(19) United States
(12) Patent Application Publication
(10) Pub. No.: US 2019/0348154 A1
(43) Pub. Date: Nov. 14, 2019

(54) STABLE PAN-GENOMES AND THEIR USE

(71) Applicant: ARES GENETICS GMBH, Vienna (AT)

(72) Inventors: Patrick FRÖSE, Munchen (DE); Andreas Emanuel POSCH, Wien (AT); Valentina GALATA, Saarbrucken (DE); Andreas KELLER, Puttlingen (DE)

(21) Appl. No.: 16/300,447

(22) PCT Filed: May 12, 2017
(86) PCT No.: PCT/EP2017/061445

§ 371 Date: Nov. 9, 2018

(30) Foreign Application Priority Data
May 13, 2016 (EP) 16169695.0

(51) Int. Cl. G16B 50/00; G16B 40/00; G16B 30/00; G16B 20/40

(52) U.S. Cl. CPC G16B 50/00; G16B 20/40; G16B 30/00; G16B 40/00

(57) ABSTRACT

The present invention relates to pan-genomes of bacterial species that are stable with regard to their core genome and the addition of new genes, their uses, as well as a data base containing these pan-genomes, a method of determining an antimicrobial drug profile using a pan-genome, a method of determining an infection of a patient and a method of selecting a treatment of a patient using a pan-genome, and a computer program product for carrying out the methods.

[0001] The present invention relates to pan-genomes of bacterial species that are stable with regard to their core genome and the addition of new genes, their uses, as well as a data base containing these pan-genomes, a method of determining an antimicrobial drug profile using a pan-genome, a method of determining an infection of a patient and a method of selecting a treatment of a patient using a pan-genome, and a computer program product for carrying out the methods.

[0002] Antibiotic resistance is a form of drug resistance whereby a sub-population of a microorganism, e.g. a strain of a bacterial species, can survive and multiply despite exposure to an antibiotic drug. It is a serious health concern for the individual patient as well as a major public health issue. Timely treatment of a bacterial infection requires the analysis of clinical isolates obtained from patients with regard to antibiotic resistance, in order to select an efficacious therapy. Generally, for this purpose an association of the identified resistance with a certain microorganism (i.e. ID) is necessary.

[0003] Antibacterial drug resistance (ADR) represents a major health burden. The presence and genesis of bacterial resistance against active agents is more rapidly gaining importance as assumed. The increased usage of available drugs leads to multi-resistant bacteria, which in turn need even harder medical treatment. According to the World Health Organization's antimicrobial resistance global report on surveillance, ADR leads to 25,000 deaths per year in Europe and 23,000 deaths per year in the US. In Europe, 2.5 million extra hospital days lead to societal cost of 1.5 billion euro. In the US, the direct cost of 2 million illnesses leads to 20 billion dollar direct cost. The overall cost is estimated to be substantially higher, reducing the gross domestic product (GDP) by up to 1.6%.

[0004] In general the mechanisms for resistance of bacteria against antimicrobial treatments rely to a very substantial part on the organism's genetics. The respective genes or molecular mechanisms are either encoded in the genome of the bacteria or on plasmids that can be interchanged between different bacteria. The most common resistance mechanisms include:

1) Efflux pumps are high-affinity reverse transport systems located in the membrane that transports the antibiotic out of the cell, e.g. resistance to tetracycline.
2) Specific enzymes modify the antibiotic in a way that it loses its activity. In the case of streptomycin, the antibiotic is chemically modified so that it will no longer bind to the ribosome to block protein synthesis.
3) An enzyme is produced that degrades the antibiotic, thereby inactivating it. For example, the penicillinases are a group of beta-lactamase enzymes that cleave the beta lactam ring of the penicillin molecule.

[0005] In addition, some pathogens show natural resistance against drugs. For example, an organism can lack a transport system for an antibiotic or the target of the antibiotic molecule is not present in the organism.

[0006] Pathogens that are in principle susceptible to drugs can become resistant by modification of existing genetic material (e.g. spontaneous mutations for antibiotic resistance, happening in a frequency of one in about 100 mio bacteria in an infection) or the acquisition of new genetic material from another source. One example is horizontal gene transfer, a process where genetic material contained in small packets of DNA can be transferred between individual bacteria of the same species or even between different species. Horizontal gene transfer may happen by transduction, transformation or conjugation. Usually, the expression of resistance imparting markers is induced only by presence of a drug.

[0007] Generally, testing for susceptibility/resistance to antimicrobial agents is performed by culturing organisms in different concentrations of these agents.

[0008] In brief, agar plates are inoculated with patient sample (e.g. urine, sputum, blood, stool) overnight. On the next day individual colonies are used for identification of organisms, either by culturing or using mass spectroscopy. Based on the identity of organisms new plates containing increasing concentration of drugs used for the treatment of these organisms are inoculated and grown for additional 12-24 hours. The lowest drug concentration which inhibits growth (minimal inhibitory concentration—MIC) is used to determine susceptibility/resistance for tested drugs. The process takes at least 2 to 3 working days during which the patient is treated empirically. Automated systems exist from several companies, e.g. Biomeriux (Vitek), Beckman Coulter (Microscan). A significant reduction of time-to-result is needed especially in patients with life-threatening disease and to overcome the widespread misuse of antibiotics.

[0009] More recent approaches focus on the genetic constitution of the pathogen and span the whole spectrum from low-plex testing for single resistance markers over small dedicated panels and target enriched sequencing to whole genome sequencing of bacteria. These approaches have demonstrated significant potential to revolutionize care of patients with infectious diseases.

[0010] Recent developments include PCR based test kits for fast bacterial identification (e.g. Biomerieux Biofire Tests, Curetis Unyvero Tests). With these test the detection of selected resistance loci is possible for a very limited number of drugs, but no correlation to culture based AST is given. Mass spectroscopy is increasingly used for identification of pathogens in clinical samples (e.g. Bruker Biotyper), and research is ongoing to establish methods for the detection of susceptibility/resistance against antibiotics.

[0011] The use of molecular techniques for direct detection of MRSA has become more commonplace especially for screening purposes. Resistance to methicillin is mediated via the mec operon which is part of the staphylococcal cassette chromosome mec (SCCmec). Recently PCR tests were introduced that are based on the detection of the right extremity sequence of the SCCmec in combination with S. aureus specific marker. Initial reports exist that describe culture based susceptibility reports despite detection of the presence of a resistance conferring gene.

[0012] It is known that drug resistance can be associated with genetic modifications such as polymorphisms or gene duplications/deletions. This holds for viruses, where resistance testing is established clinical practice (e.g. HIV genotyping). More recently, it has been shown that resistance has also genetic causes in bacteria and even higher organisms, such as humans where tumors resistance against certain cytostatic agents can be linked to genomic mutations.

[0013] Wozniak et al. (BMC Genomics 2012, 13(Suppl 7):S23) disclose genetic determinants of drug resistance in Staphylococcus aureus based on genotype and phenotype data. Stoesser et al. disclose prediction of antimicrobial susceptibilities for Escherichia coli and Klebsiella pneumoniae isolates using whole genomic sequence data (J Antimicrob Chemother 2013; 68: 2234-2244).

[0014] Chewapreecha et al (Chewapreecha et al (2014) Comprehensive Identification of single nucleotide polymorphisms associated with beta-lactam resistance within pneumococcal mosaic genes. PLoS Genet 10(8): e1004547) used a comparable approach to identify mutations in gram-positive Streptococcus Pneumonia.

[0015] However, there is still a need for easy, fast and reliable detection of infections with antimicrobial drug resistant microorganisms, particularly microbial species, and an improved prediction of response to anti-microbial therapy represents still a high unmet clinical need.

### SUMMARY OF THE INVENTION

[0016] The present inventors have found that an antibiotic resistance profile of an unknown microorganism, particularly bacterial microorganism, can be easily obtained using pangenomes that are stable with regard to their core genes as well as stable with regard to the addition of new genes when adding a further genome of an additional isolate of the microorganism, particularly bacterial microorganism. The present inventors also found further applications of the present pan-genomes, e.g. with regard to the search for a minimum bacterial genome, drug target finding, etc., which can be greatly enhanced using the present stable pan-genomes.

[0017] In a first aspect the present invention relates to a data bank comprising at least one pan-genome of one of the following bacterial species: Escherichia coli, Acinetobacter baumanii, Citrobacter koseri, Enterobacter aerogenes, Enterobacter cloacae, Klebsiella oxytoca, Klebsiella pneumoniae, Morganella morganii, Proteus mirabilis, Pseudomonas aeruginosa, Salmonella enterica, Staphylococcus aureus, Serratia marcescens, Shigella boydii, Shigella flexneri, Shigella sonnei, and Stenotrophomonas maltophilia, wherein the pan-genome of Escherichia coli comprises or consists of SEQ ID NO 1-41296 or comprises or consists of sequences that are at least 90%, preferably at least 95%, particularly preferably at least 99%, identical to SEQ ID NO 1-41296 or comprises at least 90%, preferably at least 95%, particularly preferably at least 99%, of SEQ ID NO 1-41296, the pan-genome of Acinetobacter baumanii comprises or consists of SEQ ID NO 41297-71315 or comprises or consists of sequences that are at least 90%, preferably at least 95%, particularly preferably at least 99%, identical to SEQ ID NO 41297-71315 or comprises at least 90%, preferably at least 95%, particularly preferably at least 99%, of SEQ ID NO 41297-71315, the pan-genome of Citrobacter koseri comprises or consists of SEQ ID NO 71316-86840 or comprises or consists of sequences that are at least 90%, preferably at least 95%, particularly preferably at least 99%, identical to SEQ ID NO 71316-86840 or comprises at least 90%, preferably at least 95%, particularly preferably at least 99%, of SEQ ID NO 71316-86840, the pangenome of Enterobacter aerogenes comprises or consists of SEQ ID NO 86841-113784 or comprises or consists of sequences that are at least 90%, preferably at least 95%, particularly preferably at least 99%, identical to SEQ ID NO 86841-113784 or comprises at least 90%, preferably at least 95%, particularly preferably at least 99%, of SEQ ID NO 86841-113784, the pan-genome of Enterobacter cloacae comprises or consists of SEQ ID NO 113785-171921 or comprises or consists of sequences that are at least 90%, preferably at least 95%, particularly preferably at least 99%, identical to SEQ ID NO 113785-171921 or comprises at least 90%, preferably at least 95%, particularly preferably at least 99%, of SEQ ID NO 113785-171921, the pan-genome of Klebsiella oxytoca comprises or consists of SEQ ID NO 171922-209528 or comprises or consists of sequences that are at least 90%, preferably at least 95%, particularly preferably at least 99%, identical to SEQ ID NO 171922-209528 or comprises at least 90%, preferably at least 95%, particularly preferably at least 99%, of SEQ ID NO 171922-209528, the pan-genome of Klebsiella pneumoniae comprises or consists of SEQ ID NO 209529-273591 or comprises or consists of sequences that are at least 90%, preferably at least 95%, particularly preferably at least 99%, identical to SEQ ID NO 209529-273591 or comprises at least 90%, preferably at least 95%, particularly preferably at least 99%, of SEQ ID NO 209529-273591, the pan-genome of Morganella morganii comprises or consists of SEQ ID NO 273592-293457 or comprises or consists of sequences that are at least 90%, preferably at least 95%, particularly preferably at least 99%, identical to SEQ ID NO 273592-293457 or comprises at least 90%, preferably at least 95%, particularly preferably at least 99%, of SEQ ID NO 273592-293457, the pan-genome of Proteus mirabilis comprises or consists of SEQ ID NO 293458-318000 or comprises or consists of sequences that are at least 90%, preferably at least 95%, particularly preferably at least 99%, identical to SEQ ID NO 293458-318000 or comprises at least 90%, preferably at least 95%, particularly preferably at least 99%, of SEQ ID NO 293458-318000, the pan-genome of Pseudomonas aeruginosa comprises or consists of SEQ ID NO 318001-368053 or comprises or consists of sequences that are at least 90%, preferably at least 95%, particularly preferably at least 99%, identical to SEQ ID NO 318001-368053 or comprises at least 90%, preferably at least 95%, particularly preferably at least 99%, of SEQ ID NO 318001-368053, the pan-genome of Salmonella enterica comprises or consists of SEQ ID NO 368054-404774 or comprises or consists of sequences that are at least 90%, preferably at least 95%, particularly preferably at least 99%, identical to SEQ ID NO 368054-404774 or comprises at least 90%, preferably at least 95%, particularly preferably at least 99%, of SEQ ID NO 368054-404774, the pan-genome of Staphylococcus aureus comprises or consists of SEQ ID NO 404775-421990 or comprises or consists of sequences that are at least 90%, preferably at least 95%, particularly preferably at least 99%, identical to SEQ ID NO 404775-421990 or comprises at least 90%, preferably at least 95%, particularly preferably at least 99%, of SEQ ID NO 404775-421990, the pan-genome of Serratia marcescens comprises or consists of SEQ ID NO 421991-457642 or comprises or consists of sequences that are at least 90%, preferably at least 95%, particularly preferably at least 99%, identical to SEQ ID NO 421991-457642 or comprises at least 90%, preferably at least 95%, particularly preferably at least 99%, of SEQ ID NO 421991-457642, the pan-genome of Shigella boydii comprises or consists of SEQ ID NO 457643-470165 or comprises or consists of sequences that are at least 90%, preferably at least 95%, particularly preferably at least 99%, identical to SEQ ID NO 457643-470165 or comprises at least 90%, preferably at least 95%, particularly preferably at least 99%, of SEQ ID NO 457643-470165, the pan-genome of Shigella flexneri comprises or consists of SEQ ID NO 470166-481587 or comprises or consists of sequences that are at least 90%, preferably at least 95%, particularly preferably at least 99%, identical to SEQ ID NO 470166-481587 or comprises at least 90%, preferably at least 95%, particularly preferably at least 99%, of SEQ ID NO 470166-481587, the pan-genome of Shigella sonnei comprises or consists of SEQ ID NO 481588-492644 or comprises or consists of sequences that are at least 90%, preferably at least 95%, particularly preferably at least 99%, identical to SEQ ID NO 481588-492644 or comprises at least 90%, preferably at least 95%, particularly preferably at least 99%, of SEQ ID NO 481588-492644, and the pan-genome of Stenotrophomonas maltophilia comprises or consists of SEQ ID NO 492645-537429 or comprises or consists of sequences that are at least 90%, preferably at least 95%, particularly preferably at least 99%, identical to SEQ ID NO 492645-537429 or comprises at least 90%, preferably at least 95%, particularly preferably at least 99%, of SEQ ID NO 492645-537429.

[0018] The invention further relates to the use of a data bank of the invention for the determination of bacterial resistance in a sample from a patient.

[0019] In another aspect the present invention is directed to a pangenome of one of the following bacterial species: Escherichia coli, Acinetobacter baumanii, Citrobacter koseri, Enterobacter aerogenes, Enterobacter cloacae, Klebsiella oxytoca, Klebsiella pneumoniae, Morganella morganii, Proteus mirabilis, Pseudomonas aeruginosa, Salmonella enterica, Staphylococcus aureus, Serratia marcescens, Shigella boydii, Shigella flexneri, Shigella sonnei, and Stenotrophomonas maltophilia, wherein the pan-genome of Escherichia coli comprises or consists of SEQ ID NO 1-41296 or comprises or consists of sequences that are at least 90%, preferably at least 95%, particularly preferably at least 99%, identical to SEQ ID NO 1-41296 or comprises at least 90%, preferably at least 95%, particularly preferably at least 99%, of SEQ ID NO 1-41296, the pan-genome of Acinetobacter baumanii comprises or consists of SEQ ID NO 41297-71315 or comprises or consists of sequences that are at least 90%, preferably at least 95%, particularly preferably at least 99%, identical to SEQ ID NO 41297-71315 or comprises at least 90%, preferably at least 95%, particularly preferably at least 99%, of SEQ ID NO 41297-71315, the pan-genome of Citrobacter koseri comprises or consists of SEQ ID NO 71316-86840 or comprises or consists of sequences that are at least 90%, preferably at least 95%, particularly preferably at least 99%, identical to SEQ ID NO 71316-86840 or comprises at least 90%, preferably at least 95%, particularly preferably at least 99%, of SEQ ID NO 71316-86840, the pan-genome of Enterobacter aerogenes comprises or consists of SEQ ID NO 86841-113784 or comprises or consists of sequences that are at least 90%, preferably at least 95%, particularly preferably at least 99%, identical to SEQ ID NO 86841-113784 or comprises at least 90%, preferably at least 95%, particularly preferably at least 99%, of SEQ ID NO 86841-113784, the pan-genome of Enterobacter cloacae comprises or consists of SEQ ID NO 113785-171921 or comprises or consists of sequences that are at least 90%, preferably at least 95%, particularly preferably at least 99%, identical to SEQ ID NO 113785-171921 or comprises at least 90%, preferably at least 95%, particularly preferably at least 99%, of SEQ ID NO 113785-171921, the pan-genome of Klebsiella oxytoca comprises or consists of SEQ ID NO 171922-209528 or comprises or consists of sequences that are at least 90%, preferably at least 95%, particularly preferably at least 99%, identical to SEQ ID NO 171922-209528 or comprises at least 90%, preferably at least 95%, particularly preferably at least 99%, of SEQ ID NO 171922-209528, the pan-genome of Klebsiella pneumoniae comprises or consists of SEQ ID NO 209529-273591 or comprises or consists of sequences that are at least 90%, preferably at least 95%, particularly preferably at least 99%, identical to SEQ ID NO 209529-273591 or comprises at least 90%, preferably at least 95%, particularly preferably at least 99%, of SEQ ID NO 209529-273591, the pan-genome of Morganella morganii comprises or consists of SEQ ID NO 273592-293457 or comprises or consists of sequences that are at least 90%, preferably at least 95%, particularly preferably at least 99%, identical to SEQ ID NO 273592-293457 or comprises at least 90%, preferably at least 95%, particularly preferably at least 99%, of SEQ ID NO 273592-293457, the pan-genome of Proteus mirabilis comprises or consists of SEQ ID NO 293458-318000 or comprises or consists of sequences that are at least 90%, preferably at least 95%, particularly preferably at least 99%, identical to SEQ ID NO 293458-318000 or comprises at least 90%, preferably at least 95%, particularly preferably at least 99%, of SEQ ID NO 293458-318000, the pan-genome of Pseudomonas aeruginosa comprises or consists of SEQ ID NO 318001-368053 or comprises or consists of sequences that are at least 90%, preferably at least 95%, particularly preferably at least 99%, identical to SEQ ID NO 318001-368053 or comprises at least 90%, preferably at least 95%, particularly preferably at least 99%, of SEQ ID NO 318001-368053, the pan-genome of Salmonella enterica comprises or consists of SEQ ID NO 368054-404774 or comprises or consists of sequences that are at least 90%, preferably at least 95%, particularly preferably at least 99%, identical to SEQ ID NO 368054-404774 or comprises at least 90%, preferably at least 95%, particularly preferably at least 99%, of SEQ ID NO 368054-404774, the pan-genome of Staphylococcus aureus comprises or consists of SEQ ID NO 404775-421990 or comprises or consists of sequences that are at least 90%, preferably at least 95%, particularly preferably at least 99%, identical to SEQ ID NO 404775-421990 or comprises at least 90%, preferably at least 95%, particularly preferably at least 99%, of SEQ ID NO 404775-421990, the pan-genome of Serratia marcescens comprises or consists of SEQ ID NO 421991-457642 or comprises or consists of sequences that are at least 90%, preferably at least 95%, particularly preferably at least 99%, identical to SEQ ID NO 421991-457642 or comprises at least 90%, preferably at least 95%, particularly preferably at least 99%, of SEQ ID NO 421991-457642, the pan-genome of Shigella boydii comprises or consists of SEQ ID NO 457643-470165 or comprises or consists of sequences that are at least 90%, preferably at least 95%, particularly preferably at least 99%, identical to SEQ ID NO 457643-470165 or comprises at least 90%, preferably at least 95%, particularly preferably at least 99%, of SEQ ID NO 457643-470165, the pan-genome of Shigella flexneri comprises or consists of SEQ ID NO 470166-481587 or comprises or consists of sequences that are at least 90%, preferably at least 95%, particularly preferably at least 99%, identical to SEQ ID NO 470166-481587 or comprises at least 90%, preferably at least 95%, particularly preferably at least 99%, of SEQ ID NO 470166-481587, the pan-genome of Shigella sonnei comprises or consists of SEQ ID NO 481588-492644 or comprises or consists of sequences that are at least 90%, preferably at least 95%, particularly preferably at least 99%, identical to SEQ ID NO 481588-492644 or comprises at least 90%, preferably at least 95%, particularly preferably at least 99%, of SEQ ID NO 481588-492644, and the pan-genome of Stenotrophomonas maltophilia comprises or consists of SEQ ID NO 492645-537429 or comprises or consists of sequences that are at least 90%, preferably at least 95%, particularly preferably at least 99%, identical to SEQ ID NO 492645-537429 or comprises at least 90%, preferably at least 95%, particularly preferably at least 99%, of SEQ ID NO 492645-537429.

[0020] The present invention also relates to a method of determining an antimicrobial, e.g. antibiotic, drug resistance profile for at least one clinical isolate of a microorganism and for improving a first pan-genome, comprising:

obtaining or providing a first data set of at least one nucleic acid sequence of the at least one clinical isolate of the microorganism, wherein optionally at least a part of the nucleic acid sequence of the first data set is assembled; analyzing the at least one nucleic acid sequence of the first data set for genetic variations by comparison to a first pangenome to obtain a third data set of genetic variants; providing a second data set of antimicrobial drug, e.g. antibiotic, resistance and/or susceptibility of the at least one clinical isolate of the microorganism;
correlating the third data set with the second data set and statistically analyzing the correlation;
determining the genetic variations in the at least one clinical isolate of the microorganism associated with antimicrobial drug, e.g. antibiotic, resistance; and
determining a second pan-genome using the first pan-genome as well as the genomes used for constructing it and the first data set of at least one nucleic acid sequence of the at least one clinical isolate of the microorganism.

[0021] Further disclosed is a method of determining an antimicrobial drug resistance profile for at least one clinical isolate of a microorganism and for improving a first pan-genome, comprising:

obtaining or providing a first data set of at least one nucleic acid sequence of the at least one clinical isolate of the microorganism, wherein optionally at least a part of the nucleic acid sequence of the first data set is assembled;
analyzing the at least one nucleic acid sequence of the first data set for genetic variations correlated to antimicrobial resistance and/or susceptibility by comparison to a first pan-genome, wherein the first pan-genome is obtained at least partially using a plurality of clinical isolates of the microorganism for which genetic variations are correlated to antimicrobial resistance and/or susceptibility;
determining the genetic variations in the at least one clinical isolate of the microorganism associated with antimicrobial drug resistance; and
determining a second pan-genome using the first pan-genome as well as the genomes used for constructing it and the first data set of at least one nucleic acid sequence of the at least one clinical isolate of the microorganism.

[0022] A further aspect of the present invention relates to a method of determining an antimicrobial drug resistance profile for at least one clinical isolate of a microorganism and for improving a first pan-genome, comprising:

obtaining or providing a first data set of at least one nucleic acid sequence of the at least one clinical isolate of the microorganism, wherein optionally at least a part of the nucleic acid sequence of the first data set is assembled;
analyzing the at least one nucleic acid sequence of the first data set for genetic variations correlated to antimicrobial resistance and/or susceptibility by comparison to a first pan-genome, wherein the first pan-genome is obtained at least partially using a plurality of clinical isolates of the microorganism for which genetic variations are correlated to antimicrobial resistance and/or susceptibility; and
determining the genetic variations in the at least one clinical isolate of the microorganism associated with antimicrobial drug resistance.

[0023] Also disclosed is a method of determining an antimicrobial drug resistance profile for at least one clinical isolate of a microorganism and for improving a first pan-genome, comprising:

obtaining or providing a first data set of at least one nucleic acid sequence of the at least one clinical isolate of the microorganism, wherein optionally at least a part of the nucleic acid sequence of the first data set is assembled;
analyzing the at least one nucleic acid sequence of the first data set for genetic variations not correlated to antimicrobial resistance and/or susceptibility by comparison to a first pan-genome to obtain a third data set of genetic variants, and analyzing the at least one nucleic acid sequence of the first data set for genetic variations correlated to antimicrobial resistance and/or susceptibility by comparison to the first pan-genome, wherein the first pan-genome is obtained at least partially using a plurality of clinical isolates of the microorganism for which genetic variations are correlated to antimicrobial resistance and/or susceptibility;
providing a second data set of antimicrobial drug resistance and/or susceptibility of the at least one clinical isolate of the microorganism;
correlating the third data set with the second data set and statistically analyzing the correlation;
determining the genetic variations in the at least one clinical isolate of the microorganism associated with antimicrobial drug resistance; and
determining a second pan-genome using the first pan-genome as well as the genomes used for constructing it and the first data set of at least one nucleic acid sequence of the at least one clinical isolate of the microorganism.

[0024] A further aspect of the present invention is directed to a method of determining an antimicrobial drug resistance profile for at least one clinical isolate of a microorganism and for improving a first pan-genome, comprising:

obtaining or providing a first data set of at least one nucleic acid sequence of the at least one clinical isolate of the microorganism, wherein optionally at least a part of the nucleic acid sequence of the first data set is assembled;
analyzing the at least one nucleic acid sequence of the first data set for genetic variations not correlated to antimicrobial resistance and/or susceptibility by comparison to a first pan-genome to obtain a third data set of genetic variants, and analyzing the at least one nucleic acid sequence of the first data set for genetic variations correlated to antimicrobial resistance and/or susceptibility by comparison to the first pan-genome, wherein the first pan-genome is obtained at least partially using a plurality of clinical isolates of the microorganism for which genetic variations are correlated to antimicrobial resistance and/or susceptibility; providing a second data set of antimicrobial drug resistance and/or susceptibility of the at least one clinical isolate of the microorganism;
correlating the third data set with the second data set and statistically analyzing the correlation; and
determining the genetic variations in the at least one clinical isolate of the microorganism associated with antimicrobial drug resistance.

[0025] In addition, a pan-genome is disclosed, wherein the pangenome is for Escherichia coli and is obtained using at least 150 clinical isolates, preferably at least 250 clinical isolates; or wherein the pan-genome is for Acinetobacter baumanii and is obtained using at least 150 clinical isolates, preferably at least 180 clinical isolates; or wherein the pan-genome is for Citrobacter koseri and is obtained using at least 35 clinical isolates, preferably at least 55 clinical isolates; or wherein the pan-genome is for Enterobacter aerogenes and is obtained using at least 120 clinical isolates, preferably at least 160 clinical isolates; or wherein the pan-genome is for Enterobacter cloacae and is obtained using at least 100 clinical isolates, preferably at least 150 clinical isolates; or wherein the pan-genome is for Klebsiella oxytoca and is obtained using at least 90 clinical isolates, preferably at least 120 clinical isolates; or wherein the pan-genome is for Klebsiella pneumoniae and is obtained using at least 160 clinical isolates, preferably at least 250 clinical isolates; or wherein the pan-genome is for Morganella morganii and is obtained using at least 70 clinical isolates, preferably at least 120 clinical isolates; or wherein the pan-genome is for Proteus mirabilis and is obtained using at least 120 clinical isolates, preferably at least 140 clinical isolates; or wherein the pan-genome is for Pseudomonas aeruginosa and is obtained using at least 100 clinical isolates, preferably at least 140 clinical isolates; or wherein the pan-genome is for Salmonella enterica and is obtained using at least 130 clinical isolates, preferably at least 190 clinical isolates; or wherein the pan-genome is for Staphylococcus aureus and is obtained using at least 180 clinical isolates, preferably at least 260 clinical isolates; or wherein the pan-genome is for Serratia marcescens and is obtained using at least 230 clinical isolates, preferably at least 330 clinical isolates; or wherein the pan-genome is for Shigella boydii and is obtained using at least 60 clinical isolates, preferably at least 75 clinical isolates; or wherein the pangenome is for Shigella flexneri and is obtained using at least 50 clinical isolates, preferably at least 80 clinical isolates; or wherein the pan-genome is for Shigella sonnei and is obtained using at least 60 clinical isolates, preferably at least 80 clinical isolates; or wherein the pan-genome is for Stenotrophomonas maltophilia and is obtained using at least 125 clinical isolates, preferably at least 240 clinical isolates.

[0026] Disclosed is further the use of a pan-genome of the invention for the determination of bacterial resistance in a sample from a patient.

[0027] The invention also relates to a method of determining an infection of a patient with a microorganism, comprising the steps of:

a) obtaining or providing a sample containing or suspected of containing a microorganism from the patient;
b) determining the presence of at least one genetic variation in at least one genetic sequence of the microorganism, as determined by the present methods of determining an antimicrobial, e.g. antibiotic, drug resistance profile, wherein the presence of said at least one genetic variation is indicative of an infection with an antimicrobial drug resistant microorganism in said patient.

[0028] Additionally disclosed is a method of selecting a treatment of a patient suffering from an infection with a potentially resistant microorganism, comprising the steps of:

a) obtaining or providing a sample containing or suspected of containing a microorganism from the patient;
b) determining the presence of at least one genetic variation in at least one genetic sequence of the microorganism, as determined by the present methods of determining an antimicrobial, e.g. antibiotic, drug resistance profile, wherein the presence of said at least one genetic variation is indicative of an infection with an antimicrobial drug resistant microorganism in said patient;
c) identifying said at least one or more antimicrobial drugs; and
d) selecting one or more antimicrobial drugs different from the ones identified in step c) and being suitable for the treatment of the infection with the microorganism.

[0029] Moreover, the present invention is directed to a computer program product comprising computer executable instructions which, when executed, perform a method of the present invention.

[0030] Even further aspects and embodiments of the invention are disclosed in the dependent claims and can be taken from the following description and examples, without being limited thereto.

### DETAILED DESCRIPTION OF THE INVENTION

### Definitions

[0031] Unless defined otherwise, technical and scientific terms used herein have the same meaning as commonly understood by one of ordinary skill in the art to which this invention belongs.

[0032] Susceptibility herein means that isolates are inhibited by a certain concentration of an antimicrobial agent, whereas resistance means that isolates are not inhibited

[0033] An “antimicrobial drug” in the present invention refers to a group of drugs that includes antibiotics, antifungals, antiprotozoals, and antivirals. According to certain embodiments, the antimicrobial drug is an antibiotic.

[0034] The term “nucleic acid molecule” refers to a macromolecule comprising nucleotides, particularly a polynucleotide molecule having a defined sequence. It comprises DNA molecules, RNA molecules, nucleotide analog molecules and combinations and derivatives thereof, such as DNA molecules or RNA molecules with incorporated nucleotide analogs or cDNA.

[0035] The term “nucleic acid sequence information” relates to information which can be derived from the sequence of a nucleic acid molecule, i.e. the nucleic acid sequence, such as the sequence itself or a variation in the sequence as compared to a pan-genome. A genetic sequence can thereby encompass coding as well as non-coding parts. The whole genetic material of a microorganism thereby makes up the genome.

[0036] The term “genetic variation”, which also can be termed “mutation”, relates in certain embodiments to a variation in the sequence as compared to a pan-genome as reference sequence, particularly for which it is essentially known or assured, e.g. known, that the sequence does essentially not or not contain genetic variations, e.g. by comprising isolates obtained from samples with no antimicrobial, e.g. antibiotic, resistance, and/or which is not correlated to antimicrobial resistance and/or susceptibility, e.g. as in the fourth and sixth aspect of the present invention. Such a reference sequence can be e.g. determined from a multitude of predominant wild type organisms or other reference organisms, e.g. a defined and known bacterial strain or substrain, and pangenomes obtained therefrom. A mutation is for example a deletion of one or multiple nucleotides, an insertion of one or multiple nucleotides, or substitution of one or multiple nucleotides, duplication of one or a sequence of multiple nucleotides, translocation of one or a sequence of multiple nucleotides, e.g. also a single nucleotide poly-morphism (SNP). The term “single nucleotide polymorphism” (SNP) is thereby synonymous to the term “single nucleotide variant” (SNV), and both refer to the same. According to certain embodiments, the term “genetic variation” encompasses SNPs as well as structural variations.

[0037] In certain embodiments, a genetic variation relates to a variation in the sequence as compared to a pan-genome as reference sequence, wherein the reference sequence contains known genetic variations which are correlated to antimicrobial, e.g. antibiotic, resistance and/or susceptibility, e.g. as in the fifth aspect. This means that the pan-genome is obtained using isolates for which it is known that they correlate with antimicrobial, e.g. antibiotic, resistance and/or susceptibility.

[0038] In the present invention a pan-genome can thus be one wherein the sequences are not correlated to antimicrobial resistance and/or susceptibility, one wherein the sequences are correlated to antimicrobial resistance and/or susceptibility, or one that comprises both sequences that are correlated to antimicrobial resistance and/or susceptibility and sequences that are not correlated to antimicrobial resistance and/or susceptibility.

[0039] In the context of the present invention a “sample” is a sample which comprises at least one nucleic acid molecule, particularly from a bacterial microorganism. Examples for samples are: cells, tissue, biopsy specimens, body fluids such as blood, urine, saliva, sputum, plasma, serum, cell culture supernatant, swab sample and others. According to certain embodiments, the sample is a patient sample (clinical isolate).

[0040] New and highly efficient methods of sequencing nucleic acids referred to as next generation sequencing have opened the possibility of large scale genomic analysis. The term “next generation sequencing” or “high throughput sequencing” refers to methods achieving a higher throughput in sequencing, e.g. high-throughput sequencing technologies that parallelize the sequencing process, producing thousands or millions of sequences at once, or methods producing longer reads and are read out faster. Examples include Massively Parallel Signature Sequencing (MPSS), Polony sequencing, 454 pyrosequencing, Illumina (Solexa) sequencing, SOLiD sequencing, Ion semiconductor sequencing, DNA nanoball sequencing, Helioscope™ single molecule sequencing, Single Molecule SMRT™ sequencing, Single Molecule real time (RNAP) sequencing, Nanopore DNA sequencing, Sequencing By Hybridization, Amplicon Sequencing, GnuBio.

[0041] Within the present description the term “microorganism” comprises the term microbe. The type of microorganism is not particularly restricted, unless noted otherwise or obvious, and, for example, comprises bacteria, viruses, fungi, microscopic algae und protozoa, as well as combinations thereof. According to certain embodiments, it refers to one or more bacterial species, being either Gram-negative or Grampositive, e.g. one or more of Acinetobacter, e.g. Acinetobacter baumannii, Citrobacter, e.g. Citrobacter koseri, Escherichia, e.g. E. coli, Enterobacter, e.g. Enterobacter aerogenes and/or Enterobacter cloacae, Klebsiella, e.g. Klebsiella oxytoca and/or Klebsiella pneumoniae, Morganella, e.g. Morganella morganii, Proteus, e.g. Proteus mirabilis, Pseudomonas, e.g. Pseudomonas aeruginosa, Salmonella, e.g. Salmonella enterica, Serratia, e.g. Serratia marcescens, Shigella, e.g. Shigella boydii, Shigella flexneri and/or Shigella sonnei, Stenotrophomonas, e.g. Stenotrophomonas maltophilia, and/or Staphylococcus species, e.g. Staphylococcus aureus.

[0042] A reference to a microorganism or microorganisms in the present description comprises a reference to one microorganism as well a plurality of microorganisms, e.g. two, three, four, five, six, seven, eight, nine, ten, eleven, twelve, thirteen, fourteen, fifteen, sixteen, seventeen, or more microorganisms.

[0043] A vertebrate within the present invention refers to animals having a vertebrae, which includes mammals—including humans, birds, reptiles, amphibians and fishes. The present invention thus is not only suitable for human medicine, but also for veterinary medicine.

[0044] According to certain embodiments, the patient in the present methods is a vertebrate, more preferably a mammal and most preferred a human patient.

[0045] Before the invention is described in exemplary detail, it is to be understood that this invention is not limited to the particular component parts of the process steps of the methods described herein as such methods may vary. It is also to be understood that the terminology used herein is for purposes of describing particular embodiments only, and is not intended to be limiting. It must be noted that, as used in the specification and the appended claims, the singular forms “a,” “an” and “the” include singular and/or plural referents unless the context clearly dictates otherwise. For example, the term “a” as used herein can be understood as one single entity or in the meaning of “one or more” entities. It is also to be understood that plural forms include singular and/or plural referents unless the context clearly dictates otherwise. It is moreover to be understood that, in case parameter ranges are given which are delimited by numeric values, the ranges are deemed to include these limitation values.

[0046] Regarding the dosage of the antimicrobial, e.g. antibiotic, drugs, it is referred to the established principles of pharmacology in human and veterinary medicine. For example, Forth, Henschler, Rummel “Allgemeine und spezielle Pharmakologie und Toxikologie”, 9th edition, 2005, pp. 781-919 might be used as a guideline. Regarding the formulation of a ready-to-use medicament, reference is made to “Remington, The Science and Practice of Pharmacy”, 22nd edition, 2013, pp. 777-1070.

[0047] Assembling of a nucleic acid, e.g. gene, sequence can be carried out by any known method and is not particularly limited.

[0048] According to certain embodiments, mutations, respectively genetic variations, that were found using alignments can also be compared or matched with alignment-free methods, e.g. for detecting single base exchanges, for example based on contigs that were found by assemblies. For example, reads obtained from sequencing can be assembled to contigs and the contigs can be compared to each other.

[0049] In the description, the term “structural variations” is used equivalently to the term “structural changes”, and both refer to the same phenomenon within the scope of this invention.

[0050] A structural variation comprising a change in the nucleic acid sequence comprising more than one base refers to a structural variation wherein at least two bases, preferably at least four bases, in a nucleic acid sequence of a microorganism that are adjacent are changed, and can refer to e.g. a deletion of multiple (2, e.g. 4, or more) nucleotides, an insertion of multiple (2, e.g. 4, or more) nucleotides, a substitution of multiple (2, e.g. 4, or more) nucleotides, a duplication of a sequence of multiple (2, e.g. 4, or more) nucleotides, or a translocation of a sequence of multiple (2, e.g. 4, or more) nucleotides. According to certain embodiments, a structural variation affects a sequence length of at least about 50 bases, preferably at least about 100 bases, further preferably at least about 1 Kb (=1000 bases). According to certain embodiments, a structural variation affects a sequence length of at most 300 Mb (Mega base=1000000 bases), e.g. of at most 30 Mb, e.g. of at most 3 Mb. In case the term “structural variation refers to a change in the nucleic acid sequence of 4 or more bases, e.g. at least about 50 bases, preferably at least about 100 bases, further preferably at least about 1 Kb, the term single nucleotide polymorphism can be understood to include also small indels (insertions or deletions) of up to at most 3 bases, e.g. up to two bases. According to certain embodiments, a structural variation can comprise bigger parts sections of the nucleic acid sequence, e.g. at least one whole gene in the nucleic acid sequence of the microorganism, or even more genes in an open reading frame. According to certain embodiments, structural variations refer to inclusion of repetitive elements, copy number variations (gains and losses of single genes or larger parts of chromosomes), gene fusions, translocations and other more rare events. According to certain embodiments, at least one inclusion of repetitive elements, one copy number variation (gains and losses of single genes or larger parts of chromosomes), one gene fusion, and/or translocation of single genes or larger parts of chromosomes is observed in the present methods as a structural variation. Structural variations can e.g. include inclusion of repetitive elements, copy number variations (gains and losses of single genes or larger parts of chromosomes), gene fusions, translocations, inclusion/addition of new genes, and other more rare events.

[0051] A single nucleotide polymorphism (SNP) refers within the scope of the invention to a variation in a single nucleotide within a nucleic acid sequence, which can result from e.g. an addition, deletion, substitution, insertion or translocation of a single nucleotide.

[0052] In the present invention, a reference sequence is not particularly limited, as long as it is useful as a reference for one or more unknown nucleic acid sequences in one or more samples. It is represented by one or more pan-genomes, i.e. alignment is carried out using a pan-genome. A pan-genome, also referred to as supra-genome, can describe the full complement of genes in a clade, e.g. a certain species in bacteria, which can vary among related strains. According to certain embodiments, the reference sequences comprise one or more centroids, wherein a centroid is a representative of a gene group/family/cluster of a genome, e.g. of a microorganism. Centroids can be for example extracted from the database MetaRef (http://metaref.org/). After the extraction the data from the MetaRef database can be updated continually for further experiments. A list of centroids can be extracted for each organism separately or as a whole. The centroid information, e.g. for annotation, can be extracted from databases like IMG (http://img.jgi.doe.gov/) or NCBI.

[0053] In a first aspect, the present invention relates to a data bank comprising at least one pan-genome of one of the following bacterial species: Escherichia coli, Acinetobacter baumanii, Citrobacter koseri, Enterobacter aerogenes, Enterobacter cloacae, Klebsiella oxytoca, Klebsiella pneumoniae, Morganella morganii, Proteus mirabilis, Pseudomonas aeruginosa, Salmonella enterica, Staphylococcus aureus, Serratia marcescens, Shigella boydii, Shigella flexneri, Shigella sonnei, and Stenotrophomonas maltophilia,

wherein the pan-genome of Escherichia coli comprises or consists of SEQ ID NO 1-41296 or comprises or consists of sequences that are at least 90% identical to SEQ ID NO 1-41296 or comprises at least 90% of SEQ ID NO 1-41296, the pan-genome of Acinetobacter baumanii comprises or consists of SEQ ID NO 41297-71315 or comprises or consists of sequences that are at least 90% identical to SEQ ID NO 41297-71315 or comprises at least 90% of SEQ ID NO 41297-71315, the pangenome of Citrobacter koseri comprises or consists of SEQ ID NO 71316-86840 or comprises or consists of sequences that are at least 90% identical to SEQ ID NO 71316-86840 or comprises at least 90% of SEQ ID NO 71316-86840, the pangenome of Enterobacter aerogenes comprises or consists of SEQ ID NO 86841-113784 or comprises or consists of sequences that are at least 90% identical to SEQ ID NO 86841-113784 or comprises at least 90% of SEQ ID NO 86841-113784, the pan-genome of Enterobacter cloacae comprises or consists of SEQ ID NO 113785-171921 or comprises or consists of sequences that are at least 90% identical to SEQ ID NO 113785-171921 or comprises at least 90% of SEQ ID NO 113785-171921, the pan-genome of Klebsiella oxytoca comprises or consists of SEQ ID NO 171922-209528 or comprises or consists of sequences that are at least 90% identical to SEQ ID NO 171922-209528 or comprises at least 90% of SEQ ID NO 171922-209528, the pan-genome of Klebsiella pneumoniae comprises or consists of SEQ ID NO 209529-273591 or comprises or consists of sequences that are at least 90% identical to SEQ ID NO 209529-273591 or comprises at least 90% of SEQ ID NO 209529-273591, the pan-genome of Morganella morganii comprises or consists of SEQ ID NO 273592-293457 or comprises or consists of sequences that are at least 90% identical to SEQ ID NO 273592-293457 or comprises at least 90% of SEQ ID NO 273592-293457, the pan-genome of Proteus mirabilis comprises or consists of SEQ ID NO 293458-318000 or comprises or consists of sequences that are at least 90% identical to SEQ ID NO 293458-318000 or comprises at least 90% of SEQ ID NO 293458-318000, the pan-genome of Pseudomonas aeruginosa comprises or consists of SEQ ID NO 318001-368053 or comprises or consists of sequences that are at least 90% identical to SEQ ID NO 318001-368053 or comprises at least 90% of SEQ ID NO 318001-368053, the pan-genome of Salmonella enterica comprises or consists of SEQ ID NO 368054-404774 or comprises or consists of sequences that are at least 90% identical to SEQ ID NO 368054-404774 or comprises at least 90% of SEQ ID NO 368054-404774, the pan-genome of Staphylococcus aureus comprises or consists of SEQ ID NO 404775-421990 or comprises or consists of sequences that are at least 90% identical to SEQ ID NO 404775-421990 or comprises at least 90% of SEQ ID NO 404775-421990, the pangenome of Serratia marcescens comprises or consists of SEQ ID NO 421991-457642 or comprises or consists of sequences that are at least 90% identical to SEQ ID NO 421991-457642 or comprises at least 90% of SEQ ID NO 421991-457642, the pangenome of Shigella boydii comprises or consists of SEQ ID NO 457643-470165 or comprises or consists of sequences that are at least 90% identical to SEQ ID NO 457643-470165 or comprises at least 90% of SEQ ID NO 457643-470165, the pangenome of Shigella flexneri comprises or consists of SEQ ID NO 470166-481587 or comprises or consists of sequences that are at least 90% identical to SEQ ID NO 470166-481587 or comprises at least 90% of SEQ ID NO 470166-481587, the pangenome of Shigella sonnei comprises or consists of SEQ ID NO 481588-492644 or comprises or consists of sequences that are at least 90% identical to SEQ ID NO 481588-492644 or comprises at least 90% of SEQ ID NO 481588-492644, and the pan-genome of Stenotrophomonas maltophilia comprises or consists of SEQ ID NO 492645-537429 or comprises or consists of sequences that are at least 90% identical to SEQ ID NO 492645-537429 or comprises at least 90% of SEQ ID NO 492645-537429.

[0054] According to certain embodiments, the data bank comprises at least one pan-genome of one of the following bacterial species: Escherichia coli, Acinetobacter baumanii, Citrobacter koseri, Enterobacter aerogenes, Enterobacter cloacae, Klebsiella oxytoca, Klebsiella pneumoniae, Morganella morganii, Proteus mirabilis, Pseudomonas aeruginosa, Salmonella enterica, Staphylococcus aureus, Serratia marcescens, Shigella boydii, Shigella flexneri, Shigella sonnei, and Stenotrophomonas maltophilia,

wherein the pan-genome of Escherichia coli comprises or consists of SEQ ID NO 1-41296 or comprises or consists of sequences that are at least 95% identical to SEQ ID NO 1-41296 or comprises at least 95% of SEQ ID NO 1-41296, the pan-genome of Acinetobacter baumanii comprises or consists of SEQ ID NO 41297-71315 or comprises or consists of sequences that are at least 95% identical to SEQ ID NO 41297-71315 or comprises at least 95% of SEQ ID NO 41297-71315, the pangenome of Citrobacter koseri comprises or consists of SEQ ID NO 71316-86840 or comprises or consists of sequences that are at least 95% identical to SEQ ID NO 71316-86840 or comprises at least 95% of SEQ ID NO 71316-86840, the pangenome of Enterobacter aerogenes comprises or consists of SEQ ID NO 86841-113784 or comprises or consists of sequences that are at least 95% identical to SEQ ID NO 86841-113784 or comprises at least 95% of SEQ ID NO 86841-113784, the pan-genome of Enterobacter cloacae comprises or consists of SEQ ID NO 113785-171921 or comprises or consists of sequences that are at least 95% identical to SEQ ID NO 113785-171921 or comprises at least 95% of SEQ ID NO 113785-171921, the pan-genome of Klebsiella oxytoca comprises or consists of SEQ ID NO 171922-209528 or comprises or consists of sequences that are at least 95% identical to SEQ ID NO 171922-209528 or comprises at least 95% of SEQ ID NO 171922-209528, the pan-genome of Klebsiella pneumoniae comprises or consists of SEQ ID NO 209529-273591 or comprises or consists of sequences that are at least 95% identical to SEQ ID NO 209529-273591 or comprises at least 95% of SEQ ID NO 209529-273591, the pan-genome of Morganella morganii comprises or consists of SEQ ID NO 273592-293457 or comprises or consists of sequences that are at least 95% identical to SEQ ID NO 273592-293457 or comprises at least 95% of SEQ ID NO 273592-293457, the pan-genome of Proteus mirabilis comprises or consists of SEQ ID NO 293458-318000 or comprises or consists of sequences that are at least 95% identical to SEQ ID NO 293458-318000 or comprises at least 95% of SEQ ID NO 293458-318000, the pan-genome of Pseudomonas aeruginosa comprises or consists of SEQ ID NO 318001-368053 or comprises or consists of sequences that are at least 95% identical to SEQ ID NO 318001-368053 or comprises at least 95% of SEQ ID NO 318001-368053, the pan-genome of Salmonella enterica comprises or consists of SEQ ID NO 368054-404774 or comprises or consists of sequences that are at least 95% identical to SEQ ID NO 368054-404774 or comprises at least 95% of SEQ ID NO 368054-404774, the pan-genome of Staphylococcus aureus comprises or consists of SEQ ID NO 404775-421990 or comprises or consists of sequences that are at least 95% identical to SEQ ID NO 404775-421990 or comprises at least 95% of SEQ ID NO 404775-421990, the pangenome of Serratia marcescens comprises or consists of SEQ ID NO 421991-457642 or comprises or consists of sequences that are at least 95% identical to SEQ ID NO 421991-457642 or comprises at least 95% of SEQ ID NO 421991-457642, the pangenome of Shigella boydii comprises or consists of SEQ ID NO 457643-470165 or comprises or consists of sequences that are at least 95% identical to SEQ ID NO 457643-470165 or comprises at least 95% of SEQ ID NO 457643-470165, the pangenome of Shigella flexneri comprises or consists of SEQ ID NO 470166-481587 or comprises or consists of sequences that are at least 95% identical to SEQ ID NO 470166-481587 or comprises at least 95% of SEQ ID NO 470166-481587, the pangenome of Shigella sonnei comprises or consists of SEQ ID NO 481588-492644 or comprises or consists of sequences that are at least 95% identical to SEQ ID NO 481588-492644 or comprises at least 95% of SEQ ID NO 481588-492644, and the pan-genome of Stenotrophomonas maltophilia comprises or consists of SEQ ID NO 492645-537429 or comprises or consists of sequences that are at least 95% identical to SEQ ID NO 492645-537429 or comprises at least 95% of SEQ ID NO 492645-537429.

[0055] According to certain embodiments, the data bank comprises at least one pan-genome of one of the following bacterial species: Escherichia coli, Acinetobacter baumanii, Citrobacter koseri, Enterobacter aerogenes, Enterobacter cloacae, Klebsiella oxytoca, Klebsiella pneumoniae, Morganella morganii, Proteus mirabilis, Pseudomonas aeruginosa, Salmonella enterica, Staphylococcus aureus, Serratia marcescens, Shigella boydii, Shigella flexneri, Shigella sonnei, and Stenotrophomonas maltophilia,

wherein the pan-genome of Escherichia coli comprises or consists of SEQ ID NO 1-41296 or comprises or consists of sequences that are at least 99% identical to SEQ ID NO 1-41296 or comprises at least 99% of SEQ ID NO 1-41296, the pan-genome of Acinetobacter baumanii comprises or consists of SEQ ID NO 41297-71315 or comprises or consists of sequences that are at least 99% identical to SEQ ID NO 41297-71315 or comprises at least 99% of SEQ ID NO 41297-71315, the pangenome of Citrobacter koseri comprises or consists of SEQ ID NO 71316-86840 or comprises or consists of sequences that are at least 99% identical to SEQ ID NO 71316-86840 or comprises at least 99% of SEQ ID NO 71316-86840, the pangenome of Enterobacter aerogenes comprises or consists of SEQ ID NO 86841-113784 or comprises or consists of sequences that are at least 99% identical to SEQ ID NO 86841-113784 or comprises at least 99% of SEQ ID NO 86841-113784, the pan-genome of Enterobacter cloacae comprises or consists of SEQ ID NO 113785-171921 or comprises or consists of sequences that are at least 99% identical to SEQ ID NO 113785-171921 or comprises at least 99% of SEQ ID NO 113785-171921, the pan-genome of Klebsiella oxytoca comprises or consists of SEQ ID NO 171922-209528 or comprises or consists of sequences that are at least 99% identical to SEQ ID NO 171922-209528 or comprises at least 99% of SEQ ID NO 171922-209528, the pan-genome of Klebsiella pneumoniae comprises or consists of SEQ ID NO 209529-273591 or comprises or consists of sequences that are at least 99% identical to SEQ ID NO 209529-273591 or comprises at least 99% of SEQ ID NO 209529-273591, the pan-genome of Morganella morganii comprises or consists of SEQ ID NO 273592-293457 or comprises or consists of sequences that are at least 99% identical to SEQ ID NO 273592-293457 or comprises at least 99% of SEQ ID NO 273592-293457, the pan-genome of Proteus mirabilis comprises or consists of SEQ ID NO 293458-318000 or comprises or consists of sequences that are at least 99% identical to SEQ ID NO 293458-318000 or comprises at least 99% of SEQ ID NO 293458-318000, the pan-genome of Pseudomonas aeruginosa comprises or consists of SEQ ID NO 318001-368053 or comprises or consists of sequences that are at least 99% identical to SEQ ID NO 318001-368053 or comprises at least 99% of SEQ ID NO 318001-368053, the pan-genome of Salmonella enterica comprises or consists of SEQ ID NO 368054-404774 or comprises or consists of sequences that are at least 99% identical to SEQ ID NO 368054-404774 or comprises at least 99% of SEQ ID NO 368054-404774, the pan-genome of Staphylococcus aureus comprises or consists of SEQ ID NO 404775-421990 or comprises or consists of sequences that are at least 99% identical to SEQ ID NO 404775-421990 or comprises at least 99% of SEQ ID NO 404775-421990, the pangenome of Serratia marcescens comprises or consists of SEQ ID NO 421991-457642 or comprises or consists of sequences that are at least 99% identical to SEQ ID NO 421991-457642 or comprises at least 99% of SEQ ID NO 421991-457642, the pangenome of Shigella boydii comprises or consists of SEQ ID NO 457643-470165 or comprises or consists of sequences that are at least 99% identical to SEQ ID NO 457643-470165 or comprises at least 99% of SEQ ID NO 457643-470165, the pangenome of Shigella flexneri comprises or consists of SEQ ID NO 470166-481587 or comprises or consists of sequences that are at least 99% identical to SEQ ID NO 470166-481587 or comprises at least 99% of SEQ ID NO 470166-481587, the pangenome of Shigella sonnei comprises or consists of SEQ ID NO 481588-492644 or comprises or consists of sequences that are at least 99% identical to SEQ ID NO 481588-492644 or comprises at least 99% of SEQ ID NO 481588-492644, and the pan-genome of Stenotrophomonas maltophilia comprises or consists of SEQ ID NO 492645-537429 or comprises or consists of sequences that are at least 99% identical to SEQ ID NO 492645-537429 or comprises at least 99% of SEQ ID NO 492645-537429.

[0056] According to certain embodiments, the data bank comprises at least one pan-genome of one of the following bacterial species: Escherichia coli, Acinetobacter baumanii, Citrobacter koseri, Enterobacter aerogenes, Enterobacter cloacae, Klebsiella oxytoca, Klebsiella pneumoniae, Morganella morganii, Proteus mirabilis, Pseudomonas aeruginosa, Salmonella enterica, Staphylococcus aureus, Serratia marcescens, Shigella boydii, Shigella flexneri, Shigella sonnei, and Stenotrophomonas maltophilia,

wherein the pan-genome of Escherichia coli comprises or consists of SEQ ID NO 1-41296, the pan-genome of Acinetobacter baumanii comprises or consists of SEQ ID NO 41297-71315, the pan-genome of Citrobacter koseri comprises or consists of SEQ ID NO 71316-86840, the pan-genome of Enterobacter aerogenes comprises or consists of SEQ ID NO 86841-113784, the pan-genome of Enterobacter cloacae comprises or consists of SEQ ID NO 113785-171921, the pan-genome of Klebsiella oxytoca comprises or consists of SEQ ID NO 171922-209528, the pan-genome of Klebsiella pneumoniae comprises or consists of SEQ ID NO 209529-273591, the pan-genome of Morganella morganii comprises or consists of SEQ ID NO 273592-293457, the pan-genome of Proteus mirabilis comprises or consists of SEQ ID NO 293458-318000, the pan-genome of Pseudomonas aeruginosa comprises or consists of SEQ ID NO 318001-368053, the pan-genome of Salmonella enterica comprises or consists of SEQ ID NO 368054-404774, the pan-genome of Staphylococcus aureus comprises or consists of SEQ ID NO 404775-421990, the pan-genome of Serratia marcescens comprises or consists of SEQ ID NO 421991-457642, the pan-genome of Shigella boydii comprises or consists of SEQ ID NO 457643-470165, the pan-genome of Shigella flexneri comprises or consists of SEQ ID NO 470166-481587, the pan-genome of Shigella sonnei comprises or consists of SEQ ID NO 481588-492644, and the pan-genome of Stenotrophomonas maltophilia comprises or consists of SEQ ID NO 492645-537429.

[0057] According to certain embodiments, the data bank comprises 2, 3, 4, 5, 6, 7, 8, 9, 10, 11, 12, 13, 14, 15, 16, or 17 of the pan-genomes.

[0058] The pan-genomes comprising the above SEQ ID NOs (sequence accession identifier numbers) have been found to be stable with regard to their core genome and with regard to the addition of new genes.

[0059] In order to show the “convergence” of the pan-genomes, they were iteratively plotted with the addition of each new genome of a new sample to the existing pan-genome, and analyzed in each turn for the addition of “new” genes as well as for a stability of the “core” genes (or conserved genes), i.e. genes present in 90% of all samples. The number of “new” genes decreases significantly with an increasing number of genomes and approached a value near 0 fast, whereas the size of the “core” genome (gene present in 90% of samples) only stabilized after a certain number of genomes was added. In the plot of the core genome, initially regular fluctuations were observed due to the continued addition of new genes as well as the loss of other genes in the core genome, which were dampened until the regular fluctuations ceased to exist, at which point a stability of the core genome is assumed to exist. The stability of the core genome was reached for different bacterial species with different numbers of added genomes. For the pan-genomes, first a stop of the regularity of the fluctuations was observed, and then at a second number of genomes of clinical isolates used for obtaining the pangenome fluctuations essentially were minimized so that a stable core genome was observed. The respective numbers observed for the different bacterial species were as follows:

Escherichia coli: at least 150 clinical isolates, preferably at least 250 clinical isolates;
Acinetobacter baumanii: at least 150 clinical isolates, preferably at least 180 clinical isolates;
Citrobacter koseri: at least 35 clinical isolates, preferably at least 55 clinical isolates;
Enterobacter aerogenes: at least 120 clinical isolates, preferably at least 160 clinical isolates;
Enterobacter cloacae: at least 100 clinical isolates, preferably at least 150 clinical isolates;
Klebsiella oxytoca: at least 90 clinical isolates, preferably at least 120 clinical isolates;
Klebsiella pneumoniae: at least 160 clinical isolates, preferably at least 250 clinical isolates;
Morganella morganii: at least 70 clinical isolates, preferably at least 120 clinical isolates;
Proteus mirabilis: at least 120 clinical isolates, preferably at least 140 clinical isolates;
Pseudomonas aeruginosa: at least 100 clinical isolates, preferably at least 140 clinical isolates;
Salmonella enterica: at least 130 clinical isolates, preferably at least 190 clinical isolates;
Staphylococcus aureus: at least 180 clinical isolates, preferably at least 260 clinical isolates;
Serratia marcescens: at least 230 clinical isolates, preferably at least 330 clinical isolates;
Shigella boydii: at least 60 clinical isolates, preferably at least 75 clinical isolates;
Shigella flexneri: at least 50 clinical isolates, preferably at least 80 clinical isolates;
Shigella sonnei: at least 60 clinical isolates, preferably at least 80 clinical isolates;
Stenotrophomonas maltophilia: at least 125 clinical isolates, preferably at least 240 clinical isolates.

[0060] According to certain embodiments, the data bank can be at a remote location and can be queried from a local client.

[0061] The present data banks, e.g. of the first and sixteenth aspect, as well as the present pan genomes, e.g. of the third and seventh aspect, can be used in a variety of applications.

[0062] For example, they can be used for the determination of bacterial resistance in a sample from a patient, as will be described in more detail in the following.

[0063] Further, they can be also used in the search for a minimal bacterial genome. For examples, 20 conserved genes could be found in all the pan-genomes of the third aspect. Thus, the data banks and pan-genomes can be used to enhance the understanding of the genetic building blocks of different bacteria, as well as for comparison amongst them. In a further step, even minimal, median und maximal building blocks (e.g. a minimal, median and maximum number, sequence, etc.) for each species of bacteria as well as bacteria as a whole can then be defined.

[0064] Using the pan-genomes, also variability with regard to single genes and/or the genome as a whole can be shown.

[0065] Furthermore, the present data banks and pan-genomes can be used in drug target finding approaches.

[0066] Thus, accordingly, respective methods for assisting in finding a minimal bacterial genome, or for finding a minimal bacterial genome, for determining variability with regard to single genes and/or the genome as a whole, for finding new drug targets, etc., using the present data banks and pangenomes can be formulated. These methods can also be related to computer program products to carry them out, wherein the computer program products comprise the present pan genomes, e.g. of the third and seventh aspect.

[0067] In a second aspect the present invention relates to the use of the data bank for the determination of bacterial resistance in a sample from a patient. As the pan-genomes reflect a stable core-genome and a wide variety of genes for each bacterial species, the use of the data bank leads to improved results.

[0068] A third aspect of the invention relates to a pan-genome of one of the following bacterial species: Escherichia coli, Acinetobacter baumanii, Citrobacter koseri, Enterobacter aerogenes, Enterobacter cloacae, Klebsiella oxytoca, Klebsiella pneumoniae, Morganella morganii, Proteus mirabilis, Pseudomonas aeruginosa, Salmonella enterica, Staphylococcus aureus, Serratia marcescens, Shigella boydii, Shigella flexneri, Shigella sonnei, and Stenotrophomonas maltophilia,

wherein the pan-genome of Escherichia coli comprises or consists of SEQ ID NO 1-41296 or comprises or consists of sequences that are at least 90% identical to SEQ ID NO 1-41296 or comprises at least 90% of SEQ ID NO 1-41296, the pan-genome of Acinetobacter baumanii comprises or consists of SEQ ID NO 41297-71315 or comprises or consists of sequences that are at least 90% identical to SEQ ID NO 41297-71315 or comprises at least 90% of SEQ ID NO 41297-71315, the pangenome of Citrobacter koseri comprises or consists of SEQ ID NO 71316-86840 or comprises or consists of sequences that are at least 90% identical to SEQ ID NO 71316-86840 or comprises at least 90% of SEQ ID NO 71316-86840, the pangenome of Enterobacter aerogenes comprises or consists of SEQ ID NO 86841-113784 or comprises or consists of sequences that are at least 90% identical to SEQ ID NO 86841-113784 or comprises at least 90% of SEQ ID NO 86841-113784, the pan-genome of Enterobacter cloacae comprises or consists of SEQ ID NO 113785-171921 or comprises or consists of sequences that are at least 90% identical to SEQ ID NO 113785-171921 or comprises at least 90% of SEQ ID NO 113785-171921, the pan-genome of Klebsiella oxytoca comprises or consists of SEQ ID NO 171922-209528 or comprises or consists of sequences that are at least 90% identical to SEQ ID NO 171922-209528 or comprises at least 90% of SEQ ID NO 171922-209528, the pan-genome of Klebsiella pneumoniae comprises or consists of SEQ ID NO 209529-273591 or comprises or consists of sequences that are at least 90% identical to SEQ ID NO 209529-273591 or comprises at least 90% of SEQ ID NO 209529-273591, the pan-genome of Morganella morganii comprises or consists of SEQ ID NO 273592-293457 or comprises or consists of sequences that are at least 90% identical to SEQ ID NO 273592-293457 or comprises at least 90% of SEQ ID NO 273592-293457, the pan-genome of Proteus mirabilis comprises or consists of SEQ ID NO 293458-318000 or comprises or consists of sequences that are at least 90% identical to SEQ ID NO 293458-318000 or comprises at least 90% of SEQ ID NO 293458-318000, the pan-genome of Pseudomonas aeruginosa comprises or consists of SEQ ID NO 318001-368053 or comprises or consists of sequences that are at least 90% identical to SEQ ID NO 318001-368053 or comprises at least 90% of SEQ ID NO 318001-368053, the pan-genome of Salmonella enterica comprises or consists of SEQ ID NO 368054-404774 or comprises or consists of sequences that are at least 90% identical to SEQ ID NO 368054-404774 or comprises at least 90% of SEQ ID NO 368054-404774, the pan-genome of Staphylococcus aureus comprises or consists of SEQ ID NO 404775-421990 or comprises or consists of sequences that are at least 90% identical to SEQ ID NO 404775-421990 or comprises at least 90% of SEQ ID NO 404775-421990, the pangenome of Serratia marcescens comprises or consists of SEQ ID NO 421991-457642 or comprises or consists of sequences that are at least 90% identical to SEQ ID NO 421991-457642 or comprises at least 90% of SEQ ID NO 421991-457642, the pangenome of Shigella boydii comprises or consists of SEQ ID NO 457643-470165 or comprises or consists of sequences that are at least 90% identical to SEQ ID NO 457643-470165 or comprises at least 90% of SEQ ID NO 457643-470165, the pangenome of Shigella flexneri comprises or consists of SEQ ID NO 470166-481587 or comprises or consists of sequences that are at least 90% identical to SEQ ID NO 470166-481587 or comprises at least 90% of SEQ ID NO 470166-481587, the pangenome of Shigella sonnei comprises or consists of SEQ ID NO 481588-492644 or comprises or consists of sequences that are at least 90% identical to SEQ ID NO 481588-492644 or comprises at least 90% of SEQ ID NO 481588-492644, and the pan-genome of Stenotrophomonas maltophilia comprises or consists of SEQ ID NO 492645-537429 or comprises or consists of sequences that are at least 90% identical to SEQ ID NO 492645-537429 or comprises at least 90% of SEQ ID NO 492645-537429.

[0069] According to certain embodiments, the invention is directed to a pan-genome of one of the following bacterial species: Escherichia coli, Acinetobacter baumanii, Citrobacter koseri, Enterobacter aerogenes, Enterobacter cloacae, Klebsiella oxytoca, Klebsiella pneumoniae, Morganella morganii, Proteus mirabilis, Pseudomonas aeruginosa, Salmonella enterica, Staphylococcus aureus, Serratia marcescens, Shigella boydii, Shigella flexneri, Shigella sonnei, and Stenotrophomonas maltophilia,

wherein the pan-genome of Escherichia coli comprises or consists of SEQ ID NO 1-41296 or comprises or consists of sequences that are at least 95% identical to SEQ ID NO 1-41296 or comprises at least 95% of SEQ ID NO 1-41296, the pan-genome of Acinetobacter baumanii comprises or consists of SEQ ID NO 41297-71315 or comprises or consists of sequences that are at least 95% identical to SEQ ID NO 41297-71315 or comprises at least 95% of SEQ ID NO 41297-71315, the pangenome of Citrobacter koseri comprises or consists of SEQ ID NO 71316-86840 or comprises or consists of sequences that are at least 95% identical to SEQ ID NO 71316-86840 or comprises at least 95% of SEQ ID NO 71316-86840, the pangenome of Enterobacter aerogenes comprises or consists of SEQ ID NO 86841-113784 or comprises or consists of sequences that are at least 95% identical to SEQ ID NO 86841-113784 or comprises at least 95% of SEQ ID NO 86841-113784, the pan-genome of Enterobacter cloacae comprises or consists of SEQ ID NO 113785-171921 or comprises or consists of sequences that are at least 95% identical to SEQ ID NO 113785-171921 or comprises at least 95% of SEQ ID NO 113785-171921, the pan-genome of Klebsiella oxytoca comprises or consists of SEQ ID NO 171922-209528 or comprises or consists of sequences that are at least 95% identical to SEQ ID NO 171922-209528 or comprises at least 95% of SEQ ID NO 171922-209528, the pan-genome of Klebsiella pneumoniae comprises or consists of SEQ ID NO 209529-273591 or comprises or consists of sequences that are at least 95% identical to SEQ ID NO 209529-273591 or comprises at least 95% of SEQ ID NO 209529-273591, the pan-genome of Morganella morganii comprises or consists of SEQ ID NO 273592-293457 or comprises or consists of sequences that are at least 95% identical to SEQ ID NO 273592-293457 or comprises at least 95% of SEQ ID NO 273592-293457, the pan-genome of Proteus mirabilis comprises or consists of SEQ ID NO 293458-318000 or comprises or consists of sequences that are at least 95% identical to SEQ ID NO 293458-318000 or comprises at least 95% of SEQ ID NO 293458-318000, the pan-genome of Pseudomonas aeruginosa comprises or consists of SEQ ID NO 318001-368053 or comprises or consists of sequences that are at least 95% identical to SEQ ID NO 318001-368053 or comprises at least 95% of SEQ ID NO 318001-368053, the pan-genome of Salmonella enterica comprises or consists of SEQ ID NO 368054-404774 or comprises or consists of sequences that are at least 95% identical to SEQ ID NO 368054-404774 or comprises at least 95% of SEQ ID NO 368054-404774, the pan-genome of Staphylococcus aureus comprises or consists of SEQ ID NO 404775-421990 or comprises or consists of sequences that are at least 95% identical to SEQ ID NO 404775-421990 or comprises at least 95% of SEQ ID NO 404775-421990, the pangenome of Serratia marcescens comprises or consists of SEQ ID NO 421991-457642 or comprises or consists of sequences that are at least 95% identical to SEQ ID NO 421991-457642 or comprises at least 95% of SEQ ID NO 421991-457642, the pangenome of Shigella boydii comprises or consists of SEQ ID NO 457643-470165 or comprises or consists of sequences that are at least 95% identical to SEQ ID NO 457643-470165 or comprises at least 95% of SEQ ID NO 457643-470165, the pangenome of Shigella flexneri comprises or consists of SEQ ID NO 470166-481587 or comprises or consists of sequences that are at least 95% identical to SEQ ID NO 470166-481587 or comprises at least 95% of SEQ ID NO 470166-481587, the pangenome of Shigella sonnei comprises or consists of SEQ ID NO 481588-492644 or comprises or consists of sequences that are at least 95% identical to SEQ ID NO 481588-492644 or comprises at least 95% of SEQ ID NO 481588-492644, and the pan-genome of Stenotrophomonas maltophilia comprises or consists of SEQ ID NO 492645-537429 or comprises or consists of sequences that are at least 95% identical to SEQ ID NO 492645-537429 or comprises at least 95% of SEQ ID NO 492645-537429.

[0070] According to certain embodiments, the invention is directed to a pan-genome of one of the following bacterial species: Escherichia coli, Acinetobacter baumanii, Citrobacter koseri, Enterobacter aerogenes, Enterobacter cloacae, Klebsiella oxytoca, Klebsiella pneumoniae, Morganella morganii, Proteus mirabilis, Pseudomonas aeruginosa, Salmonella enterica, Staphylococcus aureus, Serratia marcescens, Shigella boydii, Shigella flexneri, Shigella sonnei, and Stenotrophomonas maltophilia,

wherein the pan-genome of Escherichia coli comprises or consists of SEQ ID NO 1-41296 or comprises or consists of sequences that are at least 99% identical to SEQ ID NO 1-41296 or comprises at least 99% of SEQ ID NO 1-41296, the pan-genome of Acinetobacter baumanii comprises or consists of SEQ ID NO 41297-71315 or comprises or consists of sequences that are at least 99% identical to SEQ ID NO 41297-71315 or comprises at least 99% of SEQ ID NO 41297-71315, the pangenome of Citrobacter koseri comprises or consists of SEQ ID NO 71316-86840 or comprises or consists of sequences that are at least 99% identical to SEQ ID NO 71316-86840 or comprises at least 99% of SEQ ID NO 71316-86840, the pangenome of Enterobacter aerogenes comprises or consists of SEQ ID NO 86841-113784 or comprises or consists of sequences that are at least 99% identical to SEQ ID NO 86841-113784 or comprises at least 99% of SEQ ID NO 86841-113784, the pan-genome of Enterobacter cloacae comprises or consists of SEQ ID NO 113785-171921 or comprises or consists of sequences that are at least 99% identical to SEQ ID NO 113785-171921 or comprises at least 99% of SEQ ID NO 113785-171921, the pan-genome of Klebsiella oxytoca comprises or consists of SEQ ID NO 171922-209528 or comprises or consists of sequences that are at least 99% identical to SEQ ID NO 171922-209528 or comprises at least 99% of SEQ ID NO 171922-209528, the pan-genome of Klebsiella pneumoniae comprises or consists of SEQ ID NO 209529-273591 or comprises or consists of sequences that are at least 99% identical to SEQ ID NO 209529-273591 or comprises at least 99% of SEQ ID NO 209529-273591, the pan-genome of Morganella morganii comprises or consists of SEQ ID NO 273592-293457 or comprises or consists of sequences that are at least 99% identical to SEQ ID NO 273592-293457 or comprises at least 99% of SEQ ID NO 273592-293457, the pan-genome of Proteus mirabilis comprises or consists of SEQ ID NO 293458-318000 or comprises or consists of sequences that are at least 99% identical to SEQ ID NO 293458-318000 or comprises at least 99% of SEQ ID NO 293458-318000, the pan-genome of Pseudomonas aeruginosa comprises or consists of SEQ ID NO 318001-368053 or comprises or consists of sequences that are at least 99% identical to SEQ ID NO 318001-368053 or comprises at least 99% of SEQ ID NO 318001-368053, the pan-genome of Salmonella enterica comprises or consists of SEQ ID NO 368054-404774 or comprises or consists of sequences that are at least 99% identical to SEQ ID NO 368054-404774 or comprises at least 99% of SEQ ID NO 368054-404774, the pan-genome of Staphylococcus aureus comprises or consists of SEQ ID NO 404775-421990 or comprises or consists of sequences that are at least 99% identical to SEQ ID NO 404775-421990 or comprises at least 99% of SEQ ID NO 404775-421990, the pangenome of Serratia marcescens comprises or consists of SEQ ID NO 421991-457642 or comprises or consists of sequences that are at least 99% identical to SEQ ID NO 421991-457642 or comprises at least 99% of SEQ ID NO 421991-457642, the pangenome of Shigella boydii comprises or consists of SEQ ID NO 457643-470165 or comprises or consists of sequences that are at least 99% identical to SEQ ID NO 457643-470165 or comprises at least 99% of SEQ ID NO 457643-470165, the pangenome of Shigella flexneri comprises or consists of SEQ ID NO 470166-481587 or comprises or consists of sequences that are at least 99% identical to SEQ ID NO 470166-481587 or comprises at least 99% of SEQ ID NO 470166-481587, the pangenome of Shigella sonnei comprises or consists of SEQ ID NO 481588-492644 or comprises or consists of sequences that are at least 99% identical to SEQ ID NO 481588-492644 or comprises at least 99% of SEQ ID NO 481588-492644, and the pan-genome of Stenotrophomonas maltophilia comprises or consists of SEQ ID NO 492645-537429 or comprises or consists of sequences that are at least 99% identical to SEQ ID NO 492645-537429 or comprises at least 99% of SEQ ID NO 492645-537429.

[0071] According to certain embodiments, the invention is directed to a pan-genome of one of the following bacterial species: Escherichia coli, Acinetobacter baumanii, Citrobacter koseri, Enterobacter aerogenes, Enterobacter cloacae, Klebsiella oxytoca, Klebsiella pneumoniae, Morganella morganii, Proteus mirabilis, Pseudomonas aeruginosa, Salmonella enterica, Staphylococcus aureus, Serratia marcescens, Shigella boydii, Shigella flexneri, Shigella sonnei, and Stenotrophomonas maltophilia,

wherein the pan-genome of Escherichia coli comprises or consists of SEQ ID NO 1-41296, the pan-genome of Acinetobacter baumanii comprises or consists of SEQ ID NO 41297-71315, the pan-genome of Citrobacter koseri comprises or consists of SEQ ID NO 71316-86840, the pan-genome of Enterobacter aerogenes comprises or consists of SEQ ID NO 86841-113784, the pan-genome of Enterobacter cloacae comprises or consists of SEQ ID NO 113785-171921, the pan-genome of Klebsiella oxytoca comprises or consists of SEQ ID NO 171922-209528, the pan-genome of Klebsiella pneumoniae comprises or consists of SEQ ID NO 209529-273591, the pan-genome of Morganella morganii comprises or consists of SEQ ID NO 273592-293457, the pan-genome of Proteus mirabilis comprises or consists of SEQ ID NO 293458-318000, the pan-genome of Pseudomonas aeruginosa comprises or consists of SEQ ID NO 318001-368053, the pan-genome of Salmonella enterica comprises or consists of SEQ ID NO 368054-404774, the pan-genome of Staphylococcus aureus comprises or consists of SEQ ID NO 404775-421990, the pan-genome of Serratia marcescens comprises or consists of SEQ ID NO 421991-457642, the pan-genome of Shigella boydii comprises or consists of SEQ ID NO 457643-470165, the pan-genome of Shigella flexneri comprises or consists of SEQ ID NO 470166-481587, the pan-genome of Shigella sonnei comprises or consists of SEQ ID NO 481588-492644, and the pan-genome of Stenotrophomonas maltophilia comprises or consists of SEQ ID NO 492645-537429.

[0072] In a fourth aspect, the present invention relates to a method of determining an antimicrobial, e.g. antibiotic, drug resistance profile for at least one clinical isolate of a microorganism and for improving a first pan-genome, comprising: obtaining or providing a first data set of at least one nucleic acid sequence of the at least one clinical isolate of the microorganism, wherein optionally at least a part of the nucleic acid sequence of the first data set is assembled; analyzing the at least one nucleic acid sequence of the first data set for genetic variations by comparison to a first pangenome to obtain a third data set of genetic variants; providing a second data set of antimicrobial drug, e.g. antibiotic, resistance and/or susceptibility of the at least one clinical isolate of the microorganism;

correlating the third data set with the second data set and statistically analyzing the correlation;
determining the genetic variations in the at least one clinical isolate of the microorganism associated with antimicrobial drug, e.g. antibiotic, resistance; and
determining a second pan-genome using the first pan-genome as well as the genomes used for constructing it and the first data set of at least one nucleic acid sequence of the at least one clinical isolate of the microorganism.

[0073] When the second pan-genome is determined, the genomes used for making the first pan-genome are used in addition to the first data set of at least one nucleic acid sequence of the at least one clinical isolate of the microorganism, i.e. the at least one further first genome. This way the number of basis genomes for the pan-genome increases while the basic information from the first pan-genome gets carried over, including the information that e.g. might have led to a removal of a gene from the core genome, the construction of a certain centroid, etc. Also, the criteria set for the first pangenome, like a certain threshold for constructing it, e.g. regarding protein identity of the product of a certain gene, which can be e.g. set to 90% (as in the present case), will then be carried over to the second pan-genome. This way the pan-genome is self-learning with each additional isolate analyzed. This concept also is reflected in the fifth and sixth aspect, as well as related aspects.

[0074] According to certain embodiments, the second pan-genome can be used for analyzing the at least one nucleic acid sequence of the first data set for genetic variations by comparison to the second pan-genome to obtain a third data set of genetic variants, which then can again be correlated, thus improving the determination of the genetic variations. Particularly, genetic variations can be identified more accurately since also genes which are unique to the first data set are then part of the second pan genome, which reduces the noise during the variant calling.

[0075] According to certain embodiments, a plurality of at least one nucleic acid sequence of at least one clinical isolate of the microorganism can be used iteratively for constructing subsequent pan-genomes, e.g. a second, third, fourth, etc. pangenome. In this constructing, it is also possible that some of the plurality of at least one nucleic acid sequence of at least one clinical isolate of the microorganism are not taken into account for constructing a new pan-genome, e.g. when the pan-genome is based on a multitude of clinical isolates that are correlated to antimicrobial resistance and/or susceptibility.

[0076] According to certain embodiments, the first pan-genome in this aspect is essentially not correlated or not correlated to antimicrobial resistance and/or susceptibility.

[0077] According to certain embodiments, the first pan-genome is a pan-genome of the third aspect.

[0078] A simple read out concept for a diagnostic test as described in this aspect can be as follows.

[0079] A sample, e.g. blood, from a patient, is used for molecular testing, e.g. using next generation sequencing (NGS), and then a molecular fingerprint is taken, e.g. in case of NGS a sequence of selected genomic/plasmid regions or the whole nucleic acid sequences, e.g. genome, is assembled. This is then compared to a first pan-genome, i.e. selected sequences or the whole sequence are/is compared to the first pan-genome, and genetic variations (SNPs, structural variations like sequence/gene additions/deletions, etc.) in the genome of the at least one clinical isolate, e.g. comprising chromosomal nucleic acid sequences and plasmid nucleic acid sequences, can be correlated with susceptibility/resistance using the first pan-genome. Then the result is reported, which can comprise ID (pathogen identification), i.e. a list of all (pathogenic) species identified in the sample, and AST (antimicrobial susceptibility testing), i.e. a list including a susceptibility/resistance profile for all species listed, based on genetic variations.

[0080] According to certain embodiments, statistical analysis in the present method is carried out using Fisher's test with p<10⁻³, preferably p<10⁻⁶, preferably p<10⁻⁹. Also, according to certain embodiments, the method further comprises correlating different genetic sites to each other.

[0081] The different steps herein can be suitably carried out, e.g. as described with regard to other methods of the present invention.

[0082] According to certain embodiments, obtaining or providing a first data set of at least one nucleic acid sequence of the at least one clinical isolate of the microorganism, preferably a bacterial microorganism, e.g. one or more of Acinetobacter, Citrobacter, Escherichia, Enterobacter, Klebsiella, Morganella, Proteus, Pseudomonas, Salmonella, Serratia, Shigella, Stenotrophomonas and/or Staphylococcus species, e.g. Escherichia coli, Acinetobacter baumanii, Citrobacter koseri, Enterobacter aerogenes, Enterobacter cloacae, Klebsiella oxytoca, Klebsiella pneumoniae, Morganella morganii, Proteus mirabilis, Pseudomonas aeruginosa, Salmonella enterica, Staphylococcus aureus, Serratia marcescens, Shigella boydii, Shigella flexneri, Shigella sonnei, and Stenotrophomonas maltophilia, from the patient in the methods of the invention can comprise the following:

[0083] A sample of a vertebrate, e.g. a human, e.g. is provided or obtained and nucleic acid sequences, e.g. DNA or RNA sequences, are recorded by a known method for recording nucleic acid, which is not particularly limited. For example, nucleic acid sequences can be recorded by a sequencing method, wherein any sequencing method is appropriate, particularly sequencing methods wherein a multitude of sample components, as e.g. in a blood sample, can be analyzed for nucleic acids and/or nucleic acid fragments and/or parts thereof contained therein in a short period of time, including the nucleic acids and/or nucleic acid fragments and/or parts thereof of the microorganism. For example, sequencing can be carried out using polymerase chain reaction (PCR), particularly multiplex PCR, or high throughput sequencing or next generation sequencing, preferably using high-throughput sequencing. For sequencing, preferably an in vitro sample is used.

[0084] The data obtained by the sequencing can be in any format, and can then be analyzed as described with regard to the methods of the present invention, particularly in the fourth, fifth, sixth, ninth, tenth, eleventh, fourteenth and/or fifteenth aspect.

[0085] A fifth aspect of the present invention relates to a method of determining an antimicrobial drug resistance profile for at least one clinical isolate of a microorganism and for improving a first pan-genome, comprising:

obtaining or providing a first data set of at least one nucleic acid sequence of the at least one clinical isolate of the microorganism, wherein optionally at least a part of the nucleic acid sequence of the first data set is assembled; analyzing the at least one nucleic acid sequence of the first data set for genetic variations correlated to antimicrobial resistance and/or susceptibility by comparison to a first pan-genome, wherein the first pan-genome is obtained at least partially using a plurality of clinical isolates of the microorganism for which genetic variations are correlated to antimicrobial resistance and/or susceptibility;
determining the genetic variations in the at least one clinical isolate of the microorganism associated with antimicrobial drug resistance; and
determining a second pan-genome using the first pan-genome as well as the genomes used for constructing it and the first data set of at least one nucleic acid sequence of the at least one clinical isolate of the microorganism.

[0086] Again, according to certain embodiments, the second pangenome can be used for analyzing the at least one nucleic acid sequence of the first data set for genetic variations by comparison to the second pan-genome to obtain a third data set of genetic variants, which then can again be correlated, as e.g. in the fourth aspect, thus improving the determination of the genetic variations. Particularly, genetic variations can be identified more accurately since also genes which are unique to the first data set are then part of the second pan genome, which reduces the noise during the variant calling.

[0087] In the fifth aspect, the first pan genome is preferably constructed predominantly using a plurality of clinical isolates of the microorganism for which genetic variations are correlated to antimicrobial resistance and/or susceptibility, particularly preferably using only a plurality of clinical isolates of the microorganism for which genetic variations are correlated to antimicrobial resistance and/or susceptibility. This way the first pan-genome is correlated with antimicrobial resistance and/or susceptibility.

[0088] According to certain embodiments, a plurality of at least one nucleic acid sequence of at least one clinical isolate of the microorganism can be used iteratively for constructing subsequent pan-genomes, e.g. a second, third, fourth, etc. pangenome. In this constructing, it is also possible that some of the plurality of at least one nucleic acid sequence of at least one clinical isolate of the microorganism are not taken into account for constructing a new pan-genome, e.g. when the resulting pan-genome would be based on a multitude of clinical isolates that are not correlated to antimicrobial resistance and/or susceptibility.

[0089] Other steps can be similar or identical as described in e.g. the fourth aspect or other related methods.

[0090] A further, fourteenth, aspect of the present invention relates to a method of determining an antimicrobial drug resistance profile for at least one clinical isolate of a microorganism and for improving a first pan-genome, comprising: obtaining or providing a first data set of at least one nucleic acid sequence of the at least one clinical isolate of the microorganism, wherein optionally at least a part of the nucleic acid sequence of the first data set is assembled; analyzing the at least one nucleic acid sequence of the first data set for genetic variations correlated to antimicrobial resistance and/or susceptibility by comparison to a first pan-genome, wherein the first pan-genome is obtained at least partially using a plurality of clinical isolates of the microorganism for which genetic variations are correlated to antimicrobial resistance and/or susceptibility; and determining the genetic variations in the at least one clinical isolate of the microorganism associated with antimicrobial drug resistance.

[0091] In the fourteenth aspect, the first pan genome is preferably constructed predominantly using a plurality of clinical isolates of the microorganism for which genetic variations are correlated to antimicrobial resistance and/or susceptibility, particularly preferably only using a plurality of clinical isolates of the microorganism for which genetic variations are correlated to antimicrobial resistance and/or susceptibility. This way the first pan-genome is correlated with antimicrobial resistance and/or susceptibility.

[0092] According to certain embodiments, the method of the fourteenth aspect further comprises a step of determining a second pan-genome using the first pan-genome as well as the genomes used for constructing it and the first data set of at least one nucleic acid sequence of the at least one clinical isolate of the microorganism when the at least one nucleic acid sequence of at least one clinical isolate of the microorganism is correlated to antimicrobial resistance and/or susceptibility, as determined by the method of the fourteenth aspect. This way it can be ensured that the resulting second pan-genome is still based on a plurality of clinical isolates of the microorganism for which genetic variations are correlated to antimicrobial resistance and/or susceptibility.

[0093] Other steps can be similar or identical as described in e.g. the fourth or fifth aspect or other related methods.

[0094] According to certain embodiments, the first pan-genome is a pan-genome of the third aspect in the fifth or fourteenth aspect.

[0095] A sixth aspect of the present invention is directed to a method of determining an antimicrobial drug resistance profile for at least one clinical isolate of a microorganism and for improving a first pan-genome, comprising:

obtaining or providing a first data set of at least one nucleic acid sequence of the at least one clinical isolate of the microorganism, wherein optionally at least a part of the nucleic acid sequence of the first data set is assembled;
analyzing the at least one nucleic acid sequence of the first data set for genetic variations not correlated to antimicrobial resistance and/or susceptibility by comparison to a first pan-genome to obtain a third data set of genetic variants, and analyzing the at least one nucleic acid sequence of the first data set for genetic variations correlated to antimicrobial resistance and/or susceptibility by comparison to the first pan-genome, wherein the first pan-genome is obtained at least partially using a plurality of clinical isolates of the microorganism for which genetic variations are correlated to antimicrobial resistance and/or susceptibility;
providing a second data set of antimicrobial drug resistance and/or susceptibility of the at least one clinical isolate of the microorganism;
correlating the third data set with the second data set and statistically analyzing the correlation;
determining the genetic variations in the at least one clinical isolate of the microorganism associated with antimicrobial drug resistance; and
determining a second pan-genome using the first pan-genome as well as the genomes used for constructing it and the first data set of at least one nucleic acid sequence of the at least one clinical isolate of the microorganism.

[0096] Again, according to certain embodiments, the second pangenome can be used for analyzing the at least one nucleic acid sequence of the first data set for genetic variations by comparison to the second pan-genome to obtain a third data set of genetic variants, which then can again be correlated, as e.g. also in the fourth aspect, thus improving the determination of the genetic variations. Particularly, genetic variations can be identified more accurately since also genes which are unique to the first data set are then part of the second pan genome, which reduces the noise during the variant calling.

[0097] Other steps can be similar or identical as described in e.g. the fourth and/or fifth aspect or other related methods.

[0098] A further, fifteenth, aspect of the present invention is directed to a method of determining an antimicrobial drug resistance profile for at least one clinical isolate of a microorganism and for improving a first pan-genome, comprising: obtaining or providing a first data set of at least one nucleic acid sequence of the at least one clinical isolate of the microorganism, wherein optionally at least a part of the nucleic acid sequence of the first data set is assembled; analyzing the at least one nucleic acid sequence of the first data set for genetic variations not correlated to antimicrobial resistance and/or susceptibility by comparison to a first pan-genome to obtain a third data set of genetic variants, and analyzing the at least one nucleic acid sequence of the first data set for genetic variations correlated to antimicrobial resistance and/or susceptibility by comparison to the first pan-genome, wherein the first pan-genome is obtained at least partially using a plurality of clinical isolates of the microorganism for which genetic variations are correlated to antimicrobial resistance and/or susceptibility; providing a second data set of antimicrobial drug resistance and/or susceptibility of the at least one clinical isolate of the microorganism;

correlating the third data set with the second data set and statistically analyzing the correlation; and determining the genetic variations in the at least one clinical isolate of the microorganism associated with antimicrobial drug resistance.

[0099] In the fifteenth aspect, the whole information of a firstpan-genome which contains markers for antimicrobial resistance and/or susceptibility is taken into account.

[0100] Other steps can be similar or identical as described in e.g. the fourth, fifth, sixth and/or fourteenth aspect or other related methods.

[0101] According to certain embodiments, the first pan-genome is a pan-genome of the third aspect in the sixth or fifteenth aspect.

[0102] According to certain embodiments of the fourth, fifth or sixth, or fourteenth or fifteenth, aspect, the first pangenome is for Escherichia coli and is obtained using at least 150 clinical isolates, preferably at least 250 clinical isolates; or the first pan-genome is for Acinetobacter baumanii and is obtained using at least 150 clinical isolates, preferably at least 180 clinical isolates; or the first pan-genome is for Citrobacter koseri and is obtained using at least 35 clinical isolates, preferably at least 55 clinical isolates; or the first pan-genome is for Enterobacter aerogenes and is obtained using at least 120 clinical isolates, preferably at least 160 clinical isolates; or the first pan-genome is for Enterobacter cloacae and is obtained using at least 100 clinical isolates, preferably at least 150 clinical isolates; or the first pan-genome is for Klebsiella oxytoca and is obtained using at least 90 clinical isolates, preferably at least 120 clinical isolates; or the first pan-genome is for Klebsiella pneumoniae and is obtained using at least 160 clinical isolates, preferably at least 250 clinical isolates; or the first pan-genome is for Morganella morganii and is obtained using at least 70 clinical isolates, preferably at least 120 clinical isolates; or the first pan-genome is for Proteus mirabilis and is obtained using at least 120 clinical isolates, preferably at least 140 clinical isolates; or the first pan-genome is for Pseudomonas aeruginosa and is obtained using at least 100 clinical isolates, preferably at least 140 clinical isolates; or the first pan-genome is for Salmonella enterica and is obtained using at least 130 clinical isolates, preferably at least 190 clinical isolates; or the first pan-genome is for Staphylococcus aureus and is obtained using at least 180 clinical isolates, preferably at least 260 clinical isolates; or the first pan-genome is for Serratia marcescens and is obtained using at least 230 clinical isolates, preferably at least 330 clinical isolates; or the first pan-genome is for Shigella boydii and is obtained using at least 60 clinical isolates, preferably at least 75 clinical isolates; or the first pan-genome is for Shigella flexneri and is obtained using at least 50 clinical isolates, preferably at least 80 clinical isolates; or the first pangenome is for Shigella sonnei and is obtained using at least 60 clinical isolates, preferably at least 80 clinical isolates; or the first pan-genome is for Stenotrophomonas maltophilia and is obtained using at least 125 clinical isolates, preferably at least 240 clinical isolates.

[0103] In the methods of the fourth, fifth or sixth, or fourteenth or fifteenth, aspect, as well as the other methods of the invention, the first data set of at least one nucleic acid sequence of the at least one clinical isolate of the microorganism can be provided or obtained in any way, preferably non-invasive, and can be e.g. provided from in vitro samples.

[0104] According to certain aspects, at least two genetic variations of the nucleic acid sequence(s) can be determined, leading to improved results compared to determining only one genetic variation. It is not excluded, though, that only one genetic variation is determined.

[0105] According to certain embodiments, more than one, e.g. two, three, four, five, six, seven, eight, nine, ten, eleven, twelve, or more, genetic variations are determined. According to certain embodiments, the correlation and statistical analysis can encompass a technique wherein all genetic variations are taken into account and then optimized for obtaining the genetic variations in the nucleic acid sequences of the microorganism associated with antimicrobial drug, e.g. antibiotic, resistance which have improved statistical relevance, e.g. can obtain a higher probability to be association with antimicrobial drug, e.g. antibiotic, resistance. According to certain embodiments, a statistical analysis can be carried out using a classification approach/method like a decision tree, random forest, neural network, bayesian classification, support vector machine, etc. wherein at first the presence of a single nucleotide polymorphism and/or structural variation is determined, e.g. a decision tree, wherein in the decision tree at first the presence of a single nucleotide polymorphism and/or structural variation is determined. A classification approach can be suitably selected and applied, e.g. a decision tree can be generated using known methods, e.g. within the scope of the statistical analysis, and is otherwise not particularly restricted. According to certain embodiments, a resistance in the microorganism can be determined using a decision tree, corresponding to a statistical analysis.

[0106] According to certain embodiments, the obtaining or providing of a first data set of at least one nucleic acid sequence of the at least one clinical isolate of the microorganism can comprise the following:

[0107] A sample of a vertebrate, e.g. a human, e.g. is provided or obtained and nucleic acid sequences, e.g. DNA or RNA sequences, are recorded by a known method for recording nucleic acid, which is not particularly limited. For example, nucleic acid can be recorded by a sequencing method, wherein any sequencing method is appropriate, particularly sequencing methods wherein a multitude of sample components, as e.g. in a blood sample, can be analyzed for nucleic acids and/or nucleic acid fragments and/or parts thereof contained therein in a short period of time, including the nucleic acids and/or nucleic acid fragments and/or parts thereof of at least one microorganism of interest, particularly a bacterial microorganism. For example, sequencing can be carried out using polymerase chain reaction (PCR), particularly multiplex PCR, or high throughput sequencing or next generation sequencing, preferably using high-throughput sequencing. For sequencing, preferably an in vitro sample is used.

[0108] The obtaining or providing of nucleic acid sequences thereby can include obtaining or providing chromosomal nucleic acid sequences as well as plasmid nucleic acid sequences, particularly the whole nucleic acid sequences of the microorganism, e.g. bacterial microorganism.

[0109] The data obtained by the sequencing can be in any format, and can then be used to identify the nucleic acids of the microorganism to be identified, by known methods, e.g. fingerprinting methods, comparing nucleic acid sequences, e.g. genomes. When forming the third data set of nucleic acid sequences, e.g. genes, for a microorganism, additional data from other sources, e.g. the vertebrate, can be discarded.

[0110] For the present method, also the raw data can be used assembled, at least in part. Thus, according to certain embodiments, at least a part of the nucleic acid, e.g. gene, sequences of the first data set can be assembled, wherein assembly can be carried out by any known method and is not particularly limited.

[0111] For constructing pan-genomes, also assembled data can be used, e.g. nucleic acid sequence data obtained by sequencing of samples can be assembled and then calculated, e.g. using Roary (Rapid large-scale prokaryote pan genome analysis (Bioinformatics 2015 Nov. 15; 31(22): 3691-3. doi: 10.1093/bioinformatics/btv421. Epub 2015 Jul. 20. Page A J, Cummins C A, et al.).

[0112] Pan-genomes offer the advantage that they contain chromosomal nucleic acid sequences as well as plasmid nucleic acid sequences, i.e. a comparison to the pan-genome enables a fast and complete analysis of the first data set for genetic variations. Further, a pan-genome also allows for a more complete analysis for genetic variations as the pan-genome also allows for variation in gene content among closely related strains.

[0113] Also, according to certain embodiments, it is useful in genome-wide association studies to reference the points of interest, e.g. structural variations and/or SNPs, to one constant reference for enhanced standardization, which can be a stable pan-genome, e.g. as provided by the present invention.

[0114] In the present method, nucleic acid, e.g. gene, but also noncoding, sequence of the first data set can also be assembled, at least in part, according to certain embodiments with known methods, e.g. by de-novo assembly or mapping assembly, reference guided assembly. The sequence assembly is not particularly limited, and any known nucleic acid sequence assembler can be used, e.g. based on Sanger, 454, Solexa, Illumina, SOLid technologies, etc., as well as hybrids/mixtures thereof.

[0115] According to certain embodiments, the data of nucleic acids of different origin than the microorganism of interest, e.g. a bacterial microorganism, can be removed after the nucleic acids of interest are identified, e.g. by filtering the data out. Such data can e.g. include nucleic acids of a patient, e.g. the vertebrate, e.g. human, and/or other microorganisms, etc. This can be done by e.g. computational subtraction, as developed by Meyerson et al. 2002. For this, also aligning to the nucleic acid sequences, e.g. genome, of the vertebrate, etc., is possible. For aligning, several alignment-tools are available. This way the original data amount from the sample can be drastically reduced.

[0116] After such removal of “excess” data, the possible obtaining of the third data set can be carried out for the microorganism, e.g. a bacterial microorganism, as described above and below.

[0117] Regarding culturing methods for obtaining the second data set, which are nor limited, (a) sample(s) of microorganism(s) can be e.g. cultured overnight. On the next day individual colonies can be used for identification of organisms, either by culturing or using mass spectroscopy. Based on the identity of organisms new plates containing increasing concentration of antibiotics used for the treatment of these organisms are inoculated and grown for additional 12-24 hours. The lowest drug concentration which inhibits growth (minimal inhibitory concentration—MIC) can be used to determine susceptibility/resistance for tested antibiotics.

[0118] Also, resistance testing can be carried out by determining e.g. known resistance genes in the different isolates, like in case of methicillin resistant Staphylococcus aureus (MRSA) and methicillin susceptible Staphylococcus aureus (MSSA). For determining resistances, respectively susceptibility, the data from culturing methods and/or from determining known resistance genes, as well as data obtained in different ways, e.g. based on mass spectrometry (possibly also in connection with culturing) can be used.

[0119] Correlation of the genetic variations with antimicrobial drug, e.g. antibiotic, resistance can be carried out in a usual way and is not particularly limited. For example, resistances can be correlated to structural variations and/or SNPs in the whole nucleic acid sequence(s) of the respective microorganism or only parts thereof, for example only coding parts of the nucleic acid sequence(s). In some cases even only genetic variations, i.e. structural variations and/or SNPS in nucleic acid molecules with certain nucleic acid sequences, e.g. genes, e.g. certain genes, or certain mutations in nucleic acid molecules with certain nucleic acid sequences, e.g. genes, can be determined. After correlation, statistical analysis can be carried out, e.g. when using a plurality of clinical isolates.

[0120] According to certain embodiments, the data of the first data set can be filtered prior to a possible annotation to the first pan-genome and the possible correlation with the resistance/susceptibility data, e.g. when determining structural variations.

[0121] For example, to reduce the number of similar annotations for genetic variations, e.g. for structural variations and/or SNPs, they can be filtered and aggregated by one or more of the following:
[0122] Only annotations for which the considered genetic variation, e.g. structural variation and/or SNP, lies on a protein can be kept and the further data discarded
[0123] Only annotations which do not contain “hypothetical proteins” can be kept
[0124] Annotations can be sorted by identification number (ID) for genetic variations, e.g. for SNPs and/or structural variation, and nucleic acid sequence, e.g. gene product
[0125] For a unique pair of IDs and nucleic acid sequences, e.g. gene products, only the first annotation can be kept, e.g. in case of multiple nucleic acid sequences, e.g. coding certain genes, in a genome

[0126] Also, according to certain embodiments, the following genetic variations, e.g. structural variations and/or SNPs, can be excluded:

1. Constant features and phenotypes (same value or only NA (not available)) can be removed (e.g. centroids present in all samples or phenotypes with the result “resistant” for all samples)
2. Almost constant features and phenotypes can also be removed, e.g. features whose most frequent value was in >=95% of all samples, ignoring NA values, can be removed (e.g. a centroid is present in >=95% of all samples)
Also phenotypes whose most frequent value was in >=90% of all samples, ignoring NA values, can be removed (e.g. >=90% of all samples are resistant)
3. In addition, only drugs with non-missing data for at least 10% of the samples can be kept.
4. Genetic variations, e.g. SNPs and/or structural variations, without any annotation or mutations, e.g. SNPs and/or structural variations whose all annotations contain flag “synonymous”, can be removed so that only mutations, e.g. SNPs and/or structural variations, with at least one nonsynonymous annotation, e.g. a non-synonymous coding, are considered.

[0127] A possible statistical analysis is not particularly limited and can be suitably carried out.

[0128] For statistical analysis, e.g. Fisher's exact two-sided test can be applied with subsequent p-value adjustment over all phenotypes together using e.g. familywise error rate (FWER) or FDR (false discovery rate) and p-value threshold of 0.01 (corresponding to 10⁻², respectively 1e-2). Additionally, 10 permutation tests can be performed by permuting each phenotype separately and applying Fisher's exact test, e.g. to the centroid presence matrix and permuted phenotypes. Regarding centroids, the results then can be further filtered by centroid annotation, i.e.

1. Centroids without a gene product name can optionally be removed
2. Centroids whose gene product name contains “putative”, “predicted” or “hypothetical” can be removed
3. If there are centroids with same gene product name and gene symbol than only the first one can be kept
4. Centroids without GeneBank accession can be removed Other statistical analysis can also be carried out alternatively or in addition, though.

[0129] The construction of a pan-genome is not particularly limited and can be done using known methods. For example, assembled data, e.g. of several individual samples, of the microorganism, can be used for constructing a pan-genome, e.g. nucleic acid sequence data obtained by sequencing of the samples can be assembled and then calculated, e.g. using Roary (Rapid large-scale prokaryote pan genome analysis (Bioinformatics 2015 Nov. 15; 31(22): 3691-3. doi: 10.1093/bioinformatics/btv421. Epub 2015 Jul. 20. Page A J, Cummins C A, et al.).

[0130] When referring to a second data set, wherein the second data set e.g. comprises, respectively is, a set of antimicrobial drug, e.g. antibiotic, resistances of a plurality of clinical isolates, this can, within the scope of the invention, also refer to a self-learning data base that, whenever a new sample is analyzed, can take this sample into the second data set and thus expand its data base. The second data set thus does not have to be static and can be expanded, either by external input or by incorporating new data due to selflearning. The same applies, where applicable, to the first data set.

[0131] According to certain embodiments of the present methods—as above, the second data set can be provided by culturing the clinical isolates of the microorganism on suitable plates, e.g. agar plates, provided with antimicrobial drugs, e.g. antibiotics, at different concentrations, and the second data can be obtained by taking the minimal concentration of the plates that inhibits growth of the respective microorganism.

[0132] According to certain embodiments the antimicrobial drug, e.g. antibiotic drug, is selected from the group consisting of Rlactams, R-lactam inhibitors, quinolones and derivatives thereof, e.g. fluoroquinolones, aminoglycosides, glycopeptides, lincosamides, macrolides, nitrofuranes, oxazolidinones, polyketides, respectively tetracyclines, and folate synthesis inhibitors, e.g. benzene derived/sulfonamide antibiotics. According to certain embodiments, the antimicrobial drug, e.g. antibiotic drug, is selected from the group consisting of Amoxicillin/K Clavulanate (AUG), Ampicillin (AM), Aztreonam (AZT), Cefazolin (CFZ), Cefepime (CPE), Cefotaxime (CFT), Ceftazidime (CAZ), Ceftriaxone (CAX), Cefuroxime (CRM), Cephalotin (CF), Ciprofloxacin (CP), Ertapenem (ETP), Gentamicin (GM), Imipenem (IMP), Levofloxacin (LVX), Meropenem (MER), Piperacillin/Tazobactam (P/T), Ampicillin/Sulbactam (A/S), Tetracycline (TE), Tobramycin (TO), and Trimethoprim/Sulfamethoxazole (T/S). According to certain embodiments, the microorganism is a Gram-positive or a Gramnegative bacteria, e.g. a Gram-negative bacteria.

[0133] In the methods of the invention, the resistance of the microorganism, particularly the bacterial microorganism, to one or more antimicrobial, e.g. antibiotic, drugs can be determined. According to certain embodiments, the resistance of a microorganism, particularly bacterial microorganism, against 1, 2, 3, 4, 5, 6, 7, 8, 9, 10, 11, 12, 13, 14, 15 or 16, 17, 18, 19, 20, 21 or more antibiotic drugs is determined. According to certain embodiments, the resistance of a microorganism, particularly bacterial microorganism, against 1, 2, 3, 4, 5, 6, 7, 8, 9, 10, 11, 12, 13, 14, 15 or 16, 17, 18, 19, 20 or 21 antibiotic drugs is determined.

[0134] A seventh aspect of the present invention relates to a pangenome, wherein the pan-genome is for Escherichia coli and is obtained using at least 150 clinical isolates, preferably at least 250 clinical isolates; or wherein the pan-genome is for Acinetobacter baumanii and is obtained using at least 150 clinical isolates, preferably at least 180 clinical isolates; or wherein the pan-genome is for Citrobacter koseri and is obtained using at least 35 clinical isolates, preferably at least 55 clinical isolates; or wherein the pan-genome is for Enterobacter aerogenes and is obtained using at least 120 clinical isolates, preferably at least 160 clinical isolates; or wherein the pan-genome is for Enterobacter cloacae and is obtained using at least 100 clinical isolates, preferably at least 150 clinical isolates; or wherein the pan-genome is for Klebsiella oxytoca and is obtained using at least 90 clinical isolates, preferably at least 120 clinical isolates; or wherein the pan-genome is for Klebsiella pneumoniae and is obtained using at least 160 clinical isolates, preferably at least 250 clinical isolates; or wherein the pan-genome is for Morganella morganii and is obtained using at least 70 clinical isolates, preferably at least 120 clinical isolates; or wherein the pan-genome is for Proteus mirabilis and is obtained using at least 120 clinical isolates, preferably at least 140 clinical isolates; or wherein the pan-genome is for Pseudomonas aeruginosa and is obtained using at least 100 clinical isolates, preferably at least 140 clinical isolates; or wherein the pan-genome is for Salmonella enterica and is obtained using at least 130 clinical isolates, preferably at least 190 clinical isolates; or wherein the pan-genome is for Staphylococcus aureus and is obtained using at least 180 clinical isolates, preferably at least 260 clinical isolates; or wherein the pan-genome is for Serratia marcescens and is obtained using at least 230 clinical isolates, preferably at least 330 clinical isolates; or wherein the pan-genome is for Shigella boydii and is obtained using at least 60 clinical isolates, preferably at least 75 clinical isolates; or wherein the pan-genome is for Shigella flexneri and is obtained using at least 50 clinical isolates, preferably at least 80 clinical isolates; or wherein the pan-genome is for Shigella sonnei and is obtained using at least 60 clinical isolates, preferably at least 80 clinical isolates; or wherein the pangenome is for Stenotrophomonas maltophilia and is obtained using at least 125 clinical isolates, preferably at least 240 clinical isolates.

[0135] Also disclosed is—in a sixteenth aspect—a data bank comprising at least one pan-genome of the seventh aspect, preferably comprising 2, 3, 4, 5, 6, 7, 8, 9, 10, 11, 12, 13, 14, 15, 16, or 17 of the pan-genomes of the seventh aspect.

[0136] In an eight aspect, the use of the pan-genome of the third or seventh aspect for the determination of bacterial resistance in a sample from a patient is disclosed. Of course also other uses are possible, as discussed above.

[0137] A ninth aspect of the present invention relates to a, e.g. diagnostic, method of determining an infection of a patient with a microorganism, comprising the steps of:

a) obtaining or providing a sample containing or suspected of containing a microorganism from the patient;
b) determining the presence of at least one genetic variation in at least one genetic sequence of the microorganism, as determined by the method of any one of the fourth, fifth, sixth, fourteenth or fifteenth aspect of the present invention, wherein the presence of said at least one genetic variation is indicative of an infection with an antimicrobial drug resistant microorganism in said patient.

[0138] According to certain embodiments, the microorganism is a bacterial microorganism potentially resistant to antimicrobial drug treatment.

[0139] In the infection of a patient with a microorganism, preferably a bacterial microorganism, e.g. one or more of Acinetobacter, Citrobacter, Escherichia, Enterobacter, Klebsiella, Morganella, Proteus, Pseudomonas, Salmonella, Serratia, Shigella, Stenotrophomonas and/or Staphylococcus species, e.g. Escherichia coli, Acinetobacter baumanii, Citrobacter koseri, Enterobacter aerogenes, Enterobacter cloacae, Klebsiella oxytoca, Klebsiella pneumoniae, Morganella morganii, Proteus mirabilis, Pseudomonas aeruginosa, Salmonella enterica, Staphylococcus aureus, Serratia marcescens, Shigella boydii, Shigella flexneri, Shigella sonnei, and Stenotrophomonas maltophilia, the microorganism is preferably potentially resistant to antimicrobial drug treatment, which herein means an infection of a patient with a microorganism, preferably a bacterial microorganism, particularly one as noted above, wherein it is unclear if the microorganism, preferably bacterial microorganism, is susceptible to treatment with a specific antimicrobial drug or if it is resistant to the antimicrobial drug.

[0140] With this method, any genetic variations/mutations in the nucleic acid sequences of a microorganism, e.g. bacterial microorganism, e.g. a clinical isolate with an unknown strain of the microorganism, particularly bacterial microorganism, correlated with antimicrobial drug, e.g. antibiotic, resistance can be determined and a thorough antimicrobial drug, e.g. antibiotic, resistance profile can be established comprising structural variations as well as SNPs.

[0141] The different steps can herein be carried out as described with regard to the further related methods of the present invention.

[0142] According to this aspect, an infection with a microorganism, particularly a bacterial microorganism, in a patient can be determined using sequencing methods, and a resistance to antimicrobial drugs, e.g. antibiotics, of the microorganism can be determined in a short amount of time compared to conventional methods.

[0143] In a tenth aspect the present invention relates to a method of selecting a treatment of a patient suffering from an infection with a potentially resistant microorganism, comprising the steps of:

a) obtaining or providing a sample containing or suspected of containing a microorganism from the patient;
b) determining the presence of at least one genetic variation in at least one genetic sequence of the microorganism, as determined by the method of any one of the fourth, fifth, sixth, fourteenth or fifteenth aspect of the present invention, wherein the presence of said at least one genetic variation is indicative of an infection with an antimicrobial drug resistant microorganism in said patient;
c) identifying said at least one or more antimicrobial drugs; and
d) selecting one or more antimicrobial drugs different from the ones identified in step c) and being suitable for the treatment of the infection with the microorganism.

[0144] This method can be carried out similarly to the one in the ninth aspect of the invention and enables a fast way to select a suitable treatment with antibiotics for any infection with an unknown microorganism, particularly bacterial microorganism.

[0145] According to certain embodiments, genetic variations, e.g. structural variations and/or SNPs, in at least two, three, four, five, six, seven, eight, nine, ten, eleven, twelve, or more positions, respectively sequences, are determined in any of the methods of the present invention, e.g. in at least two positions, respectively sequences, or in at least three positions, respectively sequences, in the chromosomal nucleic acid sequences and/or the plasmid nucleic acid sequences. Instead of testing only single positions and/or sequences, the combination of several genetic variations, e.g. variant positions and/or sequences, can improve the prediction accuracy and further reduce false positive findings that are influenced by other factors. Therefore, it is in particular preferred to determine the presence of structural variations and/or SNPs in 2, 3, 4, 5, 6, 7, 8, 9, 10, 11, 12 (or more) sequences.

[0146] The identification of the at least one or more antimicrobial, e.g. antibiotic, drug in step c) can be based on the results obtained in step b) and corresponds to the antimicrobial, e.g. antibiotic, drug(s) that correlate(s) with the genetic variations. Once these antimicrobial drugs, e.g. antibiotics, are ruled out, the remaining antimicrobial drugs, e.g. antibiotic drugs/antibiotics, can be selected in step d) as being suitable for treatment.

[0147] According to certain embodiments in the ninth or tenth aspect, step b) is carried out using a classification approach/method like a decision tree, random forest, neural network, bayesian classification, support vector machine, etc. wherein at first the presence of a genetic variation is determined, e.g. a decision tree, wherein in the decision tree at first the presence of a single nucleotide polymorphism and/or structural variation is determined. A classification approach can be suitably selected and applied, e.g. a decision tree can be generated using known methods, e.g. within the scope of the statistical analysis, and is otherwise not particularly restricted. According to certain embodiments, a resistance in the microorganism can be determined using a decision tree, corresponding to a statistical analysis. This way the diagnosis of a resistant microorganism, e.g. bacterial microorganism, can be optimized.

[0148] According to certain embodiments, determining the nucleic acid sequence information or the presence of a genetic variation in the present methods comprises using a next generation sequencing or high throughput sequencing method, e.g. as mentioned above.

[0149] According to certain embodiments of any of the methods of the present invention the genetic variation is selected from at least one of structural variations of the nucleic acid sequences comprising at least a change in the nucleic acid sequence comprising more than one base, and single nucleotide polymorphisms (SNPs).

[0150] An eleventh aspect of the present invention is directed to a method of treating a patient suffering from an antimicrobial drug, e.g. antibiotic, resistant infection with a microorganism, preferably a bacterial microorganism, comprising the steps of:

a) obtaining or providing a sample containing or suspected of containing a microorganism from the patient;
b) determining the presence of at least one genetic variation in at least one genetic sequence of the microorganism, as determined by the method of any one of the fourth, fifth, sixth, fourteenth or fifteenth aspect of the present invention, wherein the presence of said at least one genetic variation is indicative of an infection with an antimicrobial drug resistant microorganism in said patient;
c) identifying said at least one or more antimicrobial drugs; and
d) selecting one or more antimicrobial drugs different from the ones identified in step c) and being suitable for the treatment of the infection with the microorganism; and
e) treating the patient with said one or more antimicrobial, e.g. antibiotic, drugs.

[0151] Herein, steps a) to d) can be carried out as described with respect to the fourth aspect. Step e) can be sufficiently carried out without being restricted and can be done e.g. non-invasively.

[0152] In a twelfth aspect one or more computer program products comprising computer executable instructions which, when executed, perform a method according to any one of the fourth, fifth, sixth, ninth, tenth, fourteenth or fifteenth aspect of the present invention, are disclosed.

[0153] In certain embodiments the computer program product is one on which program commands or program codes of a computer program for executing said method are stored. According to certain embodiments the computer program product is a storage medium.

[0154] As noted above, the computer program products of the present invention can be self-learning, e.g. with respect to the first and second data sets and/or the pan-genome.

[0155] In order to obtain the best possible information from the highly complex genetic data and develop an optimum model for diagnostic and therapeutical uses as well as the methods of the present invention—which can be applied stably in clinical routine—a thorough in silico analysis can be necessary.

[0156] The proposed principle is based on a combination of different approaches, e.g. optional assembly of the nucleic acid, e.g. gene, sequences and/or genome of the microorganisms, at least in part and alignment of the sequence data of the clinical isolate to be determined with one or more pan-genomes, and possibly correlation of genetic variations found in every sample, e.g. from each patient, respectively an unknown clinical isolate, with all drugs, e.g. antibiotics, or only one or some of them, and search for genetic variations for one or several drugs and in one or several strains.

[0157] Using the above steps a list of genetic variations with regard to one or more pan-genomes is generated. This can be stored in databases, and statistical models can be derived from the databases. The statistical models can be based on at least one or more genetic variations. Statistical models that can be trained can be combined from genetic variations and/or nucleic acid sequences. Examples of algorithms that can produce such models are association Rules, Support Vector Machines, Decision Trees, Decision Forests, DiscriminantAnalysis, Cluster-Methods, and many more.

[0158] The goal of the training is to allow a reproducible, standardized application during routine procedures.

[0159] For this, for example, nucleic acid, e.g. gene, sequences or parts thereof can be sequenced from a patient to be diagnosed. Afterwards, core characteristics can be derived from the sequence data which can be used to predict resistance.

[0160] The corresponding characteristics can be used as input for the statistical model and thus enable a prognosis for new patients. Not only the information regarding all resistances of all microorganisms, against all or only some or one drugs, e.g. antibiotics, can be integrated in a computer decision support tool, but also corresponding directives (e.g. EUCAST) so that only treatment proposals are made that are in line with the directives.

[0161] A thirteenth aspect of the present invention relates to the use of the computer program product according to the twelfth aspect, e.g. for determining genetic variations in the nucleic acid sequences of a microorganism for a clinical isolate of the microorganism in the fourth, fifth, sixth, fourteenth of fifteenth aspect of the invention and/or for use in the method of the ninth aspect of the invention and/or for selecting a treatment in the tenth aspect of the present invention and/or in the method of the eleventh aspect of the present invention.

### Examples

[0162] The present invention will now be described in detail with reference to several examples thereof. However, these examples are illustrative and do not limit the scope of the invention.

[0163] Pan-genomes were obtained by the method described below for several bacterial species.

[0164] For constructing pan-genomes, the following strains/species were considered, and the number of individual samples used in each case was as given in Table 1.

TABLE 1
Number of samples used for each species

| | Number of |
|---|---|
| Species | samples |
| Acinetobacter baumannii | 435 |
| Citrobacter koseri | 111 |
| Escherichia coli | 941 |
| Enterobacter aerogenes | 325 |
| Enterobacter cloacae | 549 |
| Klebsiella oxytoca | 310 |
| Klebsiella pneumoniae | 1101 |
| Morganella morganii | 286 |
| Proteus mirabilis | 457 |
| Pseudomonas aeruginosa | 1132 |
| Salmonella enterica | 633 |
| Staphylococcus aureus | 958 |
| Serratia marcescens | 510 |
| Shigella boydii | 78 |
| Shigella flexneri | 98 |
| Shigella sonnei | 226 |
| Stenotrophomonas maltophilia | 501 |

[0165] Nucleic acid sequencing was carried out in addition to classical antimicrobial susceptibility testing of the same isolates. This allowed performing genome wide correlation studies to find genetic variants (e.g. point mutations, small insertions and deletion, larger structural variants, plasmid copy number gains, gene dosage effects) in the nucleic acid sequences that are significantly correlated to the resistance against one or several drugs. The approach also allows for comparing the relevant sites in the genome to each other.

[0166] For determining genetic variants that can be in the chromosomal nucleic acid sequences as well as in plasmid nucleic acid sequences, pan-genomes were constructed, as these cover both the chromosome and the plasmids. For constructing the pangenomes, the data obtained by sequencing of the samples, as detailed below, were assembled and calculated using Roary (Rapid large-scale prokaryote pan genome analysis (Bioinformatics 2015 Nov. 15; 31(22): 3691-3. doi: 10.1093/bioinformatics/btv421. Epub 2015 Jul. 20. Page A J, Cummins C A, et al.). De novo assemblies were constructed using SPAdes (version 3.6.2, Bankevich A, Nurk S, Antipov D, et al. SPAdes: A New Genome Assembly Algorithm and Its Applications to Single-Cell Sequencing. Journal of Computational Biology. 2012; 19(5):455-477. doi:10.1089/cmb.2012.0021) with parameters -m 254 -k 21,33,55—careful -1 fp.fastq.gz -2 rp.fastq.gz where fp.fastq.gz and rp.fastq.gz are trimmed reads processed using Trimmomatic (version 0.35, http://www.ncbi.nlm.nih.gov/pmc/articles/PMC4103590) with parameters PE<forward reads> <reverse reads> <output files>ILLUMINACLIP:NexteraPE-PE:1:50:30 LEADING:3 TRAILING:3 SLIDINGWINDOW:4:15 MINLEN:36. To determine the quality of the assemblies we ran QUAST (version 3.2) with minimal length threshold of 200 bp. Assemblies were annotated using Prokka (1.11) using parameters—force—outdir<output dir>—prefix<sample ID>—locustag<sample ID>—centre ICMB—gram neg—mincontiglen 200<scaffolds fasta>. Furthermore, taxonomy of the samples was determined using Kraken (version 0.10.4-beta, finished bacterial and viral genomes from NCBI RefSeq downloaded on 2015.01.13) based on raw NGS reads using k-mer length of 31 and default parameters. Samples were grouped by the assigned species taxon (at least 50 samples per group) and filtered by the assembly quality (max. L50=200, max. #contigs(scaffolds)=1000, min. N50=5000, “RefSeq microbial genomes database: new representation and annotation strategy”, http://www.ncbi.nlm.nih.gov/pubmed/24316578) and taxonomic assignment quality (Shigella species: min. sens.=0%, min. prec.=60%, max. unclassified=30%; other species: min. sens.=50%, min. prec.=75%, max. unclassified=30% where sens.=sensitivity=(# reads assigned to species taxon)/(# processed reads) and prec.=precision=(# reads assigned to species taxon)/(# reads assigned to any species taxon).

[0167] The following pan-genomes were obtained:

Escherichia coli: SEQ ID NO 1-41296,
Acinetobacter baumanii: SEQ ID NO 41297-71315,
Citrobacter koseri: SEQ ID NO 71316-86840,
Enterobacter aerogenes: SEQ ID NO 86841-113784,
Enterobacter cloacae: SEQ ID NO 113785-171921,
Klebsiella oxytoca: SEQ ID NO 171922-209528,
Klebsiella pneumoniae: SEQ ID NO 209529-273591,
Morganella morganii: SEQ ID NO 273592-293457,
Proteus mirabilis: SEQ ID NO 293458-318000,
Pseudomonas aeruginosa: SEQ ID NO 318001-368053,
Salmonella enterica: SEQ ID NO 368054-404774,
Staphylococcus aureus: SEQ ID NO 404775-421990,
Serratia marcescens: SEQ ID NO 421991-457642,
Shigella boydii: SEQ ID NO 457643-470165,
Shigella flexneri: SEQ ID NO 470166-481587,
Shigella sonnei: SEQ ID NO 481588-492644,
Stenotrophomonas maltophilia: SEQ ID NO 492645-537429

[0168] Using the pan-genomes and the data obtained for antibiotic resistance (as described below), genetic variants were determined within the pan-genome that are correlated to antibiotic resistance.

[0169] In the present approach the different sources of genetic resistance regarding structural variances as well as the different ways of how bacteria can become resistant were covered. By measuring clinical isolates collected in a broad geographical area and across a broad time span of three decades a complete picture going far beyond the rather artificial step of laboratory generated resistance mechanisms was tried to be generated.

[0170] To this end, a set of 21 clinically relevant antimicrobial agents with 5 different modes of action was put together, and the minimally inhibitory concentration (MIC) of the 21 drugs for the isolates was measured.

[0171] The detailed procedure is given in the following: Bacterial Strains

[0172] The inventors selected strains from the microbiology strain collection at Siemens Healthcare Diagnostics (West Sacramento, Calif.) for susceptibility testing and nucleic acid sequencing.

[0173] Antimicrobial Susceptibility Testing (AST) Panels Frozen reference AST panels were prepared following Clinical Laboratory Standards Institute (CLSI) recommendations. The following antimicrobial agents (with μg/ml concentrations shown in parentheses) were included in the panels: Amoxicillin/K Clavulanate (0.5/0.25-64/32), Ampicillin (0.25-128), Ampicillin/Sulbactam (0.5/0.25-64/32), Aztreonam (0.25-64), Cefazolin (0.5-32), Cefepime (0.25-64), Cefotaxime (0.25-128), Ceftazidime (0.25-64), Ceftriaxone (0.25-128), Cefuroxime (1-64), Cephalothin (1-64), Ciprofloxacin (0.015-8), Ertepenem (0.12-32), Gentamicin (0.12-32), Imipenem (0.25-32), Levofloxacin (0.25-16), Meropenem (0.12-32), Piperacillin/Tazobactam (0.25/4-256/4), Tetracycline (0.5-64), Tobramycin (0.12-32), and Trimethoprim/Sulfamethoxazole (0.25/4.7- 32/608). Prior to use with clinical isolates, AST panels were tested with QC strains. AST panels were considered acceptable for testing with clinical isolates when the QC results met QC ranges described by CLSI16.

### Inoculum Preparation

[0174] Isolates were cultured on trypticase soy agar with 5% sheep blood (BBL, Cockeysville, Md.) and incubated in ambient air at 35±1° C. for 18-24 h. Isolated colonies (4-5 large colonies or 5-10 small colonies) were transferred to a 3 ml Sterile Inoculum Water (Siemens) and emulsified to a final turbidity of a 0.5 McFarland standard. 2 ml of this suspension was added to 25 ml Inoculum Water with Pluronic-F (Siemens). Using the Inoculator (Siemens) specific for frozen AST panels, 5 μl of the cell suspension was transferred to each well of the AST panel. The inoculated AST panels were incubated in ambient air at 35±1° C. for 16-20 h. Panel results were read visually, and minimal inhibitory concentrations (MIC) were determined.

### DNA Extraction

[0175] Four streaks of each Gram-negative bacterial isolate cultured on trypticase soy agar containing 5% sheep blood and cell suspensions were made in sterile 1.5 ml collection tubes containing 50 μl Nuclease-Free Water (AM9930, Life Technologies). Bacterial isolate samples were stored at −20° C. until nucleic acid extraction. The Tissue Preparation System (TPS) (096D0382-02_01_B, Siemens) and the VERSANT® Tissue Preparation Reagents (TPR) kit (10632404B, Siemens) were used to extract DNA from these bacterial isolates. Prior to extraction, the bacterial isolates were thawed at room temperature and were pelleted at 2000 G for 5 seconds. The DNA extraction protocol DNAext was used for complete total nucleic acid extraction of 48 isolate samples and eluates, 50 μl each, in 4 hours. The total nucleic acid eluates were then transferred into 96-Well qPCR Detection Plates (401341, Agilent Technologies) for RNase A digestion, DNA quantitation, and plate DNA concentration standardization processes. RNase A (AM2271, Life Technologies) which was diluted in nuclease-free water following manufacturer's instructions was added to 50 μl of the total nucleic acid eluate for a final working concentration of 20 μg/ml. Digestion enzyme and eluate mixture were incubated at 37° C. for 30 minutes using Siemens VERSANT® Amplification and Detection instrument. DNA from the RNase digested eluate was quantitated using the Quant-iT™ PicoGreen dsDNA Assay (P11496, Life Technologies) following the assay kit instruction, and fluorescence was determined on the Siemens VERSANT® Amplification and Detection instrument. Data analysis was performed using Microsoft® Excel 2007. 25 μl of the quantitated DNA eluates were transferred into a new 96-well PCR plate for plate DNA concentration standardization prior to library preparation. Elution buffer from the TPR kit was used to adjust DNA concentration. The standardized DNA eluate plate was then stored at −80° C. until library preparation.

### Next Generation Sequencing

[0176] Prior to library preparation, quality control of isolated bacterial DNA was conducted using a Qubit 2.0 Fluorometer (Qubit dsDNA BR Assay Kit, Life Technologies) and an Agilent 2200 TapeStation (Genomic DNA ScreenTape, Agilent Technologies). NGS libraries were prepared in 96 well format using NexteraXT DNA Sample Preparation Kit and NexteraXT Index Kit for 96 Indexes (Illumina) according to the manufacturer's protocol. The resulting sequencing libraries were quantified in a qPCR-based approach using the KAPA SYBR FAST qPCR MasterMix Kit (Peqlab) on a ViiA 7 real time PCR system (Life Technologies). 96 samples were pooled per lane for paired-end sequencing (2×100 bp) on Illumina Hiseq2000 or Hiseq2500 sequencers using TruSeq PE Cluster v3 and TruSeq SBS v3 sequencing chemistry (Illumina). Basic sequencing quality parameters were determined using the FastQC quality control tool for high throughput sequence data (Babraham Bioinformatics Institute).

### Mapping

[0177] Mapping was carried out against the pan-genomes given above and in the accompanying sequence protocol.

[0178] Raw paired-end sequencing data for the samples were mapped against the respective pan-genomes with BWA 0.7.12 The resulting SAM files were sorted, converted to BAM files, and PCR duplicates were marked using the Picard tools package 2.0.1 (http://picard.sourceforge.net/).

### Data Analysis

[0179] Identification of genetic variations was as follows: The Genome Analysis Toolkit (GATK) UnifiedGenotyper, 3.5 was used to call SNPs and indels for blocks of max. 200 samples (parameters: -ploidy 1 -glm BOTH -stand_call_conf 30 stand emit_conf_10). VCF files were combined into a single file and quality filtering for SNPs was carried out (QD<2.0∥FS>60.0∥MQ<40.0|HaplotypeScore>13.0|MappingQualityRankSum<−12.5∥ReadPosRankSum<−8.0) and indels (QD<2.0∥FS>200.0∥ReadPosRankSum<−20.0). Detected variants were annotated with SnpEff 4.2 to predict coding effects.

[0180] 10 repetitions of 5-fold cross-validation were carried out. In each fold, features were selected by ranking them using a GWAS (genome-wide association study) approach with PCA (principal component analysis) adjustment. The final model was built from the most occurring features from the crossvalidation. For obtaining an optimized model, decision tree analysis was carried out as follows:

[0181] Model: Decision tree from R-package rpart; maximal depth=5, default parameters, pruning (decreasing tree size to avoid over fitting; the set parameters affect the number of features in the model

### Comparative Examples

[0182] For comparison, analysis was also carried out by mapping the same samples to reference genomes from single isolates, obtained from NCBI, in addition to the mapping to the pangenomes, and analyzing the data for correlation between genetic variations compared to the respective reference genome and antibiotic resistance, as obtained above.

[0183] For comparing the effect of using pan-genomes compared to reference genomes for determining antimicrobial resistance, six different bacterial strains of different genera, i.e. Acinetobacter baumannii, Escherichia coli, Klebsiella oxytoca, Klebsiella pneumoniae, Proteus mirabilis, and Serratia marcescens, were considered in the following examples to show that the effect is not limited to a particular strain or genus. Also, only SNPs were considered in the examples shown below for easier analysis, although similar effects as shown below were also obtained for examples wherein structural variants were taken into account.

[0184] Raw data were obtained from sequencing as described above. Data treatment differed from the mapping step in using reference genomes, as follows:

[0185] For the mapping to the reference genomes, mapping was furthermore also carried out against specific reference genomes that take into account only nucleic acid sequences on the chromosome and are as follows: NC_017847 as annotated at the NCBI for Acinetobacter baumannii, CP000948 (see also NC_010473), as annotated at the NCBI for Escherichia coli, NC_009648, as annotated at the NCBI for Klebsiella pneumoniae, NC_016612, as annotated at the NCBI for Klebsiella oxytoca, NC_010554 as annotated at the NCBI for Proteus mirabilis, and NC_020211 as annotated at the NCBI for Serratia marcescens.

[0186] The reference genomes were thereby selected for each bacterial species by correlating the data to all available chromosomal reference genomes at the NCBI and selecting the best suited.

Reference Sequence for Acinetobacter baumannii, Strain NC_017847 (http://www.ncbi.nlm.nih.gov/nuccore/NC_017847):

LOCUS NC_017847 3964912 bp DNA circular CON 1 Mar. 2015

| | |
|---|---|
| DEFINITION | Acinetobacter baumannii MDR-TJ, complete genome. |
| ACCESSION | NC_017847 NZ_AEOE01000000 NZ_AEOE01000001 |
| | NZ_AEOE01000002 |
| | NZ_AEOE01000003 NZ_AEOE01000004 |
| VERSION | NC_017847.1 GI: 387122089 |
| DBLINK | BioProject: PRJNA224116 |
| | BioSample: SAMN02603104 |
| | Assembly: GCF_000187205.2 |
| KEYWORDS | RefSeq. |
| SOURCE | Acinetobacter baumannii MDR-TJ |
| ORGANISM | Acinetobacter baumannii MDR-TJ |
| | Bacteria; Proteobacteria; Gammaproteobacteria; |
| | Pseudomonadales; Moraxellaceae; Acinetobacter; |
| | Acinetobacter calcoaceticus/baumannii complex. |
| REFERENCE | 1 (bases 1 to 3964912) |
| AUTHORS | Huang, H., Yang, Z.L., Wu, X.M., Wang, Y., Liu, Y.J., |
| | Luo, H., Lv, X., Gan, Y.R., Song, S.D. and Gao, F. |
| TITLE | Complete genome sequence of Acinetobacter |
| | baumannii MDR-TJ and insights into its mechanism |
| | of antibiotic resistance |
| JOURNAL | J. Antimicrob. Chemother. 67 (12), 2825-2832 |
| | (2012) |
| PUBMED | 22952140 |
| REFERENCE | 2 (bases 1 to 3964912) |
| AUTHORS | Gao, F., Wang, Y., Liu, Y.J., Wu, X.M., Lv, X., |
| | Gan, Y.R., Song, S.D. and Huang, H. |
| TITLE | Genome sequence of Acinetobacter baumannii |
| | MDR-TJ |
| JOURNAL | J. Bacteriol. 193 (9), 2365-2366 (2011) |
| PUBMED | 21398552 |
| REFERENCE | 3 (bases 1 to 3964912) |
| AUTHORS | Huang, H., Yang, Z.-L., Wu, X.-M., Wang, Y., Liu,Y.- |
| | J., Luo, H., Lv, X., Gan, Y.-R., Song, S.-D. and Gao, F. |
| TITLE | Direct Submission |
| JOURNAL | Submitted (6 Apr. 2012) Department of Physics, |
| | Tianjin University, No.92, Weijin Road, Nankai |
| | District, Tianjin 300072, China |

Reference Sequence for Escherichia coli, str. K-12 substr. DH10B:

LOCUS CP000948 4686137 bp DNA circular BCT 5 Jun. 2008

| | |
|---|---|
| DEFINITION | Escherichia coli str. K12 substr. DH10B, complete |
| | genome. |
| ACCESSION | CP000948 |
| VERSION | CP000948.1 GI: 169887498 |
| DBLINK | BioProject: PRJNA20079 |
| KEYWORDS | . |
| SOURCE | Escherichia coli str. K-12 substr. DH10B |
| ORGANISM | Escherichia coli str. K-12 substr. DH10B |
| | Bacteria; Proteobacteria; Gammaproteobacteria; |
| | Enterobacteriales; Enterobacteriaceae; Escherichia. |
| REFERENCE | 1 (bases 1 to 4686137) |
| AUTHORS | Durfee, T., Nelson, R., Baldwin, S., Plunkett, G. |
| | III, Burland,V., Mau, B., Petrosino, J.F., Qin, X., |
| | Muzny, D.M., Ayele, M., Gibbs, R.A., Csorgo, B., |
| | Posfai, G., The inventor-sinstock, G.M. and |
| | Blattner, F.R. |
| TITLE | The complete genome sequence of Escherichia coli |
| | DH10B: insights into the biology of a laboratory |
| | workhorse |
| JOURNAL | J. Bacteriol. 190 (7), 2597-2606 (2008) |
| PUBMED | 18245285 |
| REFERENCE | 2 (bases 1 to 4686137) |
| AUTHORS | Plunkett, G. III. |
| TITLE | Direct Submission |
| JOURNAL | Submitted (20 Feb. 2008) Department of Genetics |
| | and Biotechnology, |
| | University of Wisconsin, 425G Henry Mall, Madison, |
| | WI 53706, USA |
| COMMENT | DH10B and DH10B-T1R are available from Invitrogen |
| | Corporation |
| | (http://www.invitrogen.com). |

Reference Sequence for Klebsiella oxytoca, Strain NC_016612 (http://www.genome.jp/dbget-bin/www_bget?refseq+NC_016612):

LOCUS NC_016612 5974109 bp DNA circular CON 7 Feb. 2015

| | |
|---|---|
| DEFINITION | Klebsiella oxytoca KCTC 1686, complete |
| | genome. |
| ACCESSION | NC_016612 |
| VERSION | NC_016612.1 GI: 375256816 |
| DBLINK | BioProject: PRJNA224116 |
| | BioSample: SAMN02603580 |
| | Assembly: GCF_000240325.1 |
| KEYWORDS | RefSeq. |
| SOURCE | Klebsiella oxytoca KCTC 1686 |
| ORGANISM | Klebsiella oxytoca KCTC 1686 |
| | Bacteria; Proteobacteria; Gammaproteobacteria; |
| | Enterobacteriales; Enterobacteriaceae; Klebsiella. |
| REFERENCE | 1 (bases 1 to 5974109) |
| AUTHORS | Shin, S.H., Kim, S., Kim, J.Y., Lee, S., Um, Y., |
| | Oh, M.K., Kim, Y.R., Lee, J. and Yang, K.S. |
| TITLE | Complete genome sequence of Klebsiella oxytoca |
| | KCTC 1686, used in production of 2,3-butanediol |
| JOURNAL | J. Bacteriol. 194 (9), 2371-2372 (2012) |
| PUBMED | 22493189 |
| REFERENCE | 2 (bases 1 to 5974109) |
| AUTHORS | Shin, S.H., Kim, S., Kim, J.Y., Yang, K.-S. and |
| | Seo, J.-S. |
| TITLE | Direct Submission |
| JOURNAL | Submitted (21 Dec. 2011) Life Science Institute, |
| | Macrogen Inc., 10F, World Meridian Center, 60-24, |
| | Gasan-dong, Kumchun-gu, Seoul 153-781, |
| | Republic of Korea |

Reference Sequence for Klebsiella pneumoniae, Strain NC_009648 (http://www.genome.jp/dbgetbin/www bget?refseq+NC_009648):

LOCUS NC_009648 5315120 bp DNA circular CON 7 Feb. 2015

| | |
|---|---|
| DEFINITION | Klebsiella pneumoniae subsp. pneumoniae MGH |
| | 78578, complete sequence. |
| ACCESSION | NC_009648 |
| VERSION | NC_009648.1 GI: 152968582 |
| DBLINK | BioProject: PRJNA224116 |
| | BioSample: SAMN02603941 |
| | Assembly: GCF_000016305.1 |
| KEYWORDS | RefSeq. |
| SOURCE | Klebsiella pneumoniae subsp. pneumoniae MGH 78578 |
| ORGANISM | Klebsiella pneumoniae subsp. pneumoniae MGH 78578 |
| | Bacteria; Proteobacteria; Gammaproteobacteria; |
| | Enterobacteriales; Enterobacteriaceae; Klebsiella. |
| REFERENCE | 1 (bases 1 to 5315120) |
| AUTHORS | McClelland, M., Sanderson, E.K., Spieth, J., Clifton, |
| | W.S., Latreille, P., Sabo, A., Pepin, K., Bhonagiri, V., |
| | Porwollik,S., Ali, J. and Wilson, R.K. |
| CONSRTM | The Klebsiella pneumonia Genome Sequencing |
| | Project |
| TITLE | Direct Submission |
| JOURNAL | Submitted (6 Sep. 2006) Genetics, Genome |
| | Sequencing Center, 4444 Forest Park Parkway, |
| | St. Louis, MO 63108, USA |

Reference Sequence for Proteus mirabilis, Strain NC_010554 (http://www.genome.jp/dbget-bin/www_bget?refseq+NC_010554):

LOCUS NC_010554 4063606 bp DNA circular CON 7 Feb. 2015

| | |
|---|---|
| DEFINITION | Proteus mirabilis strain HI4320, complete genome. |
| ACCESSION | NC_010554 |
| VERSION | NC_010554.1 GI: 197283915 |
| DBLINK | BioProject: PRJNA224116 |
| Assembly: | GCF_000069965.1 |
| KEYWORDS | RefSeq; complete genome. |
| SOURCE | Proteus mirabilis HI4320 |
| ORGANISM | Proteus mirabilis HI4320 |
| | Bacteria; Proteobacteria; Gammaproteobacteria; |
| | Enterobacteriales; Enterobacteriaceae; Proteus. |
| REFERENCE | 1 |
| AUTHORS | Pearson, M.M., Sebaihia, M., Churcher, C., |
| | Quail, M.A., Seshasayee, A.S., Luscombe, N.M., |
| | Abdellah, Z., Arrosmith, C., Atkin, B., |
| | Chillingworth, T., Hauser, H., Jagels, K., |
| | Moule, S., Mungall, K., Norbertczak, H., |
| | Rabbinowitsch, E., Walker, D., Whithead, S., |
| | Thomson, N.R., Rather, P.N., Parkhill, J. |
| | and Mobley, H.L. |
| TITLE | Complete genome sequence of uropathogenic |
| | Proteus mirabilis, a master of both |
| | adherence and motility |
| JOURNAL | J. Bacteriol. 190 (11), 4027-4037 (2008) |
| PUBMED | 18375554 |
| REFERENCE | 2 (bases 1 to 4063606) |
| AUTHORS | Sebaihia, M. |
| TITLE | Direct Submission |
| JOURNAL | Submitted (18 Feb. 2008) Sebaihia M., Sulston- |
| | Laboratories, Wellcome Trust Sanger Institute, |
| | Wellcome Trust Genome Campus, Hinxton, |
| | Cambridge, CB10 1SA, UNITED KINGDOM |

Reference Sequence for Serratia marcescens, Strain NC_020211 (http://www.genome.jp/dbget-bin/www_bget?refseq+NC_020211):

LOCUS NC_020211 5241455 bp DNA circular CON 7 Feb. 2015

| | |
|---|---|
| DEFINITION | Serratia marcescens WW4, complete genome. |
| ACCESSION | NC_020211 |
| VERSION | NC_020211.1 GI: 448239774 |
| DBLINK | BioProject: PRJNA224116 |
| | BioSample: SAMN02602965 |
| | Assembly: GCF_000336425.1 |
| KEYWORDS | RefSeq. |
| SOURCE | Serratia marcescens WW4 |
| ORGANISM | Serratia marcescens WW4 |
| | Bacteria; Proteobacteria; Gammaproteobacteria; |
| | Enterobacteriales; Enterobacteriaceae; Serratia. |
| REFERENCE | 1 (bases 1 to 5241455) |
| AUTHORS | Kuo, P.A., Kuo, C.H., Lai, Y.K., |
| | Graumann, P.L. and Tu,J. |
| TITLE | Phosphate limitation induces the intergeneric |
| | inhibition of Pseudomonas aeruginosa by |
| | Serratia marcescens isolated from |
| | paper machines |
| JOURNAL | FEMS Microbiol. Ecol. 84 (3), 577-587 (2013) |
| PUBMED | 23398522 |
| REFERENCE | 2 (bases 1 to 5241455) |
| AUTHORS | Chung, W.C., Chen, L.L., Lo, W.S., Kuo, P.A., . |
| | Tu, J and Kuo, C.H. |
| TITLE | Complete Genome Sequence of |
| | Serratia marcescens WW4 |
| JOURNAL | Genome Announc 1 (2), E0012613 (2013) |
| PUBMED | 23558532 |
| REMARK | Publication Status: Online-Only |
| REFERENCE | 3 (bases 1 to 5241455) |
| AUTHORS | Chung, W.-C., Chen, L.-L., Lo, W.-S., Kuo, P.-A., |
| | Tu, J. and Kuo, C.-H. |
| TITLE | Direct Submission |
| JOURNAL | Submitted (26 Nov. 2012) Institute of Plant and |
| | Microbial Biology, Academia Sinica, 128 Sec. 2, |
| | Academia Rd., Taipei 115, Taiwan |

[0187] Raw paired-end sequencing data for the samples were mapped also against the respective pan-genomes with BWA 0.6.1.20, as above. The resulting SAM files were sorted, converted to BAM files, and PCR duplicates were marked using the Picard tools package 1.104 (http://picard.sourceforge.net/).

### Data Analysis

[0188] For the chromosomal model using the reference genomes, analysis was as follows:

[0189] The Genome Analysis Toolkit 3.1.1 (GATK) was used to call SNPs and indels for blocks of 200 samples (parameters: -ploidy 1 -glm BOTH -stand_call_conf 30 -stand_emit_conf 10). VCF files were combined into a single file and quality filtering for SNPs was carried out (QD<2.0∥FS>60.0∥MQ<40.0) and indels (QD<2.0∥FS>200.0). Detected variants were annotated with SnpEff22 to predict coding effects.

[0190] For matching the obtained SNPs in the reference genomes with the pan-genomes, the following analysis was carried out:

1. The gene containing the variant was identified (gene entry in the corresponding GenBank file of the reference genome), i.e. the genomic position of the variant must be within the gene start and end interval. The start and end positions of the subsequence containing the variant were determined as follows: Start was set to (genomic position of the variant−250 bases) and end to (genomic position of the variant+250 bases). If the start/end position were beyond the gene start/end then they were set to start/end positions of the gene.
2. The extracted variant containing subsequences were aligned against the pan-genome of the corresponding species using blastn.
3. The blastn results were filtered: Only matches with sequence identity >=80% and aligning >=80% of the variant containing subsequence were kept.
4. For each of the remaining matches the position of the variant within the pan-genome gene was determined.
5. These positions were searched in the corresponding filtered VCF files (i.e. VCF (Variant Call Format) file containing analyzed variants). For easier analysis, only the 50 SNPs with the best p-values in the SNP analysis were taken into account. Only variants which could be mapped to the pangenome and were found in corresponding VCF files were considered: They were coded as binary variables: 0=no reference allele, 1=reference allele, NA=missing.

[0191] Resistance profiles were determined with w.r.t. EUCAST MIC breakpoint guidelines (v. 4). Samples considered were only samples after filtering w.r.t. assembly quality and taxonomic assignment. For obtaining an optimized model, decision tree analysis was carried out as follows:

[0192] Model: Decision tree from R-package rpart; maximal depth=5, other parameters set to “force” more complex trees containing multiple features; the set parameters affect the number of features in the model

[0193] Selected results for the 6 different species are given in tables 2 to 7. In the tables, the column “drug” refers to the respective antibiotic used in each exemplary analysis, columns 2 and 3 refer to the model using only chromosomal nucleic acid sequences with the reference genome, and columns 4 and 5 refers to the model obtained using the pan-genome (that take into account both chromosomal and plasmid nucleic acid sequences) (termed “PG model”). Further, the term “B ACC” refers to the balanced accuracy, and the term “features” refers to the different SNPs that were used in the decision trees obtained for the respective models in tables 2 to 7.

[0194] The balanced accuracy was thereby used for analyzing the data as it gives more balanced results, as explained in the following.

[0195] The balanced accuracy is defined as the arithmetic mean of sensitivity and specificity=(sensitivity+specificity)/2 with sensitivity=TP/(TP+FN) and specificity=TN/(TN+FP).
[0196] TN=true negatives=susceptible and predicted to be susceptible
[0197] TP=true positives=resistant and predicted to be resistant
[0198] FN=false negatives=resistance, predicted to be susceptible
[0199] FP=false positives=susceptible, predicted to be resistance

[0200] It is a better performance estimate than accuracy ((TP+TN)/(number of samples)) in case of imbalanced datasets, e.g. if there are much more resistant samples when non-resistant ones or vice versa. In such cases accuracy may be high, although the “smaller” class is not predicted correctly, as seen in the following exemplary numerical case—the balanced accuracy is less biased by the data imbalance.

[0201] Exemplary numerical case: 11 samples are resistant, 51 are susceptible and TP=50, TN=1, FN=1, FP=10. Then accuracy=(50+1)/62=82.26% and balanced accuracy is (( 50/51)+ 1/11))/2=53.57%.

[0202] A comparison of the two models is only shown in the subsequent tables if both models have at least 2 unique variants.

TABLE 2
Results of Examples for Acinetobacter baumannii

| | B_ACC | number of | | PG model |
|---|---|---|---|---|
| | using only | features | B_ACC | number of |
| Drug | chromosome | (chromosome) | (PG model) | features |
| CP | 80.7 | 4 | 85.34 | 7 |
| IMP | 61.2 | 3 | 62.11 | 2 |
| LVX | 89.35 | 7 | 91.48 | 3 |

TABLE 3
Results of Examples for Escherichia coli

| | B_ACC | number of | B_ACC | PG model |
|---|---|---|---|---|
| | using only | features | (PG | number of |
| Drug | chromosome | (chromosome) | model) | features |
| CRM | 55.65 | 8 | 62.71 | 7 |

TABLE 4
Results of Examples for Klebsiella oxytoca

| | B_ACC | number of | B_ACC | PG model |
|---|---|---|---|---|
| | using only | features | (PG | number of |
| Drug | chromosome | (chromosome) | model) | features |
| CP | 93.05 | 3 | 93.76 | 2 |

TABLE 5
Results of Examples for Klebsiella pneumoniae

| | B_ACC | number of | B_ACC | PG model |
|---|---|---|---|---|
| | using only | features | (PG | number of |
| Drug | chromosome | (chromosome) | model) | features |
| A/S | 72.6 | 5 | 77.48 | 4 |
| AZT | 88.5 | 6 | 88.81 | 2 |
| CAZ | 87.65 | 6 | 87.98 | 4 |
| CRM | 79.65 | 7 | 81.83 | 4 |
| GM | 70.45 | 8 | 70.47 | 12 |

TABLE 6
Results of Examples for Proteus mirabilis

| | B_ACC | number of | B_ACC | PG model |
|---|---|---|---|---|
| | using only | features | (PG | number of |
| Drug | chromosome | (chromosome) | model) | features |
| AM | 70.75 | 2 | 74.46 | 4 |
| A/S | 51.3 | 2 | 62.91 | 2 |
| CP | 86.35 | 2 | 89.11 | 5 |
| LVX | 83.75 | 2 | 87.77 | 4 |
| T/S | 68.45 | 2 | 71.35 | 3 |

TABLE 7
Results of Examples for Serratia marcescens

| | B_ACC | number of | B_ACC | PG model |
|---|---|---|---|---|
| | using only | features | (PG | number of |
| Drug | chromosome | (chromosome) | model) | features |
| AZT | 58.7 | 8 | 69.67 | 5 |
| CAX | 58.1 | 5 | 68.08 | 2 |
| CAZ | 60.05 | 3 | 62.82 | 5 |
| CFT | 58.6 | 6 | 67.45 | 5 |

[0203] As can be seen from the tables, the balanced accuracy—and therefore the prediction of antibiotic resistance—improved for the different tested drugs all over the different bacterial species using the pan-genome approach.

[0204] It is noted that the number of features in the tables for achieving the best results in balanced accuracy often vary, which is a result of the optimization approach which was used in the present models for achieving these results and which were not limited to achieve certain comparable numbers of features in the decision trees. Notably, though, the variances in numbers of features shifts in both directions, i.e. sometimes more feature numbers are obtained in the model using chromosomal nucleic acid sequences only, and sometimes more feature numbers are obtained in the PG model, showing that there is no bias in any of the models for a higher number of features. Further, the data for the drug A/S for Proteus mirabilis actually had the same number of features for both models, which show that the effect is also independent of the number of features and can be obtained for a combination of at least two features. It is to be noted that the features in the two models in this case also differed. Overall an improvement in performance is seen when the pan-genome is used for analysis.

[0205] Further to the results in the tables, it was also again confirmed that a combination of more than one, e.g. i (being a natural number), variants performed significantly better than single variants. It was also seen in the data that the power of predicting genetic resistance increased if variants from different genes were selected.

[0206] While in the first step all i variants could have been theoretically selected from the same gene, the performance increased when j (again being a natural number) variants are selected that come from at least two different genes. Further improved results were obtained in the pan-genome model, as seen in the above tables.

[0207] In the examples, it was demonstrated that the performance of predicting resistance of the bacteria further increases if the full set of all genes in a pan-genome is used. By using the full genetic set available, we outperformed the results that are solely based on the bacterial chromosome.

[0208] As already stated above, notably the information described herein does not only refer to single variants (SNPs) and combinations of those. The same also applies for the abovementioned larger structural variations; also in this case the performance gets better if genes are analyzed using pangenomes in the bioinformatics analysis as compared to the performance when using a reference genome from a single isolate.

The application's sequence listing, which the Patent Office published only in electronic form, follows.

SEQUENCE LISTING (537429 sequences)

SEQ ID NO: 1 - DNA, 555 bp, Escherichia coli
atgcttattggctatgtacgtgtgtcaacaaatgaccagaacacagatctacaacgtaatgcgctgaactgtgcaggatgcgagctgatttttgaagacaagataagcggtacaaagtccgaaaggcctggactgaaaaaactgctcaggacattatcggcaggtgacactctggttgtctggaagctggatcggctggggcgtagtatgcggcatctggtcattctggttgaggagttgcgcgaacgaggcatcaactttcgtagtctgacggattcaattgatactagtaccccaatggggcgctttttctttcatgtgatgggggccctggctgaaatggagcgtgaactgattgttgaacgaacaaaagctggactggaagctgctcgcgcacagggacgaattggtggacgtaagccaaaactaacggatgagcagtgggcgcaggcagggagactaatcgctgcaggagaaacgcgtcagcgcgtagcattaatttatgatgtaggagtgtcaacactataccgaaaatttcctgtaggcagggattag

SEQ ID NO: 2 - DNA, 1509 bp, Escherichia coli
atgaaaccatccatagaacaacttctacatatctacgggccgatgtcctcatctgccttaagagaaaaactgatagccaatggcctaacagaagttaacgccagacagcgaatctcccgcgttggaggtgatgttcaacgttttactcatttttctttgcccaaaaatgaagcatttctctatctgacaaaggactataactctcgtcgatattggattgcattgcttgaaagtcatgtaaatgcaagaacagtctatgctcacacctttttcgctttccacccttatcaaggggcgatcccgacatatctttttagcaaggtttcagggagtccggacaaactgaagggacacattgcgtcaagccgtcttgaagcgcaattgcttaaaggttcagttctgcgtagggaagttgatgtcgttttgggggattgtcttgttacttacataaataatattaacggggtaacggatacccaacatgtccgaaaccaattgctggttgaagatattctcattaaaggtgtagctgactggattagacacaatggccttggcagctttaataaggtccaagtccgtaactctcagaatatgccttcatttagccatcaccattgggacatatgtgctccgtcatatattatgcctttagcaacagtacaaaaaggtgaaatgagtaatggcttcattgttgcagatgtcatatacaatgatttagatagcaaaagcatccaaacctatctcacgaaagtacagcgatgcagaaatatgcgaaatactcgcccgtttctagctatgctgattgcagaacgttttgatccagaagcctttcgccttgcgaaacaagctggtgtaatggctacaacagtatctaacctacttggtcaagacatttcagcactactgtccagtttattaaatactcttaatcgtgccggtgccattgcggcagcaaacccagaaaaaatcaatgaactatttaaaggacttacgaggattgaaggcgccgcaatcaatataagaggcgtaatgtttgaaatgttagttggtcacatcgtactgaaaacccaaaatgtcagcactgttgacttgaataaacaaatcagtaccgaggcaggtaaggctgaaatagatgtgattggttttagaggcgaagcagaaattaagtgctacgaatgtaaaggctatgaagttaagcgactaatttcagtcgaaatgatcgaaaagtggctcgaacgagttcaacgcatcagaaaattctacagtcagattcatgtgtaccgtgaccgaaaaatgactttttcattctggacctcatcagattttgaacctgaagcacttgagctgctgcttcatcagaagcaaagaaatacaaaaatatcattagactggaaaaatggacgtgacattctttccattgttaaggaagacaatctgaaatcaattgcagatgttcttcaggaacattatcttcgacacccactggctcctgatgcagatatgtaa

SEQ ID NO: 3 - DNA, 468 bp, Escherichia coli
atggaggatattatatttatgtatgctgggttgatagtgtcttctttagcggcaattgtaggcttagctacatctatcatgcatactcgtaaaaaagttaaggctaatgaagagcttgcaactgaaatggcaaagagctttagtgagcttgaatctatcaataaaagcataggggatttggaagcgacaattaaaaggatagatgaagatgaattaaagttaagaatagcaattgaatctttaaaggaaatgacttctgatgaaaaaaaagaatctagggatatgttgaaaaacatcgttaatgatgaggtgttcattaaagttcttctcgaaagctataaaaaactggatacccagtcaaagaaggagatttatttgactttttccaagtcgacagatagaggcctttatcgatatataaaaagaatagcttcatcagtactcgataacttaatggttaaaatataa

SEQ ID NO: 4 - DNA, 153 bp, Escherichia coli
atgctgggtggggaaagtatgaaggaaaagaaaactgctgcgctgtttgtcgtcacgtttatcttcattggctatgcaagtcataatacaaggtgggacaaaactgagacacataaggcctcacaatggcttgcaaggctttacatgttttga

SEQ ID NO: 5 - DNA, 339 bp, Escherichia coli
gtgaaactcaatgcccgtcaaatagacactgccaagccaaaagagaaggcttacaagttggctgatggtggtggtctgtacctcctggtaaaacctggtggaggagaatattggcgtctcaagtatcgtgtagctggtaaagagaagctgttagcactaggtgtgtatcctgaggtcaccttagctgatgctcctgcaaaacttgaagaagctaaaagaggtatctctgggggaatcgatctgatggaagtgaagcgagaggaaaagattgcccgggaaacgcagttaaacaacaccttcaaagatattgcccttgagtggcacagtaacaaattataa

SEQ ID NO: 6 - DNA, 525 bp, Escherichia coli
atgagttttcttttgccgtgtggtggaattatgaataatatagatttattaaaaactataacaaactacaaaaaaatcaaaaatccggcatacccggctcaggagagtctgttaatacacttatatattagagtaaatgacaaaatccagagtattatagaaaatgaattgagcgagtatagaataaacacttcaacatttatggtgttagtttcattatatatgtctgatgattattgtcagtccccttctgatatttacaaggagttacaactctccaaaacaaacatcacacacatcatagacaaattagaaaaaaagaatattgccaaaagaattaataataaaaacgatcgtcgaagcaaaagtatttgcttaacccctgacggagttacacttgctcaaaaactaataaacactcaaaatgtaatgctaaagaaaatctggagcgggctatcagatgatgaaatgaaaacatttgaactcgccaacaaaaaattattatcaaaccttaatgttaattga

SEQ ID NO: 7 - DNA, 4131 bp, Escherichia coli
atgaataaaatatacgctctaaaatattgttatattactaacacagtaaaggttgtctctgaactagcccgaagggtatgtaaagggagtacccgcagaggaaaaagactttcagtacttacctctctggcactatctgcattactcccaaccgttgctggtgcatcaacggttggtggcaacaatccttaccagacataccgcgactttgcagaaaacaaagggcagtttcaggctggcgcaacaaacattcctatttttaataataaaggggaattagtaggacatcttgataaagcgcccatggttgattttagcagtgtgaatgtaagctcaaatcccggcgttgcaacattaattaacccgcaatatatagccagtgtaaaacataataaaggatatcagagcgtcagcttcggtgatggtcagaacagttaccatattgtggatcgtaatgaacacagttcatctgatctccacacaccaagacttgataagctcgtaactgaggttgctccggctaccgtaaccagctcatcaacagctgatatattgaacccttcaaaatactcggcattctacagggctggttcgggaagtcagtatattcaggatagtcagggtaagcgacattgggtaacaggtgggtatggttatctgacaggaggaatactcccgacatcattcttttatcacggctcagacggcattcagctgtatatggggggcaacatacatgatcatagcatcctgccctcttttggagaggccggcgacagtggttctccattatttggctggaatacggccaaagggcagtgggaactggtcggtgtttactcgggagtaggaggggggaccaatttgatatattctcttattcctcagacttttctctcacagatctattcagaggataatgacgctcccgtcttttttaatgcctcatccggcgcccccctgcaatggaaatttgacagcagcaccggcactggctctctgaaacagggttccgatgaatatgccatgcacgggcaaaaaggttctgacctgaacgcaggtaaaaatctgacattcctgggacataatggtcagattgacctggaaaactctgtcacgcagggtgccggttcactgacatttactgatgactacactgtcaccacttcaaacggaagtacctggaccggggccggtattattgtggacaaggatgcctccgtaaactggcaggttaatggtgtgaaaggtgacaacctgcataaaatcggcgaaggaaccctggttgtacagggaaccggtgttaatgagggcggcctgaaagtcggggatgggaccgttgtcctcaatcagcaggctgacagttcaggacacgttcaggcattcagtagcgtgaatattgccagcggccgcccgacagtcgtgctggcagacaaccagcaggttaatccggacaatatatcctggggctaccgggggggtgttctggatgttaacgggaatgacctgacatttcataagctgaatgccgccgattatggcgcaactctcggtaacagcagtgataaaacggctaatatcactctggattatcagacgcatccggcagacgtaaaagttaatgaatggtcatcatcaaacaggggaacagtaggttcattatatatttataataatccctatactcataccgtcgattattttatcctgaaaacaagtagttatggctggttccctaccggtcaggtcagtaacgagcactgggaatatgtcggacatgaccagaacagtgcacaggcactgcttgcaaacagaattaataataaagggtatctgtatcatggcaagttgctgggaaatattaatttctcaaataaagcaaccccgggtacaaccggcgcattggttatggacggctcagcgaatatgtccggtacatttactcaggaaaacggtcgtctgaccattcagggccacccggttatccatgcttcaacgtctcagagtattgcaaatacagtctcgtctctgggcgacaattccgttctgacacagcccacctcatttacacaggatgactgggagaacaggacgttcagctttggttcgctcgtgttaaaagatacagactttggtctgggccgcaatgccacactgaacacaaccatccaggcagataactccagcgtcacgctgggcgacagtcgggtatttatcgacaaaaaagatggccagggaacagcatttacccttgaagaaggcacatctgttgcaactaaagatgcagataaaagcgtcttcaacggcaccgtcaacctggataatcagtcagtgctgaatatcaatgagatattcaatggcggaatacaggcgaacaacagtaccgtgaatatctcctcagacagtgccgttctggagaactcaacgctgaccagtaccgccctgaatctgaacaagggagcaaatgttctggccagtcagagttttgtttctgacggtccggtgaatatttctgatgccaccctgagtctgaacagccgtcctgatgaggtatctcacacacttttacctgtatacgattatgccggttcatggaacctgaagggagacgatgcccgcctgaacgtggggccgtacagtatgttgtcaggtaatatcaatgttcaggataaagggactgtcaccctcggaggggaaggggaactgagtcctgacctgactcttcagaatcagatgttgtacagcctgtttaacgggtaccgcaatacctggagcgggagcctgaatgcaccggatgccaccgtcagcatgacagacacccagtggtcgatgaacggaaactccacggcaggaaatatgaaacttaaccggacaatagtcggttttaacgggggaacatcatcgttcacgacactgacaacagataatctggacgcggttcagtcagcatttgtcatgcgtacagaccttaacaaggcagacaaactggtgataaacaagtcggcaacaggtcatgacaacagcatctgggttaacttcctgaaaaaaccctctgacaaggacacgcttgatattccactggtcagcgcacctgaagcgacagctgataatctgttcagggcatcaacacgggttgtgggattcagtgatgtcacccccacccttagtgtcagaaaagaggacgggaaaaaagagtgggtcctcgatggttaccaggttgcacgtaacgacggccagggtaaggctgccgccacattcatgcacatcagctataacaacttcatcactgaagttaacaacctgaacaaacgcatgggcgatttgagggatattaacggcgaagccggtacgtgggtgcgtctgctgaacggttccggctctgctgatggcggtttcactgaccactataccctgctgcagatgggggctgaccgtaagcacgaactgggaagtatggacctgtttaccggcgtgatggccacctacactgacacagatgcgtcagcaggcctgtacagcggtaaaacaaaatcatggggtggtggtttctatgccagtggtctgttccggtccggcgcttactttgatttgattgccaaatatattcacaatgaaaacaaatatgacctgaactttgccggagctggtaaacagaacttccgcagccattcactgtatgcaggtgcagaagtcggataccgttatcatctgacagatacgacgtttgttgaacctcaggcggaactggtctggggaagactgcagggccaaacatttaactggaacgacagtggaatggatgtctcaatgcgtcgtaacagcgttaatcctctggtaggcagaaccggcgttgtttccggtaaaaccttcagtggtaaggactggagtctgacagcccgtgccggcctgcattatgagttcgatctgacggacagtgctgacgttcacctgaaggatgcagcgggagaacatcagattaatgggagaaaagacggtcgtatgctttacggtgtggggttaaatgcccggtttggcgacaatacgcgtctggggctggaagttgaacgctctgcattcggtaaatacaacacagatgatgcgataaacgctaacattcgttattcattctga

SEQ ID NO: 8 - DNA, 216 bp, Escherichia coli
atggctaccgttactgttcattgtccgcgctgtaattccgataaagtttatcgacatggtcgtagttgttcccagcatgagcgtttccgttgtcgttcatgtaaacgtgttttccagctcacttactcttatgaagccagaaaacccggctttaaggagctgatcgttgaaatggcgcataatggcacaggggccgtgatatcgccagaacactga

SEQ ID NO: 9 - DNA, 615 bp, Escherichia coli
atgaatatatttgaacaaactccaccaaaccgcagacgttatggtcttgctgcattcattgggctgattgctggcgttgtttccgcatttgttaagtggggggcagaagttccattgccaccacgtagtccggttgatatgtttaatgcagcgtgtggtccggaatcattaatcagggctgcaggccaaattgattgctcccgtaactttctcaatcctccgtacatttttcttcgggattggttgggactgacagatccaaattcggctgtttataccttcgccgggcatgtctttaactgggttggtgtaacgcacataatcttttcgatagtttttgccgttggttactgtgtggtcgccgaagtatttccgaaaattaaactttggcagggcttactggcaggtgctttagcgcaactttttgttcatatgatttcattccctctcatgggacttacgccacctctctttgatcttccgtggtatgagaatgtctctgaaatttttggacatttagtctggttctggtctattgaaattattcgcagagatttacgaaacagaattacccatgagccagatcctgagatccctttaggctcaaatagataa

SEQ ID NO: 10 - DNA, 711 bp, Escherichia coli
atgttcaggcgacgtggcgtaacattaactaaggccctgctgacagtggtctgtatgctggcggcacctttgacacaggcgatttcggtcggcaatctgactttttcactgccgtccgagactgactttgtcagcaaacgtgtcgtgaataacaacaaaagcgcacggatataccgtattgccatcagtgctattgatagcccgggcagcagtgaattgcgcacccgaccggtggatggtgaactacttttcgccccccgccagctggcgttgcaggctggtgagagcgagtattttaaattttactatcatggcccacgggataaccgcgagcgctactaccgggtctcatttcgcgaggttcccactcgtaacctgacaaaacgcagccctaccggcggtgaggtcagcacggagccggtggtggtgatggataccattctggtagtacgaccacgtcaggttcagtttaaatggtccttcgatcaggtgaccggaacggtaagtaacaccggcaacacgtggtttaagctactgattaaaccaggatgtgattcgaccgaagaggaaggcgatgcctggtatctacgtccgggagacgtggttcatcagcctgagttacgtcagccggggaatcattatctggtctataacgacaaattcattaagattagcgattcctgtccggctaagcccccttcggcggactaa

SEQ ID NO: 11 - DNA, 1644 bp, Escherichia coli
atgagagttaacctactgatagcgatgataatctttgcgctaatctggcctgcaaccgcgctcagagcggcagtgagcaaaacaacctgggcggatgctccggcacgcgagtttgtgtttgtcgaaaacaactcagacgacaactttttcgtcactcctggcggggcgctggatccgcgcctgaccggtgccaaccgctggaccggtttaaaatacaatggttcaggaaccatctatcagcaaagcctcggctacattgataacggttacaacaccggcctttataccaactggaagtttgatatgtggctggaaaattcaccagtttcatctcctttaactggcttgcgctgcatcaactggtacgcagggtgtaatatgaccaccagtcttatcctgccgcaaaccaccgacgccagtggattttatggcgcgacggtgaccagcggcggcgcgaaatggatgcacggcatgttgtcagacgcgttttaccagtatctgcaacaaatgcccgtcggcagcagctttacaatgaccatcaatgcctgccagacctctgtgaactatgacgccagcagcggcgcacgctgtaaggatcaggcctccggcaactggtatgttcgcaacgtcacccatacgaaagcagcaaatctgcggttgataaatacccactcgctggcggaagtatttatcaacagcgacggagtaccgactctgggcgaagggaacgccgactgccggacgcaaaccatcggcagccgttcaggattaagttgtaagatggttaactataccctgcaaacaaacggactcagcaacacctcaatccatatattcccggcgatcgccaactcgtcgttagcctcggccgtcggggcgtacgatatgcagttcagtctgaatggcagttcatggaaaccggtgagcaatactgcctattactacaccttcaacgagatgaagagcgcagactcgatctatgttttcttctcgagcaacttctttaaacagatggtgaacctcgggatcagcgatatcaacaccaaagatctattcaactttcgctttcagaacaccacatcaccggagtctggctggtatgaattttctacctccaacacgctgattatcaaaccccgtgatttcagcatcagtattatctccgatgaatatactcagacaccgtcgcgggagggatatgtcggcagcggcgagtcggcactcgatttcggctatatcgtaaccaccagcggtaaaacagctgccgacgaagtgctgatcaaggtgaccggacccgcgcaggtgattggcgggcgctcctattgtgtcttcagctccgatgacggtaaggcgaaagtaccgttcccggcgacgctttcctttattacccgcaacggagctacaaaaacctacgatgccggatgcgatgatagctggcgggatatgaccgatgcgctgtggttgaccacaccgtggactgatatctctggcgaagtggggcagatggataagaccacagtcaaattttcgattccaatggataacgccatttctctgcgtacggtagatgataacggctggtttggcgaagtcagcgcttcaggagagattcatgttcaggcgacgtggcgtaacattaactaa

SEQ ID NO: 12 - DNA, 2526 bp, Escherichia coli
atgcctttacgacggttctccccaggactgaaagcccagtttgccttcggcatggtctttttgttcgttcagcccgatgccagcgctgctgacataagtgcgcagcaaataggtggggtgattattccgcaggccttcagtcaggcgcttcaggacggcatgagcgtcccgctctatattcatctcgccggtagccagggtcgccaggacgatcagcgaatcggcagcgcttttatctggttggatgatggacagttacgcatccggaaaatacagctggaagagagtgaagataacgccagtgtcagcgaacaaactcgacagcaactgatgactctggccaacgccccgttcaatgaggcccttaccatccccctgactgacaacgcgcagttggatctcagcttgcgccaactgctgctgcagctggtggtcaagcgcgaagcgctgggcaccgtactacgctcacgtagcgaagacatcgggcagtccagtgttaataccctcagcagtaatctgagctataacttcggcgtctataacaaccagttgcgtaacggcgggagcaacacctccagctatctgtcgctgaataacgttactgcgctgcgcgaacatcacgtggtgctcgacggctcactgtacgggattggtagcggtcaacaggacagtgaattatataaagcgatgtatgaacgcgattttgctggtcaccgatttgccggtggaatgctcgacacctggaacttgcagtccttagggccgatgaccgccatttcagcagggaagatttacggcctttcctggggaaaccaggccagctccaccatcttcgacagcagccagtcggccacgccagtgatcgcctttttaccggcggcgggcgaagtacatctcacccgtgatgggcggctactaagcgttcagaacttcaccatgggcaatcatgaagtggatacccggggtctaccgtacggtatttacgatgtggaagttgaggtaatcgttaacggtcgcgtgatcagcaaacgcacccagcgggtcaataagctgtttagccgggggcgtggcgtcggtgcaccgctggcgtggcagatatggggcggtagctttcatatggatcgctggtcggaaaacgggaaaaagacgcgaccagccaaagagagttggctggcaggtgcctcgacctccggctcactgagtacgtttagctgggcggcaacgggatatggatacgataatcaggcggtgggtgaaacccgtctgacgctgccgcttgggggggcgatcaacgttaacctgcaaaacatgctggccagtgacagctcatggagcaacatcgccagcatcagcgccactctacctggaggcttcagttcgctgtgggttaaccaggaaaaaacccgcattggcaatcaattgcgacgtagcgatgccgacaaccgtgcaatcggcggcacactcaacctgaactcactgtggtcgaagctgggtacgttcagcatcagctacaatgatgaccgccgctacaacagccattattacacggcagattactatcaaagtgtctacagcggtacctttggttcgcttggcctgcgggccggtattcagcgctataacaacggcgacagcagcgccaatacagggaaatatatcgctctcgatctctcgctaccactgggcaactggtttagcgcagggatgacccatcaaaacggctacaccatggcaaacctgtcagcacgcaaacagtttgatgaaggaaccattcgcactgttggtgccaatctgtcacgagccatctccggcgataccggtgatgacaaaaccctcagcggtggggcgtatgcacagttcgacgctcgttacgccagcggaacgctgaacgtcaatagcgcggcggacggctacatcaatactaatttgaccgccaacggcagcgtcggctggcagggtaaaaacatcgctgccagcgggcggaccgatggcaacgctggggtgatattcgacactggcctggagaacgatggtcagatcagcgccaaaattaacgggcggattttcccgcttaacggcaagcgtaactatctcccgctctctccctatggaagatatgaggtggagttgcagaacagcaaaaactcactcgacagttacgatatcgtcagcggtcgcaaaagtcatctgactctctatccaggcaatgtcgctgtcattgagccagaggtgaagcagatggttaccgtctccggtcgtatccgtgcggaagacggcacactgctggctaacgcacggattaacaaccatatcggccgaacccgaaccgatgaaaacggcgagtttgtcatggacgtggataagaaataccccactatcgattttcgctacagtggcaataaaacctgcgaagtggcactggaactcaaccaggcgcgcggtgccgtctgggtcggtgatgtggtctgcagcggcctctcatcgtgggcggcggtgacgcagacaggagaagagaatgagagttaa

SEQ ID NO: 13 - DNA, 669 bp, Escherichia coli
atgaaaaagcaccttctgcctctcgctctgctgttttccggaatatcaccggcccaggcgctggatgtcggcgatatatcatcgtttatgaacagtgacagcagcacgctaagcaaaacgatccaaaacagtaccgacagtggccgcctcatcaatatccgtctcgaacggctctcttcaccgcttgacgacgggcaggttatcgcaatggacaagccggatgagttgctactcactcccgccagcttgctgctacccgcccaagccagcgaagtgatccgcttcttctataagggaccagcagatgaaaaagagcgctactaccgcattgtctggtttgatcaggccctcagtgatgcgcagcgcgataatgccaaccgtagcgctgtggccactgcttccgcccgcatcggcaccattctggtcgtcgcaccccgccaggcgaactaccactttcagtacgccaacggctccttgacaaatacaggaaatgcgacgctgcggatcctcgcctacggcccctgcctgaaagccgccaatggtaaggagtgtaaagagaattactacctgatgccgggcaagtcgcgtcgttttacccgcgtggacacggcggataacaaaggacgggttgcactttggcagggtgataagttcattcccgtgaaatag

SEQ ID NO: 14 - DNA, 588 bp, Escherichia coli
atgaaaaaaaaggttctggcaatagctctggtaacggtgtttaccggtacaggtgtagcgcaggctgctgacgtaacagctcaggctgtagcgacctggtcagcaacagccaaaaaagacaccaccagtaagctggttgtgacgccactcggtagcctggcgttccagtatgccgaaggcattaaaggttttaactcacaaaaaggtctatttgacgtggctatcgagggtgactcaacggctaccgcctttaaactgacctcacgccttatcaccaacaccttaacccagttggatacctcaggttccacactgaatgtgggcgtggattataacggcgcggcagtcgaaaaaactggcgataccgtgatgatcgataccgccaacggcgtactgggcggcaaccttagcccactggctaacggttacaatgccagcaatcgtaccaccgcacaggatggtttcactttctccatcatcagcggcaccaccaatggtaccaccgcagtaaccgattacagcactctaccggaaggcatctggagcggcgacgttagcgtacagttcgacgctacctggaccagttaa

SEQ ID NO: 15 - DNA, 543 bp, Escherichia coli
atggaatgtcaaaaccgttctgataaatacatctggtctccccatgacgcctacttctataaaggactatctgaactgattgtggatatcgacagattaatttatctatcgctggagaaaatcagaaaagatttcgtgtttatcaatctcaatacggattctttaactgagtttataaaccgtgataatgagtggttatccgcggtaaaggggaaacaggtcgtattgattgcggccagaaagtcagaagccttagcaaattattggtattacaacagcaatattaggggcgtggtatacgctggactgagtcgtgatattagaaaagaactggcctatgtgattaatggcaggttcctgagaaaagatattaagaaagataaaatcactgaccgggaaatggaaattatccgcatgacggctcagggaatgctgcctaaatcgattgccagaattgaaaattgtagtgtgaagacagtgtatacccatcggcggaatgcagaggccaagctgtactcaaaattatataagttggttcagtaa

SEQ ID NO: 16 - DNA, 141 bp, Escherichia coli
atgaaagtccttaactctctgcgtaccgcaaaagaacgccatccagactgtcagattgtgaagcgaaaaggacggctgtatgtgatttgtaaatctaatccacgttttaaggccgttcagggtcgtaagaaaaaacgttga

SEQ ID NO: 17 - DNA, 267 bp, Escherichia coli
atgatgaaacccaatatccatcctgagtatcgtactgtggtgttccacgacaccagcgttgatgagtactttaaaatcggctcgactatcaaaacagaccgtgagattgagctggatggcgtaacgtatccgtacgtaacaattgatgtctcttcgaaatcgcacccgttctatacagggaagctgagaacagtggcatcagaaggaaatgttgcacggttcacccaacgttttggtcgttttgttagcacgaaaaagggggcatga

SEQ ID NO: 18 - DNA, 1143 bp, Escherichia coli
atgacaaataaacacccatcattgttttctccttttatgctgacagaaaaaataaagctacgtaatcgtatcattatggctcctatgacaacctggtcagctaatcctgatggaaccatctctgagcaagaactcgaattttataaacgtcgctcacaaaatgttggtttagtaataacaggatgcacctatgtcacgccaagcggcattgggtttactcatgaatttgccgcgtatgacgaccgtttcattaacagccttgaaaagttagcagctgcagccaaaagtggcggtgctccggctattttgcagattttccacgccggtaataaagccatcccggagcttgtgccaaataacgatgttattagtgccagcgcatcaagcgtaaaatctggtgactttatgaagagagtggtacaaagcagggaaatgactgaaaacgaaattcaggaaaccattagagcattcggagatgtcacaaaaagggcgattaaagcaggttttgatggcgttgaacttcatggtgcgcacggattccttctgcagaatttcttctcccctctatttaaccagcgtaatgaccgatggggaggagatcttgaaggacgtatgcgcttcccgctggccgtattacaggaagtaaaaaatgtagtctatgaatatgcgacaaagccctttgctatcggttacagaatatctcctgaagaatctgtaacaggggggctgcggatagaggatacttataaactccttgatcgactcatttcatccggtatttcgtatatacatacctcgctggtcagtattaacgatagctaccctgttgagtcgccaaatggcccccgaactattgaattaattttaaatcatattgcaggcagagtgccggtaatcgccgcaggtaaaatacgcacaccgtctcaggctcaagaagcaatttccgcgggcctgccacttgttgcgatcggtaaagggctggtgataaatccagaatgggtgactttagctgaatcaggtagaagtcatgaaattcaaacagcccttaatccacaacgcgttcctgaattaaccattccggataaactatgggatcaaattcaggcatcgaaaggaactggctggtttccgttaatggattaa

SEQ ID NO: 19 - DNA, 921 bp, Escherichia coli
atgaaaactgtttcgataaaacacacttactgggatatagctgctgatatctatttccctgacgattttaatagtgaaaaaaagtatcctgccattatcagtgcccatccaattggaagctgcaaagaacagacatcgggtagtgtgtatggtgccgccctggcaaaagctggctttatcgtcattgcttttgatgccagttttcagggaagcagcggtggagaaccgcgttatctggaagatccaacaatgcgagtaaaagacttcagcattgtcgttgattaccttaccaccttaccttacgttgatgccgggcgtattggtgtactgggtatttgtggtggaggtggatatgccattaatgccgcaatgacagaacgtcggattaaagccattggtactgtcacgggtgcaaactacgggcgtcttatgcgtgagggatttacagcgtttaatcctatcggagcactcgaagcaatggcgcaacaaagaacagacgaagctaacggcgcaaaacttcgcgtagatgatttgctcccttcttctccggaagcagctcttgaagcgggattaacagaaatagacctttttgaagcaacagaatattatcgttcgccacgaggctgtgcgcctaatggggtaaatcgttcgctattttcacatcagactgttgccgtgggctgggatgcttttcatcttgcagaagtcctgttaactcaaccactaatggttgtagtgggcgatagagtgggcgcttttggtgcctatcgtgacggctgcgaaattattggtcgtgcagcctcaaaacataaagaactggtcgtggttgaaggttattcacattacgacctgtatgataagccagaacctgtgaaacaggcgctcgataaattaattcctttttacaaaacacatttgtaa

SEQ ID NO: 20 - DNA, 927 bp, Escherichia coli
atgatgaaaatagagccttcaattttgccttctcttgcctggtttgcgctgattgttcgtgccggcagtttttccagagcagcctctgaaatgggtattacgcgggccgcattgtcccagaatttaaaatctcttgaggaacgtcttaacaccaagctgatataccgtacgacccgcaatatgtcgcttactgaggaaggacagcatctgtatgaagtgctggtgtcggctttggggcaaattgatgatgcgttgaaagatgtcggtgatacccaacttgaacctacaggactgttgagaataaattcctcccgtgttgcagcaaggatgcttgttgagcctcatattggcgagtttcttactcgttaccctaaaacaaagatagaactcattatggatgacggtttatctaacattattgcggacggctgtgatgtgggcatacgtcttgagcaaggactggatgagcatatgactgccgttcctgtttctccgcttattaaactggttactgtggcatcgccagattatttaaaagaacacggtattcctgaaactcctcaggaattgagtaaccataattgtcttcggttgcggcataaaagtagcggtgcactctcagcatgggagttttcgaatgttgtggggggtaatgaagagttcgaaatagaggtgtcaggtaagtatatttctaatgatgacgaaagcatgatacgaatggcgctgaatggaacgggtatcattcaacatctggattttgcaatcgctgaacatatcaatgcgggcaagttacagccgattcttgaggattgggccgtttcatttcctggattttatatatatgtttcatcacgggtgagaatgccctctaaagttcgtgcttttattgattttatggtggagaaaagagtaaaaatagaaagttaa

SEQ ID NO: 21 - DNA, 894 bp, Escherichia coli
atgctcaaagaaaacttcaacgaactgcaaatctttcttgtggtggcaagagagcgaagttttaccaaagcagcgggcaaactcggcgtctctcagtctgcacttagccatgcaatgaaggctctggaggaaaggctcaatatccgcctcctgacacggactacccgcagtgtggctcccacagaagcgggggagagaatcattgcctgccttgaaccgcgtattgacgagcttgaacaggaactggaatcacttattcaattgaacggcacgccctccgggaatattcggttatctgccggggaacatgccgcgcgaagtctgatctggccgaagctaaaaccttttctcagagagtatcccgaaatcaatgtcgaactggtggtggataacggttttgtcgatattgttgaaggccgttttgatgccgggatacgactgggtgaaaatgttgataaagatatggttgcagtcaggattggaccagatatgcgaatggctgtggtgggagctccggcgtattttgctgcaaaccctgcgcctgaaacgcctcatgagctacaaaatcatcgctgcatcaacatgcgtttgccaactgccggtgggctttaccactgggagttcgagcgagaagggaaaccgcttcgcgttaaggttgatgggcaactgacgtgtagtccattgccagaaagaattgatgccgcgttatcagggtttgggatcgcttgtgtccctgaagacatggttcaggagtatataaagtcaggcaagcttattcaggtattacaggagtggtgtccaacttttcctgggtattatctttactaccccagccgcaagcagcatccgccagcttttgcgctgttgatcgatgcgcttcgctacaccgaataa

SEQ ID NO: 22 - DNA, 990 bp, Escherichia coli
atgcaaaaacgttatctgggtaaatccggactcgaagtctccgcccttgggctcggttgcatgggcttaagccacggctacggcccggcgaccgatacccgtcaggctatcgaacttattcgtgctgcggttgaacgtggcgtcaccttcttcgataccgccgaagtgtatggtccgtatctgaatgaagaagtggtcggcgaagccttaaaaccgtttcgtgaccgcgtggtaattgccactaaattcggttttaccttcggcgatgataataagcagcagattttaaacagccgtccggaacatatccgtgaagccgttgaaggatcattacgtcgtctgaaaacagatgttattgacctgctgtatcaacaccgtgttgatccagatgttcctattgaagatgttgcaggaacggtgaaagacctcatcgcagaaggtaaggtcaaacatttcggcctgtctgaagcaggagcacaaaccattcgtcgtgcacatgcggtacaacctgtcaccgccctgcaaagcgaatattccatgtggtggcgtgagcctgaacaggaaattctgccgttgctggaggaactgggaattggttttgtccccttcagcccactaggtaaaggtttcctgacaggggcgattaagccgggaaccactttcggcaaagatgattaccgcagcaccgtaccgcgtttcgcagcacaagccattgaagccaatgaaaaactggtcaccttgttaggtgaactggctgcggagaaaggggtaacgtctgcacaaatcgcactggcatggctattagcacaaaagccgtggattgttcccatccctggcaccactaaactgcaccggctggaagaaaacctggccgctgctgacattgttctttcgcagaaagatacgcagcagataagcgaggcgctggaaacaattaaaatcgtcggtgaacgttactcgcctgaacatcaggcacgcgtaggccgctaa

SEQ ID NO: 23 - DNA, 852 bp, Escherichia coli
atgcaaaaagtaaaactgaacaacggtattgaaatgcccctgttgggctttggtgtatttcagatgaccgatgccgccgaatgcgaaagagcggtcattgacgctattaacagcggttatcgactgattgacaccgccgcctcttatcaaaatgaaatccaggtcgggaacgcactgaaacaaagcggtatcgcccgtaacgaactctttgtcaccacgaaactctggttgcaggataccagttacgaaggggccaaagcccagttcgaacgctctctgaatcgactgcaacttgattacgttgacctgtacttgattcaccagccatatggcgatgtccacggggcctggcgtgccatggaagagctgcaacaggccggtaaaattcgcgctattggcgtcagtaacttccatcctgaccgactggcagaccttatcgcttttaataacgtcgttccggcggtaaaccaggttgaagttaaccctttcaatcagcagctacaggccgttccctggatgcaaagtcgtggcattcagccagaagcctgggcaccgtttgcggaagggaaaaatggtctgttccagcatcctgttctcacggcaattggcgagaagtatggcaaaagcgtgggccaggtagttctgcgctggatctaccaacgaggcattgtttcactggcaaaatcagtgcgaaaagaacgcatggaagagaacatcaacattctcgattttgaactcagccctgaagatatgctgcaaattaccgccctggataccgcaaccagcgcgttcttctctcaccgcgatcccgcaatggtggaatggctgactggccgcaaacttgatgtttaa

SEQ ID NO: 24 - DNA, 4251 bp, Escherichia coli
atgtcacgttataaaacagacaataaacagccacgatttcgttattcagttctggcccgctgcgtggcgtgggcaaatatctctgttcaggttctttttccactcgcagtcacctttacgccagtaatggcagcacgtgcgcagcatgcggttcagccacggttgagcacggaaaatactacggtaactgctgataataacgtggagaaaaatgtcgcgtcgcttgccgctaatgccgggacatttttaagcagtcagccagatagcgatgcgacacgtaactttattaccggaatggccaccgctaaagctaaccaggaaattcaggagtggctcgggaaatacggtactgcgcgcgtcaaactgaatgtcgataaaaatttctcgctgaaggactcttcgctggaaatgctttatccgatttatgatacaccgacaaatatgttgttcactcagggggcaatacatcgtaccgacgatcgtactcagtcaaatattggttttggctggcgtcatttttcagaaaatgactggatggcgggggtgaatacttttatcgattatgatttatcccgtagtcatacccgcattggtgttggtgcggaatactggcgtgattatttgaaactgagcgccaatggttatatccgggcttctggctggaaaaaatcgccggatgttgaggattatcaggaacgcccggcgaatggctgggatattcgtgctgagggctatttacctgcctggccgcagcttggcgcaagcctgatgtatgaacagtattatggcgatgaagtcgggctgtttggtaaagataaacgccagaaagatccacatgcgattaccgctgaagtgaattacacgccagtgcctcttctgaccctgagtgccgggcataagcagggcaagagtggtgagaatgacactcgctttggcctggaagttaattatcggattggcgaacctctggaaaaacaactcgatacagacagcattcgcgagcgtcgaatgctggcaggcagccgctatgacctggttgagcgtaataacaatatcgttcttgagtatcgcaaatctgaagtgatccgtattgctctgcctgagcgtattgaaggcaagggcggccagacggtttccctggggcttgtggtcagcaaagcaactcacggtctgaaaaatgtgcaatgggaagcgccgtctttgctggccgcaggcggaaaaattacggggcagggcaatcagtggcaagtgacgctcccggcttatcaggcaggcaaagacaattattatgcgatttcagcgattgcctacgataacaaaggcaatgcctcgaaacgtgtgcagacagaagtagttattagcggagctggtatgagcgccgatcgtacggcgttaacgcttgacggtcagagccgtattcaaatgcttgctaacggtaatgagcaaaagccgctggtgctgtctctgcgcgacgccgagggccagccagtcacgggcatgaaagatcagatcaagactgaactaaccttcaaaccggctggaaatattgtgactcgtaccctgaaggccactaaatcacaggcaaagccaacactgggtgagttcaccgaaactgaagcaggggtgtatcagtctgtctttactaccggaacgcagtcaggtgaggcaacgattactgttagcgttgatgacatgagcaaaactgtcactgcagaactgcgggccacgatgatggatgtgtcaaactccaccctgagtgctaacgagccgtcaggtgatgtggttgctgatggtcagcaagcctacacgctgacactgacagcggtggactccgagggtaatccggtgacgggagaagccagccgcctgcgacttgttccgcaagacactaatggtgtaaccgttggtgccatttcggaaataaaaccaggggtttacagcgccacggtttcttcgacccgtgccggaaacgttgttgtgcgtgccttcagcgagcagtatcagctgggcacattacaacaaacgctgaagtttgttgccgggccgcttgatgcagcacattcgtccatcacactgaatcctgataaaccggtggttggcggtacagttacggcaatctggacggcaaaagatgctaatgacaaccctgtaactggcctcaatccggatgcaccgtcattatcgggcgcagctgctgctggttctacggcatcaggctggacggataatggcgacgggacctggactgcgcagatttctctcggcactacggcgggtgaattagacgttatgccgaagctcaatgggcaggacgcggcagcaaatgcggcaaaagtaaccgtggtggctgatgcattatcttcaaaccagtcgaaagtctctgtcgcagaagatcacgtaaaagccggtgaaagcacaaccgtaacgctggtggcgaaagatgcgcatggcaacgctatcagtggtctttcgttgtcggcaagtttgacggggaccgcctctgaaggggcgaccgtttccagttggaccgaaaaaggtgacggttcctatgttgctacgttaactacaggcggaaagacgggcgagcttcgtgtcatgccgctcttcaacggccagcctgcagccaccgaagccgcgcagctgactgttattgccggagagatgtcatcagcgaactctacgcttgttgcggacaataaaactccaacggttaaaacgacgacggaactcaccttcaccgtgaaggatgcgtacgggaatccggtcaccgggctgaagccagatgcaccagtgtttagtggtgccgccagcacggggagtgagcgtccttcagcaggaaactggacagagaaaggtaatggggtctacgtgtcgaccttaacgctgggatctgccgcgggtcagttgtctgtgatgccgcgagtgaacggccaaaatgccgttgctcagccactggtgctgaatgttgcaggtgacgcatctaaggctgagattcgtgatatgacagtgaaggttaataaccaactggctaatggacagtctgctaaccagatcaccctgaccgtcgtggacagctatggtaacccgttgcaggggcaagaagttacgctgactttaccgcagggtgtgaccagcaagacggggaatacagtaacaaccaatgcggcagggaaagtggacattgagcttatgtcaacggttgcaggggaacttgagatcgaggcctcggtgaaaaactctcagaagacggtcaaggtgaaattcaaggcggatttcagtaccggtcaggcgagcctggaggtagacgccgctgctcaaaaagtggcaaacggcaaagatgcctttacgctgacggcaacggttaaggatcaatacggcaaccttcttcctggcgctgtggtcgtctttaatctgcctcggggcgtcaaaccgcttgcagacggtaatatcatggtgaacgccgacaaggagggtaaagcggaactgaaagtggtttccgtgactgccggaacctatgagatcacggcgtcagcaggaaatgaccagccttcgaatgcgcagtctgtaacgtttgtggctgataagactacggcgaccatctccagtattgaggtgattggcaaccgtgcagtggcggacggcaaaaccaaacagacgtataaagttacggtgactgatgccaataacaacctgctgaaagatagcgaagtgacgctgactgccagcccggaaaatttagttctgactcccaatgggacggcgacaacgaatgagcaagggcaggctattttcaccgccacgaccactgtcgcagcgacatatacactcacggcgaaagtggaacaggccgacggtcaggaatcgacgaaaactgccgaatctaaattcgtcgcggatgataaaaacgcggtgctcgctgcatctccagagcgtgtagattctctggtggcggacgggaagactactgcaacactgacggttactctgatgtcgggtgtcaaccccgtaggaggaaccatgtgggtcgacattgaggctccggaaggggtgacagaggcggattatcagttcctgccgtcgaaaaatgaccatttcgcgagcgggaaaatcacgcgtacatttagtaccaacaagccaggtacatacacattcacattcaactctttgacatatggagggtatgaaatgaaaccagtgactgtgacaattaacgccgttcctgcagatactgaaggcgctgaggagaaataa

SEQ ID NO: 25 - DNA, 858 bp, Escherichia coli
atgatcaggcagaagattctacagcagctcctggagtggattgagtgcaatcttgagcaccctatttcaatcgaagatatcgcacagaaatctggctacagcagacgcaacatccagcttctgttccgaaatttcatgcatgtgcctttgggagaatacattcgcaaacgaaggctttgtcgtgccgccattcttgtccggctctccgcgaaatctatgcttgatattgcactctctttgcattttgattcacagcagtcattcagccgcgaatttaaaaagttattcggctgctctccccgtgaataccgccaccgtgattattgggatctcgcaaatatcttcccttcttttttaatacgtcaacagcaaaagacggagtgtagattagtcaactttcctgagacacctatttttggcaattcatttaaatatgatattgaagtgtcgaataaattaccggatgaagaagtcaaactgcgacgtcatcatttagtcagatgtatgaagaattttaagacggatatctatttcgtctccacgttcgaaccatcaacaaaatcggtcgatttgctcacagttgaaacttttgccggtacggtatgcaaacaaaccgattcagagatgccgaaagagtggacaattaaccgaggactgtatgcctctttccgctatgaaggtgagtgggagcactaccctgaatgggcgcgaaacctctatctgatggaattacctgccagggggttagccagagtgaacggcagtgatattgagcgattttattacaatgaaaacttcgtcgaaattgatagcaataacattgtttgcgaaatttttatccccgttcgcccggtttag

SEQ ID NO: 26 - DNA, 870 bp, Escherichia coli
gtggaattttccgtattaagtaacaatctgaaaatgccgatgatgggatttggtgtttttcaggttaccgataaagacgtgtgcaaacagtcagtgttgaatgctatccgcacgggttatcgactcatcgacactgcagcggtatacggtaatgaagatgccgtcggtgaagccgttcgtgaagccatatctgaaggtttatgtacccgagaagagttatttataacgtctaaattgtgggtgcaggatatgttgaatcaggatattgcagcagcaggtattgaagcatcattaaaaaaatcggggctagaatacttcgatctctatttattgcaccaggccatgcgcgattattttagtgcgtggcgtgcactcgaagatgcctatgaagagggcaaattaaaagcgattggggtttccaatttctaccctcatgttctggcgaacttttgtgaaacggtaagagttaaaccgatggtcaaccaggtcgagttgcatccctattttgcccaaccagaggcgctggcaaccatgaagtattataacgtgcagcctgaagcatgggctccgttaggtggtggacgacataaaccctttgaaaataatctgcttcagagtattgcagatgcccatcaaaaatcgatttctcaggtcattctgcgttggaatattcaacggggagtggtcgttattccgaaatcgacacatcaacagcgtatcgaagaaaattttgctatttgggatttctcactgacagagaaagaaatggcgcaaattagttcgcttgatttgggttatgttggggaatcggtaaaacattttaatcctgagtttgttcgtggttgtcttgctgtaaaaatacatgattga

SEQ ID NO: 27 - DNA, 594 bp, Escherichia coli
atggaaagatacctgcacctgttaagtcggggagataaaattggcctgacattgattcgtctgagtattgcgattgtttttatgtggattgggttattaaagtttgtcccttacgaggcagacagcattacaccattcgtcgcaaacagtccactaatgtcgttcttttatgaacacccggaagactataaacagcatctgactcacgaaggcgaatacaaaccagaagcaagagcatggcaaacggctaataatacctatggtttttccaacggtcttggcgtcgtggaggtgattattgctctgctggttttggctaatcctgtcaatcgctggttaggtttattgggtgggctgatggcatttaccacgccgctggtaacactctcatttttaatcaccaccccggaggcatgggtacccgcattgggtgacgctcatcatggtttcccttatttatccggtgctggtcgtctggtattgaaagatactctgatgctggcaggtgctgtcatgataatggcagattcggcgcgggatattcttaaacaacgcagtaatgaatccagttcaacgttaaaaactgaatattga

SEQ ID NO: 28 - DNA, 1326 bp, Escherichia coli
atgaataaatatcaggcagttattattggttttggcaaggctggaaaaacattagccgtcacgctggcaaaagcaggttggcgtgtggctctcatcgaacaatcaaatgcaatgtatggcgggacctgtattaatatcggctgtatcccaaccaaaacattggttcatgacgcacagcagcacacagattttgtccgtgccatacagcgtaaaaatgaagtggttaattttttacgtaataagaattttcataatcttgcggatatgcccaatatcgacgtgatcgacggccaggcggagtttatcaataatcatagcctgcgtgttcatcggcctgggagaaatctggagattcatggcgagaaaatttttattaataccggtgcacaagccgtggttccgccaattcctggaattaccaccacgcctggtgtatatgacagcaccggattacttaatctaaaagaattgcctgggcatttaggtattttgggcggcggatatattggcgttgagttcgcctctatgttcgctaattttggcagcaaagtaaccattttagaggcagcttcgctgtttttgcctcgggaagatcgggatattgctgataatatcgcgacgattttacgcgatcagggtgtcgatataatcctcaatgcccatgtggagcgaatcagtcaccatgaaaatcaagtgcaagtgcatagcgagcacgcccaactggcggtggatgcactgttaatagcttccggtcgtcaaccggctaccgcttcgttacatccagaaaatgcaggtatcgcagtaaacgagcgcggggcaattgtcgttgacaagcaattacataccaccgcagacaatatttgggcgatgggagatgttaccggcgggctgcaatttacttatatttcactggatgattaccgcattgtgcgtgatgagttgctgggagaaggcagacgtagtactgatgatcggaaaaatgtgccttattccgtattcatgacaccgccactgtccagggttggtatgacagaagaacaggccagagagagtggtgctgatattcaggtggtgacattgcctgtagctgcaattccgcgtgccagagtgatgaatgatactcgtggggtattaaaagcgattgttgataataaaacccaacgtatattaggggcatcactgctgtgtgttgactcccacgagatgatcaatatagtgaaaatggtgatggatgccgggctgccttatagcatattacgcgatcagatatttactcatccgtcgatgagcgaatcactcaatgatctattttcattagtcaaataa

SEQ ID NO: 29 - DNA, 855 bp, Escherichia coli
atggatgctcttagccgtttgttgatgcttaacgctccacaaggaacgatcgataagaattgcgtgttaggaagtgactggcaacttccacatggtgccggggaattgtcggttattcgttggcatgcgttaacgcaaggagcggcgaagctggaaatgccgacgggagagatttttacattacgcccgggaaatgtggtcctgctaccacaaaattcagctcatcgcctgagtcatgtcgataatgaatcgacctgtattgtctgtggcactcttcggctgcaacattcggcgcgttattttttaacgtctttgccggaaacgctgtttgtagcaccagtgaaccatagcgtggaatataactggctgagggaggcgatcccgtttttacaacaggaatccagatcggcaatgccgggagtggatgctctgtgtagccagatctgcgctacattctttaccctcgcggtgcgtgagtggattgcacaggttaatacagagaaaaacattctcagtttgcttctgcatccacgtcttggtgcggtaatacagcaaatgatggaaatgcctggacacgcctggaccgtcgaatcgctggccagcatcgcccacatgtcccgggcaagttttgcccagcttttccgtgatgtttccggaaccacgccgctggctgtattaacaaagttgcgtctacaaatagcggcccagatgttttcccgggaaatgctccctgttgtggtgatcgctgagtcagtaggctatgccagcgaatcatcttttcacaaggcgtttgtccgcgagtttggttgtactccgggagaatatcgggaaagggtcagacagcttgcaccctga

SEQ ID NO: 30 - DNA, 720 bp, Escherichia coli
gtgaatgtcaatttctttgtcacctgcattggtgacgccctgaaatcaagaatggcacgagactccgtgctgctactggaaaaactcggctgtcgcgtaaatttcccggagaaacaaggatgctgcggtcagcctgcgatcaatagtggttatatcaaagaagcgattccagggatgaaaaatctgatcgccgcactggaggataacgacgatcccattatttcaccggctggctcttgcacctatgccgtaaaaagttacccgacgtatctggcggatgaacctgaatgggcatcacgtgccgaaaaggttgccgcgcgtatgcaggatctcacctcttttattgttaatacattaggggtagtcgatgtaggtgccagtttgcaagggagagcggtgtatcacccatcttgtagcctggcccgtaagctgggggtgaaggacgaaccacttacgctgctgaaaaatgtgcgtggactggagctgttgacctttgctgaacaggatacctgctgcggatttggcggcacgttctcggtcaaaatggccgaaatatccggcgagatggtgaaagaaaaggttgcgcacctgatggaagtccgccctgagtatttaattggtgctgacgtgagttgcctgctgaacatcagtggacgattacaacgggaagggcagaaagtcaaagtgatgcatattgctgaagtgctgatgagccgctga

SEQ ID NO: 31 - DNA, 1428 bp, Escherichia coli
atgtcgatcaaaaccagtaatacagattttaagacacgcattcgtcagcaaattgaagatccgatcatgcgcaaagcggtggcaaacgcgcagcagcgtattggggcaaatcggcaaaaaatggtcgatgaattggggcactgggaggagtggcgcgatcgggccgcccagatacgtgatcatgttctgagtaatctcgacgcttatctgtaccagctctcagaaaaagtgacgcaaaacggaggtcacgtctattttgcaaaaaccaaagaagacgccacccgctacattttacaggttgcccaacgcaaaaatgcccggaaggtggtgaaatctaaatcgatggtgaccgaagagattggtgtcaatcatgtgttgcaggatgccgggattcaggtgattgaaaccgatctgggtgaatacattctccagctggatcaagatccgccctctcatgttgtggtcccggcaattcataaagatcgccatcagatccgtcgagtgctacacgaacatctgggctatgaggggccggaaacgcctgaagcgatgaccttattcattcggcaaaaaatccgcgaagatttcctcagtgctgaaataggtattaccggctgtaatttcgcggtggcagagaccggttcggtatgcctggtgaccaatgaaggtaatgcgcgaatgtgtaccacgctgcctaaaacgcatattgcagtgatgggaatggagcgtattgctcccacgtttgcagaggtagatgtattgatcaccatgctggcgcgcagtgccgttggtgcacgtttgacgggatacaacacctggctgacaggaccgcgcgaagcggggcacgttgatggtcctgaagagtttcatctggttattgtcgataacgggcgttctgaggtgctggcctctgaatttcgggatgtgctgcgctgtattcgttgcggggcttgtatgaatacttgtccggcatatcgccatattggcggtcatggatatggctctatttatccagggccaattggtgcggtgatttccccgttacttggcggctataaagattttaaagatttaccctacgcctgctctttatgcaccgcttgtgacagcgtgtgtccggtgcgtattccgctgtcaaaactgattttgcgtcatcgtcgggtgatggctgaaaaagggatcaccgcaaaagcagagcaacgggcgataaaaatgttcgcttatgccaatagtcatccaggattgtggaaagttgggatgatggctggtgctcatgcggcaagctggtttatcaatggcggcaaaacaccactcaaatttggcgcgattagcgactggatggaagcacgcgatcttcctgaagctgacggagagagtttccgtagttggtttaagaaacatcaggcgcaggagaaaaagaatggataa

SEQ ID NO: 32 - DNA, 687 bp, Escherichia coli
atggataatcggagcaaatttttgaataacgttgctcaggcactggggcgcccgctgcgacttgaaccgcaagcagaagatgcgccgcttaacaactatgctaacgagcggcttacccaacagcagcgctgtgacgcgtttatccagtttgccagcgatgttatgttgacgcgctgtgaactgaccagcgaggcgaaggcggcagaagctgcaatacgtctgtgtaaagagctgggagatcagtcggtcgtgattagtggtgacacgaggctggaggaattggggattagcgaacgtttgcagcaggaatgcaatgccgttgtttgggatccggcgaaaggtattgagaacatatcacaagcagagcaggctaaagtgggcgtcgtatatgctgaatatggtttaaccgaatcgggaggcgtggttcttttttccgccgccgggcgcgggcgttcattgagcctgctcccggaatcttctctttttatcctgcgtaaaagcacaatcctgccgcgtgtagcgcaactcgcagaaaaattgcatcagaaagcgcaggccggtgaacgaatgccgtcatgtattaacatcatcagtggtcccagttcaacggcggacattgagcttatcaaagtcgtcggggttcatggtccggtgaaagcggtgtatctgattattgaggattgctga

SEQ ID NO: 33 - DNA, 669 bp, Escherichia coli
atgaatgaacaaatcaaacaggatatcgatctgattgagattttattttatctgaagaaaaagattcgtgttatcctttttattatagctatctgtatggcaatggtgctgttgtttctgtatatcaataaagataatataaaagtgacttacagtctaaaaataaaccagacaacaccaggcatacttgttagctgtgatagcaataataactttgcctgtcagaccacaatgactgaagatgttattcagcgaattactacattttttcagaccagcccagatgtcaagaacagagaaataaagctggaatggtcaggagataagagagatttaccaactgctgaagaggaaatatctcgcgtgcaggcgtctatcatcaaatggtatgcgtcagaataccataatggcaggcaagttctcgatgagatacaaacgccttcagcaattaacagtgagctttatacaaaaatgatatacctgaccaggaactggtcactgtatccgaacggtgatggctgtgtcactataagctcaccagaaataaaaaataaataccctgctgccatttgcctggctctgggattttttctaagtattgtgatttctgtgatgttttgccttgtcaaaaaaatggtagatgaataccaacaaaactctgggcagtaa

SEQ ID NO: 34 - DNA, 2298 bp, Escherichia coli
atgaaaaacagtaaggcattttaccgcagcgcattagcgacagctattgttatggctctttctgcaccagcattcgctactgatagcacggtatcaactgatccggttacgctgaatacagagaagacgactctggatcaagatgttgttattaacggtgataacaagattacagccgtaacaattgaaacgtcagattcagataaagaccttaatgttacttttggcggtcacgatattaccgccgcatcaacggtaaaccaagatttcgttgaaggtgtaaaagttagtggtaacaaaaatgttgtgattaatgctacagactccaccatcacagctcaaggtgaaggcacctatgtccggactgcaatggtcattgattcaactggcgatgttgttgttaatggcggtaatttcgttgcaaaaaatgaaaaaggtagtgcgacagggatatctctggaagcgaccacgggaaataatttaacgctcaatggtacaaccataaatgctcaaggtaataagagttacagcaacggctctacggcaatttttgctcaaaagggtaatttgttgcagggttttgacggtgatgcaaccgacaacatcacccttgctgactcaaatattattaatggcgggattgaaacaatagttactgccgggaataagacgggaattcatacagtcaacctgaatattaaggatggctcagtaattggggcggctaataataaacaaacaatttatgcctctgcttcggcgcaaggcgcaggttcagcaacgcaaaatttaaatttgtctgttgctgattcaaccatctactctgatgtcctggccctttcttcaagcaatagttcagtcggtaccacaacaaatgtaaacatgaacgttgcccgctcttactgggaaggtaatgcttataccttcaatagcggcgataaagcgggtagtaatctggatataaatctttccgatagttcagtctggaaaggcaaagtttcaggggcaggagatgccaacgtatctctgcaaaacgggtctgtctggaatgttacgggttcctcaactgttgatgctctggcagtaaaagacagtacggttaatatcacgaaggctacagtcaatactggcacgtttgcttctcaaaacagcactctgattgttgatgcctcttctgaaaacaccctggatatcagcggtaaagcgagcggtgacttgagtgtttacagtgcgggttcattggatcttatcaatgaacaaacggcatttatttctaccggcaaagacagcactctaaaagccacaggcacaacggaaggtggtctgtatcaatatgacctgacacagggagctgatggtaacttttatttcgtaaaaaacacgcataaagcatccaacgccagctccgtgattcaggcaatggcagctgctccggctaacgtcgctaatctgcaggctgacacgctctccgcccgtcaggatgctgtccgtctgagcgaaaatgacaagggtggcgtatggattcagtactttggcggtaaacagaaacataccaccgcgggaaatgcatcctatgacctggatgtaaatggtgtaatgctgggtggtgatacccgcttcatgactgaagatggtagctggctggccggtgtggcgatgtcttctgcgaaaggtgacatgactaccatgcagagcaaaggtgacactgaaggttacagcttccacgcttacctgagccgccagtataacaacggtatcttcattgatactgctgcacagtttggtcactacagcaacacggcagatgttcgcctgatgaatggtggcggtaccatcaaagctgactttaacaccaatggttttggtgcgatggttaaaggcggttacacatggaaagacggtaatggcctgtttattcagccatatgccaaactgtctgctctgactctggaaggtgtggattatcaactcaacggcgtggacgttcattctgacagctataactctgtgctgggtgaggccggtacgcgcgtgggttatgacttcgctgtgggcaacgcgaccgttaaaccttatctgaatctggccgcactgaacgaattctctgatggcaacaaagtccgtctgggtgatgagtctgtcaatgccagcattgacggtgcagcattccgcgtgggtgcaggtgtacaggctgatatcaccaaaaacatgggagcatatgcaagccttgactacaccaaaggtgacgacattgagaacccgctacagggtgtagttggtatcaatgtgacctggtaa

SEQ ID NO: 35 - DNA, 762 bp, Escherichia coli
atgcgtttcgttcttttctgtccctcaggaattgtaccagcgcagttcgcagctctatcaaccggttctgtcggcaatgttacctgcatcagaacagaagaggagttacgcaataaattgcggcacaggccacagagtgtcgtgatatcggcagggcgacctgccgaatgcgctgaaatgtggttccgattttatcgggatcactcattcgtggtggtgttgtgcgtcgcgcccttttttctgccaccggatgtgagtatttctggcgttctcaaaaacctgaggttactgaaaccaggaatgtcagtagagcgtgtcatcagtattgcaaatgcctctggtgggttttcagggctgaagcatgcagaaattttgccagttatggacagttactctgtctttatgaaagaggtgaataactgcacaaagacaatcgtcatgtcagaacgcttcccggaaaagcaaaagaaggtgttgtcgttacttcttgccggacacagctgggaatacagtgcgcagtttctcaaaacggggataagacagatatggcttgccgagcagtcgctaaaaaagcgttggggaataccggacagcatgtcattgcgggaagccctgctgctgagcagcaataattttcacggtgatggaaatgcattggaaacaacgaatgccatgacattgcgtgaaaacggaaataccaacaggtattccgtggtggtaaatgcagggacgcaggctttatctctgcataaatataaataa

SEQ ID NO: 36 - DNA, 141 bp, Escherichia coli
atgacacagcagcgttgttactaccacccactgcggcgcatacggactcgctacagtgtaggagccaaaatatttctactgctctgggctgcaggattgggaggcacgctgtacagcctgtacagcgtgctggcgtactga

SEQ ID NO: 37 - DNA, 795 bp, Escherichia coli
atgaagaagcctctggttattatcagtgcctgtcagttcaccaggctggcactggagtctctcatcccaacggacaggtatatcgtgcgggtgtacagcaacgtcactacagaggttgaattcgttttaaagacctcctgtggctacctgttagctgatatcccttcgcttccttcgggggagttggttcttctggcttgtctcgcccgtttgcggagtgatgccgggcaatggcaggtctgcctgaccggtgactccgactggttcgataatgctcctgctgcaagtctgtataacggcttcccacgcatcggcaccatgctgacagcgagtcgttatcagaatcaaattatccgctggttactgcgtcctttgcccggcgatatgagcgatttctggctcctgactgcacgggagttgagcgtgcttaagattctgatgcagggtatgagtttcagtgagattgcccgttatgaacaacgcagttcaaagaccctgcatgcgattgccacacgggctttaatgaaacttggactgggaacactgagcgatttcaggctgctctatacgggatgcggtgacagcagagtgaaacggaatatacggctacatgcaaaatatatcggacaacattccgctcatcgactcactcagtatgtgcagaacatggtatccggaattctttatccagagaaagttgccgttggtgaatcaataaattctgacgccatatccggaaaagtactttccggacaaagaaaaaatatgtctaaaaaaagaccaggattgttatga

SEQ ID NO: 38 - DNA, 564 bp, Escherichia coli
atgacgagaaaatatctcacacaggatgaagtctacaggctgatggatgcagcccagagcatgtcctttcctgaaagaaatcgctgtctaattatgatggctttcattcacggttttagggccagtgaacttcttgatttacgtttatccgatattgatgcatctggaaaacaacttaatattcggcgtattaaaaatggtttctcgacaacacatcctcttcttcctgatgaatataatttgatcaagttgtggcttaagcagaggaagttaattgaaaacggagttgaaggagactggctttttctctcccggaaacgccgccctatcagcagacaacattttttttctatcattcgtgaggctggaaaacgtgcaggattagctgtaaaagcacatcctcatatgttacgtcatgcctgtggttttgctctggctgacaatggtgtcgatacccgactacttcaggattatctgggtcatcgaaatattcagcatactgtcagatacacagccagtaatgctgctcgttttaaaggggtgtggaaaaaaaagcctcgttaa

SEQ ID NO: 39 - DNA, 282 bp, Escherichia coli
atgtggttttggtctgacttatttttgtactcgttacaagaacccttttcgtatatgctaaccgtgagcgggaatgaacaggtaaccatagccaggaacattagcggcgtaattcttaagctgagtggtatttcatctgtagtttatctgtgtatgcatagcaccttcatcagccagattgagcaagtcagcttagaatttgctggcgagattgtcacgatgaagcatgagagttacctcagtgttttatataaggattcggtcctcatagtagaacggtaa

SEQ ID NO: 40 - DNA, 1671 bp, Escherichia coli
ttgcaatttgactacatcattattggtgccggctcagccggcaacgttctcgctacccgtctgactgaagatccgaacacaaccgtgctgctgcttgaagcaggcggcccggactatcgctttgacttccgcacccagatgcccgccgcgctggcgttcccgctacagggcaaacgctacaactgggcctatgagacggaacccgaaccgtttatgaacaaccgccgcatggagtgcggacgcggcaaaggtctgggcggttcatcgctgatcaacggtatgtgctacatccgtggcaatgcgctggatctcgataactgggcacaagaacctggtctggagaactggagttatctcgactgcctgccctactaccgcaaggccgagactcgcgatgtgggcgagaacgattaccacggtggcgatggcccggtgagcgtcaccacctccaaacccggcgtcaatccgctgtttgaagcgatgattgaagcgggcatgcaggcaggctacccgcgcacggacgatctcaacggctatcagcaggaaggttttggcccgatggatcgcaccgtcacgccgcatggccgtcgcgccagcaccgcgcgtggctatctcgatcaggccaaatcgcgccctaacctgaccattcgtactcacgccatgaccgatcacatcatttttgacggcaaacgcgcggtgggcgtcgagtggctggaaggcgacagcaccattccgacccgcgcggcggcgaataaagaagtgctgttatgtgcaggcgcgattgcttcaccgcagatcctgcaacgctccggcgtcggcaacgctgaactgctggcggagtttgatattccgctggtgcatgagttacccggcgtcggcgaaaatcttcaggatcacctggagatgtatctgcaatacgagtgcaaagaaccggtttccctctaccctgccctgcagtggtggaatcagccgagaatcggtgcggagtggctgtttggcggcaccggcgttggtgccagcaaccactttgaagcaggcggatttattcgcagtcgtgaggaatttgcgtggccgaatattcagtaccatttcctgccagtggcgattaactataacggctcgaacgcagtgaaagagcacggcttccaatgccatgtcggatcgatgcgctcgccaagccgtgggcatgtgcggattaaatcccgcgacccgcaccagcatccgggaattctgtttaactacatgtcgcacgagcaggactggcaggagttccgcgacgcaattcgcatcacccgcgagatcatgcatcaacccgcgctggatcaataccgtggccgcgaaatcagccctggtgtcgaatgccagacggatgagcagctcgatgagttcgtgcgtaaccacgccgaaaccgcgtttcatccgtgcggtacctgcaaaatgggttatgacgagatggctgtggttgacggcgaaggccgcgtacacgggctggaaggcctgcgcgtggtggatgcgtcaattatgccgcaaattatcaccggcaatttgaacgccacgacgattatgattggcgagaaaatagcggatatgattcgtgggaaggaagcgttgccgaggagcacggcgggatattttgtggcaaatgggatgacggtgagagcgaaaaaatga

SEQ ID NO: 41 - DNA, 1473 bp, Escherichia coli
atgtcccgaatggcagaacagcagctttatatacatggtggttatacctccgccaccagcggtcgcaccttcgagaccattaacccggccaacggtaacgtgctggcgaccgtgcaggccgccgggcgtgaggatgtcgatcgcgccgtgaagagtgcccaacaagggcaaaaaatctgggcggcgatgaccgctatggaacgctcgcgtattctgcgtcgggccgttgatattctgcgtgaacgcaatgacgaactcgcaaaactggaaacccttgacaccggaaaagcatattcggaaacctcaaccgtcgatatcgttaccggtgcggacgtgctggagtactacgccgggctgatcccgtcgctggaaggcagccagatcccattgcgtgagacgtcatttgtttatacccgccgcgaacctctgggcgtagtggcagggattggcgcatggaactacccgatccagattgccttgtggaaatccgcccccgcgctggcggcaggcaacgcgatgattttcaaaccgagcgaagtcaccccgcttaccgcgttaaagctggccgaaatttacagcgaagcgggcctgccggacggcgtatttaacgtgctgccgggcgtaggtgcggaaaccgggcagtatctgaccgagcatccgggcattgccaaagtgtcatttaccggcggtgtcgccagcggcaaaaaagtgatggctaactcggcggcttcctccctgaaagaagtgaccatggagctgggcggtaaatcaccgctgatcgttttcgacgatgcagatctcgatctcgccgctgatatcgccatgatggcgaacttcttcagctccggtcaggtgtgtaccaacggcacccgcgtcttcgttccggcgaaatgcaaagccgcatttgaacaaaagattctggctcgcgttgagcgcattcgcgcggacgacgttttcgatccgcaaactaacttcggcccgctggtcagcttcccgcatcgcgataacgtgctgcgctatatcgccaaaggcaaagaggaaggcgcacgcgtactgtgcggcggcgatgtactgaagggggatagcttcgataacggcgcatgggttgcaccgaccgtgttcaccgattgcagcgacgatatgaccattgtgcgagaagagattttcgggccggtgatgtccattctgacctacgagtcggaagacgaagtcattcgccgcgctaacgataccgactacggtctggcggcgggtatcgtgacggcggacctgaacctcgcgcatcgcgtcattcatcagctggaagcgggtatttgctggatcaacacctggggcgaatccccggcagagatgcccgttggcggctacaaacactccggcattggtcgcgagaacggcgtgatgacgctccagagttacacccaggtgaagtccatccaggttgagatggctaaattccagtccatattctaa

SEQ ID NO: 42 - DNA, 588 bp, Escherichia coli
atgcccaaattgggaatgcagtcgatccggcgcagacaactgatcgacgccacgctggaagcaataaatgaagtgggcatgcacgatgcaacgatcgcgcagatcgcccgccgtgcaggcgtttctacggggatcatcagccactatttcagggacaaaaatggtctgctggaagcaaccatgcgcgatatcaccagtcagctgcgtgacgcggttttgaatcgattacatgcacttccgcagggcagtgcagagcggcgattacaggcgattgttggcggaaacttcgatgaaacccaggtgagcagtgcggcgatgaaagcctggctggccttctgggccagcagtatgcatcagccgatgctctatcgcttgcagcaggtcagtagccgccgcttattgtcgaatctggtgagcgaatttcgccgcgagttaccgcgccaacaggcacaggaagcgggctacggccttgccgcgctaattgacggattatggctgcgcgcggcactgagcggcaaagcactggataaacctctcgcacactcgctgacccgtcactttattactcagcatttacccaccgattaa

SEQ ID NO: 43 - DNA, 2034 bp, Escherichia coli
atgacagacctttcacacagcagggaaaaggacaaaatcaatccggtggtgttttacacttccgccggactgattttgttgttttccctgacaacgatcctgtttcgcgacttctcggccctgtggattggccgcacgctggactgggtttctaaaaccttcggttggtactatctgctggcggcaacgctctatattgtctttgtggtctgtatcgcttgttcgcgttttggttcggtgaagctcgggccagaacaatcaaaaccggaattcagtctgctgagttgggcggcgatgctgtttgctgccgggatcggtatcgacctgatgttcttctccgtagccgaaccggtaacgcagtatatgcagccgccggaaggcgcgggacagacgattgaggccgcgcgtcaggcgatggtctggacgctgtttcactacggcttaaccggctggtcgatgtatgcgctgatgggcatggcgctcggatactttagctatcgttataatttgccgctcactatccgctcggcgctgtacccgatcttcggtaaacggattaacgggccgataggtcactcagtggatattgctgcggtgatcggcaccatcttcggtattgccactacgctcggtatcggtgtggtgcagcttaactatggcttgagcgtgctgtttgatattcccgattcgatggcggcgaaagcggcactgatcgccttgtcggtgatcatcgccactatctcggtgacatccggtgttgataagggcattcgcgtgttatcggaactcaacgttgcgctggcgctgggattgattctgttcgtgttgtttatgggcgacacctcgttcctgcttaatgcactggtgctgaatgttggcgactatgtgaatcgctttatgggcatgacgctcaacagttttgccttcgaccgtccggttgagtggatgaataactggacgctcttcttctgggcatggtgggtggcatggtcgccgtttgtcggcttgttcctggcgcgtatctcgcgtgggcgtaccattcgccagttcgtgctgggcacgttgattattccgtttaccttcacgctgttatggctctcggtattcggcaatagcgcgctgtatgaaatcatccacggcggcgctgcatttgccgaggaagcgatggtccatccggagcgcggcttctacagcctgctggcgcagtatccggcgtttacctttagcgcctccgtcgccaccattactggcctgctgttttatgtgacctcggcggactccggtgcgttggtgctggggaatttcacctcgcagcttaaagatatcaacagcgacgcacccggctggctgcgcgtcttctggtcggtggcgattggcctgctgacgctaggcatgctgatgaccaacgggatatctgcgctgcaaaacaccacggtgattatgggcctgccgttcagctttgtgatcttcttcgtgatggcggggttgtataaatctctgaaggtagaagattaccgccgtgaaagtgccaaccgcgataccgcgccgcgaccgctggggcttcaggatcgcctgagctggaaaaaacgtctctcgcgcctgatgaattatccgggcacgcgttacactaaacagatgatggagacggtctgttatccggcaatggaagaagtggcgcaggaactgcggttgcgcggcgcgtacgtggagctaaaaaacctgccgccggaagagggacaacaattggggcatctggatttgttggtgcatatgggcgaagagcagaactttgtctatcagatttggccgcagcaatattcagtgccgggctttacctaccgcgcacgtagcgggaaatcgacctactaccggctggaaaccttcctgttagaaggcagccagggcaacgacctgatggactacagcaaagagcaggtgatcaccgatattctcgaccagtacgagcggcaccttaactttatccatctccatcgtgaagcgccgggccatagcgtgatgttcccggactcgtga

SEQ ID NO: 44 - DNA, 1089 bp, Escherichia coli
atgaattcatgtgattttcgtgtttttctgcaagagttcggtacaacggttcatttgtcattgcctggtagcgtatccgagaaagaacgactgctactcaagctgctgatgcagggaatgtctgtaacagaaatatcacagtacagaaatcgcagtgcaaagaccatttcacatcaaaagaaacagctctttgagaaactggggattcagagcgatattactttctggcgggatattttctttcagtacaatccggagatcatatccgccacgggtaataatagtcacaaatatattaatgataatcactatcaccatatcgtcacgcctgaagccatcagtctggcgttggaaaaccacgagtttaaaccgtggatccaaccggttttctgcgcgcagactggggtactgacgggctgtgaagtgcttgtccgctgggaacatccacaaacgggaatgatcccaccggatcagtttattcctctggcggagtcatccggtcttattgtcataatgactcgccagctgatgaaacagactgcggatattctgatgccggtaaaacatttgctgccggacaatttccatattggtatcaacgtctcggcgggctgttttttggctgcgggatttgaaaaagagtgtctgaacctggttaagaaattaggtaacgataaaatcaagctggttcttgagctgacggaacgtaatcctattccggtaacgccagaagccagagcgatatttgacagccttcatcagcacaatattacttttgcgctggatgactttggtacgggttatgcgacctatcgttacttgcaggcgttcccggtcgattttattaaaattgacaagtcgtttgtgcaaatggcgagtgtcgatgaaatctccggtcatattgtggacaatattgtcgaactggcgcgtaagcctggtctgagtatcgtggcggaaggggtagaaacccaggagcaggcggatttaatgatcggtaaaggcgttcactttttacagggctatttgtactctccgccagtaccgggtaataaatttatctctgaatgggtaatgaaagcaggtggttga

SEQ ID NO: 45 - DNA, 933 bp, Escherichia coli
atgaactcaatttttaccgaagagaatctgttggcatttactaccgctgcgcgttttggcagcttcagtaaagccgcagaagagttgggtttaaccacttccgccattagctacaccattaaacgtatggagacggggctggatgtggtgctgttcactcgcagtacccgcagcattgagttaacggagtccgggcgttattttttccgcaaagctaccgacctgcagaatgattttcatgccattaaacgcagtatcgatactatttcgcagggcatagaagcgcgtgtgcgcatttgtattaatcagctgctttatacgcccaaacacaccgcacgcttattacaggtgctgaaaaagcagtttcctacctgccagattaccgtcaccaccgaagtgtataacggcgtctgggatgcgattattaataatcaggcaaatatcgctatcggcgcccccgacacgctgctggacggtggcggcattgattacacggagattggcgcgattcgctgggcttttgccatcgccccggatcacccattagcccttgtgccggagccgatcgccgaaagccagctgcgtctctaccctaatatcatggtggaggacaccgcgcatacgattaataaaaaagtgggctggttgctgcatgggcaggagtcaattctggtgcccgatttcaacaccaaatgtcagtgccagattttaggtgaaggaattggttttttgccggattacatggtccgtgaggcgatggcgcaatccttgctggttacccgacaaatccataacccgcgccaggattcacgcatgttactcgcaacccagcactctgccaccggtcaggtgacgcagtggattaaaaaacaatttgcgccaaatggcatattaacggggatctatcaggatttactgcatcgggagaattaa

SEQ ID NO: 46 - DNA, 498 bp, Escherichia coli
atgaacggactcacggcaacgggtgtcaccgtcggtatttgtgcagggctttggcagttagtgtcttcacatgtcgggctctctcagggatgggaattattaggaaccattggcttcgtcgccttttgcagtttttatgccgcaggcggcggtaaatcggggtttatcagaagcctggcggttaattattccgggatggtgtgggcgtttttcgccgcgctggctgccggttggctggccccggtgagtgggatttccggggtctgggcgagcgtaattacgactgtacccttctcggcggtggtggtctggcaagggcgtttctggttactgtcttttattcccgggggctttctcggcatgacgctattttttgccagcgggatgaactggacggtgacattactgggttttctggcgggtaactgcgtggggataatttcagaatatggcggacaaaaattaagcgaagcgacgactaaacgcgacgggtattaa

SEQ ID NO: 47 - DNA, 606 bp, Escherichia coli
atgactataaaaaatccacctgcagactatttattggctgcgcaacagggggatatcgataaagtaaaaacctgccttgcgctgggtgtcgatattaatacctgcgatcgccacgggaaaacggcaattacgctggcaagtttatatcagcaatatgcttgcgttcaggcattaattgacgccggagcggatattaataaacaagatcatacctgtttaaatccttttttaattagctgtctgaacgatgatttaacgctactacgaattattttaccggctaaacccgatcttaattgcgtaacccgttttggcggtgtcggcctgacgcctgcctgtgaaaaaggccatttaagtattgtaaaagagcttttggcgcatacggagattaacgttaaccagaccaaccatgttggctggacgccgctactggaagcgattgtgcttaatgatggcgggattaaacagcaggcgattgtccagttattactggaacacggtgccagcccgcatctgacggataaatatggcaaaacactgctggaactggcgcgagaacggggctttgaagagattgcgcagttactgattgccgcaggcgcataa

SEQ ID NO: 48 - DNA, 864 bp, Escherichia coli
gtgtgggcgctaactgcggatgcggattttctggcgcagcgggggcaaggacaggttgaacaggtctttgccagagcggtaaatatcgtactcccggctcgccagcagttgctgacgctgctttgtgaagagtacgacaatgcgcctaacagttgtcggttggcactcactcactttaatggtctgttccggcatggtgataaggttcagtttgacgatcaaggcattacgattggtcaacatcatcatatagagatgagtcattgccagcgttggctgtccccaaccttgcaaatgaccgctctgaattttcaccttatcgcctggcaacagtggcacgacattattcatcagcacctgggggaaaatgaaaccctgtttaattatcgcggcgataatccgttttatcaggcgttaaataaagaactacatattaaacgtcgggcagttattcaggccgtaaacgataaacaaaatatcgccgtagcggtcgccagtatgatgggcttagggattggccttacgccatcagccgatgattatctgaccggactggtacttattttatttatttccggacatccggcggaaaaatacaaagaggaattttatctcggtttgcaacgcggcagaaataataccacgttattaagtgccatcacgctggaagccgcattacaacaacgctgccgggaaaatattcatcgttttattcacaacattatttatgacatccctgggaacgcaactcaggcaatagaaaaaattaaacatattggctccagttccggctgcgacatgctgtatggcatggccgatggttgtgcgctgagccaaacttacggagggaattatgtcagttaa

SEQ ID NO: 49 - DNA, 1551 bp, Escherichia coli
atgtcagttaaaatagtcattaaaccgaatacctattttgattctgtctcgctgatgtctatctccacgcgtgcaaataaactcgacggcgtcgagcaggcatttgtggcgatggcgaccgaaatgaacaaaggcgtgttgaagaatttaggactgctgacgccggagctggagcaagcgaaaaacggcgacctgatgattgtcatcaatggtaaatcgggtgtggacaacgagcagttgctggcggagattgaagaactgttcaacaccaaagcgcaaagcggctcgcacgaggcgcgttacgccactattgccagcgccaaaaagcatatcccggaaagtaacctggcagtgatttcggtcaacggtctgtttgccgctcgcgaagcgcgtcaggcgctgcaaaatgacctcaacgtgatgctgttttccgataatgtctcagttgaagatgaactggcgctcaaacagttggcccatgaaaaagggctgctgatgatggggccagactgcggcacggcgattatcaacggcgcggcgctctgctttggtaacgccgtgcgtcgcggcaacatcggtattgttggcgcatctggcaccggcagccaggaattgagcgtccgtatccatgaatttggtggcggcgtttcacaactgatcggcaccggcgggcgcgacctgagcgagaaaatcggtggcctgatgatgctcgatgccatcgggatgctggaaaacgatccgcaaactgaaatcattgtgcttatctccaaaccgcctgcgcctgcggtggcccgcaaagtgctggaacgcgcacgcgcctgccgcaagccagtggtggcctgcttcctcggtcgtggcgaaacgccagtggatgagcaggggctacagtttgctcgcggcagcaaagaggcggcattgaaagcggtgatgctctccggcgtgaaacaagaacatctcgacctgcatacgcttaaccagccgttgattgcggatgtgcgggcgcgtctgcaaccgcagcagaaatacattcgtggtctgttctgcggcggtacgctgtgtgacgaaaccctgttcgcggtgatggaaaaacatggcgatgtctacagcaatatccagcccgatcctgaattccgcctgcaagatatcaaccgcagcatcaaacacaccttcctcgactttggcgatgatgacttcaccaacggcaagccgcatccaatgattgacccgaccaaccgtatcagccgcttgatcgaagaagcgcgcgatccagaagtggcggtgatcgtgatggattttgtgctcggatttggatcgcatgaagatccggtcggttccaccatcgaggcgatcaaagaagcgaaagcgatcgccgctgccgaaggacgcgagttgatcattctcgcctatgtgctgggcaccgatctcgatacgccatcattagaacaacaaagccagatgctgcttgatgccggagtgattctggcgagcagcagcaccaataccggattgctggcgcgtgaatttatctgcaaaggggaggaagcctggtga

SEQ ID NO: 50 - DNA, 1419 bp, Escherichia coli
gtgagccagtcactgtttagccaacagttgaacgttattaacgtcggtatcgccatgtttagcgatgatctgaaaaagcagcatgtagaagtgacccaactcgactggacgccgccggggcagggcaatatgcaggtggtgcaggcactggacaacattgccgattcgccactggcggacaaaatcgcctccgcgaatcagcaggcgctggagcgcattatccagtcgcatccggtgctgattggttttgatcaggcgattaacgtggtgccgggcatgacggcgaaaaccattcttcacgccgggccgccggtcacctgggaaaaaatgtgcggcgcgatgaaaggcgcggtcaccggagcgctggtgtttgaaggactggcgaaagatctcgacgaggcggctgagctggcggcttccggggagatcaccttctcgccgtgccacgaacacgactgtgtgggatcgatggcgggcgtcacctcggcctcgatgtttatgcacatcgtgaaaaacaaaacctatggcaacatcgcttataccaacatgagcgagcagatggcgaagattttgcgtatgggcgctaacgaccagagcgtgatcgaccgcctcaactggatgcgcgatgtgcagggacccatgctgcgcgacgcgatgaaaattatcggcgaaatcgatctgcgcttaatgctggcgcaggcgctgcatatgggcgatgaatgccataaccgcaataacgccgggacgacgctgctgattcaggcgctgacgccggggattattcaggcaggttattccgtcgagcaacagcgcgaagtgtttgagtttgtcgccagcagcgactacttctccggcccgacgtggatggcgatgtgtaaagcggcgatggatgcggcgcacggcatcgaatacagcaccgtggtgaccaccatggcgcgtaacggcgtcgagttcggcctgcgggtcagcggcctgccggggcagtggtttaccggcccggcgcagcaggtcatcggcccgatgtttgccggttataagccggaagattcagggctggatattggcgacagcgccatcaccgaaacctacggtattggcggatttgcgatggcgaccgcgcccgcgatcgtcgcgctggtggggggcacggtggaagaggctatcgatttctcccgtcagatgcgtgaaatcacccttggcgaaaaccccaacgtcaccattccgctgctcggttttatgggcgtgccgtcggcaatcgacatcacccgcgtgggtagcagcggcattctgccagtgatcaacaccgccatcgcccataaagatgcgggcgtcggcatgattggcgcgggcattgtgcatccacccttcgcctgcttcgagaaagccattcttggctggtgcgaacgttacggcgtctga

SEQ ID NO: 51 - DNA, 951 bp, Escherichia coli
atgaaagaacttgtggtcgttgccattggtggcaacagcattatcaaagataacgccagccagtcgattgagcatcaggcggaggcggtgaaagccgtggccgatacggtgctggaaatgctggcttccgattacgacattgtgctgacccacggcaacgggccgcaggtcgggctggatttacgccgcgcggagattgcccacgagcgcgaagggctgtccttaacgccgctggcgaactgtgtggcggatacgcaaggtggcattggctatctgatccagcaggcgctgaacaaccgactggcgcgtcacggcgagaaaaaagccgtcaccgtggtgactcaggtggaagtggataaaaacgatccggggtttgcccatcccaccaagcccatcggcgaattctttagtgaaagccagcgtgacgaactacaaaaggcaaaccctgactggcgttttgttgaagatgccggacggggctatcgccgcgtggtcgcctcgccggaaccgaaacgtattgtcgaagcacctgccattaaggcgctgatccaacaaggctttgtggtgattggcgcgggcggcggtggaattcctgtggtgcgcaccgaagcgggggattaccaaagcgtggacgcggttatcgacaaagatctctctaccgcgctactggctcccgaaattcacgccgacattctggtgatcaccactggcgtcgaaaaagtgtgtattcactttggcaaaccgcagcagcaggcgctggatcgcgtagatattgccaccatgacccgctatatgcaggaaggacatttcccgcccggcagcatgttgccaaaaatcatcgccagcctgacgttcctggaacaaggcggcaaagaagtgattatcaccacgccggaatgcctgcctgcggcgctacgcggcgaaacgggcacccatattattaaaacctaa

SEQ ID NO: 52 - DNA, 1383 bp, Escherichia coli
atgaaagaaaataatagccgccgtgaatttctgagccagagcggtaagatggtcaccgccgccgcgctgtttggtccctcagtgccgctcgcccatgcgggggtagctggcaccctaaactgcgaagcgaacaacaccatgaaaatcactgacccgcattactatctcgataacgtgcagctggaaaccggttttgactacgaaaatggcgtggcggtacagacccgcacggcgcgccagaccctggagattcaggacggtaaaattgttgccctgcgcgagaacaagcagcatccggacgccacgctgccgcactatgacgctggcggtaagctgatgctgcccaccacccgcgacatgcatattcatctcgacaaaaccttctacggcgggccgtggcgctcgctcaatcgtccggcaggcaccactatccaggacatgatcaaactcgagcagaaaatgctgccggaactgcaaccgtacacgcaggaacgggcggaaaaactgatcgatttattgcagtcgaaaggcaccaccattgcccgcagccactgcaatatcgaaccggtttccggcctgaaaaatctgcaaaatttgcaggcggtgctggcgcgacgtcaggcgggcttcgagtgtgaaatcgtcgccttcccgcagcacggtttgctgctgtcgaaatcggaatccttaatgcgcgaagcgatgcaggcgggggcgcattacgtcggcgggctggacccgaccagtgttgatggcgcgatggaaaaatccctcgacaccatgttccagattgcgctggactatgacaaaggcgtcgatattcacctgcacgaaaccacgccggcgggcgtggcagccatcaattatatggttgaaacggtggagaaaacgccgcaactgaagggcaagctgaccatcagccacgcctttgcgctggcaacgctcaacgaacaacaggtagataaactggcgcaccggatggtggcgcagcaaatttctatcgcctcgacggtgccgattggcacgttgcatatgccgctcaaacagctgcacgacaaaggcgtaaaagtcatgaccggcaccgacagcgttatcgaccactggtcaccctacggcctgggcgacatgctggaaaaagccaatctgtacgtgcagctctatattcgccctaacgaacagaatttatcccgctcgctgtttttagccaccggtgatgtattgccgctaaatgaaaaaggcgagcgcgtgtggccaaaagcgcaggatgacgccagttttgtgctggtggacgcctcctgttccgccgaggcggtggcgcgtatttcgccgagaacggcgacgttccataaagggcaactggtgtggggaagtgtggcaggttga

SEQ ID NO: 53 - DNA, 1050 bp, Escherichia coli
atgaagatcaaagctgttggtgcatattccgctaaacaaccgcttgaaccgatggatatcacccggcgtgaaccgggaccgcatgatgtcaaaatcgaaatcgcttactgtggcgtctgccattccgatctccaccaggtccgttcggagtgggcggggacggtttacccctgcgtgccgggtcatgaaattgtggggcgcgtggtagccgttggtgatcaggtagaaaaacatgcgccgggcgatctggtcggtgtcggctgcattgtcgacagttgtaaacattgcgaagagtgtgaagacgggctggaaaactactgtgattacatgaccggcacctataactcgccgacaccggatgaaccgggccatactctgggcggctactcacaacagatcgtcgttcatgagcgatatgttctgcgtattcgtcacccgcaagagcagctggcggcggtggctcctttgttgtgtgcagggatcaccacgtattcgccgctacgtcactggcaggccgggccgggtaaaaaagtgggcgtggtcggcatcggcggtctgggacatatggggattaagctggcccacgcggtgggggcgcatgtggtggcatttaccacttctgaggcaaaacgcgaagcggcaaaagccctgggggccgatgaagttgttaactcacgcaatgccgatgagatggcggctcatctcaagagtttcgatttcattttgaatacagtagctgcgccacataatctcgacgattttaccaccttgctgaagcgtgatggcaccatgacgctggttggtgcgcctgcgacaccgcataaatcaccggaagttttcaacctgatcatgaaacgccgtgcgatagccggttctatgattggcggcattccagaaacgcaggagatgctcgatttttgcgccgaacatggcatcgtggctgatatagagatgattcgggccgatcaaattaatgaagcctatgagcgaatgctgcgtggtgatgtgaaatatcgttttgttatcgataatcgcacactaacagactga

SEQ ID NO: 54 - DNA, 633 bp, Escherichia coli
atggatcctttgcacgccgtttacctgaccgtaggattgttcgtgattactttttttaatccgggagccaatctctttgtggtagtacaaaccagcctggcttccggtcgacgcgcgggggtgttgaccgggctgggcgtggcgctgggcgatgcattttattccgggttgggtttgtttggtcttgcaacgctaattacgcagtgtgaggagattttttcgcttatcagaatcgtcggcggcgcttatctcttatggtttgcatggtgtagcatgcaccgcctgtcaacaccgcaaatgagcacactacaacaaccgattagcgccccctggtatgtctttttccgccgtggattaattaccgatctctctaacccgcaaaccgttttattttttatcagtattttctcagtaacattacatgccgaaacaccaacatgggcacgattaatggcctgggcggggattgtgctcgcatcaattatctggcgagtctttcttagtcaggcgttttctttgcccgcagtgcgtcgtgcttatgggcgtatgcaacgcgttgccagtcgggttattggtgcaattattggtgtattcgcgctacgcctgatttacgaaggggtgacgcagcggtga

SEQ ID NO: 55 - DNA, 276 bp, Escherichia coli
atgaaaataatctctaaaatgttagtcggtgcgttagcgtttgccgttaccaatgtctatgccgcagaattaatgaccaaagcggaatttgaaaaggttgcatcgcaatatgaaaaaataggtgatatttcaaccagtaatgaaatgtcgaccgcagatgcgaaagaagatttgatcaaaaaagccgatgaaaaaggggctgatgtgttggtactgacctctggtcaaactgacaataagatccacggcacggcaaatatttataagaagaagtga

SEQ ID NO: 56 - DNA, 1587 bp, Escherichia coli
atggcacatccaccacggctgaatgacgacaaaccggttatctggacggtatctgtaacgcggctgttcgagctgtttcgcgatatcagcctcgagtttgatcatctggcgaacattacccctatccagcttggctttgaaaaagcggtgacctacatccgcaagaaactggcaagcgaacgctgtgacgccatcatcgctgctggctctaacggcgcgtacctgaaaagccgcctgtcagtgccagttattttgattaaaccgagcggctacgatgtgttacaggcactggcaaaagccggaaaactcacctcttctatcggcgttgtcacttatcaggaaactattccggcgctggtggcgtttcaaaaaacctttaatttgcgcctcgaccaacgtagctacattaccgaagaagacgcgcgcgggcagattaaggagctgaaagctaacggcaccgaagcggtggtcggcgcggggctgattaccgatctggcagaagaagccggaatgaccggaatttttatctattccgccgccaccgtacgccaggcgttcagcgatgcgctggatatgacgcgcatgtcgttacgccataacactcacgatgccacccgcaacgccctgcgtactcgttacgtgctgggcgatatgctcggtcaatcaccacagatggaacaggtgcggcagactattttgctgtatgcccgctccagtgcggcggtgttgattgaaggggaaacggggacgggcaaagagctggcggcccaggcgattcatcgggaatattttgcccgccacgatgcgcgacagggcaaaaagtcacatccgtttgttgccgtcaactgcggggcgattgccgaatcgctgctggaagcggagctgtttggctatgaggaaggggcgtttaccggctcgcgacgcggaggacgcgccgggctgtttgaaatcgcccacggtggcacgctgtttcttgacgagataggcgaaatgccgctgccgttgcagactcggctgctgcgggtgctggaagaaaaagaggtcacccgcgtcggcgggcatcagcctgttccggtggatgtgcgggtcattagcgccactcactgcaatctggaagaagatatgcagcaagggcagtttcgccgtgacctgttttatcggctgagtattttgcgtctacaactgccgccgctacgcgagcgggtggcggatattctgccgctggcggaaagctttttgaaaatgtctctggcggcactctctgtccctttttctgccgcattacgtcagggattagagacctgtcagattgtattattgctctacgactggccgggcaatattcgtgaactgcgcaatatgatggaacgactggcgttatttttaagtgtggaaccgacgccggatttaacgccgcaatttttgcagctgctactgccggaactggcgcgcgagtcggcgaagactcccattcaaggcttgctgacagcacaacaggcactggagaaatttaatggcgataagacagcagcggcgaattatttaggtatcagccggacgacgttctggcggcggctgaaaagctga

SEQ ID NO: 57 - DNA, 891 bp, Escherichia coli
atgtctctacactctccaggtaaagcgtttcgcgctgcactgactaaagaaaatccattgcagattgttggcaccattaacgccaaccatgcgctgttggcgcagcgtgccggatatcaggcaatttatctctccggcggtggcgtggcggcagggtcgctggggctgcccgatctcggtatttctactcttgatgatgtgctgactgacattcgccgtattaccgacgtttgttcgctgccgctgctggtggatgcggatatcggttttggttcttctgcttttaacgtggcgcgcaccgtgaaatcgatgattaaagccggtgcggcaggattgcatattgaagatcaggttggtgcgaaacgctgcggtcatcgtccgaataaagcgatcgtctcgaaagaagagatggtggatcggatccgcgcggcggtggatgcgaaaaccgatcctgattttgtgatcatggcgcgcaccgatgcgctggcggtcgaggggctggatgcggcgatcgagcgtgcgcaggcctatgttgaagcgggtgccgaaatgctgttcccggaggcgattaccgaactcgccatgtatcgccagtttgccgatgcggtgcaggtgccgatcctcgccaacattaccgaatttggcgcaacaccgctgtttaccaccgacgaattacgcagcgcccatgtcgcaatggcgctctacccgctttcagcgtttcgcgccatgaaccgcgccgctgaacatgtctacaacatcctgcgtcaggaaggcacacagaaaagcgtcatcgacaccatgcagacccgcaacgagctgtacgaaagcatcaactactaccagtacgaagagaagctcgacgacctgtttgcccgtggtcaggtgaaataa

SEQ ID NO: 58 - DNA, 1170 bp, Escherichia coli
atgagcgacacaacgatcctgcaaaacagtacccatgtcattaaaccgaaaaaatcggtggcactttccggcgttccggcgggcaatacggcgctctgcaccgtgggtaaaagcggcaacgacctgcattaccgtggctacgatattcttgatctggcggaacattgtgaatttgaagaagtggcgcatctgctgatccacggcaaactgccaacccgtgacgaactcgccgcctacaaaacgaaactgaaagccctgcgtggtttaccggctaacgtgcgtaccgtgctggaagccttaccggcggcgtcacacccgatggatgttatgcgcaccggcgtttccgcgctcggctgcacgctgccagaaaaagaggggcacaccgtttctggtgcgcgggatattgccgacaaactgctggcgtcacttagttcgattcttctctactggtatcactacagccacaacggcgaacgcatccagccggaaactgatgacgactctatcggcggtcacttcctgcatctgctgcacggcgaaaagccgtcgcaaagctgggaaaaggcgatgcatatctcgctggtgctgtacgccgaacacgagtttaacgcttccacctttaccagccgggtgattgcgggcactggctctgatatgtattccgccattattggcgcgattggcgcactgcgcgggccgaaacacggcggggcgaatgaagtgtcgctggagatccagcaacgctacgaaacgccggacgaagccgaagctgatatccgtaagcgggtggaaaacaaagaagtggtcattggttttgggcatccggtttataccatcgccgacccgcgccaccaggtgatcaaacgcgtggcaaagcagctctcgcaggaaggcggctcgctgaagatgtacaacatcgccgatcgcctggaaacagtgatgtgggagagcaaaaagatgttccccaatctcgactggttctccgctgtttcctacaacatgatgggtgttcccaccgagatgttcacaccactgtttgttatcgcccgcgtcactggctgggcggcgcacattatcgaacaacgtcaggacaacaaaattatccgtccttccgccaattacgttggaccggaagaccgccagtttgtcgcgctggataagcgccagtaa

SEQ ID NO: 59 - DNA, 1452 bp, Escherichia coli
atgtcagttcaaatcaacaatattcgcccggaatttgatcgtgaaatcgttgatatcgtcgattacgtgatgaactacgaaatcagctccagagtagcctacgacaccgcacattactgcctgctcgacacgctcggctgcggtctggaagctctcgaatatccggcctgtaaaaaactgctggggccaattgtccccggcaccgtcgtacccaacggcgtgcgcgttcccggaactcagtttcagctcgaccccgtccaggcggcatttaacattggcgcgatgatccgttggctcgatttcaacgatacctggctggcagcggagtgggggcatccttccgacaacctcggcggcattctggcaacggcggactggctttcgcgcaacgcggtcgccagcggcaaagcgccgttgaccatgaaacaggtgctgaccggaatgatcaaagcccatgaaattcagggctgcatcgcgctggaaaactcctttaaccgcgttggtctcgaccacgtcctgttagtgaaagtggcttccaccgccgtggtcgccgaaatgctcggcctgacccgcgaggaaattctcaacgccgtttcgctggcgtgggtggacggtcagtcgctgcgcacctatcgccatgcgccgaacaccggcacgcgtaaatcctgggcggcgggcgatgctacttcccgcgcggtacgtctggcactgatggcgaaaaccggcgaaatgggttatccgtcagccctgactgcgcctgtgtggggcttctacgacgtctcctttaaaggcgaatcgttccgcttccagcgcccgtatggttcttacgtgatggaaaatgtgctgttcaaaatctccttcccggcggagttccactcccagacggcagttgaagcagcgatgacgctctatgaacagatgcaggcagcaggcaaaacggcggcggatatcgaaaaagtgaccattcgcacccacgaagcctgtattcgcatcatcgacaaaaaagggccgctcaataacccggctgaccgcgaccactgcattcagtacatggtggcgatcccgctgctgttcgggcgcttaacggcggcagattacgaggacaacgttgcgcaagataaacgcatcgacgccctgcgcgagaagatcaattgctttgaagatccggcgtttaccgctgactaccacgacccggaaaaacgcgccatcgccaatgccataacccttgagttcaccgacggcacgcgctttgaagaagtggtggtggagtaccccattggtcatactcgccgccgtcaggatggcattccgaaactggtcgagaaattcaaaatcaatctcgcgcgccagttcccgactcgccagcagcagcgcattctggaggtttctctcgacagaactcgcctggaacagatgccggtcaatgaatatctcgacctgtacgtcatttaa

SEQ ID NO: 60 - DNA, 1887 bp, Escherichia coli
atgtcttttagcgaattttatcagcgttcgattaacgaaccggagcagttctgggccgagcaggcccggcgtattgactggcagacgccctttacgcaaacgctagaccacagcaacccgccgtttgcccgttggttttgtgaaggccgaaccaacttgtgtcacaacgctatcgatcgctggctggagaaacagccagaggcgctggcattgattgccgtctcttcggaaacagaggaagagcgtacctttaccttccgccagttacatgacgaagtgaatgcggtggcgtcaatgctgcgctcactgggcgtgcagcgtggcgatcgggtgctggtgtatatgccgatgattgccgaagcgcatattaccctgctggcctgcgcgcgcattggcgctattcattcggtggtgtttgggggatttgcttcgcacagcgtggcggcgcgaattgatgacgctaaaccggtgctgattgtctcggctgatgccggggcgcgcggcggtaaaatcattccgtataaaaaattgctcgacgatgcgataagtcaggcacagcatcagccgcgtcacgttttactggtggatcgcgggctggcgaaaatggcgcgcgttagcgggcgggatgtcgatttcgcgtcgttgcgccatcagcacatcggcgcgcgggtgccgatggcatggctggaatccaacgaaacctcctgcattctctacacctccggcacgaccggcaaacctaaaggtgtgcagcgtgatgtcggcggatatgcggtggcgctggcgacctcgatggacaccatttttggcggcaaagcgggcggcgtgttcttttgtgcttcggatatcggctgggtggtagggcattcgtatatcgtttacgcgccgctgctggcggggatggcgactatcgtttacgaaggattgccgacctggccggactgcggcgtgtggtggaaaattgtcgagaaatatcaggttagccgcatgttctcagcgccgaccgccattcgcgtgctgaaaaaattccctaccgctgaaattcgcaaacacgatctttcgtcgctggaagtgctctatctggctggagaaccgctggacgagccgaccgccagttgggtgagcaatacgctggatgtgccggtcatcgacaactactggcagaccgaatccggctggccgattatggcgattgctcgcggtctggatgacaggccgacgcgtctgggaagccccggcgtgccgatgtatggctataacgtgcagttgctcaatgaagtcaccggcgaaccgtgtggcgtcaatgagaaagggatgctggtagtggaggggccattgccgccaggctgtattcagaccatctggggcgacgacgaccgctttgtgaagacgtactggtcgctgttttcccgtccggtgtacgccacttttgactggggcatccgcgatgctgacggttatcactttattctcgggcgcactgacgatgtgattaacgttgccggacatcggctgggtacgcgtgagattgaagagagtatctccagtcatccgggcgttgccgaagtggcggtggttggggtgaaagatgcgctgaaagggcaggtggcggtggcgtttgtcattccgaaagagagcgacagtctggaagaccgtgaggtggcgcacttgcaagagaaggcaattatggcgctggtagacagccagattggcaactttggccgcccggcgcacgtctggtttgtctcgcaattgccaaaaacgcgatccggaaaaatgctgcgccgcacgatccaggcgatttgcgaaggacgcgatccaggggatctgacgaccattgatgatccggcgtcgttggatcagatccgccaggcgatggaagagtag

SEQ ID NO: 61 - DNA, 1260 bp, Escherichia coli
gtgtcgcaagataacaactttagccaggggccagtcccgcagtcggcgcggaaaggggtattggcattgacgttcgtcatgctgggattaaccttcttttccgccagtatgtggaccggcggcactctcggaaccggtcttagctatcatgatttcttcctcgcagttcttatcggtaatcttctcctcggtatttacacttcatttcttggttacattggcgcaaaaaccggcctgaccacccatcttcttgctcgcttctcgtttggtgttaaaggctcatggttgccttcactgctgctgggcggcacccaggttggctggtttggcgttggcgtggcgatgtttgctattccggtgggcaaggcaaccgggctggatattaatttgctgattgccgtctccggtttactgatgaccgtcaccgtcttctttggcatttcggcgctgacagttctttcggtgattgcggttccggctatcgcctgtcttggcggttattccgtgtggttggccgttaacggcatgggcggcctggacgcattaaaagcggtcgttcccgcacaaccgttagatttcaatgtcgcgctggcgctggttgtggggtcatttatcagtgcgggcacgctcaccgctgactttgtccggtttggtcgtaatgccaaactggcggtgctggtggcgatggtggcctttttcctcggcaactcgttgatgtttattttcggtgcagcgggcgcggcggcactggggatggcggatatctctgatgtgatgattgctcagggccttctgctgcctgcgattgtggtgctggggctgaatatctggaccaccaacgataacgcgctctatgcgtcgggtttaggtttcgccaacattaccggtatgtcgagcaaaaccctttcggtgattaacggtattatcggtacggtctgcgcattatggctgtataacaattttgtcggctggttgaccttcctttcggcagctattcctccggtgggcggcgtgatcatcgctgattatctgatgaaccgtcgccgctatgagcactttgcgaccacgcgtatgatgagtgtcaattgggtggcgattctggctgtcgcgctggggattgccgcaggccactggttaccgggaattgttccggtcaacgcagtattgggtggcgcgctgagctatctgatccttaacccgattttgaatcgtaaaacgacagcagcaatgacgcatgtggaggctaacagtgtcgaataa

SEQ ID NO: 62 - DNA, 1284 bp, Escherichia coli
gtgtcgaataacgctttacaaacaattattaacgcccggttacccggcaaagaggggctgtggcagattcattttcacgacggaaaaatcagcgccattgatgcgcaatccggcgtgatgcccgtaactgaaaacagcctggatgccgaacaaggtttagttttaccgccgtttgtggagccgcatattcacctggacaccacgcaaaccgccggacaaccgaactggaatcagtccggcacgctgtttgaaggcattgaacgctgggccgagcgcaaagcgttattaacccatgacgacgtgaaacaacgcgcatggcaaacgctgaaatggcagattgccaacggcattcagcatgtgcgtacccatgtcgatgtttcggacgcaactctgactgcgctgaaagcaatgctggaagtgaaacaggaagttgcgccgtggattgatctacaaatcgttgccttcccgcaggaagggattttgtcgtatcccaatggtgaagcgttgctggaagaggcgttacgcttaggggcagacgttgttggggcgattccgcattttgaatttacccgtgaatatggcgtggagtcgctgcataaaaccttcgccctggcgcaaaaatacgaccgtctcatcgatgttcactgtgacgagattgatgatgagcaatcacgctttgtcgaaaccgttgctgccctggcgcaccgtgaaggaatgggcgcgcgagtcaccgccagccacaccacggcaatgcactcctataacggggcgtatacttcgcgcctgttccgtttgctgaaaatgtccggtattaactttgtcgccaacccgttggtcaatattcatctgcaaggacgtttcgatacgtatccaaaacgtcgcggcatcacgcgcgttaaagagatgctggagtccggcattaacgtctgctttggtcacgatgatgtcttcgatccgtggtatccgctgggaacggcgaatatgctgcaagtgctgcatatggggctgcatgtttgccagctgatgggctacgggcagattaacgacggcctgaatttaatcacccaccacagcgccaggacgttgaatttgcaggattacggcattgccgccggaaacagcgccaacctgattatcctgcctgctgaaaatgggtttgatgcgttgcgccgtcaggttccggtacgttattcggtacgtggcggtaaggtgattgccagcacacaaccggcacaaaccaccgtatatctggagcagccagaagccatcgattacaaacggtaa

SEQ ID NO: 63 - DNA, 621 bp, Escherichia coli
atgatcgcaatgaacatgtcgatgacagaaagaataaaagcaggcaagctatttaccgatatgtgcgaaggcttacctgaaaaaagacttcgtggaaaaacgttaatgtatgagtttaatcactcgcatccatcagaatttgaaaaaagggaaagtctgattaaagaaatgtttgccacggtaggggaaaacgcctgggtagaaccccccgtctatttctcttacggttccaacatccatataggccgcaatttttatgcaaatttcaatttaaccattgtcgacgactacacggtaacgatcggtgataacgtactgattgcacccaacgttactctttccgttgcgggacacccggtacaccatgaattgagaaaaaacggagaaatgtactcttttccgataacgattggcaataacgtctggatcggaagtcatgtggttattaatccaggcgtcaccatcggggataattctgttattggcgcgggtagtgtcgtcacaaaagacattccaccaaacgtcgtggctgctggcgttccttgtcggattattcgcgaaataaacgaccgggataagcaatattatttcaaagattttaaagttgagtcttcagtttaa

SEQ ID NO: 64 - DNA, 1254 bp, Escherichia coli
atgtactatttaaaaaacacaaacttttggatgttcggtttattctttttcttttacttttttatcatgggggcctacttcccgtttttcccgatttggctacatgacatcaaccatatcagcaaaagtgatacgggtattatttttgccgctatttctctgttctcgctattattccaaccgctgtttggtctgctttctgacaaactcgggctgcgcaaatacctgctgtggattattaccggcatgttagtgatgtttgcgccgttctttatttttatcttcggaccactgttacaatacaacattttagtaggatcgattgttggtggtatttatcttggcttttgttttaacgccggtgcgccagcagtagaggcatttatcgagaaagtcagccgtcgcagtaatttcgaatttggtcgcgcgcggatgtttggctgtgttggctgggcgctgtgtgcctcgattgtcggcatcatgttcaccatcaataatcagtttgttttctggctgggttctggctgtgcactcatcctcgccgttttactctttttcgccaaaacggatgcgccctcttcagccacggttgccaatgcggtaggtgccaaccattcggcatttagccttaagctggcgctggaactgttcagacagccaaaactgtggtttttgtcactgtatgttattggcgtttcctgcacctacgatgtttttgaccaacagtttgctaatttctttacttcgttttttgctaccggtgaacagggtacgcgggtatttggctacgtaacgacaatgggcgaattacttaatgcctcgattatgttctttgcgccactgatcattaatcgcatcggtgggaaaaatgccctgctgctggctggcactattatgtctgtacgtattattggctcatcgttcgccacctcagcgctggaagtggttattctgaaaacgctgcatatgtttgaagtaccgttcctgctggtgggctgctttaaatatattaccagccagtttgaagtgcgtttttcagcgacgatttatctggtctgtttctgcttctttaagcaactggcgatgatttttatgtctgtactggcgggcaatatgtatgaaagcatcggtttccagggcgcttatctggtgctgggtctggtggcgctgggcttcaccttaatttccgtgttcacgcttagcggccccggcccgctttctctactgcgtcgtcaggtgaatgaagtcgcttaa

SEQ ID NO: 65 - DNA, 3075 bp, Escherichia coli
atgactatgattacggattctctggccgtcgtattacaacgtcgtgactgggaaaaccctggcgttacccaacttaatcgccttgcggcacatccccctttcgccagctggcgtaatagcgaagaggcccgcaccgatcgcccttcccaacagttgcgcagcctgaatggcgaatggcgctttgcctggtttccggcaccagaagcggtgccggaaagctggctggagtgcgatcttcctgacgccgatactgtcgtcgtcccctcaaactggcagatgcacggttacgatgcgcctatctacaccaacgtgacctatcccattacggtcaatccgccgtttgttcccgcggagaatccgacaggttgttactcgctcacatttaatattgatgaaagctggctacaggaagaccagacgcgaattatttttgatggcgttaactcggcgtttcatctgtggtgcaacgggcgctgggtcggttacggccaggacagccgtttgccgtctgaatttgacctgagcgcatttttacgcgccggagaaaaccgcctcgcggtgatggtgctgcgctggagtgacggcagttatctggaagatcaggatatgtggcggatgagcggcattttccgtgacgtctcgttgctgcataaaccgaccacgcaaatcagcgatttccaagttaccactctctttaatgatgatttcagccgcgcggtactggaggcagaagttcagatgtacggcgagctgcgcgatgaactgcgggtgacggtttctttgtggcagggtgaaacgcaggtcgccagcggcaccgcgccttttggcggtgaaattatcgatgagcgtggcggttatgccgatcgcgtcacgctacgcctgaacgttgaaaatccggaactgtggagcgccgaaatcccgaatctctatcgtgcggtggttgaactgcacaccgccgacggcacgctgattgaagcagaagcctgcgatgtcggtttccgcgaggtgcggattgaaaatggtctgctgctgctgaacggcaagccgttgctgattcgcggcgttaaccgtcacgagcatcatcctctgcatggtcaggtcatggatgagcagacgatggtgcaggatatcctgctgatgaagcagaacaactttaacgccgtgcgctgttcgcattatccgaaccatccgctgtggtacacgctgtgcgaccgctacggcctgtatgtggtggatgaagccaatattgaaacccacggcatggtgccaatgaatcgtctgaccgatgatccgcgctggctacccgcgatgagcgaacgcgtaacgcggatggtgcagcgcgatcgtaatcacccgagtgtgatcatctggtcgctggggaatgaatcaggccacggcgctaatcacgacgcgctgtatcgctggatcaaatctgtcgatccttcccgcccggtacagtatgaaggcggcggagccgacacctccgcaaccgatattatttgcccgatgtacgcgcgcgtggatgaagaccagcccttcccggcggtgccgaaatggtccatcaaaaaatggctttcgctgcctggagaaatgcgcccgctgatcctttgcgaatatgcccacgcgatgggtaacagtcttggcggcttcgctaaatactggcaggcgtttcgtcagtacccccgtttacagggcggcttcgtctgggactgggtggatcagtcgctgattaaatatgatgaaaacggcaacccgtggtcggcttacggcggtgattttggcgatacgccgaacgatcgccagttctgcatgaacggtctggtctttgccgaccgcacgccgcatccggcgctgacggaagcaaaacaccagcagcagtttttccagttccgtttatccgggcgaaccatcgaagtgaccagtgaatacctgttccgtcatagcgataacgaactcctgcactggtcggtggcgctggatggcaagccgctggcaagcggtgaagtgcctctggatgttggcccgcaaggtaagcagttgattgaactgcctgaactgccgcagccggagagcgccggacaactctggctaacggtacgcgtagtgcaaccaaacgcgaccgcatggtcagaagccggacacatcagcgcctggcagcaatggcgtctggcggaaaacctcagcgtgacactcccctccgcgtcccacgccatccctcaactgaccaccagcggaacggatttttgcatcgagctgggtaataagcgttggcaatttaaccgccagtcaggctttctttcacagatgtggattggcgatgaaaaacaactgctgaccccgctgcgcgatcagttcacccgtgcgccgctggataacgacattggcgtaagtgaagcgacccgcattgaccctaacgcctgggtcgaacgctggaaggcggcgggccattaccaggccgaagcggcgttgttgcagtgcacggcagatacacttgccgacgcggtgctgattacgaccgcccacgcgtggcagcatcaggggaaaaccttatttatcagccggaaaacctaccggattgatgggcacggtgagatggtcatcaatgtggatgttgcggtggcaagcgatacaccgcatccggcgcggattggcctgacctgccagctggcgcaggtcgcagagcgggtaaactggctcggcctggggccgcaagaaaactatcccgaccgccttactgcagcctgttttgaccgctgggatctgccattgtcagacatgtataccccgtacgtcttcccgagcgaaaacggtctgcgctgcgggacgcgcgaattgaattatggcccacaccagtggcgcggcgacttccagttcaacatcagccgctacagccaacaacaactgatggaaaccagccatcgccatctgctgcacgcggaagaaggcacatggctgaatatcgacggtttccatatggggattggtggcgacgactcctggagcccgtcagtatcggcggaattccagctgagcgccggtcgctaccattaccagttggtctggtgtcaaaaataa

SEQ ID NO: 66 - DNA, 1092 bp, Escherichia coli
gtggtgaatgtgaaaccagtaacgctatacgatgtcgcggagtatgccggtgtctcttatcagaccgtttcccgcgtggtgaaccaggcctgccacgtttctgcgaaaacgcgggaaaaagtggaagcggcgatggcggagctgaattacattcccaaccgcgtggcacaacaactggcgggcaaacagtcgttgctgattggcgttgccacttccagtctggccctgcacgcgccgtcgcaaattgtcgcggcgattaaatctcgcgccgatcaattgggtgccagcgtggtggtgtcgatggttgaacgaagcggcgtcgaagcctgtaaagcggcggtgcacaatcttctcgcgcaacgcgtcagtgggctgatcattaactatccgctggatgaccaggatgccattgctgtggaagctgcctgcgctaatgttccggcgttatttcttgatgtctctgaccagactcccatcaacagtattattttctcccatgaagacggtacgcgactgggcgtggagcacctggtcgcattgggtcaccagcaaatcgcgctgttagcaggtccattaagttctgtctcggcgcgtctgcgtctggcgggctggcataaatatctcacacgcaatcaaattcagccgataacagaacgggaaggcgactggagtgccatgtccggttttcaacaaaccatgcaaatgctaaatgagggcatcgttcccactgcgatgctggttgccaacgatcagatggcgctgggcgcaatgcgcgccattaccgagtccgggctgcgcgttggtgcggatatctcggtagtgggatacgacgataccgaagacagctcgtgttatatcccgccgttaaccaccatcaaacaggattttcgcctgctggggcaaaccagcgtggaccgcttgctgcaactctctcagggccaggcggtgaagggcaatcagctgttgcccgtctcactggtgaaaagaaaaaccacccttccgcccaatacgcaaaccgcctctccccgcgcgttggccgattcattaatgcagctggcacgacaagtttcccgactggaaagcgggcagtga

SEQ ID NO: 67 - DNA, 540 bp, Escherichia coli
atggcaaaacttaccttacaagagcagttgctcaaagcgggactagtcaccagcaaaaaagcggcgaaggtcgagagaacggcgaaaaaatcgcgtgttcaggcgcgtgaagctcgggcggcggtagaagaaaataaaaaggcacagcttgagcgtgataaacagcttagcgagcaacaaaaacaagcggcgttggcgaaagaatataaagcccaggtgaagcagctcattgaaatgaaccgaattaccattgccaatggcgatattggttttaacttcactgacggcaatctgattaagaaaatctttgtcgataaaatcacgcaaacgcagttgattaatggtcgtctggcgattgcccgcttgttggtcgataacaataacgaaggtgaatacgccattattcccgccagcgttgccgataaaattgctcagcgtgatgccagcagtattgtgttgcacagcgcgctcagcgccgaagagcaggatgaagacgatccgtatgccgacttcaaagtgcctgatgatttgatgtggtaa

SEQ ID NO: 68 - DNA, 834 bp, Escherichia coli
atggaactcattgaaaaacatgccagctttggcggctggcaaaatgtgtatcggcattattcccaatcactgaaatgtgaaatgaatgtcggcgtctatctcccaccaaaagccgagaatgaaaaattgccggtgttgtactggctttcaggcctgacctgcaacgagcagaatttcattactaaatcggggatgcagcgttacgcggctgagcacaacattattgttgttgcgccggacaccagtccgcgaggcagtcatgtcgcagatgctgaccgttacgatctcgggcaaggtgccgggttttacctgaacgcgacgcaagcgccgtggaatgaacattacaaaatgtatgactatatccgcaacgagctgccgaatttagtgatgcatcattttccagcaacggccagaaagtctatctcaggtcattctatgggcgggctgggcgcgctggtgctggcgttacgtaacccagatgaatatgccagcgtctcggcgttttcgcccattgtctccccatcgcaagtaccgtggggacagcaagcctttgccgcatatcttggtgaaaataaagatgcctggttggattacgacccggtgagtcttatttcacaaggtcaacgcgttgcggaaatcatggttgatcagggattgagtgatgatttttacgcagaacagctgcggactccaaatcttgaaaagatctgccaggagatgaatatcaagacgttaatccgttatcacgagggttatgatcacagctattattttgtctccagttttattggcgagcatattgcgtaccacgccaataaactgaatatgcgttga

SEQ ID NO: 69 - DNA, 1110 bp, Escherichia coli
atgaaatcacgtgctgccgttgcatttgctcccggtaaaccgctggaaatcgttgaaattgacgttgcaccaccgaaaaaaggtgaagtgctgattaaagtcacccataccggtgtttgccataccgacgcatttaccctctccggcgatgacccggaaggtgtcttcccggtggttctcggtcacgaaggggccggggttgtagttgaagtcggtgaaggggtaaccagcgtcaaacctggcgaccatgtgatcccgctttacaccgcagagtgcggcgagtgtgagttctgtcgttctggcaaaactaacctgtgtgtcgcggttcgcgaaacgcagggcaaaggcttgatgccagacggtaccacccgtttttcttacaacgggcagccgctttatcactacatgggatgctcaacattcagtgaatacaccgtggtagcggaagtgtctctggccaaaattaatccagaagcgaaccatgaacacgtctgcctgctgggctgtggcgtgaccaccggtattggcgcggtacacaacacagctaaagtccagccaggtgattctgttgccgtgtttggtcttggcgcgattggtctggcagtggttcagggcgcgcgtcaggcgaaagcgggacggattatcgctatcgataccaacccgaagaaattcgaactggcgcgtcgcttcggtgccaccgactgcattaacccgaatgactacgacaaaccaattaaagatgttctgctggatatcaacaaatggggtatcgaccatacctttgaatgcatcggtaatgtcaacgtgatgcgtgcagcgctggaaagcgcgcaccgcggctggggtcagtcggtgatcatcggggtagcaggctccggtcaggaaatctccacccgtccattccagttggtcaccggtcgcgtatggaaaggttccgcgtttggcggcgtgaaaggtcgttcccagttaccgggtatggttgaagatgcgatgaaaggtgatatcgatctggaaccgtttgtcacgcatacaatgagcctggatgaaattaatgacgccttcgacctgatgcatgaaggtaaatccattcgaaccgtaattcgttactga

SEQ ID NO: 70 - DNA, 276 bp, Escherichia coli
atgcccagtactccggaagagaagaaaaaggtccttactcgagttcgtcgtattcgggggcagattgatgctctggaacggtcgctggagggtgatgccgaatgccgtgccatactccaacagatcgctgccgttcggggcgcggctaacgggctgatggcagaagtgcttgaaagccatatccgggaaacgtttgaccgaaatgactgctacagccgcgaagtcagccaatccgttgacgacactattgaactggttcgtgcctatcttaaatag

SEQ ID NO: 71 - DNA, 963 bp, Escherichia coli
atggcaatttcatcgcgtaacacacttcttgccgcactggcattcatcgcttttcaggcgcaggcggtgaacgtcaccgtggcgtatcaaacctccgccgaaccggcgaaagtggctcaggccgacaacacctttgctaaagaaagcggagcaaccgtggactggcgtaagtttgacagtggagccagcatcgtgcgggcgctggcttcgggcgacgtgcaaatcggcaacctcggttccagcccgttagcggttgcaaccagccaacaggtgccgattgaagtcttcttgctggcgtcaaaactgggtaactccgaagcgctggtggtaaagaaaactatcagtaaaccggaagacttgattggtaaacgcatcgccgtaccgtttatctccaccacccactacagcttgctggcggcgctgaaacactggggtattaaacctgggcaagttgagattgtgaacctgcagccgcccgcgattatcgccgcatggcagcggggagatattgatggtgcttatgtctgggcaccggcggttaacgccctggaaaaagatggcaaggtgctgaccgattctgaacaggtcgggcagtggggcgcgccgacactggacgtctgggtcgtgcggaaagattttgccgagaaacatcctgaggtcgtgaaagcgttcgctaaaagcgccatcgatgctcagcaaccgtacattgctaacccagacgcgtggctgaaacagccggaaaacatcagcaaactggcgcggttaagcggcgtgccggaaggtgacattccggggctggtgaaggggaatacctatctgacgccgcagcagcaaacggcagaactgaccggaccggtgaacaaagcgatcatcgacaccgcgcagtttttgaaagagcagggcaaagtcccggctgtagcgaatgattacagccagtacgttacctcgcgcttcgtgcaataa

SEQ ID NO: 72 - DNA, 768 bp, Escherichia coli
atgctgcaaatttctcatctttacgccgattatggcggcaaaccggcactggaagatatcaacctgacgctggaaagcggcgagcttctggtagttctggggccgtctggctgcggcaaaactacgttgctgaatttgattgctggttttgtgccttatcagtatggcagcattcaactggcgggtaagggtattcagggaccgggagcagagcgtggcgtagtttttcagaatgaagggttgttaccgtggcgcaatgtacaggacaacgtggcgttcggcctgcaactggcaggtgtagagaaaatgcagcgactggaaatcgcacaccagatggtgaaaaaagtcgggctggaaggcgcagaaaaacgctacatctggcagctttccggtggtcaacgtcagcgggtggggattgcccgcgcgttggcggcaaatccccagctgttattactcgacgaaccgtttggtgcgctggacgccttcacccgcgaccagatacaaaccctgctgctgaaactctggcaggagacgggaaagcaggtgctgttgattacccacgatatagaagaagcggtgtttatggcgactgaactggttctgctttcacccggcccaggccgcgtgctggagcggctgccgctcaacttcgcccgccgctttgttgcgggagagtcgagccgcagcatcaagtccgatccacaattcatcgccatgcgcgaatatgttttaagccgcgtatttgagcaacgggaggcgttctcatga

SEQ ID NO: 73 - DNA, 828 bp, Escherichia coli
atgagtgtgctcattaatgaaaaactgcattcgcatcggctgaaatggcgctggccgctctcgcgtcaggtgaccttaagcattggcacgttagcgattttactcactgtatggtgggtagtcgcggcgctgcaactgattagcccgctgtttttgccgccaccgcaacaggtactggcaaaactgctcaccattgccgggccgcagggatttatggacgccacgctgtggcagcatctggcagccagcctgacgcgcattgtgctggcgctactcgcggcggtgttgatcggtattccggtcgggatcgccatggggctaagcccgacggtgcgcggcattctggatccgataatcgagctttatcgtccggtgccgccgctggcttatttgccgctgatggtgatctggtttggtattggcgaaacctcgaagatcttactgatctatctagcgatttttgcgccggtggcgatgtcggcgctggcgggggtgaaaagcgcgcagcaggttcgcattcgtgccgcccagtcgctgggtgccagccgtgcgcaggtgctgtggtttgtcattttgcccggcgcgctgccggaaatcctcaccggattacgcattggtctgggtgtgggctggtctacgctggtggcggcggagctgattgccgcaacgcgcggtttaggatttatggttcagtcagcgggtgaatttctcgcgactgacgtggtgctggcggggatcgcggtgattgcgattatcgcctttcttttagaactgggtctgcgcgcgttacagcgccgcctgacgccctggcatggagaagtacaatga

SEQ ID NO: 74 - DNA, 852 bp, Escherichia coli
atgagtgaacgtctgagcattaccccgctggggccgtatattggcgcacaaattacgggggccgacttaacgcgcccgttaagcgataatcagtttgaacagctttaccatgcggtgctgcgccatcatgtggtgtttctgcgcgatcaagctattacgccgcagcagcaacgcgcgctggcccagcgttttggcgagctgcatattcaccctgtttaccctcatgctgaaggggttgacgagatcatcgtcctggatacccataacgataatccgccggataacgacaactggcacaccgatgtgacatttattcaaacgccacccgcaggggcgattctggcggcgaaagagttaccctcgaccggcggcgatacgctctgggccagtggtattgccgcatatgaggcgctctctgttcccttccgccagctgttgaacgggttgcgtgcggagcatgatttccgtaaatcgttcccggaatacaagtaccgcaaaaccgaggctgagcatcaacgctggcgtgaggcggtcgcgaaaaatccaccgttgctacatccggtggtgcgaacgcatccggtgaccggtaaacaggcgctgtttgtgaacgaaggttttaccacacgaattgttgatgtcagcgagaaagagagcgaagccttgttaggttttttgtttgcccatatcactaaaccggagtttcaggtacgctggcgctggcaaccgaatgatattgcgatttgggataaccgcgtgactcagcactatgccaatgcggattacctgccacagcggcggattatgcatcgggcgacgattcttggggatattccgttttatcgggcggggtaa

SEQ ID NO: 75 - DNA, 975 bp, Escherichia coli
atgacagatttaatccaacgccctcgtcgcctgcgcaaatctcctgcgctgcgcgctatgtttgaagagacaacacttagccttaacgacctggtgttgccgatctttgttgaagaagaaattgacgactacaaagccgttgaagccatgccaggcgtgatgcgcattccagagaaacatctggcacgcgaaattgaacgcatcgccaacgccggtattcgttccgtgatgactttcggcatctctcaccataccgatgaaaccggcagcgatgcctggcgggaagatggactggtggcgcgtatgtcgcgcatctgcaagcagaccgtgccagaaatgatcgttatgtcagacacctgcttctgtgaatacacatctcacggtcactgcggtgttctgtgcgagcatggcgtcgacaacgacgcgactctggaaaatttaggcaagcaagctgtggttgcagctgctgcaggcgcagacttcatcgccccttctgccgcgatggatggtcaggtacaggcgattcgccaggcgctggacgctgcgggctttaaagatacggcgattatgtcgtattcgaccaagttcgcctcctccttttatggcccgttccgtgaagctgccggaagcgcattaaaaggcgaccgcaaaagctatcagatgaacccaatgaaccgtcgtgaggcgattcgtgagtcgctgctggatgaagcccagggcgcagactgcctgatggttaaacctgccggagcatacctcgacatcgtgcgtgagctgcgtgaacgtactgaattgccgattggcgcgtatcaggtgagcggtgagtacgcgatgattaagttcgccgcgctggcgggtgctatagatgaagagaaagtcgtgctcgaaagcttaggttcgattaagcgtgcgggtgcggatctgattttcagctactttgcgctggatttggctgagaagaagattctgcgttaa

SEQ ID NO: 76 - DNA, 2949 bp, Escherichia coli
atgcactcctggaaaaagaaacttgtagtatcacaattagcattggcttgcactctggctatcacctctcaggctaatgcagcgaccaacgatatttctggtcaaacttacaatactttccatcactacaacgacgccacctatgctgatgacgtttactatgatggttatgtaggctggaataactatgccgctgatagttattacaacggcgatatctatccggtcattaataacgctaccgttaacggcgtgatttctacctactatctggacgatggtatttctactaataccaacgccaatagcctgacaatcaaaaacagcactattcacggcatgatttattccgagtgcatgacaactgattgtgctgatcgtgcggatgactactaccatgatcgtctggcgctgaccgttgataattcaacgatcgatgacaactacgaacactacacatataacggcacctacaataatgccgctgacactcatgttgtaaatgtatttaacattggtactgccatcactctggatcaggaagttgatctgtccatctctaataactctcatgtagcaggtattacgctgactcagggttatgagtgggaagatatcgacgacaacactgtcagcactggtgtaaacagcagcgaagtatttaataacaccatcactgttaaagattctaccgtgacctctggttcatggactgatgaaggtactactggttggtttggtaatactggtaatgctagtgattacaatggtgatgggtggaatgctgatgatgttgcattagctgttattgcacatccatatgctgataacgccatgcaaaccactgcaacattcgacaattccacactgatgggcgatgtattcttctcaagtaattttgatgagaacttcttcccacaaggtcgtgatagctatcgtgatgctgacggtgatgtagatactaacggttgggatggtactgatcgcctggatctgaccctgaacaatggcagcaagtgggtcggtgcggcaatgtctgcgcatcagattggtgttgatactgatgacgatggtgtaaatgactcctatacatatggaatcaatactgaagccactgcaactctgatcgacatcgcagctaacagcctgtggccttcatcaactgttggtgtagaaaacagcgactctgaatacagcgaatttgatcacatcatcggtaacgaagtttaccagagcggtctgttcaatgtgaccctgaacaccggttcacagtgggataccaccaaaacttctctgattgatactctgagcatcaacagtggttcaactgttaatgttgctgattcaacgctgatttctgactctatctctctgactggtctttctgcgctgaacatcaacgaagatggtcatgttgcaactgattcactgactgtcgacaacagtaccgtaaccatttctgatgaagtttctgctggctgggctgtaggtgatgctgctctgtatgctaacaacatcaaagtgactaacgacggtatcctggatgtaggtaacactgcggcgaatgctctgcaggttgatactctgaacctgaccagcactactgataccagtggtaacattcacgcaggtgtgttcaacatcgaaagcaaccgcttcgtactcgatgccgatctgaccaacgaccgtaccaacgatactaccaagtcaaactacggttatggcttaatcgcaatgaactctgatggtcacctgaccattaacggtaacggcgataacgacaacactgcttctatcgaagctggtcagaacgaagttgataacaacggtgaccatgttgcagctgcaaccggtaactacaaagttcgtatcgacaacgctactggtgctggttctatcgctgactacaacggcaacgagctgatctacgtcaacgacaaaaacagcaacgcgaccttctctgctgctaacaaagctgacctgggtgcatacacctatcaggctgagcagcgtggtaacaccgttgttctgcatcagaccgagttgaccgactacgctaacatggcgctgagcatcccgtctgcgaacaccaatatctggaacctggaacaagacaccgttggtactcgtctgaccaactctcgtcatggtctggctgataacggcggcgcatgggtaagctacttcggtggtaacttcaacggcgacaacggcaccatcaactatgatcaggatgttaacggcatcatggtcggtgttgataccaaaattgacggtaacaacgctaagtggatcgtcggtgcggctgcaggcttcgctaaaggtgatatgaatgaccgttctggtcaggtggatcaagacagccagactgcctacatctactcttctgctcacttcgcgaacaacgtctttgttgacggtagcttgagctactctcacttcaacaacgacctgtctgcaaccatgagcaacggtacttacgttgacggcagcaccaactccgacgcttggggctttggtttgaaagccggttacgacttcaaactgggtgatgcaggttacgtgactccttacggcagcgtttctggtctgttccagtctggtgatgattaccagctgagcaacgacatgaaagttgatggtcagtcttacgacagcatgcgttatgaactgggtgtagatgcaggttataccttcacctacagcgaagaccaggctctgactccgtacttcaaactggcttacgtctacgacgactctaacaacgataacgatgtgaacggtgattccatcgataacggtactgaagggtctgcggtacgtgttggtctgggtactcagttcagcttcaccaagaacttcagcgcctataccgatgctaactacctcggtggtggtgacgtagatcaagactggtccgcgaatgtgggtgttaaatatacttggtaa

SEQ ID NO: 77 - DNA, 624 bp, Escherichia coli
atgttatctgtagttaaacctcttcaggaatttggtaagctcgataaatgtttgtccagatacggtacgcgcttcgagtttaataatgaaaagcaagttatattttccagtgatgtcaatagcgaagatactttcgttattttagagggcgttatctctttgcgtagagaagaaaacgtacttatcggtattacacaggctccttatattatggggctggctgatggtttaatgaaaaacgatataccatacaaattaatatcagaaggaaactgtacgggatatcatttgccagccaaacaaaccattactcttattgaacaaaatcaactctggcgagacgctttttactggttagcctggcaaaatagaattctggaattacgcgacgttcagctcattgggcataattcctacgaacaaatccgcgcgacgttattatcaatgattgactggaatgaagaattgcgatcacgtattggcgtgatgaattatatccatcaacgtacacgtatatcgcgttctgtcgttgcggaagttctcgctgctttgcgtaaaggcggctatatcgaaatgaataaaggcaaactggtcgctatcaaccgtttgccttcagagtattaa

SEQ ID NO: 78 - DNA, 1158 bp, Escherichia coli
ttgaaacgtagtctgcttttttctgccgtgctgtatgcggcgtcattgacctccgtccatgcggctcagccgatcactgaaccggagtttgcctctgatattgtcgatcgttatgccgatcatattttttacggcagcggtgccacggggatggcgctggttgttatcgacggtaaccagcgcgtctttcgcagttatggcgaaacgcgacctggtaataacgttcgcccgcagctggattccgtcatacgtattgcttccctcaccaagttaatgaccagtgagatgctggtgaaattgctcgaccaggggaccgtgaagttaaacgatccgctaagtaaatatgctccgccaggcgcacgcgtaccgacctacaatgggacgcccattacgctggtgaatctggcaacccataccagcgccctgccccgtgaacagcccggtggcgcggcacatcgtccggtatttgtctggccaacgcgcgagcaacgctggaaatacctttccactgccaaactaaaagccgcgccgggcagccaggccgcgtactccaacctcgcattcgatctgctggcagatgcactggcgaatgcgtccggcaagccttatacccagttgtttgaagagcagattacccgtccgttggggatgaaagacaccacctacaccccctcaccggatcagtgccgccgtttaatggttgctgagcgcggtgccagtccgtgcaataacacgctggcggcaattggcagcggcggcgtctattccacgccaggcgatatgatgcgctggatgcagcagtatttgtcatctgatttttatcagcgcagtaaccaggctgatcgcatgcagacgttgatttatcagcgcgcgcagtttacaaaagtgattggcatggatgtccccggcaaagcggatgcgcttggtttaggctgggtatatatggccccgaaagagggtcgtccggggattattcagaagacaggtggtggtggcggtttcattacctatatggcgatgatcccgcagaagaatattggcgcgtttgtggtggtcactcgttcgccgttgacgcgctttaaaaatatgagcgatggcatcaatgacctggtgaccgagctaagcgggaataaaccgttggttatccccgcatcctga

SEQ ID NO: 79 - DNA, 1221 bp, Escherichia coli
atgtttaagtcttttttcccaaagccgggaacgttttttctctcggcctttgtttgggcattgattgccgttatcttctggcaagccggtgggggtgattgggtggcgcgtatcaccggcgcttccgggcagatcccgattagcgccgcgcgtttctggtcgttggatttcctgattttttacgcttactacattgtttgcgtaggactttttgcattgttctggtttatctatagcccgcaccgttggcaatactggtcaatactcggtactgcgctgattatctttgtcacctggtttttggtggaagtcggggttgccgtcaacgcctggtatgcgccgttctatgatctgattcaaacggcgctaagttcgccgcataaagtcaccatcgaacaattttaccgcgaagtgggcgtctttctggggattgcgctgatcgcggtggtgatcagtgtgctgaacaacttctttgtcagtcactacgtgttccgctggcgtacggcgatgaacgaatattacatggcgaactggcaacaactgcgtcatatcgaaggggccgcgcagcgtgtgcaggaagacaccatgcgttttgcttcaacgctggagaatatgggcgtcagctttatcaacgctatcatgacgttgatcgccttcctgccggtgctggtaacgctctccgcacatgtgccggagctgccgattgtcgggcacattccgtatggtctggtgattgccgctatcgtctggtcgctgatggggaccggattactggcagtggtagggatcaaactgccggggctggagtttaaaaaccagcgtgtagaggctgcctaccgtaaagagctggtttatggtgaagacgatgccacgcgcgcgacgccgcctacggtacgcgagctttttagcgccgtacggaaaaactatttccgcctctattttcactatatgtatttcaatatcgcccgcattctctatttgcaggtcgataacgttttcggtttgttcttgctgtttccgtcaattgttgccggtacgattacactcggcctgatgacgcagattactaacgtttttggtcaggttcgcggtgctttccagtacctgattaactcatggaccacactggttgagttgatgtctatctacaaacgtctgcgcagctttgaacatgagctggatggtgacaaaattcaggaagtaacccataccttgagctaa

SEQ ID NO: 80 - DNA, 1095 bp, Escherichia coli
atgtcgcgcgtcaatcctctatcttcgctgtcattgttggcggttctgattttagcggggtgtagtagtcaggctccgcaaccgttgaaaaagggcgaaaaagcgatagatgtggcgagcgtcgtgcggcagaagatgcctgcgagcgtgaaagaccgcgatgcctgggcgaaagatctcgccaccacctttgaaagtcaggggctggcaccgacgctggaaaacgtctgctcggtgctggcggtggcgcagcaggagtcaaattatcaggcagatccggccgttccgggcttaagcaagatcgcctggcaagagattgaccgtcgtgctgaacggatgcacattcctgcttttctggtgcataccgcgctaaaaatcaaatcgccaaacggcaaaagctatagcgaacggttagattcggtgcgtacagaaaagcaattgagcgcgatttttgacgatctgatcagcatggtgccaatggggcagacgctgtttggttcgctcaatccggtgcgcaccggtgggccgatgcaggtcagtattgcttttgccgaacagcataccaaagggtatccgtggaaaatggacggtacagtccgtcaggaagtcttcagtcgccgcggcgggttgtggtttggtacttaccatttactgaattatcccgccagctatagcgcgccgatataccgttttgctgattttaacgctggctggtacgccagccgtaatgccgcgtttcagaacgcggtcagtaaggccagcggcgtgaagctggcactggacggtgatttaattcgttacgacagtaaagagcccgggaaaaccgaactggcaacgcgcaaactggcgggaaaactggggatgagcgacagcgaaattcgccgtcagttagagaaaggggacagcttctcttttgaggagacggcgctgtacaagaaagtttatcaacttgccgaagcgaaaaccggtaaatcactaccccgcgaaatgttgcctggcattcaactggaaagcccgaaaatcacccgcaatctgactacggcctggtttgcgaagcgcgtagacgaacggcgggcgcgttgtatgaaacagtga

SEQ ID NO: 81 - DNA, 309 bp, Escherichia coli
atggctgatttcaccctgtcaaaatcgctgtttagcggaaaatatcgcaatgcctcttcaacgcctggcaatattgcctatgcgttgtttgtgctgttttgcttttgggctggggcacaattgctgaacctgctagtgcatgcgcccggcgtctatgagcgtttaatgcaggtccaggaaacaggtcgcccacgggtggaaattggtttaggtgtcggcaccatttttgggctgatcccgtttttagtaggctgcctcatttttgcagtagtggcgctatggctgcactggcgacatcgccgccagtaa

SEQ ID NO: 82 - DNA, 213 bp, Escherichia coli
atgaatctgcctgtaaaaatccgccgtgactggcactactatgcgttcgccattggccttatattcattcttaatggcgtggtggggttactgggatttgaagcaaaaggttggcagacctatgccgtcggtctggtgacgtgggtgattagtttctggctggcggggttgattattcgtcgtcgcgatgaagaaactgaaaacgcccaataa

SEQ ID NO: 83 - DNA, 1095 bp, Escherichia coli
atggaaaaactgcgggtaggaatcgtttttggtggtaaatcagcggaacatgaagtgtctctgcaatcggcaaaaaacattgtcgatgccattgataaaagtcgcttcgatgttgtgctgctgggcattgataaacaagggcaatggcacgtcagcgatgccagcaattatctgctaaatgcagacgatcctgcccatattgcgttgcgcccttcggcgaccagccttgcgcaggtgccaggtaaacatgagcatcagcttatcgacgcacaaaacggtcagccgttgccgacggtggatgtcattttcccgattgtccacggtacgctgggcgaagatggttccttgcagggaatgctgcgggtcgccaatttaccgtttgtaggttctgatgttctggcttcagcggcctgtatggataaagatgtcaccaaacgtctgctgcgcgatgccgggctgaacattgcgccatttattaccctgacgcgcgctaatcgtaacaacatcagttttgccgaagtagagtctaaactggggttaccactgtttgtaaaaccggctaatcagggctcttctgttggtgtcagcaaagtaaccagtgaagaacagtacacaattgccgtcgatctggcgttcgagttcgatcataaagtgatcgttgagcaagggatcaaaggtcgtgaaatcgaatgcgcagttcttggcaacgataacccgcaagcaagcacctgtggcgagatcgtactcaccagcgatttctatgcctacgacaccaagtacattgacgaagatggcgcgaaagtggtagttccggcagccattgcgccagaaatcaacgataagatccgggcgattgccgttcaggcttatcagacgttgggatgcgcaggcatggcgcgtgtagacgtgtttttaaccccagagaacgaagtggtgatcaacgagatcaacaccctgcctggcttcaccaacatcagtatgtatccgaagctgtggcaagccagcggtctgggttacaccgacctgatcacgcgtttgattgagctggcgctggagcgtcacgctgcggataacgcactgaaaaccacaatgtaa

SEQ ID NO: 84 - DNA, 261 bp, Escherichia coli
atgaaaaatctcattgctgagttgttatttaagcttgcccaaaaagaagaagagtcgaaagaactgtgcgtgcaggtagaagctttggagattatcgtcacggcaatgcttcgcaatatggcgcaaaatgatcaacagcggttgattgatcaggtagagggggcgctgtacgaggtaaagcccgatgccagcattcctgacgacgatacggagctgctgcgcgattacgtaaagaagttattgaggcatcctcgtcagtaa

SEQ ID NO: 85 - DNA, 1416 bp, Escherichia coli
gtgaaacaaagcactattgcactggcactcttaccgttactgtttacccctgtgacaaaagcccggacaccagaaatgcctgttctggaaaaccgggctgctcagggcgatattactgcacccggcggtgctcgccgcttaacgggtgatcagaccgccgctctgcgtgattctcttagcgataaacctgcaaaaaatattattttgctgattggcgatgggatgggggactcggaaattactgccgcacgcaattatgccgaaggtgcgggcggcttttttaaaggtatcgatgccttaccgcttaccgggcaatacactcactatgcgctgaataaaaaaaccggcaaaccggactacgtcaccgactcggctgcatcagcaaccgcctggtcaactggtgtcaaaacctataacggcgcgctgggcgtcgatattcacgaaaaagatcacccaacgattctggaaatggcaaaagccgcaggtctggcgaccggtaacgtttctaccgcagagttgcaggatgccacgcccgctgcgctggtggcgcatgtgacctcgcgcaaatgctacggtccgagtgcgaccagtgaaaaatgtccgggtaacgctctggaaaaaggcggaaaaggatcgattaccgaacagctgcttaacgcccgtgccgatgttacgcttggcggcggtgcaaaaacctttgctgaaacggcaaccgccggtgaatggcagggaaaaacgctgcgtgaacaggcacaggcgcgtggttatcagttggtgagcgatactgcctcactgaattcggtgacggaagcgaatcagcaaaaacccctattaggactgtttgctgacggcaatatgccagtacgctggcaaggaccgaaagcaacgtaccacggtaatatagataagcccgcagtcacctgtacgcctaatccgcaacgtaatgacagtgtaccgaccctggcgcagatgaccgataaagccattgaattgttgagtaaaaatgagaaaggctttttcctgcaagttgaaggtgcgtcaatcgataaacaggatcacgctgcgaatccttgtgggcaaattggcgagacggtcgatctcgatgaagccgtacaacgggcgctggaattcgctaaaaaggatggtaacacgttggtcatagtcaccgctgatcacgcccatgccagccagatagttgcgccggataccaaagctccgggcctcacccaggcgctaaataccaaagatggcgcagtgatggtgatgagttacgggaactccgaagaggattcacaagaacataccggcagtcagttgcgtattgcggcgtatggcccgcatgccgccaatgttgttggactgaccgaccagaccgatctcttctacaccatgaaagccgccctggggctgaaataa

SEQ ID NO: 86 - DNA, 321 bp, Escherichia coli
atgaaaattacattactggttaccttgcttttcggtctggtttttttaaccaccgtcggcgctgccgagagaaccttaaccccacaacaacagcgtatgacctcttgtaatcagcaggcgacggcgcaggcgttgaaaggggatgctcgtaagacctacatgagtgattgcctgaagaacagcaaatctgcgcctggtgaaaaaagtttgacgccacagcagcaaaagatgcgcgaatgtaataatcaagcaacacaacaatctctgaaaggggatgatcgtaataagtttatgagtgcctgcctcaagaaagccgcctga

SEQ ID NO: 87 - DNA, 1116 bp, Escherichia coli
atgttcccaaaaataatgaatgatgaaaactttttcaaaaaagcggcggcgcatggggaggaacctcctttaactcctcaaaacgaacatcagcggtccgggctgcgctttgcccgtcgcgtcagactaccccgcgcggttggcctggctggcatgttcttaccgattgcttcaacgctggtttcgcatccgtcgccgggctggtggtggctgttgttggtcggctgggcgttcgtctggccgcatttagcctggcaaatagcgagcagggccgtcgatccgcttagccgggaaatttacaacttaaaaaccgatgcagtattagcgggaatgtgggtaggcgtaatgggcgtaaacgcactgccttccaccgcgatgttgatgattatgtgtctgaatttgatgggggcaggcggcccccgtctgtttgtcgcgggtctggtgttgatggtggtctcctgccttgtcaccctcgagctgacgggcatcaccgtgtcgttcaatagcgcaccgctggaatggtggctctcccttcccattattgtcatttatcctctgctgtttggctgggtcagctaccagacggcgactaaactggcggaacataaacgcaggttgcaggtcatgagtacccgcgacggtatgacgggcgtgtataaccgacgtcattgggaaactatgttacgcaatgaatttgataactgtcggcggcataatcgcgatgcaacgttactgattatcgatatcgaccatttcaagagcatcaacgatacctggggccatgatgtgggtgatgaagcgattgtggcgcttacccgacagttacaaattaccctacgcggtagcgatgtgattggtcggtttggcggcgatgagtttgcagtaatcatgtccggtacgccagcagagagcgccatcaccgccatgttacgggtgcatgaagggctaaacacgttacgcttgccgaatacgccacaggtaactttacggattagtgtgggggttgcgccgctgaatccacaaatgagtcactatcgcgagtggttgaaatcggcagatttggcgctctacaaggcaaagaaagccggacgtaaccgcaccgaagtggcggcctga

SEQ ID NO: 88 - DNA, 810 bp, Escherichia coli
atggaaaagaaaatcggttttattggctgcggcaatatgggaaaagccattctcggcggtctgattgccagcggtcaggtgcttccagggcaaatctgggtatataccccctccccggataaagtcaccgccctgcatgaccagttcggcatcaacgccgcagaatcggcgcaagaagtagcgcaaatcgccgacatcatttttgccgccgttaaaccaggcatcatgattaaagtgcttagcgaaatcacctccagcctgaataaagactctctggtcgtttctattgctgcaggtatcacgctcgaccagcttgcccgcgcgctgggccatgaccggaaaattatccgcgccatgccgaacactcccgcgctggttaatgccgggatgacctccgtaacgccaaacgcgctggtaaccccagaagataccgctgatgtgctgaatattttccgctgctttggcgaagcggaagtgattgctgagccgatgatccacccggtggtcggtgtgagcggttcttcgccagcctacgtctttatgtttatcgaagcgatggccgacgccgccgtgctgggcgggatgccacgcgcccaggcgtataaatttgccgctcaggcggtaatgggctccgcaaaaatggtgctggaaacgggagaacatccggggacactgaaagatatggtctgctcaccgggaggcaccaccattgaggcggtacgcgtactggaagagaaaggcttccgtgccgcagtgatcgaagcgatgacgaagtgtatggaaaaatcagaaaaactcagcaaatcctga

SEQ ID NO: 89 - DNA, 459 bp, Escherichia coli
atgacaatttgggtggatgccgacgcgtgtcccaatgtaattaaagagattttgtatcgcgcggcggaacgtatgcagatgccgctggtactggtagcaaaccagagtttacgcgtgccgccatcgcgatttattcgtacgctgcgcgtcgcggcaggtttcgacgttgctgataacgaaattgttcggcagtgtgaagcgggcgatttggtgatcaccgcagatatacctttggctgctgaagccatcgagaaaggcgcggcggcgcttaatccgcgcggcgaacgttacacgccagcgaccattcgtgagcgcctgacgatgcgcgattttatggataccttacgtgccagtgggatccagaccggaggaccagatagtctttcacaacgtgaccgccaggcttttgctgcggagctggagaagtggtggctggaagtgcaacgtagtcgtggctaa

SEQ ID NO: 90 - DNA, 525 bp, Escherichia coli
atgacacaacctctttttctgatcgggcctcggggctgtggtaaaacaacggtcggaatggcccttgccgattcgcttaaccgtcggtttgtcgataccgaccagtggttgcaatcacagctcaatatgacggtcgcggagatcgtcgaaagggaagagtgggcgggattccgcgccagagaaacggcggcactggaagcggtaactgcgccatccaccgttatcgccacgggcggcggcattattctgacggaatttaatcgtcacttcatgcaaaataacgggatcgtggtttatttgtgtgcgccagtatcagtcctggttaaccgactgcaagctgcaccggaagaagatttacggccaaccttaacgggaaaaccactgagcgaagaagttcaggaagtgctggaagaacgcgatgcgctatatcgcgaagttgcgcatattatcatcgacgcaacaaacgaacccagccaggtgatttctgaaattcgcagcgctctggcacagacgatcaattgttga

SEQ ID NO: 91 - DNA, 192 bp, Escherichia coli
atgccaacgaaaccgccttatcctcgtgaagcatatatagtgacgattgaaaaaggaaagccaggacagacggtaacctggtaccaactcagagccgatcatcctaaaccagactcgttgatcagtgaacatccgaccgctcaggaagcgatggatgcgaaaaaacgctatgaggaccctgacaaagagtga

SEQ ID NO: 92 - DNA, 678 bp, Escherichia coli
atgagtgcgtcgttggcgatcctgaccatcggcattgtacctatgcaggaagttttgccgctcctgacagaatacattgacgaagataatatttcccatcatagcctgctggggaagttaagccgcgaagaagtgatggcggagtacgcgccagaagcaggcgaagacaccattctcacattattaaatgacaaccatctggcccatgtttcgcgtcgcaaagtggagcgagacctgcaaggtgtggttgaagtgctcgataatcagggttacgacgtcattatattaatgagtacagcaaacattagtagtatgaccgcgcgtaatacgatctttcttgagccgtcgcggatattgccaccgctggtttcctctattgttgaagatcatcaggtgggggttatcgtaccggttgaggagttgctgaccgttcaggcgcaaaaatggcaaattttgcagaaaccgccagtattttcattgggtaatcccattcatgattcggaacaaaaaatcattgatgccgggaaagaattactggcaaaaggtgcagatgtcatcatgctggattgtttgggatttaaccagcgtcatcgcgatttactgcaaaaacagctcgatgttcctgtcttgctctctaacgtattgattgcacggctggctgcggaattactgatgtaa

SEQ ID NO: 93 - DNA, 285 bp, Escherichia coli
atgcttcaaagtaatgagtacttttccggcaaagtgaaatcgatcggcttttccagcagcagcactggtcgcgccagcgtgggtgttatggttgaaggtgaatacaccttcagcaccgctgagcctgaagagatgacggtaatcagtggcgcgctgaatgtgttactgcctgacgcgaccgactggcaagtgtatgaagccggttcgctgtttaatgttcccggtcacagcgagtttcatctgcaagttgccgaacccacctcttatctgtgccgctatctgtaa

SEQ ID NO: 94 - DNA, 180 bp, Escherichia coli
atgtcgttaacaacaccggagtatgtgcgttgcgcaatgccgtttggcgcaaatgatcattgcgactttgcagcaatgcacgccaccattcatcatctgatttatcttttatcgtcgccagttccgcaacaatatctggagatcttcgctgatatttatatcaaccttgatgaattatga

SEQ ID NO: 95 - DNA, 978 bp, Escherichia coli
atgcaaggccgccgacaattcgttatcatgcccgctaaatttaacgacaaggccgtggaaattatcatgctgtggttcaaaaatttaatggtttaccgtcttagccgcgagatttcgctgcgtgcagaagagatggaaaaacagctagcctcgatggcatttaccccatgcggcagccaggacatggcgaagatgggctgggtacctccgatgggatcgcacagcgatgcgttaacgcacgttgccaatggtcaaattgttatctgtgcgcgcaaagaagaaaaaatcctcccgtccccggtgattaaacaggcgctggaagcgaaaatcgccaaactggaagcggaacaggcgcgtaagctgaagaaaaccgaaaaagattcgctgaaagacgaagtgctgcactctctgctgccgcgtgctttcagccgttttagccagacaatgatgtggatcgacacggttaacggtttgattatggtggactgcgccagcgccaaaaaagcggaagatacgctggcactgctgcgtaaaagcctggggtcgttaccggttgtaccattgagcatggaaaacccgattgaactgacgctgaccgaatgggtacgttccggcagcacggcacagggcttccagctgcttgatgaagccgagctgaaatcgttgctggaagatggcggcgtgatccgcgcgaagaaacaagatctgaccagcgaagagatcaccaatcacatcgaagccggaaaagtggtgactaaactggcgctcgactggcagcagcgcattcagtttgtgatgtgcgacgatggttcgctcaagcgtctgaagttctgcgacgagctgcgcgatcaaaacgaagatatcgaccgtgaagatttcgcccagcgctttgatgccgatttcatcctgatgactggtgaactggcagcgttaattcaaaacctgattgaaggattaggtggcgaagcacaacgttaa

SEQ ID NO: 96 - DNA, 909 bp, Escherichia coli
gtgcgtataggtatcgatttaggcggcaccaaaactgaagtgattgcattgggcgatgcaggggagcagttgtaccgccatcgtctgcccacgccgcgtgatgattaccggcagactattgaaacgatcgccacgttggttgatatggcggagcaggcaacagggcagcgcggaacggtaggtatgggcattcctggttcgatttcgccctacaccggcgtggtgaagaatgccaattcaacctggctcaacggtcagccattcgataaagacttaagcgcgcggttgcagcgggaagtgcggctggcaaatgacgccaactgtctggcggtttcagaagcggtagatggcgcggcagcgggagcgcagacggtatttgccgtgattatcggcacgggatgcggcgcgggcgtggcattcaatgggcgggcgcatatcggcggcaatggcacggcaggcgagtggggacacaatccgctaccgtggatggacgaagacgaactgcgttatcgcgaggaagtcccttgttattgcggtaaacaaggttgtattgaaacctttatttcaggcacgggattcgcgacggattatcgtcgtttgagcggacatgcgctgaaaggcagtgaaattatccgcctggtagaagaaagcgatccggtagcggaactggcattgcgtcgctacgagctgcggctggcaaaatcgctggcacatgtcgtgaatattctcgatccggatgtgattgtcctgggcggcggaatgagcaatgtagaccgtttatatcaaacggttccacagttgattaaacaatttgtcttcggcggagaatgtgaaacgccggtacgcaaggcgaaacatggtgattcgagcggcgtacgcggcgctgcatggttatggccacaagagtaa

SEQ ID NO: 97 - DNA, 1269 bp, Escherichia coli
ttggcctcgctggtcgttatcctgcaatctatcactttattggctacggtgattggtagccgttctggtggttgtgatggtggtatgaaaaaagttattttatctttggctctgggcacgtttggtttggggatggccgaatttggcattatgggcgtgctcacggagctggcgcataacgtaggaatttcgattcctgccgccgggcatatgatctcgtattatgcgctgggggtggtggtcggtgcgcctataatcgcgcttttttccagccgctactcactcaaacatatcttgttgtttctggtggcgttgtgcgtcattggcaacgccatgttcacgctctcttcgtcttacctgatgctcgccattggtcggctggtttccggctttccgcatggtgcattttttggcgtcggcgcgatcgtgttatcaaaaattatcaaacccggcaaagtcaccgccgccgtggcagggatggtttccgggatgacagtcgccaatttgctgggcattccactgggaacgtatttaagtcaggaatttagctggcgctacacctttttgttgatcgctgtttttaatattgcggtgatggcatcggtctatttttgggtgccggatattcgcgacgaggcgaaaggaaaactacgcgaacaatttcactttttacgcagccctgccccgtggttaattttcgccgctacgatgtttggcaacgcaggtgtgtttgcctggttcagctacgtaaagccatacatgatgtttatttccggtttttcggaaacggcgatgacctttattatgatgttagttgggctagggatggtgctggggaatatgctaagtggcaggatttcaggacgttattcaccactgcgcattgcagcagtgactgactttatcattgtactggcactgctgatgctctttttcttcggcggtatgaaaacaacgtcgcttatttttgcttttatttgttgcgcgggattatttgccctatcagcacctctacaaatattattactgcaaaatgccaaaggcggagagttattaggtgccgcaggtgggcaaatagcgtttaacctcggtagcgccgtcggcgcatattgcggtggtatgatgctgacgctggggctggcatataattacgtggcgctgcccgctgccctgctttcgtttgctgcgatgtcgtcgttgctactgtatggtcgctataagcgccagcaagcggcggatagttcggtgctggcgaaaccactggggtag

SEQ ID NO: 98 - DNA, 3144 bp, Escherichia coli
atgaaaattctcagcctgcgcctgaaaaacctgaactcattaaaaggcgaatggaagattgatttcacccgcgagccgttcgccagcaacgggctgtttgctattaccggcccaaccggtgcggggaaaaccaccctgctggacgccatttgtctggcgctgtatcacgaaaccccgcgcctctctaacgtttcacaatcgcaaaatgatctcatgacccgcgataccgccgaatgtctggcggaagtggagtttgaagtcaaaggtgaagcgtatcgcgcgttctggagccagaatcgggcgcgtaaccagccggacggtaatttgcaggtgccacgcgtagagctggcgcgctgcgcagacggcaaaattctcgccgacaaagtgaaagataagctggaactgacggcgacgttaaccggactggattacgggcgcttcacccgttcgatgctgctttcgcaggggcaatttgctgccttcctgaatgccaaacccaaagaacgcgcagaattgctcgaggagttaaccggcactgaaatctacgggcaaatctcggcgatggtttttgagcagcacaaatcggcccgcacagagctggagaagctgcaagcgcaggccagcggcgtcgcgttgctcacgccggaacaagtgcaatcgctgacagcgagtttgcaggtacttactgacgaagaaaaacagttaattaccgcgcagcagcaagaacaacaatcgctaaactggttaacgcgtctggacgaattgcagcaagaagccagccgccgtcaacaggccttgcaacaggcattagccgaagaagaaaaagcgcaacctcaactggcggcgctcagtctggcacaaccggcacgaaatcttcgtccgcactgggaacgcatcgcagaacacagcacggcgctggcgcatactcgccagcagattgaagaagtaaatactcgcttacagagcacaatggcgcttcgtgcgagcattcgccaccacgcggcgaagcagtcagcagaattacagcagcagcaacaaagcctgaatgcctggttacaggaacacgaccgcttccgtcagtggaacaacgaactggcgggttggcgtgcacagttctcccaacaaaccagcgatcgcgagcatctgcggcaatggcagcaacagttaacccatgctgagcaaaaacttaatgcgcttgcggcgatcacgttgacgttaaccgccgatgaagttgctaccgccctggcgcaacatgctgagcaacgcccactgcgtcagcgcctggtcacactgcatgggcagattgttccccaacaaaaacgtctggcgcagttacaggtcgctatccagaacgtcactctggagcagacgcaacgtaatgccgcacttaacgaaatgcgccatcgttataaagaaaaaacgcaacaacttgccgatgtgaaaaccatttgcgagcaggaaactcgcattaaaacgctggaagcccagcgcgcgcagttacaggcgggtcagccttgtccactttgtggttccagcagccacccggcggtcgaggcgtatcaggcgctggaaccgggcgttaatcaggcccggctattaacgctggaaaaagaagtgaaaaagctcggcgaagaaggtgcggcgctacgtgggcaactggatgcattaacgaagcagcttcagcgcgatgagagcgaagcgcaaagcctccggcaagatgagcaagcacttactcaacaatggcaagccgtcacggccagcctcaatatcaccctgcagccacaggacgatattcaaccgtggctagatgcacaagatgagcacgaacgccagctgcggttactcagccaacggcatgaattacaagggcagattgccgcgcataatcagcaaattatccagtatcaacagcaaattgaacaacgccagcagcaactcttaacggcattggcgggttatgcgctgacattaccacaggaagatgaagaagagagctggttggcgacgcgtcagcaagaagcgcagagctggcagcaacgccagaacgaattaaccgcgctgcaaaaccgtatgcagcagctgactccgattctggaaacgttgccgcaaagtgatgaactcccgcacagcgaagaaactgtggcgctggaaaactggcggcaggttcacgaacaatgtctcgcattacacagccagcagcagacgttacagcaacaggatgttctggcggcgcaaagtctgcaaaaagcccaggcgcagtttgacaccgcgctacaggcgagcgtctttgaggatcagcaggcgttccttgcggcgctaatggatgaacaaacactaacgcagctggaacagctcaagcagaatctggaaaaccagcgccgtcaggcgcaaacgctggtcactcagacagcagaaacgctgacacagcatcagcaacaccgacctggcgggttggctctcactgtgacggcggaacagattcagcaagagttagcgcaaactcaccaaaagttgcgtgaaaacaccacgagtcaaggcgagattcgccagcagctgaagcaggatgcagataaccgtcagcaacaacaaaccttaatgcagcaaattgctcaaatgacgcagcaggttgaggactggggatatctgaattcgctaataggttccaaagagggcgataaattccgcaaatttgcccaagggctgacgctggataatttagtccatctcgctaatcagcaactcacccggctacacgggcgctatctgttacagcgcaaagccagcgaagcgctggaagttgaggttgttgatacctggcaggctgatgcggtacgcgatacccgtaccctttccggcggcgaaagtttcctcgtcagtctggcgctggcactggcgctttcagatctggtcagccataaaacgcgtattgactcgctgttccttgatgaaggttttggcacactggatagcgaaacgctggataccgcccttgatgcgctggatgccctgaatgccagtggcaaaaccatcggggtgattagccacgttgaggcgatgaaagagcgtattccggtgcagatcaaagtgaagaagatcaatggactgggctacagcaaactggaaagtgcgtttgcaatgaaataa

SEQ ID NO: 99 - DNA, 1203 bp, Escherichia coli
atgcgcatccttcacacctcagactggcatctcggccagaacttctacagtaaaagccgcgaagccgaacatcaggcttttcttgactggctgctggagacagcacaagcccatcaggtggatgcgattattgttgccggtgatgttttcgataccggctcgccgcccagttacgcccgcacgttatacaaccgttttgttgtcaatttacagcaaactggctgtcatctggtggtactggcaggaaaccatgactcggtcgccacgctgaatgaatcgcgcgatatcatggcgttcctcaatactaccgtggtcgccagcgccggacatgcgccgcaaatattgccccgtcgcgacgggacgccaggcgcagtgctgtgtcccataccttttttacgcccgcgtgacattattaccagccaggcggggcttaacggtattgaaaaacagcagcatttgctggcggctattactgattattatcaacaacattatgccgatgcctgcaaactgcgcggcgatcagcctctgcccatcatcgtcacgggacatttaacgaccgtgggtgccagtaaaagtgacgccgtgcgtgacatttatattggcacgctggacgcgtttccggcacaaaactttccaccagccgactacatcgcgctcgggcatattcaccgcgcgcagattattggcggcatggaacatgttcgctattgcggttcccccataccactaagttttgatgaatgcggtaagagtaaatatgtccatctggtgacattttcaaacggcaaattagagagcgtggaaaacctgaacgtaccggtaacgcaacccatggcggtgctgaaaggcgatctggcgtcgattaccgcacagctggaacagtggcgcgatatatcacaggagccgcctgtctggctggatatcgaaatcactactgatgagtatctgcatgatattcagcgcaaaatccaggcattaaccgaatcattgcctgtcgaagtattgctggtacgccggagtcgtgaacagcgcgagcgtgtgttagccagccaacagcgtgaaaccctcagcgaactcagcgtcgaagaggtgttcaatcgccgtctggcactggaagaactggatgaatcacagcagcaacgtctgcagcatcttttcgccacgacgttgcatagcctcgccggagaacacgaagcatga

SEQ ID NO: 100 - DNA, 690 bp, Escherichia coli
atggcgagacgtattctggtcgtagaagatgaagctccaattcgcgaaatggtctgcttcgtgctcgaacaaaatggctttcagccggtcgaagcggaagattatgacagtgctgtgaatcaactgaatgaaccctggccggatttaattctccttgactggatgttacctggcggctccggtatccagttcatcaaacacctcaagcgcgagtcgatgacccgggatattccagtggtgatgttgaccgccagaggggaagaagaagatcgcgtgcgcggccttgaaaccggtgcggatgactatatcaccaagccgttttctccgaaggagctggtggcgcgaatcaaagcggtaatgcgccgtatttcgccaatggcggtggaagaggtgatcgagatgcaggggctaagtctggacccgacatctcaccgggtgatggcgggcgaagaaccgctggagatggggccgacagaatttaaactgctgcacttttttatgacgcatcctgagcgcgtgtacagtcgcgagcagctgttaaaccacgtctggggaaccaacgtgtatgtggaagatcgtacggtcgatgtccacattcgtcgcctgcgtaaagcactggagcccggcgggcatgaccgcatggtgcagaccgtgcgcggtacagggtatcgtttttcaacccgcttttaa

SEQ ID NO: 101 - DNA, 1296 bp, Escherichia coli
gtgctggaacggctgtcgtggaaaaggctggtgctggagctgctactttgctgcctcccggctttcatcctgggtgcattttttggttacctgccctggtttttgctggcatcggtaacaggactgcttatctggcatttctggaatttattgcgcctttcatggtggctgtgggtggatcgtagtatgaccccgccaccggggcgtggtagctgggaaccgctactatacggcttacaccagatgcagctgcgaaataaaaaacgccgccgtgaactgggcaatctgattaaacgctttcgtagcggcgcggagtcgctgcccgacgcggtggtgctgaccacggaagagggcggtattttctggtgcaacggtctggcgcaacagattcttggcttgcgctggccggaagataacgggcagaacatccttaacttgctgcgttacccggagtttacgcaatatctgaaaacgcgtgatttctctcgcccgctcaatctggtgctcaacaccgggcggcatctggagattcgcgtcatgccttatacccacaaacagttgctgatggtggcgcgagatgtcacgcaaatgcatcaactggaaggggcgcggcgtaacttttttgccaatgtgagccatgagttacgtacgccattgaccgtgttacagggttacctggagatgatggatgagcaaccgctggaaggcgcggtacgtgaaaaagcgttgcacaccatgcgcgagcagacccagcggatggaagggttggtgaagcaattgctgacgctgtcgaaaatagaagccgcaccgacgcatttgctcaatgaaaaggttgatgtgccgatgatgctgcgcgtcgttgagcgcgaggctcagactctgagtcagaaaaaacagacatttacctttgagatagataacggcctcaaggtgtcaggcaacgaagatcagctacgcagtgcgatttcgaacctggtctataacgccgtgaatcatacgccggaaggcacgcatatcaccgtacgctggcagcgagtgccgcacggtgccgaatttagtgttgaagataacggaccgggcattgcaccggagcatattccgcgcctgaccgagcgtttttatcgcgttgataaagcgcgctcccggcaaaccggtggtagcggcttagggttagcgatcgtgaaacatgcggtgaatcatcacgaaagtcgcctgaatattgagagtacagtaggaaaaggtacacgtttcagttttgttatcccggaacgtttaattgccaaaaacagcgattaa

SEQ ID NO: 102 - DNA, 1320 bp, Escherichia coli
atgacccatcaattaagatcgcgcgatatcatcgctctgggctttatgacatttgcgttgttcgtcggcgcaggtaacattattttccctccaatggtcggcttgcaggcaggcgaacacgtctggactgcggcattcggcttcctcattactgccgttggcctaccggtattaacggtagtggcgctggcaaaagttggcggcggtgttgacagtctcagcacgccaattggtaaagtcgctggcgtactgctggcaacagtttgttacctggcggtggggccgcttttcgctacgccgcgtacagctaccgtttcttttgaagtgggcattgcgccgctgacgggtgattccgcgctgccgctgtttatttacagcctggtctatttcgctatcgttattctggtttcgctctatccgggcaagctgctggataccgtgggcaacttccttgcgccgctgaaaattatcgcgctggtcatcctgtctgttgccgcaattatctggccggcgggttctatcagcacggcgactgaggcttatcaaaacgctgcgttttctaacggcttcgtcaacggctatctgaccatggatacgctgggcgcaatggtgtttggtatcgttattgttaacgcggcgcgttctcgtggcgttaccgaagcgcgtctgctgacccgttataccgtctgggctggcctgatggcgggtgttggtctgactctgctgtacctggcgctgttccgtctgggttcagacagcgcgtcgctggtcgatcagtctgcaaacggtgcggcgatcctgcatgcttacgttcagcatacctttggcggcggcggtagcttcctgctggcggcgttaatcttcatcgcctgcctggtcacggcggttggcctgacctgtgcttgtgcagaattcttcgcccagtacgtaccgctctcttatcgtacgctggtgtttatcctcggcggcttctcgatggtggtgtctaacctcggcttgagccagctgattcagatctctgtaccggtgctgacagccatttatccgccgtgtatcgcactggttgtattaagttttacccgctcatggtggcataattcgtcccgcgtgattgctccgccgatgtttatcagcctgctttttggtattctcgacgggatcaaggcatctgcattcagcgatatcttaccgtcctgggcgcagcgtttaccgctggccgaacaaggtctggcgtggttaatgccaacagtggtgatggtggttctggccattatctgggatcgcgcggcaggtcgtcaggtgacctccagcgctcactaa

SEQ ID NO: 103 - DNA, 1374 bp, Escherichia coli
atggaaagtaagaacaagctaaagcgtgggctaagtacccgacacatacgctttatggcactgggttcagcaattggcaccgggctgttttacggttcggcagatgccatcaaaatggccggtccaagcgtgttgttggcctatattatcggtggtatcgcggcgtatatcattatgcgtgcgctgggggaaatgtcggtacataacccggcagccagctctttctcgcgttatgcgcaggaaaacctcggcccgctggcaggttacattaccggctggacctactgctttgaaatccttattgtcgccatcgccgatgtgaccgcttttggtatctatatgggtgtctggttcccgacggtgccgcactggatttgggtactgagtgtggtgctgatcatttgcgccgtaaacctgatgagcgtgaaggtattcggtgagctggagttctggttctcgttctttaaagtcgccactatcatcatcatgattgtcgccggtttcggcatcatcatctgggggattggcaacggcgggcaaccgaccggtattcataacctgtggagcaacggcggcttcttcagtaacggctggcttggtatggtgatgtcgttgcaaatggtgatgtttgcttacggtgggatcgaaattatcgggattaccgccggtgaagcgaaagatcctgagaaatcgattccgcgtgcgattaactccgtgccgatgcgtattctggtgttctacgtcggtacgctgttcgtcattatgtctatctacccgtggaatcaggttggcactgccggtagcccgtttgtgctgacgttccagcatatgggcattacctttgccgccagcattcttaactttgttgtgctgaccgcttcgctgtcggcaattaacagtgacgtatttggtgtaggccgtatgctccacggtatggcagagcagggcagcgcgccaaaaattttcagcaaaacctcgcgtcgcggtattccgtgggttacggtgctggtgatgactaccgcgctgctgtttgcggtgtatctgaactacatcatgccggaaaacgtcttcctggtgatcgcttcgctggcaaccttcgccacggtgtgggtgtggattatgatcctgctgtcgcaaatcgccttccgtcgccgtttgccgccagaagaagttaaggcgctgaaatttaaagtgccgggtggggtcgcaaccaccatcggcggtttgattttcctgctctttattatcgggttgattggttatcaccctgatacgcgtatctcgctgtatgttggtttcgcgtggattgttgtgctgttgattggctggatgtttaagcgccgccacgatcgtcagctggctgaaaaccagtaa

SEQ ID NO: 104 - DNA, 1818 bp, Escherichia coli
atgatgttaaatgcatggcatctgccggtgcccccatttgttaaacaaagcaaagatcaactgctcattacactgtggctgacgagcgaagacccaccgcagcgcattatgctgcgtacagaacacgataacgaagaaatgtcagtaccgatgcataagcagcgcagtcagccgcagcctggcgtcaccgcatggcgggcggcgatcgatctctccagcggacaacctcggcggcgttatagtttcaaattgctgtggcacgatcgccagcgttggtttacaccgcaaggcttcagccgaatgccgccagcacgactggagcagtttgccattgatgtaccggatatcggcccacaatgggctgcggatcagattttttatcagatcttccctgatcgtttcgcccgtaatcttcctcgtgaagctgaacaggatcatgtctattaccatcacgcagccggacaagagatcatattgcgtgactgggatgaaccggtcacggcgcaggctggcggatcaacgttctatggcggcgatctggacgggataagtgaaaaactgccgtatctgaaaaaacttggcgtgacggcgctgtatctcaatccggtgtttaaagctcccagcgtgcataaatacgataccgaggattatcgccatgtcgatccgcagtttggcggtgatggggcgttgctgcgtttgcgacacaatacgcagcagctgggaatacgactggtgctggacggcgtgtttaaccacagtggcgattcccatgcctggtttgacaggcacaatcgtggcacggggggagcttgtcacaaccccgaatcaccctggcgtgactggtactcgtttagtgatgatggcacggcgctcgactggctgggctatgccagcttgccgaagctggattatcagtcggaaagtctggtgaatgaaatttatcgcggggaagacagtattgtccgccactggctgaaagcgccgtggaatatggatggctggcggctggatgtggtgcatatgctgggggaagcgggtggggcgcgcaataatttgcagcacgttgccgggatcaccgaagcggcgaaagaaacccagccggatgcgtatattgtcggcgaacattttggcgatgcacggcaatggttacaggccgatgtggaagatgccgccatgaactatcgcggcttcacattcccgttgtggggatttcttgccaacaccgatatctcttacgatccgcagcaaattgacgcccaaacctgtatggcctggatggataattaccgcgcagggctttctcatcaacaacaattacgtatgtttaatcagctcgacagccacgatactgcgcgatttaaaacgctgctcggtcgggatgttgcgcgcctgcccctggcggtggtctggctgttcacctggcctggtgtaccgtgcatttattacggtgatgaagtgggactggatggcaaaaacgatccgttttgccgtaagccgttcccctggcaggtggaaaagcaggattcggcgttattcgcgctgtaccagcgaatgattgcgctgcgtaagaaaagtcaggcgttgcgtcgtggcggctgtcaggtgctgtatgcggaagataacgtggtggtatttgtccgcgtgctgaatcagcagcgtgtactggtggcaatcaaccgtggcgaagcctgtgaagtggtgctacccgcgtcaccgttgcttaatgtcgcgcaatggcaacgcaaagaaggtcacgggcaactgacggacgggattctggctttgcctgccatttcggctacggtgtggatgaattaa

SEQ ID NO: 105 - DNA, 582 bp, Escherichia coli
atgaattttttagctcacctgcatttagcccatctcgcggaaagctcgctttccggcaatttactggctgatttcgtacgcggaaatcctgaagaaagttttccgcccgacgtcgtggctggcattcatatgcatcggcgaatcgacgtattaaccgacaatctgccagaagtccgcgaagcgcgggagtggtttcgtaatgaaacgcgccgtgtcgcgcctattacgctggatgtgatgtgggatcactttctgtcccgccactggtcgcagctgtcgcccgattttccgctacaggaatttacctgttatgcccgggagcaagtgatgactattcttccagactcaccgccacgctttatcaatctgaacaactacttatggtcagagcagtggttggtgcgctatcgcgatatggatttcatccagagcgtgttaaacggcatggcaagccgtcgcccacgtctggatgccctgcgtgactcctggtacgatttagacgcccattacgatgctctcgaaacccgcttctggcagttttatccgcggatgatggagcaggcgtcacgcaaggcgttataa

SEQ ID NO: 106 - DNA, 1071 bp, Escherichia coli
atgcgcgttaccgatttctcttttgaattgcccgaatccctgattgcccactatcccatgcctgaacgcagtagctgtcgtttactgtcgctggacgggccgacgggcgcgctgacgcacggtactttcaccgatttactcgataagctcaaccccggcgatcttctggtttttaataatacccgcgtgatcccggcgcgtctgtttgggcgtaaagccagcggcggcaagattgaagtgctggttgagcggatgctcgacgacaaacgcattcttgcgcatattcgcgcctcgaaagcgccaaaacctggcgcagaactgctgctgggcgatgacgaacgtattaacgcaacaatgaccgcgcgccacggcgcactgtttgaagtcgaatttaatgatcaacgttcggtgctggatattctcaacagcatcggccatatgccgctgccgccgtacatcgaccgtccggacgaagatgcagaccgcgaactttatcaaacggtttatagcgaaaaacccggcgcggtggcagcaccgaccgccggactgcactttgacgaacctttgctggaaaaattacgcgccaaaggcgtggagatggcgtttgtgacgttgcacgttggtgcgggcaccttccagccggtgcgcgtcgacaccattgaagatcacatcatgcactcggaatacgctgaagtgccgcaggatgtggtagacgcggtactggcggcgaaagcgcgcggtaaccgggtgattgcggttggtaccacctcagtacgttcgctggaaagtgcggctcaggcagcgaaaaacgatctcattgaaccgttctttgacgatacccaaatctttatctatccgggcttccagtacaaagtggtcgatgcgctggtgacgaacttccaccttccggaatcgacgctgattatgctggtttcggcatttgctggttatcaacacaccatgaatgcctataaagcggcggtagaagagaaatatcgcttttttagttacggtgatgcgatgtttatcacgtacaatccgcaggcaattaatgagcgcgttggggagtaa

SEQ ID NO: 107 - DNA, 1128 bp, Escherichia coli
atgaaatttgaactggacaccaccgacggtcgcgcacgccgtggccgcctggtctttgatcgtggcgtagtggaaacgccttgttttatgcctgttggcacttacggcaccgtaaaagggatgacgccggaagaagttgaagccactggcgcgcaaattatcctcggcaacaccttccacctgtggctgcgcccgggccaggaaatcatgaaactgcacggcgatctgcacgattttatgcagtggaaaggaccaatccttaccgactccggcggcttccaggtcttcagccttggtgatattcgtaaaatcaccgaacagggcgttcacttccgcaacccgatcaacggcgacccgattttcctcgacccggaaaagtcgatggagattcagtacgatcttggttcggatatcgtcatgatctttgatgagtgtacgccgtatcctgctgactgggattacgcaaaacgctccatggagatgtctctgcgttgggcgaagcgtagccgtgagcgttttgacagtctcggaaacaaaaatgcgctgtttggtatcattcagggcagtgtttacgaagatttacgtgatatttctgttaaaggtctggtagatatcggttttgatggctacgctgtcggcggtctggctgtgggtgagccgaaagcagatatgcaccgcattctggagcatgtatgcccgcaaattccggcagacaaaccgcgttacctgatgggcgttggtaaaccagaagacctggttgagggcgtacgtcgcggtatcgatatgtttgactgcgtaatgccaacccgcaacgcccgaaatggtcatttgttcgtgaccgatggcgtggtgaaaatccgcaatgcgaagtataagagcgatactggcccactcgatcctgagtgtgattgctacacctgtcgcaattattcacgcgcttacttgcatcatctcgaccgttgcaacgaaatattaggcgcgcgactcaacaccattcataaccttcgttactaccagcgtttgatggcgggtttacgcaaggctattgaagagggtaaattagagagcttcgtaactgatttttaccagcgtcaggggcgagaagtaccacctttgaacgttgattaa

SEQ ID NO: 108 - DNA, 333 bp, Escherichia coli
atgagcttttttatttctgatgcggtagcggcaacgggtgcaccggcgcaaggtagcccgatgtctttgattttgatgctggtggtattcggtctgattttctatttcatgatcctgcgtccacagcagaagcgcaccaaagaacacaaaaagctgatggactccatcgctaaaggtgatgaagtgctgacgaacggtggcctggtcggtcgcgtaaccaaagtagcggaaaacggctacattgctatcgcactgaatgacaccactgaagtagttattaaacgtgacttcgtagctgccgttctgccgaaaggcaccatgaaggcgctgtaa

SEQ ID NO: 109 - DNA, 1815 bp, Escherichia coli
atgctgatcgtggtgattgtcatcggtctgctgtatgcgcttcccaacctgtttggtgaggatccggctgttcagatcactggtgcgcgcggagtcgccgccagtgagcaaacgctgatccaggtccagaaaacgttacaagaagaaaaaataactgctaagtctgtggcactggaagagggcgctattcttgcgcgcttcgactccactgacacccagctgcgcgctcgtgaagcattaatgggcgttatgggtgacaaatacgtcgtggcgcttaaccttgccccggcaacgccgcgctggctggcagccattcatgctgagccgatgaagctcggccttgacctgcgtggcggcgttcacttcctgatggaagtggatatggacaccgcgcttggcaaactccaggaacaaaatatcgatagcctgcgcagcgacctgcgtgaaaagggcatcccgtataccaccgttcgtaaagaaaacaactacggcctgagcatcactttccgcgatgctaaagctcgtgatgaagccattgcgtatctgagcaagcgccatccggacctggtgattagcagccagggcagcaaccagctgcgtgcggtaatgagcgatgctcgtctgagtgaagcgcgtgaatatgcggtgcagcagaacatcaatatcctgcgtaaccgtgtaaaccaacttggcgtggcggagccggtggttcagcgtcagggtgctgaccgtatcgttgttgaactgccaggtattcaggacactgcgcgtgcgaaagagattctgggtgcgacggcaacgctggaattccgtctggtaaacaccaacgttgatcaggccgctgcggcatccggtcgcgtaccgggcgactctgaagtgaaacagacccgcgaaggtcagccggttgtgctgtacaaacgcgtaattctgaccggtgaccatatcaccgactccacttccagccaggacgaatacaaccagccgcaggttaacatctcgctcgatagcgcgggtggtaacatcatgtctaacttcaccaaggacaacatcggcaaaccgatggcaaccctgtttgtggagtacaaagacagcggtaagaaagatgcaaacggtcgtgcggttctggtgaaacaggaagaggtgattaatatcgccaacatccagtctcgtctgggtaacagcttccgtattactggcatcaataacccaagcgaagcgcgtcagctttcactgctgctgcgtgccggtgcgttgatcgcgccgattcagattgttgaagaacgtaccattggcccaaccctgggtatgcagaacattgagcaggggctggaggcttgccttgccggtctgctggtttctattctgttcatgatcatcttctataagaagtttggtctgattgcgaccagtgctctgattgccaacttgatcttgattgtcggtattatgtcgctgttgccaggcgcaacgctgagtatgccaggtatcgcgggtatcgtcttaacccttgcggtagcggtcgatgcgaacgtactgatcaacgaacgtattaaagaagagttgagcaacggacgtactgttcaacaggcaattgatgaaggttatcgtggcgcattcagttccatcttcgatgcgaacatcaccacgctgattaaagtcatcatcctgtatgcagtgggtaccggggcaattaaagggttcgcgattactaccggtatcggtgtggcgacgtcgatgtttaccgcgattgtcggtacgcgtgccatcgtaaacctgctatatggcggcaagcgcgtcaagaagctgtcaatctga

SEQ ID NO: 110 - DNA, 972 bp, Escherichia coli
gtggcacaggaatatactgttgaacaactaaaccacggccgtaaagtctatgactttatgcgctgggactactgggctttcggcatctctggtctgctgttaatcgccgctatcgttattatgggcgtgcgcggctttaactgggggctggattttaccggtggtacggttattgaaattacgctcgaaaaaccggctgaaattgacgtaatgcgtgatgcattgcaaaaagccggttttgaagagccgatgctgcaaaactttggtagcagccacgacatcatggtccgtatgccgcctgctgaaggcgaaaccggcggtcaggtgctgggcagccaggttctgaaggtgattaacgaatccaccaatcagaatgcggcagtgaagcgtattgagttcgtcggtccgagcgtgggggcagaccttgcgcaaaccggtgcgatggcgctgatggcagcgctgctgtctatcctcgtgtacgttggtttccgctttgagtggcgactggcggcaggggttgttattgcgctggcgcacgacgttatcattacgctgggtattttgtcgttattccatatcgagattgacctgaccattgtggcatcattgatgtcggttatcggttactcgcttaacgacagtatcgtggtatcggaccgtattcgtgaaaacttccgcaagatccgtcgcggtacgccttacgaaatctttaacgtgtccttgacccagacgctgcaccgtaccttgatcacatccggtactaccttgatggttatcctgatgctgtacctcttcggtggtccggtactggaaggcttctcgctgaccatgcttatcggtgtttccatcggtactgcatcttccatctatgtggcatctgcgctggctctgaaactgggtatgaagcgcgaacacatgttgcagcagaaagtggaaaaagaaggggcggatcagccgtcaattctgccttaa

SEQ ID NO: 111 - DNA, 348 bp, Escherichia coli
atggctatcatcccaaaaaactatgcgcggttagaaagcggctatcgcgaaaaagcattaaaaatctatccgtgggtctgcggtcgctgttcccgcgagtttgtttattccaacctgcgtgaacttaccgttcaccacattgatcacgaccatactaataacccggaagatggcagtaactgggaattactttgtctctattgccacgatcatgagcattcgaaatacactgaagcggatcagtatggtacgaccgttatcgcaggggaagatgcgcagaaagatgtcggtgaagcgaagtacaacccattcgctgatttgaaagcgatgatgaacaagaagaagtga

SEQ ID NO: 112 - DNA, 885 bp, Escherichia coli
atgaaaaaaacattactggcagccggtgcggtactggcgctctcttcgtcttttactgtcaacgcagctgaaaacgacaaaccgcagtatctttccgactggtggcaccagagcgttaacgttgtcggaagctatcacacccgtttcggaccgcagctccgcaacgatacctaccttgagtacgaagcattcgctaaaaaagactggttcgacttctatggttatgcggatgcgccggtattcttcggcggtaactccgatgcaaaaggtatctggaaccacggttctccgctgtttatggaaatcgaaccgcgtttctccattgacaagctgaccaatactgaccttagcttcggtccgttcaaagagtggtactttgcgaacaactacatttacgacatgggtcgtaataaagatggccgccagagcacctggtacatgggtctgggtaccgacatcgatactggtctgccgatgagcctgtccatgaacgtctatgcgaaataccagtggcagaactacggcgcagcgaacgaaaacgagtgggacggttaccgtttcaaagtgaagtactttgtgccgattaccgatctgtggggcggccagctgagctacatcggcttcaccaacttcgactggggttccgacctgggcgatgacagcggttatgcgaacaacggtattaaaacacgtaccaataactctattgcgtccagccatattctggcgctgaattacgatcactggcactactctgtcgttgcccgttactggcataacggtggtcagtggaatgacgatgcagaactgaacttcggcaacggcaacttcaacgttcactctaccggctggggtggttatctggtagtaggttacaacttctaa

SEQ ID NO: 113 - DNA, 540 bp, Escherichia coli
atgaatactaacgtttttcgacagctcctgctgggaagcctgttcagccttagcgcctgtgtgcagcaaagtgaagtgcgacagatgaaacacagcgtcagcacgctgaaccaggagatgacgcagctcaataaagaaacggtcaaaatcactcagcaaaacaggctgaatgcaaaatccagcagtggggtttaccttctgcctggagcaaaaacaccagcaagactggaaagccagatcggtactttacgtatgtcgctggtgaatattacgcctgatacagatggcaccaccctgacgctacgtattcagggcgaatctaatgaccctttacccgcattcagcggaaccgttgaatatgggcaaattcagggaacaatagacaactttcaggaaatcaatgtgcagaatcaattgattaacgcacctgccagcgtcctcgcccccagcgatgttgatattccgttacagttaaagggtatttctgtggatcagttaggctttgtacgtatccacgacattcaacctgttatgcagtaa

SEQ ID NO: 114 - DNA, 450 bp, Escherichia coli
atgcattgcccattctgtttcgccgtggacactaaggtaattgactctcgtctcgtgggcgagggttcatccgtacgccgccgtcggcagtgtctggtgtgtaatgaacgtttcaccacctttgaagtggcggagctggttatgccgcgtgttgtaaaaagcaacgacgtgcgtgaaccgtttaatgaagagaaattacgtagcggaatgctgcgggcgctggaaaaacgtccggtgagttccgatgacgtcgaaatggcaatcaatcatataaaatcgcagctgcgcgccaccggtgagcgcgaagtgccgagcaagatgattggcaatctggtgatggagcaattgaaaaagctcgataaagtcgcctatatccgttttgcctctgtctaccgcagtttcgaagatatcaaagaatttggcgaagagatcgcgcgcctggaggactaa

SEQ ID NO: 115 - DNA, 1104 bp, Escherichia coli
gtgcaggacgagtattacatggcgcgggcgctaaagctggcgcaacgaggacgttttaccacgcatcccaacccgaatgtcgggtgcgtcattgtcaaagatggcgaaattgtcggtgaaggttaccatcaacgagcgggtgaaccgcatgccgaggtgcacgcgttgcgcatggccggcgaaaaagccaaaggcgcaacggcgtatgtcacactcgaaccctgtagccatcatggtcgtacgccaccgtgttgtgatgcattaattgctgcgggcgtggcgcgcgtggttgctgcaatgcaagaccccaatccgcaggtcgctggacgtggactttaccgtctgcaacaggctggcattgacgtcagccacgggctgatgatgagtgaagctgagcaattgaataaaggctttctcaaacggatgcgcaccggctttccttatattcagttaaaacttggcgcatcgcttgatggtcgcacggcgatggcgagtggcgaaagccagtggatcacttcacctcaggcgaggcgcgacgtacaacgactgcgcgcgcaaagtcatgccattttaaccagcagcgccacggtgctggcggatgatccagccttaacagtgcgttggtctgaactggatgaacaaactcaggggctctacccgcaacaaaatctccgccagccggtacgtattgtgattgatagccaaaatcgcgtgacgccggaacatcgcattgtgcagcagcccggcgaaacctggttcgcgcgtacgcaggaagattctcgtgagtggccggaaacggtgcgtaccttgctgattccagagcataaaggtcacctggatctggttgtactaatgatgcaactgggtaaacagcagattaacagcatctgggtggaagcggggccaacgctcgctggcgcattgctacaggcgggtttagtcgatgagctgattgtctatatcgcacctaaactattaggcaacgacgcccgtggattatgcacgctgccagggcttgagaaattagccgacgctccccaatttaaattcaaagagatacgtcatgtaggcccggatgtttgcctgcatttagtgggtgcatga

SEQ ID NO: 116 - DNA, 471 bp, Escherichia coli
atgaacattattgaagctaacgttgctaccccggacgctcgcgtcgccatcaccatcgcgcgtttcaacaactttatcaatgacagcctgctggaaggtgcaattgacgcactgaaacgtatcggtcaggtaaaagatgaaaacattaccgttgtttgggtgccaggtgcctatgagctgccgctggcggcgggtgcactggctaaaaccggtaaatacgacgcggtgattgcgctgggtacggttattcgtggtggcactgcccactttgaatatgtcgctggtggtgcaagcaacggcctggcgcatgttgcccaggacagcgaaattccggttgcttttggtgttctgaccactgaaagcattgaacaagcgatcgaacgtgctggcaccaaagctggcaacaaaggtgcagaagctgcactgaccgcgcttgaaatgattaatgtattgaaagccatcaaggcctga

SEQ ID NO: 117 - DNA, 420 bp, Escherichia coli
gtgaaacctgctgctcgtcgccgcgctcgtgagtgtgccgtccaggcgctctactcctggcagttgtcccagaacgacatcgctgatgttgaataccagttcctggctgaacaggatgtaaaagacgttgacgtcctgtacttccgtgagctgctggccggggtggcgactaacaccgcatacctcgacggactgatgaagccgtacctgtcccgtctgctggaagaactgggccaggtagaaaaagcagtactgcgcattgcgctgtacgagctgtctaaacgtagcgatgtgccatacaaagtggccattaacgaagcgatcgaactggcgaaatcgttcggcgcagaagacagccataagttcgtcaacggcgtactcgataaagcagcacctgtgattcgccctaacaaaaagtaa

SEQ ID NO: 118 - DNA, 978 bp, Escherichia coli
atggcatgtggcgagttctccctgattgcccgttattttgaccgtgtaagaagttctcgtcttgatgtcgaactgggcatcggcgacgattgcgctcttctcaatatccctgagaaacagaccctggcgatcagcactgatacgctggtggcgggcaaccacttcctccctgatatcgatcctgctgatctggcttataaagcactggcggtgaacctaagcgatctggcagcgatgggggccgatccggcctggctgacgctggcattaaccttaccggacgtagacgaagcgtggcttgagtccttcagcgacagcttgtttgatcttctcaattattacgatatgcaactcattggcggcgataccacgcgtgggccattatcaatgacgttgggtatccacggctttgttccgatgggacgagccttaacgcgctctggggcgaaaccgggtgactggatctatgtgaccggtacaccgggcgatagcgctgccgggctggcgattttgcaaaaccgtttgcaggttgccgatgctaaagatgcggactacttgatcaaacgtcatctccgtccgtcgccgcgtattttacaggggcaggcactgcgcgatctggcaaattcagctatcgatctctctgacggtctgatttccgatctcgggcatatcgtgaaagccagcgactgcggcgcacgtattgacctggcattgctgccgttttctgatgcgctttctcgccatgttgaaccggaacaggcgctgcgctgggcgctctctggcggtgaagattacgagttgtgtttcacggtgccggaactgaaccgtggcgcgctggatgtggctctcggacacctgggcgtaccgtttacctgtatcgggcaaatgaccgccgatatcgaagggctttgttttattcgtgacggcgaacctgtcacgttagactggaaaggatatgaccattttgccacgccataa

SEQ ID NO: 119 - DNA, 519 bp, Escherichia coli
atgaccattttgccacgccataaagatgtcgcgaaaagtcgcctgaaaatgagtaatccgtggcatctgcttgctgtcggattcggaagtggattaagcccgatcgttcctggcacgatggggtcgctggcggcgattcccttctggtatctgatgacttttttgccctggcagctctattcgctggtggtaatgctggggatctgtatcggcgtctatctttgtcatcaaacggcgaaagacatgggcgtgcacgatcacggcagtattgtctgggacgaatttattggtatgtggattacgctcatggcgctgccgaccaatgactggcagtgggttaccgccggatttgtgattttccgtattctggatatgtggaagccgtggccgatccgctggtttgatcgcaatgtacatggcggcatggggatcatgattgacgatattgtcgccggggtgatctccgctggcatcctgtattttatcggtcatcactggccgctgggtattctgtcgtag

SEQ ID NO: 120 - DNA, 975 bp, Escherichia coli
atgcaatacaaccccttaggaaaaaccgaccttcgtgtttcccgactttgcctcggctgtatgacctttggcgagccagatcgcggtaatcacgcatggacactgccggaagagagcagccgtcccatcattaaacgtgcgctggaaggcggcataaatttctttgataccgccaatagctattccgatggcagcagcgaagagatcgtcggtcgcgcactgcgggatttcgcccgtcgtgaagacgtggtcgttgcgaccaaagtgttccatcgcgttggtgatttaccggaaggattatcccgtgcacaaattttgcgctctatcgacgacagcctgcgccgtctcggcatggattatgtcgatatcctgcaaattcatcgctgggattacaacacgccgatcgaagagacgctggaagccctcaacgacgtggtaaaagccgggaaagcgcgttatatcggcgcgtcatccatgcacgcttcgcagtttgctcaggcactggaactacaaaaacagcacggctgggcgcagtttgtcagtatgcaggatcactacaatctgatttatcgtgaagaagagcgcgagatgctgccgctgtgttatcaggaaggcgtggcggtgattccatggagcccgctggcgcggggccgtctgacgcgtccttggggagaaaccaccgcacggctggtgtcggatgaagtggggaaaaatctctaccaagaaagcaatgaaaatgacgcacaaattgcagaacgcttaacgggcgtcagtgaagaacttggtgcaacgcgagcacaagttgcgctggcctggttgttgagtaaaccgggcattgccgcaccgattatcggaacttctcgggaggaacagcttgatgaactgctaaacgcggtggatatcaccttgaagccggaacagatcgccgagctggaaacgccgtataaaccgcatccggtcacaggatttaaatag

SEQ ID NO: 121 - DNA, 1863 bp, Escherichia coli
atgagttttgatattgccaaatacccgaccctggcactggtcgactccacccaggagttacgactgttgccgaaagagagtttaccgaaactctgcgacgaactgcgccgctatttactcgacagcgtgagccgttccagcgggcacttcgcctccgggctgggcacggtcgaactgaccgtggcgctgcactatgtctacaataccccgtttgaccagttaatctgggatgtggggcatcaggcttatccgcataaaattttgaccgggcgccgcgacaaaatcggcaccatccgtcagaaaggtggcctgcacccgttcccgtggcgcggcgaaagcgaatatgacgtattaagcgtcgggcattcatcaacctccatcagtgccggaattgggatcgcagttgctgccgagaaagaaggcaaaaatcgccgcaccgtctgtgtcattggcgatggcgcgattactgctggcatggcgtttgaagcgatgaatcacgcgggcgatatccgtcctgatatgctggtggttctcaacgacaatgaaatgtcgatttccgaaaatgttggcgcgctcaacaaccatctggcgcagctgctttccggtaagctttactcttcactgcgcgaaggcggaaaaaaagttttctctggcgtgccacccattaaagagctgctcaaacgtaccgaagaacatattaaaggcatggtagtgcctggcacgttgtttgaagagctgggctttaactacatcggcccggtggacggtcacgatgtgctggggcttatcaccacgcttaagaacatgcgcgacctgaaaggcccgcagttcctgcatatcatgaccaaaaaaggtcgtggttatgaaccggcagaaaaagacccaatcaccttccacgccgtgcctaaatttgatccctccagcggttgtctgccgaaaagtagcggcggtttgccaagctattcaaaaatctttggcgactggttgtgcgaaaccgcagcgaaagataacaagctgatggcgattactccggcgatgcgtgaaggttccggcatggtcgagttttcacgtaaattcccggatcgctacttcgacgtggcaattgccgagcaacacgcagtgacctttgctgcgggtctggcgattggaggctacaaacccattgttgcgatctactccaccttcctgcaacgcgcctatgatcaggtgctgcatgacgtggcgattcaaaagcttccggtcctgttcgccatcgaccgtgcgggcattgttggtgctgacggtcaaacccaccagggcgcttttgatctctcttacctgcgctgcataccggaaatggtcattatgaccccgagcgatgaaaacgaatgtcgccagatgctctataccggctatcactataacgatggcccgtccgcggtgcgctacccgcgcggcaacgcagttggcgtggaactgacgccactggaaaaactgccaattggcaaaggcattgtgaagcgtcgtggtgagaaactggcgatccttaactttggtacgctgatgccagaagcggcgaaagtcgctgaatcgctgaacgctacgctggtcgatatgcgtttcgtgaaaccgcttgatgaagcgttaattctggaaatggccgccagccatgaagcgctggttaccgtagaagaaaacgccattatgggtggtgcaggcagcggcgtgaacgaagtgctgatggcccatcgtaaaccagtacccgtgctgaacattggtctgccggacttctttattccacaaggaactcaggaagaaatgcgcgccgaactcggcctcgatgccaccggtatggaagccaaaatcaaagcctggctggcataa

SEQ ID NO: 122 - DNA, 900 bp, Escherichia coli
atggactttccgcagcaactcgaagcctgcgttaagcaggccaaccaggcgctgagccgttttatcgccccactgccctttcagaacactcccgtggtcgaaaccatgcagtatggcgcattattaggtggtaagcgcctgcgacctttcctggtttatgccactggtcatatgttcggcgttagcacaaacacactggacgcacccgctgccgccgtagagtgtatccacgcttactcattaattcatgatgatttaccggcgatggatgatgacgatctgcgtcgcggtttgccgacctgccatgtgaagtttggcgaagcaaacgcgattctcgctggtgacgctttacaaacgctggcgttctcgattctaagcgatgccgatatgccggaagtgtcagatcgcgacagaatttcgatgatttctgagctggcgagcgccagcggtattgccggaatgtgcggtggtcaggcattagatttagacgctgaaggcaaacacgtacctctggacgcgcttgagcgtattcatcgtcataaaaccggcgcattgattcgcgccgccgttcgccttggtgcattaagcgccggagataaaggacgtcgtgctctgccagtactcgacaagtacgcagagagcatcggccttgccttccaggttcaggatgacatcctggatgtggtgggagatactgcaacgttgggaaaacgccagggtgccgaccagcaacttggtaaaagtacctaccctgcacttctgggtcttgagcaagcccggaagaaagcccgggatctgatcgacgatgcccgtcagtcgctgaaacaactgactgaacagtcactcgatacctcggcactggaagcgctagcggactacatcatccagcgtaataaataa

SEQ ID NO: 123 - DNA, 243 bp, Escherichia coli
atgccgaagaaaaatgaggctcccgccagctttgaaaaggcgctgagcgagctggaacagattgtaacccgtctggaaagtggcgacctgccgctggaagaggcgctgaacgaattcgaacgcggcgtgcagctggcacgtcaggggcaggccaaattacaacaagccgaacagcgcgtacaaattctgctgtctgacaatgaagacgcctctctaaccccttttacaccggacaatgagtaa

SEQ ID NO: 124 - DNA, 1449 bp, Escherichia coli
atgaagtttatcattaaattgttcccggaaatcaccatcaaaagccaatctgtgcgcttgcgctttataaaaatccttaccgggaacattcgtaacgttttaaagcactatgatgagacgctcgctgtcgtccgccactgggataacatcgaagttcgcgcaaaagatgaaaaccagcgtctggctattcgcgacgccctgacccgtattccgggtatccaccatattctcgaagtcgaagacgtgccgtttaccgacatgcacgatattttcgagaaagcgttggttcaatatcgcgatcagctggaaggcaaaaccttttgcgtacgcgtgaagcgccgcggcaaacatgattttagctcgattgatgtggaacgttacgtcggcggcggtttaaatcagcatattgaatccgcgcgcgtgaagctgaccaatccggaagtgactgtccatctggaagtggaagacgatcgtctgctgctgattaaaggccgctacgaaggtattggcggtttcccgatcggcacccaggaagatgtgttgtcgctcatttccggtggtttcgactccggtgtttccagttatatgttgatgcgtcgcggctgccgcgtgcattactgcttctttaacctcggcggcgcggcgcatgaaattggcgtacgtcaggtggcgcattatctgtggaaccgctttggcagctcccaccgcgtgcgttttgtcgctattaatttcgaaccggtcgtcggggaaattctcgagaaaatcgacgacggtcagatgggcgttatcctcaaacgtatgatggtgcgtgccgcgtccaaagtggcagaacgttacggcgtacaggcgctggttaccggtgaagcgctcggccaggtgtccagccagacgctgaccaacctacgcctgattgataacgtctccgatacgctgatcctgcgtccgctgatctcttacgacaaagagcacatcatcaacctggctcgccagattggcaccgaagactttgcccgcacgatgccggaatattgcggcgtgatttccaaaagcccgacggtgaaagcggttaaatcgaagattgaagcggaagaagagaagttcgacttcagcattctcgataaagtggtggaggaagcgaataacgttgatatccgcgaaatcgcccagcagaccgagcaggaagtggtggaagtggaaaccgtcaatggcttcggcccgaacgacgtgatcctcgatatccgttctatcgatgaacaggaagataagccactgaaagtcgaagggattgatgtggtttctctgccgttctataaactgagcaccaaatttggcgatctcgaccagagcaaaacctggctgttgtggtgtgagcgcggggtgatgagccgcctgcaggcgctctatctgcgcgagcagggctttaacaatgtgaaggtgtatcgcccgtaa

SEQ ID NO: 125 - DNA, 591 bp, Escherichia coli
atgagcgcatcggcactggtttgcctcgcccctggtagtgaagagactgaagccgtcaccactatcgacctcttggttcgcggcggtatcaaagtcaccactgccagcgtcgccagcgatggtaacctggcgattacctgctcgcgcggcgtgaagctgctggcggatgcgccgctggttgaagtggctgatggcgaatatgacgtgattgtgctgcctggtggcatcaaaggcgcagagtgttttcgcgatagcaccctgctggttgaaaccgttaaacagttccaccgttccgggcgtatcgtcgcggctatttgcgccgcgccagccaccgtgctggtcccgcacgatatcttcccgattggcaatatgaccggcttcccgacgctgaaagacaaaatacccgccgaacaatggcaggacaagcgcgtcgtctgggatgcacgggtaaaattgctgaccagccaggggccaggtacagctatcgactttggtctgaaaattatcgacctgctggttgggcgcgagaaagcccatgaagtggcatcacaactggtgatggcggcagggatttataattattacgagtag

SEQ ID NO: 126 - DNA, 912 bp, Escherichia coli
atgaaaattaccgtattgggatgcggtgccttagggcaattatggcttacagcactttgtaaacagggtcacgaagttcagggctggctgcgcgtaccgcaaccttattgtagcgtgaatctggttgagacagatggttcgatatttaacgagtctctgaccgccaacgatcccgattttctcgccaccagcgatctgctcctggtgacgctgaaagcatggcaggtttccgatgccgtcaaaagcctcgcgtccacactgcctgtaaccacgccaatactgttaattcacaacggcatgggcaccatcgaagagttgcaaaacattcagcagccattactgatgggcaccaccacccatgccgctcgccgcgacggcaatgtcattattcatgtggcaaacggtatcacgcatattggtccggcacggcaacaggacggcgattacagttatctggcggatattttgcaaaccgtattgcctgacgtcgcgtggcataacaatattcgcgccgagctgtggcgcaagctggcagtcaactgtgtgattaatccactgaccgccacctggaattgcccgaatggtgaattacgtcatcatccgcaagaaattatgcagatatgcgaagaagtcgcggcagtgatcgaacgcgaagggcatcatacttcagcagaagatttgcgtgattacgtgatgcaggtgattgatgccacagcggaaaatatctcgtcgatgttgcaggatatccgcgcgctgcgccacaccgaaatcgactatatcaatggttttctcttacgccgcgcccgcgcgcatgggattgccgtaccggaaaacacccgcctgtttgaaatggtaaaaagaaaggagagtgaatatgagcgcatcggcactggtttgcctcgcccctggtag

SEQ ID NO: 127 - DNA, 492 bp, Escherichia coli
atgccatctttcgatattgtctctgaagttgatcttcaggaagcacgtaacgcggtcgataacgcgagccgcgaagtggagtcccgttttgacttccgtaacgttgaagcctcatttgagctgaatgacgccagcaaaaccatcaaagtgttgagcgagtccgacttccaggtcaatcagttgctggatattctgcgtgccaagttgctgaagcgcggcattgaaggcagttcactggatgtaccggaaaatatcgttcatagcggtaaaacctggtttgtggaagcgaaactgaaacagggcattgagagcgcgactcagaagaaaatcgtcaaaatgatcaaagacagcaaactgaaagtgcaggcgcaaattcagggcgatgagatccgcgtaacgggtaaatctcgtgatgatttacaggctgtcatggcgatggtacgtggtggcgatctgggtcagccgttccagttcaaaaacttccgcgattaa

SEQ ID NO: 128 - DNA, 1710 bp, Escherichia coli
atgaaagtgaaatctactttgttattaataattttatctgtgttttattctcatcaggttttatccagcgcccccactcagccggatgtttattctgtcgtcgagcaaaaacttaactctgctttacctctgaaagaaaatactaccttcagatcgcaggctgaatggttcaatttgcaatataaattattagtatctggctaccctgaacgtgcttacaatttactgagcaaacttgaaacagaatcgaaaaacgctaaatattatctagatttaactgcctccagagtcgctgaagaaggagcaccagagactgccttaacttttttatcaaaaattgggttaaataaaccggcaactcttacatcctttgagagctatatcaatagctggataaaaagcaaacaacccgataaggctatgcaacttctcagtctcgatgacaatgccctgcattattatttacctactgtgttagtcgcatatcagagcgatcctgacaaggcaataagtatttataataatgtatatggtgacaatgttattataccctatcagcaagccaccatgttacttacagttgcggagggttatcaaacaaaaggcgatataaaaaacgctattcattatgccgataatgcgctgaatatgtttggcagtcgtgaatcccattatggtgatgagtatttgaaactcatgaatatctacgctaccaatggcaacaaagaaaaagcggtagttttatctcaacgtctacaaaaagccatcaccgaatctcaatcgaattacttaagtactctggaaggaattttactgttttatagaaataatgatatgcagcaagactatcaaaacagcctttcaaattacatagtatttattgataaaacctttgccttttccccatcaacaagaagtgaattaagcctcattaatttattaaattcattaaatgaggtggaattgatgaaaaaacgtctggcgcttctgatgacagcaccagaatacacttgttatgatagtcagtattgttatgaagacaaagtcagcgcattaaaaaccctgcatagtcatcaggataatgagctaatggacaaatatttcacgactcttcttaaagagatcagtaatcaaccattagaagactgggatataataataagtaataccggtgaaaaatttagtgaggtgggactaaccaaatatgctcaacatctcgcatctttcgctgaagaattttatataaaagagcaaaaatcacattctgaaagtgaaatgagaggactattttcatcacttgccgaaatatatagttttggtaacgatactgccagcgcaaaccgagtgttgcatcaacatgtccctgccttcaatacagatcatatgattcaatattatataaatgccaaagaatggaacaatgccagggaattattgataaaagaggaaatgttgggtatgcataatctgatattgttggagaacatttgtatgcagaaaactgcacaatgcatggcacacattacctttactctcaacaaattgacaacacaacctgcaataacaaaaaaagatagcgtgggtaatgagcaactttatcagattggcaaaatctaccataagctgggagttaaaccagagccaaagcagcaggctttaattcagtcgctttatgaccaggcatcaggaagcacctcttcaactcaataa

SEQ ID NO: 129 - DNA, 2154 bp, Escherichia coli
atggtaaaaccattacttactattatcactctattgtattgcgccagttcatcagcaaaaagtggatcccctcccgcaagcactataactttcatcgcacaaatcgagcatgttgagctaaataaaacagcattatctcatgatatgaaactcattcttgccgatcgtttttatttcaaaaccagtaatccttgtgaaacaaattcaatttccgctcgaccagaatcaatgggcattactgacaaagcctatgccgacaaattaagaaatttagaaactccttttcttgatgatcgctatttctttatgaccatcaatcagtgtgacggtaatggtagccccatgctgacagatataaaagtatgtacaacagaattatgtggtgctgaatatacaaagaaaatacctactgtatggcttgatgaaacattaaaaccaactgctaaacgcctagcaatttattttattcaatctcctttaccctatgacgataagaaaaaacaatggaaagttaccggatggtatatctcatcaactgataatccgtcttcaactaaacagattgcatttgaaggatatacagacacagataacttctccaattctaaatttatttcttcatttcaatcctggtttgaaaatggaaagataaaaagcattgttaactataatccacaaggagaaagagatggaaaatacgaaagttattacaatagcaatggtaatgtctatgaatctctaagtttttctaatggacttatcaacggcgagtatattacatattatgaaaatgggaccattgaaaataaacgttattttaataacggaaaaattaaagatggtgaatgccctcatttttatgaagatggaaaaatcaaacagcaacatagctatctgaatagtaaactcgatggtccggcatatgaatattatcctgatggcaaactcatgcaggaaaatttctatcagcaaagtgagttgattggaaaagataccagttactaccaatcaggaaaaataaactctatacacaatagaaattcccgtggtcagtatgatggaattaacgaacgttatagtgaagagggtaagttactgtctaaatccgtctataaagacggaaaacaaatttctgttcaaacctggtatgaaaatgggcagaaagaagaggagaaacattttgatgagcaaggccaattaaatggtttggttaagcaatggtataaaaatggaaatcttgcaaaatcacaaaactataaacatgacatactcgatggtgatagtgaagagtggtacgaaaatggcatccctgagagtctgtatccttataagaatggaaaaaccgacggcgttgccaaatcatggaataagtatggtaaattaacctattcaatcgaatacaaaaatggcgtagagaatggggtatatcgtaactggagcaaaaacacaggtaaactaaccaaagaaacccagtacgtcaatggtatcaggcagggcgtggaaaaagagtttaacgatcgcacgggtaaactattaaccgccacgcaatacgttaataataaaagaaatggcacggaggaaacttatgatcaaaatggaataaaatatattacgtgctatcaaaatgatgaggaattatcgtctttatacactccaacacaaataaaagataatgcaacaaaaggcaactccagcactcaatttacattaggaaaatacgaattcacctgtgcaaatatagatgaagggattaaatggttaaccaaatcggcagagcaaaaaaacactgatgcgatatactttttagctacagcctacaaaggcaatggcatacctgcaaacaatgaaaaatacataacatatctgcaacaagcagcaatgctgggcaatagtaatgcacaggcggaaattggctatttatatctcatcggaaaagaactaccacagaatctgcctgatgctggtgactggtttaaaaaagcagctgctcagggtaattttgttgcacatttctacctgggaagaatgtatcaaaatggtgatggcgttgagaaaaatatggaaaaagccaggtttcatctatctaatgcagcagaaggtggaataaaacctgcgcttaaagcattaaatgaacttgaacatcaaacaaaataa

SEQ ID NO: 130 - DNA, 1371 bp, Escherichia coli
atgaacgattataaaatgacgtcaggtgagcggcgcgcgacctggggtttaggcaccgttttctcgttgcgcatgctgggcatgttcatggttctgccggttctgaccacgtacggcatggctctgcaaggtgccagcgaagcattaatcggtattgccattggtatttatggtctgactcaggccgtttttcagattccgtttggcctgctttcagaccgcattggtcgcaaaccattaattgtcggtgggctggcggtgtttgccgccggtagcgttatcgctgcgctctctgactccatctggggaattattctgggccgggcgctacaaggctccggtgcgattgccgctgccgttatggcgctgctttccgatctcacgcgcgaacaaaaccgcaccaaagcgatggcgtttatcggcgtgagctttggcattacctttgccattgcgatggtgcttggcccgatcatcactcacaaacttgggctgcacgcgctgttctggatgatcgctattctggcaacaaccggcattgcgttgaccatttgggttgtgcccaacagtagcactcacgtacttaatcgtgagtccggaatggtgaaaggcagtttcagtaaagtgctggcggaaccgcggctgctgaaactcaactttggcattatgtgtctgcatattttgctgatgtcgacctttgttgccctgcccggacagatggctgatgcggggttaccggcggctgaacactggaaggtctacctggcaacgatgttaatcgcctttggctcggtcgtgcctttcattatctacgctgaagttaagcgcaaaatgaagcaagtctttgtcttttgcgtcgggttgatcgtggttgcggaaattgtgttgtggaacgcacaaacgcagttctggcaactggtggtcggcgtgcagcttttctttgtggcgtttaatttgatggaagcccttctgccttcacttatcagtaaagaatcgccagcaggttacaaaggtacggcgatgggtgtttactccaccagccagtttcttggcgtggcgattggcggttcgctgggcggctggattgacggcatgtttgacggtcagggagtatttctcgctggcgcaatgctggccgcagtgtggctggcagtcgccaataccatgaaagaaccgccgtatgtcagcagcttgcgcattgaaatcccggacaacgtgatggcagatgaaaaactggaaaaaagcttactgacaacgcctggtgtcaaagatgtactgctggcgaagttagagcatagcgtctatgtgaaaatagacagtaaaatcaccaatcgcttcgaaatagagcgagttatcaacgaagtatcttattaa

SEQ ID NO: 131 - DNA, 891 bp, Escherichia coli
atgatgtttaagcaatacctgcaagtaacgaaaccaggcatcatctttggcaacctgatctcggtgattgggggattcctgttggcctcaaagggcagcattgattatcccctgtttatctacacgctggttggggtgtcactggttgtggcgtcgggttgtgtgtttaacaactacatcgacagggatatcgacagaaagatggaaaggacgaagaatcgggtgctggttaaaggcctgatctctcctgctgtctcgctggtgtacgccaccttgctgggtattgctggctttatgctgctgtggtttggcgcgaatccgctggcctgctggctgggggtgatgggctttgtggtttatgtcggcgtttatagcctgtacatgaaacgtcattctgtctacggcaccttgattggttcgctctccggcgctgcgcctccggtgatcggttactgtgcggtaaccggcgagttcgatagcggcgcagcgatcctgctggctatcttcagcctgtggcagatgcctcactcttatgccatagccattttccgctttaaggattatcaggcggcaaacattccggtactgccggtggtgaaaggcatttcggtggcgaagaatcacatcacgctgtatatcatcgcctttgccgttgccacgctgatgctctctcttggcggctacgctgggtataaatatctggtggtcgccgctgcggtgagcgtctggtggttaggcatggctctgcgcggctataaagttgctgatgacagaatctgggcacgcaagctgttcggtttctctatcatcgccatcactgccctctcggtgatgatgtccgttgattttatggtgccggactcgcatacgctgctggctgctgtgtggtaa

SEQ ID NO: 132 - DNA, 330 bp, Escherichia coli
atgagtcattctaacgcaagcagcggcgcatcccatggcagcgtaaagacctacatgacaggctttatcctgtcgataatcctgacggtaattccgttctggatggtgatgacaggggctgcctctccggccgtaattctgggaacaatcctggcaatggcagtggtacagattctggtgcatctggtgtgcttcctgcacatgaataccaaatcagatgaaggctggaatatgacggcgtttgtcttcaccgtgctaatcatcgctatcctggttgtaggctccatctggattatgtggaacctcaactacaacatgatgatgcactaa

SEQ ID NO: 133 - DNA, 615 bp, Escherichia coli
atggcaactgatactttgacgcacgcgactgcccacgcgcacgaacacgggcaccacgatgcaggcggaaccaaaatcttcggattttggatctacctgatgagcgactgcattctgttctctatcttgtttgctacctatgccgttctggtgaacggcaccgcaggtgggccgacaggtaaggacattttcgaactgccgttcgttctggttgaaactttcttgctgttgttcagctccatcacctacggcatggcggctatcgccatgtacaaaaacaacaaaagccaggtgatctcctggctggcgttgacatggttgtttggtgccggatttatcgggatggaaatctatgaattccatcacctgattgttaacggcatgggtccggatcgcagcggcttcctgtcagcattctttgcgctggtcggcacgcacggtctgcacgtcacttccggtcttatctggatggcggtgctgatggtgcaaatcgcccgtcgcggcctgaccagcactaaccgtacccgcatcatgtgcctgagcctgttctggcacttcctggatgtggtttggatctgtgtgttcactgttgtttatctgatgggggcgatgtaa

SEQ ID NO: 134 - DNA, 1992 bp, Escherichia coli
atgttcggaaaattatcacttgatgcagtcccgttccatgaacctatcgtcatggttacgatcgctggcattattttgggaggtctggcgctcgttggcctgatcacttacttcggtaagtggacctacctgtggaaagagtggctgacctccgttgaccataaacgtctcggtatcatgtatatcatcgtggcgattgtgatgttgctgcgtggttttgctgacgccattatgatgcgtagccagcaggcccttgcctctgcgggcgaagcgggcttcctgccacctcaccactacgatcagatcttcaccgcgcacggcgtgattatgatcttcttcgtggcgatgcctttcgttatcggtctgatgaacctggtggttccgctgcagatcggcgcgcgtgacgttgcgttcccgttcctcaacaacttaagcttctggtttaccgttgttggtgtgattctggttaacgtttctctcggcgtgggcgaatttgcgcagaccggctggctggcctatccaccgctatcgggaatagagtacagtccgggagtcggtgtcgattactggatatggagtctccagctatccggtataggtacgacgcttactggtatcaatttcttcgttaccattctgaagatgcgcgcaccgggcatgaccatgttcaagatgccagtatttacctgggcatcactgtgcgcgaacgtactgattattgcttccttcccaattctgacggttaccgtcgcgttgttgaccctggatcgctatctgggcacccatttctttaccaacgatatgggtggcaacatgatgatgtacatcaacctgatttgggcctggggccacccggaagtttacatcctgatcctgcctgtattcggtgtgttctccgaaattgcggcaaccttctcgcgtaaacgtctgtttggttatacctcgctggtatgggcaaccgtctgtatcaccgtgctgtcgttcatcgtctggctgcaccacttctttacgatgggtgcgggcgcgaacgtaaacgccttctttggtatcaccacgatgattatcgccatcccgaccggggtgaagatcttcaactggctgttcaccatgtatcagggccgcatcgtgttccattctgcgatgctgtggaccatcggtttcatcgtcaccttctcggtaggcgggatgactggcgtgctgctggcagtaccgggcgcggacttcgttctgcataacagcctgttcctgattgcgcacttccataacgtgatcatcggcggcgtggtcttcggctgcttcgcagggatgacctactggtggcctaaagcgttcggtttcaaactgaacgaaacctggggtaaacgcgcgttctggttctggatcatcggcttcttcgttgcctttatgccactgtatgcgctgggcttcatgggcatgacccgtcgtttgagccagcagattgacccgcagttccacaccatgctgatgattgcagccagcggtgcggtactgattgcgctgggtattctctgcctcgttattcagatgtacgtttctattcgtgaccgcgaccagaaccgtgacctgactggcgacccgtggggtggccgtacgctggagtgggcaacctcttccccgcctccgttctataactttgccgttgtgccgcacgttcacgaacgtgatgcattctgggaaatgaaagagaaaggcgaagcgtacaaaaagcctgaccactatgaagaaattcatatgccaaaaaacagcggtgccggtatcgtcattgcggctttctccaccatcttcggtttcgccatgatctggcatatctggtggctggcgattgttggcttcgcaggcatgatcatcacctggatcgtgaaaagcttcgacgaggacgtggattactacgtgccggtggcagaaatcgaaaaactggaaaaccagcatttcgatgagattactaaggcagggctgaaaaatggcaactga

SEQ ID NO: 135 - DNA, 948 bp, Escherichia coli
atgagactcaggaaatacaataaaagtttgggatggttgtcattatttgcaggcactgtattgctcagtggctgtaattctgcgctgttagatcccaaaggacagattggtctggagcaacgttcactgatactgacggcatttggcctgatgttgattgtcgttattcccgcaatcttgatggctgttggtttcgcctggaagtaccgtgcgagcaataaagatgctaagtacagcccgaactggtcacactccaataaagtggaagctgtggtctggacggtacctatcttaatcatcatcttccttgcggtactgacctggaaaaccactcacgctcttgagcctagcaagccgctggcacacgacgagaagcccattaccatcgaagtggtttccatggactggaaatggttcttcatctacccggaacagggcattgcaaccgtgaatgaaatcgctttcccggcgaacactccggtgtacttcaaagtgacctccaactccgtgatgaactccttcttcattccgcgtctgggtagccagatttatgccatggccggtatgcagactcgcctgcatctgatcgccaacgaacccggtacttatgacggtatctccgccagctacagcggcccgggcttctcaggcatgaagttcaaagctattgcaacaccggatcgcgccgcattcgaccaatgggtcgcaaaagcgaaacagtcgccgaacagcatgtctgacatggcagcgttcgaaaaactggccgcgcctagcgaatacaaccaggtggaatatttctccaacgtgaaaccagacttgtttgccgatgtgattaacaagtttatggctcacggtaagagcatggacatgacccagccagaaggtgagcacagcgcacacgaaggtatggaaggcatggacatgagccacgcggaatccgcccattaa

SEQ ID NO: 136 - DNA, 1476 bp, Escherichia coli
atgtccagtcaatatttacgtatttttcaacagccgcgttcagccatattgctgatcctgggttttgcttccgggctaccgctcgccctgacgtccggcaccttacaggcctggatgacggtcgagaatatcgatctcaaaaccattggtttcttctctctggtaggccaggcttacgtttttaaattcctctggtcaccactgatggaccgctacacgcccccatttttcgggcggcggcgcggttggctgctcgccacgcaaattctgttattagtcgccattgcggcgatgggttttctcgaaccaggcacccagctccgctggatggcggcactggcggtggtgatcgctttttgctctgcctcccaggatattgtcttcgatgcgtggaaaaccgatgtgctcccggcagaagaacgtggtgcgggcgcggcaatcagcgtgctgggttaccgtttagggatgctggtttccggcggcttagccctgtggctggcagataaatggctgggctggcagggcatgtactggttgatggcggcgctgttgatcccctgtattatcgcgacgttgcttgcaccagaacccaccgacaccattcctgtgcccaaaacgctggaacaagcggttgttgcacctctgcgagatttctttggtcgcaataatgcctggcttattttgcttcttatcgtgctgtataagctgggcgacgcattcgctatgagcctgacaaccacgtttttgattcgcggcgtcgggtttgatgcgggtgaagtaggcgtggttaacaaaacgcttggcttactggcgaccattgttggcgcattgtacggtgggattttgatgcagcgcctgtcgctgttccgtgcactgctgattttcggcattttacaaggtgcatctaacgccggttactggctgctgtcgattactgataagcatctctacagcatgggtgcagccgtctttttcgaaaacctctgtggcgggatgggtacatcagcctttgtcgcgctgttaatgacgctgtgtaataagtcattttccgctactcaatttgccctgctctcagcgctttctgctgtagggcgagtttatgtcggccccgtggcgggttggtttgttgaagcacatggctggtcgacattctatctattctccgtcgccgctgccgtaccagggcttattttgctgctggtttgccgccagacgcttgaatatacacgagtaaatggcaactttatctcccgtaccgaatatcctgcaggttatgcctttgccatgtggacactggcggcgggtatcagcctgttggccgtgtggttactgctgttgacaatggacgcgctggatttgacgcacttctctttcctgcctgcgctgctggaagtcggggttttagtcgccctttctggcgttgtgcttggtggtttgctggattatctggcgctacgaaaaacacatctgacgtaa

SEQ ID NO: 137 - DNA, 579 bp, Escherichia coli
atgttcaaaaaaatcctcttcccgttagttgctctgtttatgcttgcaggatgcgcaaaaccgccaacaactatcgaagtttccccgacgattacactgccacagcaggatccaagcctgatgggcgtcaccgtaagcattaatggtgccgatcagcgtaccgatcaggcgctggcaaaagtcactcgcgataatcaaatcgttaccctgaccgcctcccgcgatctgcgtttcctgctgcaagaagtgctggaaaaacaaatgaccgcccgtggatacatggttggtccgaatggcccggttaatctgcaaatcatcgttagccaactgtatgctgacgtgtcccagggcaacgtgcgctacaacatcgcgaccaaagcggatatcgccatcatcgctaccgcgcagaatggcaacaaaatgaccaaaaactatcgtgccagctacaatgttgaaggtgcgttccaggcctccaacaaaaatatcgccgatgcggttaacagtgtgctgaccgataccatcgctgatatgtctcaggacaccagcatccacgaattcatcaagcagaacgcgcgttaa

SEQ ID NO: 138 - DNA, 315 bp, Escherichia coli
atgatacgtgagcggatagaagaaaaattaagggcggcgttccaacccgtattcctcgaagtagtggatgaaagctatcgtcacaatgtcccagccggctctgaaagccattttaaagttgtgctggtcagcgatcgttttacgggtgaacgttttctgaatcgtcatcgaatgatttacagtactttagcggaggaactctctactaccgttcatgcgctggctctgcatacttacactattaaggagtgggaagggttgcaggacaccgtctttgcctctcctccctgtcgtggagcaggaagcatcgcgtaa

SEQ ID NO: 139 - DNA, 1299 bp, Escherichia coli
atgcaagtttcagttgaaaccactcaaggccttggccgccgtgtaacgattactatcgctgctgacagcatcgagaccgctgttaaaagcgagctggtcaacgttgcgaaaaaagtacgtattgacggcttccgcaaaggcaaagtgccaatgaatatcgttgctcagcgttatggcgcgtctgtacgccaggacgtcctgggcgacctgatgagccgtaacttcattgacgccatcattaaagaaaaaatcaatccggctggcgcaccgacctatgttccgggcgaatacaagctgggtgaagacttcacctactctgtagagtttgaagtttatccggaagttgaactgcagggtctggaagcgatcgaagttgaaaaaccgatcgttgaagtgaccgatgctgacgttgacggcatgctggatactctgcgtaaacagcaggcaacctggaaagaaaaagacggcgctgttgaagcagaagaccgtgtgaccatcgacttcaccggttctgttgacggcgaagagttcgaaggcggtaaagcgtctgatttcgtactggcgatgggtcagggtcgcatgatcccgggctttgaagacggtatcaaaggccacaaagctggcgaagagttcaccatcgacgtgaccttcccggaagagtaccacgcagaaaacctgaagggtaaagcagcgaaattcgctatcaacctgaagaaagttgaagagcgtgaactgccggaactgactgcagaattcatcaaacgtttcggcgttgaagatggttccgtagaaggtctgcgcgctgaagtgcgtaaaaacatggagcgcgagctgaagagcgccatccgtaaccgcgttaagtctcaggcgattgaaggtctggtaaaagctaacgacatcgacgtaccggctgcgctgatcgacagcgaaatcgacgttctgcgtcgccaggctgcacagcgtttcggtggcaacgaaaaacaagctctggaactgccgcgcgaactgttcgaagaacaggctaaacgccgcgtagttgttggcctgctgctgggcgaagttatccgcaccaacgagctgaaagctgacgaagagcgcgtgaaaggcctgatcgaagagatggcttctgcgtacgaagatccgaaagaagttatcgagttctacagcaaaaacaaagaactgatggacaacatgcgcaatgttgctctggaagaacaggctgttgaagctgtactggcgaaagcgaaagtgactgaaaaagaaaccactttcaacgagctgatgaaccagcaggcgtaa

SEQ ID NO: 140 - DNA, 624 bp, Escherichia coli
atgtcatacagcggcgaacgagataactttgcaccccatatggcgctggtgccgatggtcattgaacagacctcacgaggtgagcgctcttttgatatctattctcgtctacttaaggaacgcgtcatttttctgactggccaggttgaagatcacatggctaacctgattgtggcgcagatgctgttcctggaagcagaaaacccagaaaaagatatctatctgtacattaactctccaggcggggtgattactgccgggatgtctatctatgacaccatgcagtttatcaagcctgatgtcagcaccatctgtatgggccaggcggcctcgatgggtgctttcttgctgactgcaggggcaaaaggtaaacgtttctgcctgccgaattcgcgcgtgatgattcaccagccgttgggcggctaccagggccaggcgaccgatatcgaaattcatgcccgtgaaattctgaaagttaaagggcgcatgaatgaacttatggcgcttcatacgggtcaatcattagaacagattgaacgtgataccgagcgcgatcgcttcctttctgcccctgaagcggtggaatacggtctggtcgattcgattctgacccatcgtaattga

SEQ ID NO: 141 - DNA, 1275 bp, Escherichia coli
atgacagataaacgcaaagatggctcaggcaaattgctgtattgctctttttgcggcaaaagccagcatgaagtgcgcaagctgattgccggtccatccgtgtatatctgcgacgaatgtgttgatttatgtaacgacatcattcgcgaagagattaaagaagttgcaccgcatcgtgaacgcagtgcgctaccgacgccgcatgaaattcgcaaccacctggacgattacgttatcggtcaggaacaggcgaaaaaagtgctggcggtcgcggtatacaaccactacaaacgtctgcgcaacggagataccagcaatggcgtcgagttgggcaaaagtaacattctgctgatcggtccgaccggttccggtaaaacgctgctggccgaaacgctggcgcgcctgctggacgttccgttcaccatggctgacgcaaccacgctgaccgaagccggttatgtgggtgaagacgttgaaaacatcattcagaagctgttgcagaagtgcgattacgacgtacagaaagcgcagcgcgggattgtctacatcgatgaaattgacaagatttctcgtaagtcagacaacccgtccattacccgagacgtttccggtgaaggcgtacagcaggcactgttgaaactgatcgaaggtacggtagctgctgttccgccgcaaggtgggcgtaaacatccgcaacaggaattcttgcaggttgatacctctaagatcctgtttatctgtggcggtgcgtttgccggtctggataaagtgatttcccatcgtgtagaaaccggttccggcattggttttggcgcgacggtaaaagcgaagtccgacaaagcaagcgaaggcgagctgctggcgcaggttgaaccggaagatctgatcaagtttggtctgatccctgagttcattggtcgtctgccggttgtcgcaacgttgaatgaactgagcgaagaagctctgattcagatcctcaaagagccgaaaaacgccctgaccaagcagtatcaggcgctgtttaatctggaaggcgtggatctggaattccgtgacgaggcgctggatgctatcgctaagaaagcgatggcgcgtaaaaccggtgcccgtggtctgcgttccatcgtagaagccgcactgctcgataccatgtacgatctgccgtccatggaagatgtcgaaaaagtggttatcgacgagtcggtaattgatggtcaaagcaaaccgttgctgatttatggtaagccggaagcacaacaggcatctggtgaataa

SEQ ID NO: 142 - DNA, 2355 bp, Escherichia coli
atgaatcctgagcgttctgaacgcattgaaatccccgtattgccgctgcgcgatgtggtggtttatccgcacatggtcatccccttatttgtcgggcgggaaaaatccatccgttgtctggaagcggcgatggaccatgataaaaaaattatgctggtcgcgcagaaagaagcttcaacggatgagccgggtgtaaacgatcttttcaccgtcgggaccgtggcctctatattgcagatgctgaaactgcctgacggcaccgtcaaagtgctggtcgaggggttacagcgcgcgcgtatttctgcgctctctgacaatggcgaacacttttctgcgaaggcggagtatctggagtcgccgaccattgatgagcgggaacaggaagtgctggtgcgtactgcaatcagccagttcgaaggctacatcaagctgaacaaaaaaatcccaccagaagtgctgacgtcgctgaatagcatcgacgacccggcgcgtctggcggataccattgctgcacatatgccgctgaaactggctgacaaacagtccgttctggagatgtccgacgttaacgaacgtctggaatatctgatggcaatgatggaatcggaaatcgatctgctgcaggttgagaaacgcattcgcaaccgcgttaaaaagcagatggagaaatcccagcgtgagtactatctgaacgagcaaatgaaagctattcagaaagaactcggtgaaatggacgacgcgccggacgaaaacgaagccctgaagcgcaaaatcgacgcggcgaagatgccgaaagaggcaaaagagaaagcggaagcagagctgcagaagctgaaaatgatgtctccgatgtcggcagaagcgaccgtagtgcgtggatatatcgactggatggtacaggtgccgtggaatgcgcgtagcaaggtcaaaaaagacctgcgtcaggcgcaggaaatccttgataccgaccattatggtctggagcgcgtgaaagatcgtatccttgagtatcttgcggttcaaagccgtgtcaacaaaatcaagggaccgatcctctgcctggtagggccgccgggggtaggtaaaacctccctgggtcagtccatcgccaaagccaccgggcgtaaatatgtccgtatggcgctgggcggcgtgcgtgatgaagcggaaatccgtggtcaccgccgtacttacatcggttctatgccgggtaaactgatccagaaaatggcgaaagtgggcgtgaaaaacccgctgttcctgctcgatgagatcgacaaaatgtcttctgacatgcgtggcgatccggcctccgcactgcttgaagtgctggatccagagcagaacgtagcgttcagcgaccactacctggaagtggattacgatctcagcgacgtaatgtttgtcgctacgtcgaactccatgaacattccggcaccgctgctggatcgtatggaagtgattcgcctctccggttataccgaagatgaaaaactgaacatcgccaaacgtcacctgctgccgaagcagattgaacgtaatgcactgaaaaaaggtgagctgaccgtcgacgatagcgccattatcggcattattcgttactacacccgtgaggcgggcgtgcgtggtctggagcgtgaaatctccaaactgtgtcgcaaagcggttaagcagttactgctcgataagtcattaaaacatatcgaaattaacggtgataacctgcatgactacctcggtgttcagcgtttcgactatgggcgcgcggataacgaaaaccgtgtcggccaggtaaccggtctggcgtggacggaagtgggcggtgacttgctgaccattgaaaccgcgtgcgttccggggaaaggtaaactgacctataccggttcgctcggcgaagtgatgcaggagtctattcaggcggcgttaacagtggttcgtgcgcgtgcggaaaaactggggatcaaccctgatttttacgaaaaacgtgacatccacgtccacgtaccggaaggtgcgacgccgaaagatggtccgagtgccggtattgccatgtgcaccgcgctggtttcttgcctgaccggtaacccggttcgtgccgatgtggcaatgaccggtgagatcactctgcgtggtcaggtactgccgatcggtggtttgaaagaaaaactactggcagcgcatcgcggcgggattaaaacagtgttaattccgttcgaaaataaacgcgatctggaagagattcctgacaacgtaattgccgatctggacattcatcctgtgaagcgcattgaggaagttctgactctggcgctacaaaatgaaccgtctggcatgcaggttgtgactgcaaaatag

SEQ ID NO: 143 - DNA, 273 bp, Escherichia coli
gtgaataaatctcaattgatcgacaagattgctgcaggggctgatatctctaaagctgcggctggccgtgcgttagatgctattattgcttccgtaactgaatctctgaaagaaggggatgatgtagcactggtaggttttggtacttttgccgttaaagagcgtgctgcccgtactggccgcaacccgcagaccggtaaagagatcaccatcgctgctgctaaagtaccgagcttccgtgcaggtaaagcactgaaagacgcggtaaactaa

SEQ ID NO: 144 - DNA, 1872 bp, Escherichia coli
atgatggacagcttacgcacggctgcaaacagtctcgtgctcaagattattttcggtatcattatcgtgtcgttcatattgaccggcgtgagtggttacctgattggcggaggcaataactacgccgcaaaagtgaatgaccaggaaatcagccgtgggcaattcgagaacgccttcaacagcgagcgtaatcgcatgcagcaacagctgggcgatcaatactccgagctggcagcgaacgaaggctatatgaaaaccctgcgtcaacaggtgctgaatcgtctgatcgacgaggcgcttctggatcagtacgctcgtgagctgaaactgggtatcagcgatgagcaggttaaacaggcgattttcgcgaccccagccttccaggttgacggcaaatttgataacagccgctataacggtatcctcaaccagatggggatgaccgccgatcagtacgcccaggcgctgcgtaaccagctcactacccaacagctgattaacggcgttgccggtaccgattttatgctgaaaggtgaaaccgacgagctggcggcactggtagctcaacaacgcgtggtgcgtgaagcgactatcgatgttaacgcgctggcggcgaagcagcctgtgaccgaacaggaaattgccagctactacgaacaaaacaaaaacaatttcatgacgccggaacaattccgcgtgagttacatcaagctggatgccgcgacgatgcagcaaccggttagcgatgcggatatccagagctactacgatcagcatcaggatcaattcacccagccgcagcgtacccgttacagcatcatccagaccaaaactgaagatgaagcgaaagcggtacttgatgagctgaataagggcggtgattttgctgcattagccaaagaaaaatctgccgatattatctctgcccgcaacggcggtgatatgggttggttagaagatgccactatcccggacgaactgaaaaatgcgggtctgaaagaaaaaggccaactgtctggtgttatcaaatcttcggtcggtttcctgattgtgcgtctggacgacattcagccagcgaaagtgaaatcgttagacgaagtacgtgacgacattgcggcgaaagtgaaacacgaaaaagccctcgatgcgtactacgcgctgcagcagaaagtgagcgatgcggcaagcaacgacaccgagtctctggccggtgcagagcaagctgccggcgttaaagccactcagacgggttggttcagcaaagataacctgccggaagagttgaacttcaagccagttgccgacgctatcttcaacggcggtctggtaggtgaaaacggcgcgccgggcatcaactctgacatcatcaccgtagacggcgaccgcgcattcgtgctgcgcatcagcgagcacaaaccggaagcggtgaaaccgttggcagatgttcaggaacaagttaaggcactggttcagcacaacaaagctgaacaacaggcgaaagtggatgctgagaaactgctggttgatttgaaagccggcaaaggtgcggaagctatgcaggctgccggtctgaaatttggcgagccgaaaaccttaagccgttccggtcgtgacccgattagccaggctgcgtttgcactgccactgccagcgaaagacaaaccgagctacggtatggcgaccgatatgcaaggtaatgtggttctgctggcgctggatgaagtgaaacaaggttcaatgccggaagatcagaaaaaagcgatggtgcagggtatcacccagaacaacgcacaaatcgtctttgaagctctgatgagtaacctgcgtaaagaggcgaaaatcaaaattggcgatgcgctggaacagcaataa

SEQ ID NO: 145 - DNA, 372 bp, Escherichia coli
atgaaacacggaattaaagcactgctcattaccctgtccctggcctgtgccggaatgtctcatagcgcgctggcggcagcttctgtggcgaaaccgacaacagtagaaaccaaagcggaagctcctgcagcacaaagtaaagcagcagtaccggcgaaagccagtgacgaagaaggcacccgggtcagcattaataatgccagcgcggaagagttagcccgcgcgatgaatggcgttggcctgaagaaagcgcaggcgattgtcagttatcgcgaagagtacggtccgtttaaaacggtggaggatctaaaacaggtgccggggatgggcaattcgctggtggaacgtaatctggcggtattaaccctgtaa

SEQ ID NO: 146 - DNA, 399 bp, Escherichia coli
atgcaaacacaaatcaaagttcgtggatatcatctcgacgtttaccagcacgtaaacaacgcccgctaccttgaatttctcgaagaagcccgctggcatgggttggaaaatagcgacagttttcactggatgacggcccataacatcgctttcgtcgtggtcaatatcaatattaactatcgccgcccggcggtattaagcgacctgttaaccattaccagtcagttgcagcaattaaacggtaaaagtggcatcttaagccaggtcattacactggagccggaaggacaggtggtagcggatgcgcttattacgtttgtttgtattgatcttaaaacgcagaaagcattagctctggaaggggaattgcgcgaaaagctggagcagatggttaagtaa

SEQ ID NO: 147 - DNA, 696 bp, Escherichia coli
atgaaacgtgctgtcgttgtgttcagtggaggccaggattccaccacctgtctggtgcaggcattacaacaatatgatgaagtccattgcgtgacgttcgattacggtcaacgccatcgcgcagaaatcgacgtggcacgcgaactggcgctgaaactgggggcacgcgcgcataaggtgcttgatgtaacgctgctcaacgagctggcggtcagcagcctgacgcgtgacagcattccggtgcctgattatgaacctgaagccgatggtatcccgaatacgtttgtcccagggcgtaatattttgttcctgacactggcggcaatatatgcgtatcaggtaaaagcagaagccgtaattaccggcgtctgcgaaacggatttctccggctacccggattgccgcgatgagtttgtgaaagcactaaaccatgccgtcagtttgggcatggcgaaagatattcgttttgaaacgccgctgatgtggattgataaagcggaaacctgggcgctggcagattattacggcaagctggatttagtccgtaacgaaacgctgacctgttataacggcattaaaggcgacggttgcggtcattgtgcggcgtgtaatttacgtgccaacggtttgaatcattatctggccgataaaccgacggtgatggcagcgatgaagcagaaaaccgggttgaagtaa

SEQ ID NO: 148 - DNA, 1701 bp, Escherichia coli
atgcgactgctcaaccgtcttaaccagtatcaacgtctgtggcaaccttccgccggaaagccgcaaaccgtcaccgtcagcgaactggccgaacgctgtttttgcagcgaacgccatgttcgtacggtgttgcgtcaggcacaggaggcgggatggctggagtggcaggcgcagtcaggacgcggaaagcgcggtcaactacgctttctggtcacgccagaatcgctacgcaatgcgatgatggaacaggcgctggaaaccggaaagcagcaagatgtgctggagctggcgcaactggccccaggtgagttgcgcactctgttacagccgtttatgggcggacaatggcaaaacgatacgcccacgttgcgtattccctactatcgcccgctcgaaccgctacaaccgggctttttgcccggctgtgccgagcagcatctggccgggcagatattttccggcctgacccgcttcgataataatactcagcgcccgattggcgatttagcacatcactgggaaacctctactgacgggttacgctgggacttttatcttcgttcaacgctacactggcataacggcgatgcagtaaaagcctcacacttacaccagcgattattgatgctgttacaactgccagcactggatcaattatttattagcgtgaagcgtattgaagtcacccatccgcagtgtctgaccttctttttacatcgccccgattactggcttgcgcaccgactggcgagctattgcagccatctggcgcatccgcaattcccactgatcggcactggtccttttcgcttaacacaattcacagcggaactggtgcgcctggagagccatgattattaccatttacgtcatccgctgcttaaagcggttgagtactggataactccgccgcttttcgaaaaagatttgggaaccagttgtcggcatcccgtgcaaatcaccatcggcaaaccggaggagctgcaacgggtcagccaggtcagtagtggcatcagtttaggtttttgctatttaacgttgcgcaaaagtccccgactgtccctctggcaggcgcgaaaagtgatctccattattcatcaatccggtttattacaaacgttagaagtcggagaaaacctgatcaccgccagtcatgcattactgccaggctggactattccgcaatggcaagtaccggatgaggtcaaactaccgaaaaccttgacgctggtttatcacctaccgatagaacttcataccatggcagaacgcctacaggcgacactggcagcggaaggctgtgaactcacaattatttttcataacgcaaaaaactgggacgacacgaccctactggcacacgcagacctcatgatgggcgacagattaattggcgaagcaccggaatataccctggagcaatggctgcgttgcgatccactgtggccacatgttttcgacgctccagcatatgcacatttgcaatcgacactggacgcagtgcaagtaatgcctgatgaggaaaaccgatttaatgccctgaaagcggtttttagccagttaatggcagatgcgacgctgacgccgctgttcaactatcactatcgcattagcgcccctcccggcgtgaacggtgtgcgactgacaccgcgcggctggtttgaatttaccgaagcctggcttcccgcgccgtcgcaatga

SEQ ID NO: 149 - DNA, 819 bp, Escherichia coli
atggctcgtctggcagcatttgatatggatggcactttattgatgcctgaccatcatttaggtgagaaaaccctctctactttggcgcgactgcgtgaacgcgacattaccctcacttttgccacggggcgtcatgcgctggagatgcagcatattctcggggcgctatcgctggatgcatatttgattactggcaacggaacgcgcgtgcattctctggaaggtgaacttttacatcgtgatgatttacctgcggatgtcgcggagctggtgctgtatcagcaatgggatacccgagcaagcatgcatatcttcaatgacgatggttggtttaccgggaaagagatccctgcgttgttgcaggcatttgtctatagcggttttcgttatcagataatcgatgtcaaaaaaatgccactcggcagcgtcaccaagatctgcttctgtggcgatcacgacgatcttacacgcttgcagatccagctatacgaagcattaggcgagcgtgcacatttatgtttttccgccacggattgcctcgaagtgctgccggtgggctgcaataaaggcgctgcattgacggtgctgacccaacatttaggtttatcgttacgcgattgcatggcctttggtgatgcgatgaacgatcgcgaaatgttaggcagtgtcggtagcggatttattatgggcaatgcgatgccgcaactgcgcgcggagctcccgcatttaccggtgattggacattgccgaaatcaggctgtctctcactatttgacgcactggctggactatccacatctaccttattcccccgaataa

SEQ ID NO: 150 - DNA, 459 bp, Escherichia coli
atgttagataaaattgaccgtaagctgctggccttgctacagcaggattgcaccctctctttgcaggcactggctgaagccgttaatctgacaaccaccccctgctggaagcgtctgaaacggctggaggacgacggtatccttatcggcaaagtcgccctgctggatccggaaaaaataggcctcggcctgaccgcctttgtgctgataaaaacgcaacatcacagcagcgaatggtattgccgctttgtcacggtggttaccgaaatgccagaagtgctggggttctggcgcatggctggtgaatacgattatctgatgcgcgtccaggttgccgacatgaaacgctacgacgagttttataagcgtctggtaaacagtgtaccggggctgtcggacgtcacttccagcttcgcgatggaacagattaaatacaccacttctttacccatcgaataa

SEQ ID NO: 151 - DNA, 1773 bp, Escherichia coli
gtgcgattatttgctcaattaagctggtatttccgtcgggaatggcgtcgctatctcggggctgtcgccttgcttgtcattatcgcgatgctgcaactggttccgccaaaagtggttggtattgttgttgatggcgtgacagaacaacactttactaccgggcagatcctgatgtggatcgccaccatggtgctgattgccgttgtggtttatctcctgcgttacgtctggcgcgtattgctgtttggtgcgtcttatcaactggctgttgaactgcgtgaagattattaccgccagctaagccggcagcatcctgagttttacctgcgtcatcgcacgggtgacctcatggctcgtgcgaccaatgacgtcgatcgcgtcgtgtttgccgccggagaaggggtgctgacgctggtggattcactggtaatgggctgcgctgtgttgattatgatgtctacgcaaattagctggcagttgaccttatttgccctgttgccgatgccagtgatggcgatcatgatcaagcgcaacggcgatgccttgcatgaacgctttaagctggcacaggcggcgttttccagtcttaatgaccgcacccaggaaagcctcaccagtatccgcatgatcaaagcctttggtctggaagatcgtcagtcggcgttatttgccgcggatgccgaagataccggcaaaaaaaacatgcgggtggcgcgtattgatgctcgtttcgacccgaccatctatatcgcgattggtatggcgaacttgctggcgattggcggcggtagttggatggtggtgcagggcagtttaacgctgggccagctcaccagttttatgatgtatttaggtctgatgatttggccaatgctggcgctggcatggatgtttaacattgtggaacgtggcagcgcggcgtatagccgaattcgtaccatgctggccgaagcgccagtcgttattgatggtagtgataaggtgccagaaggtcgtggtgaactggatgtgaatattcgccagtttacgtatccgcagactgaccatcctgcgctggaaaacgtcaatttcgccctgaaaccctgtcagatgctgggtatctgcgggccgactggttccggcaaaagtaccctgttgtcgctcattcagcgtcatttcgacgtcagcgagggggatatccgctttcatgatattcctctgacgaagttacaactcgatagctggcgtagccgcctggcggtagttagccagacaccgttccttttttccgacaccgtagcgaacaacatcgcgttgggttgcccgaatgccacccagcaagagattgagcatgtcgcgcggttagccagcgtgcatgacgatattttgcgtttaccgcaaggtttcgatacagaagtgggcgagcgcggcgtgatgctttccggtgggcaaaaacagcgtatctccattgctcgtgcgttattagtcaacgcggaaatcctcatccttgatgatgcgctttcagcggtggacggacgcacagagcaccagatcctgcataacctgcgtcagtgggggcagggaagaacggtaatcatcagtgcccatcgcctttctgcactgacggaagccagtgaaattattgtgatgcagcacggacatatcgcccagcgtggcaatcatgatgagctggcgcaacaaagtggctggtatcgcgatatgtatcgctatcaacaactggaggcggcgctcgacgacgctccggaaattcgcgaggaggccatcgatgcgtag

SEQ ID NO: 152 - DNA, 1782 bp, Escherichia coli
atgcgtagttttagccaactgtggccgactctcaagcgcctgttagcgtacggttcaccgtggcgtaaaccgttggggattgcggtcctgatgatgtgggttgcggcggcggcagaagtcagtgggccgctgcttatcagctattttatcgacaatatggtagcgaaaaataacctgccgttgaaagtggttgcagggctggcggcggcgtatgttgggctgcaactgtttgcagccgggctacattacgcgcagtcgctgctgtttaatcgggcggcagtaggcgtagtgcaacagttgcgtaccgacgtgatggatgctgcgttacgccagccattaagcgagtttgatacccaacccgtcgggcaggtgatttcccgcgtcactaatgacactgaagtgatccgcgatctctacgttaccgtagtggcaactgtcctgcgtagcgccgcactggtgggcgcgatgctggtggcgatgttcagcctcgactggcgaatggcgctggtggcgataatgattttcccggtggtgctggtggtaatggtgatatatcagcgttacagcacgccgattgtccgtcgtgtgcgcgcttatctggcggatatcaacgacggctttaacgaaatcatcaatggcatgagcgttatccagcagttccgtcagcaggcgcgatttggcgaacgtatgggtgaggccagtcgttcacactatatggcgaggatgcaaaccctgcgcctcgacggttttctgctgcgtccgctgctgagtctgttttcatcgctcattctttgtggcttgttgatgctgtttggcttctccgccagcggcaccattgaagtgggcgtgttgtatgcgttcatcagttatttggggcgacttaacgaacccttaatcgaactgaccacgcagcaggcgatgctgcaacaggctgttgttgctggtgagcgcgtttttgagctgatggacggaccgcgccagcaatatggcaatgatgatcgcccgttgcagagcggcaccatcgaagtcgataacgtgtcatttgcttatcgcgatgacaatctggtgctaaagaacattaatctctctgtgccttcgcgcaactttgtggcgctggtcgggcataccggcagtggcaaaagcaccctcgccagtttattgatgggctattacccgctaacggaaggtgagattcgccttgatggtcgtccattaagtacgctaagtcacagcgcgctgcgccagggcgtggcaatggtgcagcaagatccggtggtgctggcggataccttcctcgccaacgtgacgctgggacgtgatatctctgaagaacgcgtctggcaggcgctggaaaccgtgcagctggcggagctggcgcgtagcatgagtgatggtatttacacgccgcttggcgagcaggggaataatctctcagtcgggcaaaagcaactgctggcactggcgcgcgtgctggtggagacgccgcaaatcctgatccttgatgaggcaaccgccagcattgactccgggactgaacaggcgattcaacatgctctggcggcggtgcgtgaacatactacgcttgtggtgattgctcaccgcttatcgactattgttgatgccgacaccattctggtgcttcatcgtgggcaagccgtggagcagggcactcaccagcaactgctggcggcccagggacgatactggcagatgtatcaactgcaacttgtgggcgaagagctggcagccagcgtgcgtgaagaggaatcattgagcgcctga

SEQ ID NO: 153 - DNA, 339 bp, Escherichia coli
atgaagctggtgaccgtgattatcaaaccattcaaacttgaagacgttcgtgaagcgttatcttccattggtattcagggcctgaccgtcaccgaagtgaaaggtttcgggcgtcagaaagggcatgccgagctgtaccggggggcggaatacagcgtcaacttcctgccaaaagtaaaaattgatgtggcgattgctgatgaccaactcgatgaagtgatcgatatcgtcagcaaagcggcttacaccggaaaaattggcgacggcaaaatcttcgtcgctgaattgcaacgcgtcattcgtattcgtaccggcgaagccgacgaagcggcgctgtaa

SEQ ID NO: 154 - DNA, 1287 bp, Escherichia coli
atgaagatagcaacgataaaaactgggcttacttcactggcgatgctgccgggactggtaatggctgcacctgcggtggccgataaagccgacaatgcgtttatgatgatttgtactgcgctggtgctgtttatgaccgttccggggattgccctgttttatggagggctgattcgtggcaaaaacgtgctgtcgatgctgactcaggtgaccgtgacgtttgcactggtctgtattctctgggtggtttacggctactcgctggcgtttggcgaaggcaacaacttcttcggcaacattaacgggttgatgctgaaaaacattgaactgacggcggtgatgggcagcatttatcagtatatccacgtggcgtttcagggatcgtttgcctgcattaccgtaggcttgatagttggggcgctggcggaacgaatccgcttctcagctgtgttgatttttgtggtggtatggctgacgctctcttacattccgattgcgcatatggtctggggcggcggtttgctggcttctcacggtgcactggattttgcgggtggcacggtggtgcacattaacgccgcaatcgccggtctggtgggcgcgtatctgataggcaaacgcgtgggcttcggcaaagaggcctttaaaccgcacaacctgccgatggtcttcaccgggactgccattctctatatcggttggtttggctttaacgccgggtcagcgggcacggcgaatgaaatcgcggcactggcatttgtgaatactgtggtcgcaactgcggcggcaattcttggctggatcttcggtgaatgggcgctgcgtggtaagccttcactgctgggagcgtgttctggcgcgattgccggtctggtcggcgtgacgccagcctgtggttacattggggttggcggtgcgttgattatcggcgtggtagctggtctggcgggcttgtggggcgttaccatgctcaaacgcttgctgcgggtggatgatccctgcgatgtcttcggtgtgcacggcgtttgtggtattgtcggctgtatcatgaccgggatttttgccgccagctcgctgggcggcgtgggcttcgctgaaggtgtgacgatgggccatcagttgctggtacagctggaaagcatcgccattacgattgtctggtctggtgtggtggcatttatcggctacaaactggcggatttgacggttggtctgcgtgtaccggaagagcaggagcgagaagggctggacgtcaacagccacggcgagaatgcctataacgcgtaa

SEQ ID NO: 155 - DNA, 861 bp, Escherichia coli
atgagtcaggcgctaaaaaatttactgacattgttaaatctggaaaaaattgaggaaggactctttcgcggccagagtgaagatttaggtttacgccaggtatttggcggccaggtcgtgggtcaggccttgtatgctgcaaaagagaccgtccctgacgagcggctggtacattcttttcacagctactttcttcgccctggcgatagtaagaagccgattatttatgatgtcgaaacgctgcgtgacggtaacagcttcagcgcccgccgggtttctgctattcaaaacggcaaaccgattttttatatgactgcctctttccaggcaccagaagcgggtttcgaacatcaaaaaacaatgccgtccgcgccagcgcctgatggcctgccttcagaaacgcaaatcgcccaatcgctggcgcacctgctgccgccagtgctgaaagataaattcatctgcgatcgtccgctggaagtccgtccggtggagtttcataacccactgaaaggtcacgtcgcagaaccgcatcgtcaggtgtggatccgcgcaaatggtagcgtgccggatgatctgcgcgttcatcagtatctgctcggttatgcttctgatcttaatttcctgccggtagctctacagccgcacggtatcggttttctcgaaccggggattcagattgccaccattgaccattccatgtggttccatcgcccgtttaatttgaatgaatggctgctgtatagcgtggaaagcacctcggcgtccagcgcacgcggctttgtgcgcggtgagttttatacccaggacggcgtgctggttgcctcgaccgttcaggaaggggtgatgcgtaatcacaattaa

SEQ ID NO: 156 - DNA, 573 bp, Escherichia coli
atgaaactcgtgcacatggccagtggtttagcggttgcgattgcgttggcggcttgcgcagataaaagcgcggatattcagacgccagcaccggctgcaaatacgtctatttcagcaacacaacaacctgctatccagcaaccgaatgtctctggtaccgtctggatccgtcagaaagtcgcactgccgcctgatgccgtgctgaccgtgacactttctgacgcgtcgttagccgatgcgccgtcgaaagtgctggcgcagaaagcggtgcgtaccgaaggtaaacagtcaccattcagctttgttctgccatttaacccggcagatgttcagccgaacgcgcgtattctgttgagtgcggcgattaccgtgaatgacaaactggtatttattaccgataccgttcagccggtgatcaaccagggcggaactaaagccgacctgacattggtgccggtgcagcaaaccgccgtgccggttcaggctagcggtggcgcaacgactaccgtaccttcaacttcaccaacccaggtgaatccgtcttcggcagttccagctccaacgcaatattaa

SEQ ID NO: 157 - DNA, 312 bp, Escherichia coli
atggaaaaagaagattcatttccccaacgcgtctggcaaatcgtagccgctattcccgaaggctatgtcaccacttacggtgatgtggcgaaactggcgggatcgccgcgcgccgcgcgccaggtaggcggtgtgttaaagcgtctccccgaaggcagcaccttgccctggcaccgggtggttaatcgccacggcaccatttcactgaccggaccggatttacagcgtcagcgacaggcattactggcagaaggtgtgatggtgtcgggaagcgggcaaatcgacttgcagctttatcgctggaactactaa

SEQ ID NO: 158 - DNA, 354 bp, Escherichia coli
atgaagtatgttgatggttttgttgttgccgttcctgccgataaaaaggatgcctatcgggaaatggccgctaaggccgcgccattatttaaagagttcggtgcgcttcgtattgtcgaatgctgggccagcgatgtaccggatggtaaagtgaccgattttcgtatggcggtgaaagcggaagagaatgaagaggttgtctttagctggattgaatacccttcaaaagaggtccgcgacgctgctaatcaaaagatgatgtcggacccacggatgaaagagttcggcgagtccatgccgtttgacggcaagcgaatgatctatggtggattcgaatcaatcatcgacgagtag

SEQ ID NO: 159 - DNA, 1551 bp, Escherichia coli
gtgagaacacgacatctggtcagccttatttcgggagtactgattctttcagtattgctgcctgtcggcttaagcatctggctggcccatcagcaggtagaaacatcatttattgaagagctgaatacgtattcctcccgcgtcgctattcgggccaataaggtggcgacacaagggaaagatgcgctgcaagagctggaaagatggcaaggcgcggcctgtagcgaagcccatctcatggaaatgcgtcgggtatcttacagttatcgctatattcaggaagtggtttatatcgataacaacgttccccaatgttcgtctctggagcatgaaagcccgcccgataccttccccgagccaggtaaaatttcgaaagatggttatcgtgtctggttaacatcgcataacgatttaggcattattcgttacatggtcgccatgggaacggcacattatgtcgtcatgatcgaccccgcttcctttattgatgtcattccctatagctcatggcaaattgatgccgccattattggcaatgcccataacgttgtcataaccagcagcgataaaattgctcagggaattattaccaggctacaaaaaacacccggtgagcatatcgaaaataatggaatcatttacgatatcctgcccttaccggagatgaatatttcgatcatcacctgggcttcaacgaaaatgttgcagaaaggctggcatcggcaagtctttatttggttaccgctcgggttggtgattggcctgctggcagcgatgtttgtgctgcgtattttgcgccgtatccagtcaccgcatcatcggctgcaggatgctatcgaaaatcgtgatatttgcgtgcactatcagccgattgtctccttagccaatggcaaaattgtcggtgctgaggcactggcgcgccggccgcagacagacggtagttggttgtcaccagatagttttattccgctggcacagcaaacgggcctttctgagccattgacgctactgattataagaagcgtctttgaagatatgggcgactggctgcgtcagcattctcagcagcatatttcgatcaatcttgaatccaccgtgctcacctcggaaaaaatcccgcaattgctgcgtgaaatgatcaatcactatcaggttaatcccagacagatcgcgcttgaactcactgaacgcgagtttgccgatccgaaaaccagcgccccgataatttctcgctaccgggaggcgggccatgaaatttatctcgatgattttggtacagggtattcaagtttaagctatttacaggatctggatgtcgacattctgaagatcgataaatctttcgttgatgcgctggaatataaaaatgtcacgccgcatatcatcgaaatggcaaaaacactgaaactgaaaatggttgcggagggaatcgaaaccagtaaacaagaagagtggctacgccagcatggcgtgcactacggtcagggctggctctacagcaaggcattaccgaaagaggatttcttacgctgggccgagcaacatttgtga

SEQ ID NO: 160 - DNA, 471 bp, Escherichia coli
atgaccgaaatacaacgcctgctgaccgaaacgattgagtctctgaatacccgcgaaaaacgcgacaacaaaccccgctttagtatcagttttatccgtaaacatccggggctgtttatcggtatgtacgttgctttttttgctaccctggcggtgatgttgcaatccgaaacgctttcaggctctgtctggctgctggttgtattatttatcctgcttaatggtttcttctttttcgatgtctacccacgctaccgctatgaagatatcgacgtgctggatttccgcgtttgctataacggcgaatggtacaacacgcgctttgtacctgccgcgctagttgaagccatcctgaactctccgcgtgtcgcggatgttcataaagaacaactgcaaaaaatgatcgtccgtaaaggtgaactatctttttacgatatttttaccctcgctcgcgccgaatcaacatcttaa

SEQ ID NO: 161 - DNA, 552 bp, Escherichia coli
atgagcacagaaaaagaaaagatgattgctggtgagttgtatcactcggcagatgaggcgttatctcgcgatcgcctgcgcgctcgtcggcttattcaccgatacaatcattccctggcggaagagcacacattacgccagcaaattcttgctgatttattcggtcaggtgacagaggcttatattgagccaacgtttcgctgtgactatggttataacatttttctcggcaataattttttcgccaacttcgattgcgtgatgcttgatgtctgccctattcgcattggtgataactgtatgttggcaccaggcgttcatatctacacggcaacacatcccatcgaccctgtagcacgtaatagcggtgctgaactggggaaacccgtcaccatcggtaataacgtctggattggcggacgtgcggtcattaaccctggtgtgaccattggtgataacgtcgtggtagcctcaggtgcagttgtcacaaaagatgtcccggacaacgttgtcgtgggcggtaatccagccagaatcattaaaaaattgtaa

SEQ ID NO: 162 - DNA, 219 bp, Escherichia coli
atgtccgaaaaacctttaacgaaaaccgattatttaatgcgtttacgtcgttgtcagacaattgacacgctggagcgtgttatcgagaaaaataaatacgaattatcagataatgaactggcggtattttactcagccgcagatcaccgcctcgccgaattgaccatgaataaactgtacgacaagatcccttcctcagtatggaaatttattcgctaa

SEQ ID NO: 163 - DNA, 375 bp, Escherichia coli
atggatgaatactcacccaaaagacatgatatcgcacagcttaagtttctctgtgaaaccctgtatcatgactgccttgcaaaccttgaagaaagcaatcatggctgggttaacgacccaacctcggcgatcaacctccagttgaatgaactgattgagcatattgcgaccttcgcacttaattacaaaattaagtataatgaagacaataagctcattgagcagatcgacgaatatctggatgacacctttatgttgttcagtagttatggtattaatatgcaggatcttcagaaatggcggaagtcaggtaatcgactattccgttgttttgtcaatgcgacgaaagagaatcctgcgagtttatcttgttag

SEQ ID NO: 164 - DNA, 3150 bp, Escherichia coli
atgcctaatttctttatcgatcgcccgatttttgcgtgggtgatcgccattatcatcatgttggcaggggggctggcgatcctcaaactgccggtggcgcaatatcctacgattgcaccgccggcagtaacgatctccgcctcctaccctggcgctgatgcgaaaacagtgcaggacacggtgacacaggttatcgaacagaatatgaacggtatcgataacctgatgtacatgtcctctaacagtgactccacgggtaccgtgcagatcaccctgacctttgagtctggtactgatgcggatatcgcgcaggttcaggtacagaacaaactgcagttggcgatgccgttgctgccacaagaagtacagcagcaaggggtgagcgttgagaaatcatccagcagcttcctgatggttgtcggcgttatcaacaccgatggcaccatgacgcaggaggatatctccgactacgtggcggcgaatatgaaagatgccatcagccgtacgtcgggcgtgggtgacgttcagttgttcggttcacagtacgcgatgcgtatctggatgaacccgaatgaactgaacaaattccagctaacgccggttgatgtcattaccgccatcaaagcacagaacgcccaggttgcagctggtcagctcggtggtacgccgccggtgaaaggccaacagcttaacgcctctattattgctcagacgcgtctgacctctactgaagagttcggcaaaatcctgctgaaagtgaatcaggatggttcccgcgtgctgctgcgtgatgtggcgaaaattgagctgggtggtgagaactacgacatcatcgcagagtttaacggccaaccggcttccggtctggggatcaagctggcgaccggtgcgaacgcgctggataccgctgcggcaatccgtgctgaactggcgaagatggaaccgttcttcccgtcgggtctgaaaattgtttacccgtatgacaccacaccgttcgtgaaaatctctattcacgaagtggttaaaacgctggtcgaagcgatcatcctcgtgttcctggtaatgtatctgttcttgcagaacttccgcgcgacgttgattccgaccattgccgtaccggtggtattgctcgggacctttgccgtccttgccgcctttggcttctcgataaacacgctaacaatgttcgggatggtgctcgccatcggcctgttggtggatgacgccatcgttgtggtagaaaacgttgagcgtgtgatggcggaagaaggtttgccgccaaaagaagccacccgtaagtcgatggggcagattcagggcgctctggtcggtatcgcgatggtactgtcggcggtattcgtaccgatggccttctttggcggttctactggtgctatctatcgtcagttctctattaccattgtttcagcaatggcgctgtcggtactggtggcgttgatcctgactccggctctttgtgccaccatgctgaaaccgattgccaaaggcgatcacggggaaggtaaaaaaggcttcttcggctggtttaaccgcatgttcgagaagagcacgcaccactacaccgacagcgtaggcggtattctgcgcagtacggggcgttacctggtgctgtatctgatcatcgtggtcggtatggcctatctgttcgtgcgtctgccaagctccttcttgccagatgaggaccagggcgtatttatgaccatggttcagctgccagcaggtgcaacgcaggaacgtacgcagaaagtgctcaatgaggtaacgaattactatctgaccaaagaaaagaacaacgttgagtcggtgttcgccgttaacggcttcggctttgcgggacgtggtcagaataccggtattgcgttcgtttccttgaaggactgggccgatcgtccgggcgaagaaaacaaagttgaagcgattaccatgcgtgcaacacgtgctttctcgcaaatcaaagatgcgatggttttcgcctttaacctgcccgcaatcgtggaactgggtaccgcaaccggctttgactttgagctgattgaccaggctggccttggtcacgaaaaactgactcaggcgcgtaaccagttgcttgcagaagcagcgaagcaccctgatatgttgaccagcgtacgtccaaacggtctggaagataccccgcagtttaagattgatatcgaccaggaaaaagcgcaggcgctgggtgtttctatcaacgacattaacaccactctgggcgctgcatggggcggtagctatgtgaacgactttatcgaccgcggtcgtgtgaagaaagtttacgtcatgtcagaagcgaaataccgtatgctgccggatgatatcggcgactggtatgttcgtgctgctgatggtcagatggtgccgttctcggcgttctcctcttctcgttgggagtacggttcgccgcgtctggaacgttacaacggcctgccatctatggaaatcttaggccaggcggcaccgggtaaaagtaccggtgaagcaatggagctgatggaacaactggcgagcaaactgcctaccggtgttggctatgactggacgggaatgtcctatcaggaacgtctctccggcaaccaggcaccttcactgtacgcgatttcgttgattgtcgtgttcctgtgtctggctgcgctgtacgagagctggtcgattccgttctccgttatgctagtcgttccgctgggggttatcggtgcgttgctggctgccaccttccgtggcctgaccaatgacgtttacttccaggtaggcctgctcacaaccattggtttgtcggcgaagaacgcgatacttatcgtcgaattcgccaaagacttgatggataaagaaggtaaaggtctgattgaagcgacgcttgatgcggtgcggatgcgtttacgcccaatcctgatgacctcgttggcgtttatcctcggcgttatgccgctggttatcagtactggtgctggttccggcgcgcagaacgcagtaggtaccggtgtaatgggcgggatggtgaccgcaacggtactggcaatcttcttcgttccggtattctttgtggtggttcgccgccgctttagccgcaagaatgaagatatcgagcacagccatactgtcgatcatcattga

SEQ ID NO: 165 - DNA, 1194 bp, Escherichia coli
atgaacaaaaacagagggtttacgcctctggcggtcgttctgatgctctcaggcagcttagccctaacaggatgtgacgacaaacaggcccaacaaggtggccagcagatgcccgccgttggcgtagtaacagtcaaaactgaacctctgcagatcacaaccgagcttccgggtcgcaccagtgcctaccggatcgcagaagttcgtcctcaagttagcgggattatcctgaagcgtaatttcaaagaaggtagcgacatcgaagcaggtgtctctctctatcagattgatcctgcgacctatcaggcggcatacgacagtgcgaaaggtgatctggcgaaagcccaggctgcagccaatatcgcgcaattgacggtgaatcgttatcagaaattgctcggtactcagtacatcagtaagcaagagtacgatcaggctctggctgatgcgcaacaggcgaatgctgcggtaactgcggcgaaagctgccgttgaaactgcgcgaatcaatctggcttacaccaaagtcacctctccgattagtggtcgcattggtaagtcaaacgtgacggaaggcgcattggtacagaacggtcaggcgactgcgctggcaaccgtgcagcaacttgatccgatctacgttgatgtgacccagtccagcaacgacttcctgcgcctgaaacaggaactggcgaatggcacgctgaaacaagagaacggcaaagccaaagtgtcgctgatcaccagtgacggcattaagttcccgcaggacggtacgctggaattctctgacgttaccgttgatcagaccactgggtctatcaccctacgcgctatcttcccgaacccggatcacactctgctgccgggtatgttcgtgcgtgcacgtctggaagaagggcttaatccaaacgctattttagtcccgcaacagggcgtaacccgtacgccgcgtggcgatgccaccgtactggtggttggcgcggatgacaaagtggaaacccgtccgatcgttgcaagccaggctatcggcgataagtggctggtgacagaaggtctgaaagcaggcgatcgcgtagtaataagtgggctgcagaaagtgcgtcctggtgtccaggtaaaagcacaagaagttaccgctgataataaccagcaagccgcaagcggtgctcagcctgaacagtccaagtcttaa

SEQ ID NO: 166 - DNA, 648 bp, Escherichia coli
atggcacgaaaaaccaaacaagaagcgcaagaaacgcgccaacacatcctcgatgtggctctacgtcttttctcacagcagggggtatcatccacctcgctgggtgagattgcaaaagcagctggcgttacgcgcggtgcaatctactggcattttaaagacaagtcggatttgttcagtgagatctgggaactgtcagaatccaatattggtgaactagagcttgagtatcaggcaaaattccctggcgatccactctcagtattaagagagatattaattcatgttcttgagtccacggtgacagaagaacggcgtcgattattgatggagattatattccacaaatgcgaatttgtcggagaaatggctgttgtgcaacaggcacaacgtaatctctgtctggaaagttatgaccgtatagaacaaacgttaaaacattgtattgaagcgaaaatgttgcctgcggatttaatgacgcgtcgcgcagcaattattatgcgcggctatatttccggcctgatggaaaactggctctttgccccgcaatcttttgatcttaaaaaagaagcccgcgattacgtcgccatcttactggagatgtatctcctgtgccccacgcttcgtaaccctgccactaacgaataa

SEQ ID NO: 167 - DNA, 3363 bp, Escherichia coli
atgactatgttccagtattacaaacgatcacggcattttgttttttcagcatttattgcttttgtttttgtcttgttatgccagaacacggcgtttgcgcgggcgtcatcgaatggtgatctgccgacaaaagcggacctgcaggcacaacttgactcactgaataaacaaaaagatctttctgctcaggacaaactggtgcagcaggatctgacagatacattagccaccctcgataaaatcgatcgcgtaaaagaagagacagttcagctacggcaaaaagtcgctgaagcgccggaaaaaatgcgccaggcgaccgcggcgttaacagcacttagtgatgtcgataacgacgaagaaacgcgcaaaattctgagcacgctttcgttgcgccagctggaaactcgcgttgcccaggcgctggacgatttgcaaaacgcacaaaatgatctggcgtcttataacagccagctggtttcgttacagacgcagcccgaacgcgtacaaaatgcgatgtataacgcttcgcagcagctgcaacaaattcgcagtcgtctggatgggactgatgtcggcgagacagccttacgtcccagccagaaagtgttaatgcaggctcagcaggctttgctgaatgccgagattgaccagcagcgtaaaagcctggaagggaacacagtcttacaggataccttgcaaaagcaacgggattacgtgacggcgaacagcgcccgtctggagcaccagttgcagctgttgcaagaagcggtaaacagcaagcgcctgactttaaccgaaaaaacggcgcaggaagccgtctccccggatgaagccgcgcgtattcaggctaatccgctggtgaagcaggaactggaaattaaccagcagttaagtcagcgtctgattaccgcgactgaaaacggtaatcagttgatgcagcaaaacattaaagtcaaaaactggctggagcgggcgctgcaatcggaacgcaatattaaagagcagattgccgtcctgaagggcagtctgctgttgtcacgtatcctgtaccagcaacaacaaacactcccctcggcagatgaactggaaaacatgaccaaccgcatcgcggatttgcgtctcgaacagtttgaagtcaaccagcagcgtgacgcgctgttccagagcgatgcgttcgtcagcaaactggaagaaggtcacaccaacgaagtcaacagcgaagttcacgatgcattattgcaagtagttgatatgcgtcgcgaattgctggatcagcttaacaaacagttgggtaaccagctgatgatggccattaacctgcaaatcaaccagcagcagttaatgagtgtgtcgaaaaacctgaaatccatcctgacgcagcaaattttttgggtgaacagtaaccgcccgatggactgggactggattaaagcgttcccgcaaacgctgaaagatgaatttaagtcgatgaaaatcacggtgaactgggaaaaagcctggcccgccgtattcatcgccttcctcgctggtttgccgctgctgttgattgccgggctgattcactggcgtttaggctggctgaaagcatatcaacaaaaactggcttcggcggtaggttccctgcgtaacgatagccagctcaatacgccaaaagcgattcttattgacctaatccgcgcactgccggtgtgcctgattattctcgctgtcggcctgattctgctgactatgcagctcaatatcagcgagttattgtggtcgttcagcaaaaaactggcgattttctggctggtgtttggcctgtgctggaaagtgctggagaaaaacggtgttgccgtgcgtcactttggtatgccggaacagcagaccagccactggcgtcggcaaattgtccgcatcagcctcgcgttgctgccgatccatttctggtctgtggtggcagaactctccccgctgcatctgatggatgatgtgctggggcaggcgatgattttcttcaacctgctgctgattgccttcctggtgtggccgatgtgccgcgaaagctggcgtgataaagagtcgcacaccatgcgactggtcaccattaccgtgctgtcgattatcccgattgcgttgatggtgctgaccgccacgggttacttctacaccacgctgcgcctctccgggcgttggattgaaaccgtttatttggtgatcatctggaacctgctgtaccagacggtattgcgcggcttaagcgtagcggcgcggcgtatcgcctggcgtcgtgcactggcgcgtcggcagaatctggtgaaagagggcgcagaaggtgccgaaccgccggaagaacccaccattgcgctggagcaggttaaccagcagacgctgcgtattaccatgttgctgatgtttgcgctgttcggtgtcatgttctgggcaatttggtctgatttgatcaccgtgttcagctatctcgacagcattacgctctggcattacaacgctactgaagctggtgctgcggtggtgaaaaacgtcaccatgggcagtctgttgtttgcgattatcgcctcaatggtggcctgggcgttgattcgcaacctgcctggtttgctggaagtgctggtgctctcgcgactgaatatgcgccagggcgcgtcgtatgccattactaccatccttaactacatcattattgccgttggtgcgatgacggtgttcggatcgctgggcgtctcgtgggataaactccagtggctggcggcagcattatccgtaggtcttggttttggtttacaagagatcttcggtaacttcgtttccggtttgatcattctgttcgaacgtccggtgcgcataggcgacacggtaaccattggtagcttctcgggtacggtcagcaagatccgtattcgtgcgacaacgattaccgatttcgatcgcaaagaagtgattatcccgaacaaagcgtttgttaccgagcgtctgatcaactggtcgttaactgacacgactacgcgtctggtgatccgtctcggcgtagcctatggctccgatctggaaaaagtgcgtaaagtgttgctgaaggcggcgactgagcacccaagggtgatgcacgaaccaatgccggaagtcttctttacggcatttggtgccagcacgttggatcatgagctgcgtctgtatgtgcgtgaactgcgtgaccgtagccgtactgtcgatgagctgaaccgtactatcgatcagttgtgccgtgaaaacgacatcaacattgcctttaaccaacttgaagtgcatctgcacaacgagaagggcgatgaagtgacggaagtgaaacgcgactacaaaggcgacgatccgacgccagcggtagggtaa

SEQ ID NO: 168 - DNA, 162 bp, Escherichia coli
atgtcactggaaaatgcccctgacgatgtcaaactggccgtcgatttgattgtgctactggaagaaaatcagatcccagcccgcaccgtgctgcgcgcgctggatattgtaaaacgcgattatgaaaagaaattaacgcgcgatgatgaggcggaaaagtga

SEQ ID NO: 169 - DNA, 528 bp, Escherichia coli
gtgaaaaccgccctgctgctggaaaaactggaaggacagctcgccacgctgcgtcagcgttgtgccccggtagcgcaatttgccacgctaagtgcccgttttgacaggcacctttttcagacccgtgcgacaacactacaggcttgtctcgatgaggcgggcgataacctggctgcgcttcgtcatgcggttgagcagcaacagctgccgcaagtcgcctggctggcagaacatctggcggcgcaactggaggctatagcgcgtgaagccacagcctggtcgctacgcgagtgggatagcgcaccaccgaaaattgcccgctggcagcgtaaacgtattcagcatcaggattttgagcggcggctacgtgagatggttgccgaacgtagagcccgtctggcacgagcgaccgatctcgtggaacagcagacgctgcatcgtgaagtggaagcctatgaagcgcgcctggcacgctgccgccatgcgctggaaaaaatcgaaaacaggttagcgcgtttaacccgctag

SEQ ID NO: 170 - DNA, 378 bp, Escherichia coli
atgcaacgaatcattttaatcatcattggctggctggcggtagtgctgggtacgctgggcgtggtattaccggtattaccgacgacgccgtttatcctgctggcggcctggtgctttgcccgttcttccccgcgctttcacgcctggttgctgtaccgctcatggtttggcagctatctacgtttctggcagaaacatcatgcgatgccgcgcggcgcaaaaccacgggcgattttgcttattttgattacgtttacgatttcgctgtggttcgtccagatgccgtgggtgcgcatcatgttgctggtaattctcgcctgtttgcttttttatatgtggcgaattccggtgattgatgaaaagcaagaaaagcactga

SEQ ID NO: 171 - DNA, 552 bp, Escherichia coli
atgaccgcgactgcacagcagcttgagtatctcaaaaatagcatcaaaagcattcaggactacccaaaacccggcattcttttccgcgatgtcaccagcttactggaagacccgaaagcttacgctctcagcatcgacttgctggttgagcgttacaaaaatgcgggcattaccaaagttgtcggcaccgaagcgcgtggcttcttgtttggcgctccggtagctctgggtctgggcgttggctttgtaccggtccgtaaaccgggcaaactgccgcgtgaaaccatcagtgaaacttacgacctggaatacggcaccgatcagctggaaatccacgttgatgccatcaaaccgggcgacaaagttctggtggtggacgacctgctggcaaccggcggcactatcgaagcgaccgttaaactgatccgtcgtctgggtggtgaagtggctgatgctgcgttcattatcaacctgttcgatctcggcggcgaacagcgtctcgaaaaacagggcattaccagctacagccttgttccgttcccgggccattaa

SEQ ID NO: 172 - DNA, 1932 bp, Escherichia coli
atgagttatcaggtcttagcccgaaaatggcgcccacaaacctttgctgacgtcgtcggccaggaacatgtgctgaccgcactggcgaacggcttgtcgttagggcgtattcatcatgcttatcttttttccggtacccgtggcgtcggaaaaacctctatcgcccgactgctggcgaaggggctaaactgcgaaaccggcattaccgcgacgccgtgcggcgtgtgcgataactgtcgtgaaatcgagcaggggcgctttgtcgatctgattgaaatcgacgccgcctcgcgcactaaagttgaagacactcgcgacctgctggataacgtccagtacgctccggcgcgtggtcgtttcaaagtttatctgatcgacgaagtgcatatgctgtcgcgccacagctttaacgcactgttaaaaacccttgaagagccgccggagcacgttaagtttttgctggcgacgaccgatccgcagaaattgccggtgacgattttgtcacgctgtctgcaatttcatctcaaggcgctggatgtcgagcaaatccgccatcaacttgagcacatcctcaatgaagaacatatcgctcacgagccgcgggcgctgcaattgctggcacgcgccgctgaaggcagcctgcgagatgccttaagtctgaccgaccaggcgattgccagcggtgacggccaggtttcaacccaggccgtcagtgcgatgctgggtacgcttgacgacgatcaggcgctgtcgctggttgaagcgatggtcgaggccaacggcgagcgcgtaatggcgctgattaatgaagccgctgcccgtggtatcgagtgggaagcgttgctggtggaaatgctcggtctgttgcatcgtattgcgatggtacaactttcgcctgctgcacttggcaacgacatggccgctatcgagctgcggatgcgtgaactggcgcgcaccataccgccgacggatattcagctttactaccagacgctgttgattggtcgcaaagaattaccgtatgcgccagaccgccgtatgggcgttgagatgacgctgctgcgcgcgctggcgttccatccgcgtatgcctctgcctgagccagaagtgccacgccagtcctttgcgcccgttgcgccaacggcagtaatgacgccaacacaggtgccgccgcaaccgcaatcagcgccgcagcaggcaccgactgtaccgctcccggaaaccaccagccaggtgctggcggcgcgccagcagttgcagcgcgtgcagggagcaaccaaagcaaaaaagagtgaaccggcagccgctacccgcgcgcggccggtgaataacgctgcgctggaaagactggcttcggtcaccgatcgcgttcaggcgcgcccggtgccatcggcgctggaaaaagcgccagccaaaaaagaagcgtatcgctggaaggcgaccactccagtgatgcagcaaaaagaagtggtcgccacgccgaaggcgctgaaaaaagcgctggaacatgaaaaaacgccggaactggcggcgaagctggcggcagaagccattgagcgcgacccgtgggcggctcaggtgagtcaactttcgctaccaaaactggtcgaacaggtggcgttaaatgcctggaaagaggagagcgacaacgcagtatgtctgcatttgcgctcctctcagcggcatttgaacaaccgcggcgcacagcaaaaactggctgaagcgttgagcacgttaaaaggttcaacggttgaactgactatcgttgaagatgataatcccgcggtgcgtacgccgctggaatggcgtcaggcgatatacgaagaaaaacttgcgcaggcgcgcgagtccattattgcggataataatattcagaccctgcgtcgattcttcgatgcggagctggatgaagacagtatccgccccatttga

SEQ ID NO: 173 - DNA, 330 bp, Escherichia coli
atgtttggtaaaggcggtctgggtaacctgatgaagcaagcccagcagatgcaagaaaaaatgcagaaaatgcaggaagagatcgcgcagctggaagtgaccggcgaatctggcgcaggtctggtaaaagtgaccattaacggtgcacacaactgccgtcgcgtagagatcgacccgagcctgctggaagacgacaaagagatgctggaagacctggtggctgcagcattcaacgacgcggcacgtcgtatcgaagaaacgcagaaagaaaaaatggcctctgtatcctccggaatgcagctgccgcctggctttaagatgccgttctga

SEQ ID NO: 174 - DNA, 606 bp, Escherichia coli
atgcaaaccagcccgctgttaacacagcttatggaagcactgcgctgtctgccgggcgttggcccgaagtcggcgcagcgtatggcgttcacgttgcttcagcgcgatcgtagtggcgggatgcgtctggcgcaggcgctcacccgggcgatgtcggaaatcggccactgcgccgattgccgcactttcaccgaacaggaagtctgtaacatctgttcgaatccacgtcgtcaggaaaacggtcaaatctgcgtggtggagagtccggcggacatttacgccattgagcagacggggcagttttcaggtcgttattttgtgttgatggggcacctgtcgccgctggacggcatcggtccggatgacatcggccttgatcgcctggaacagcgtctggcagaggaaaaaatcactgaagtgatcctcgccaccaaccccacggttgaaggtgaagctaccgctaactacattgccgagctttgtgcgcaatatgacgtggaagccagccgaatcgctcatggcgtaccggttggcggcgaactggaaatggtcgatggcaccacgctgtcacactcccttgccgggcgtcataagattcgtttttaa

SEQ ID NO: 175 - DNA, 1875 bp, Escherichia coli
atgaaaggacaagaaactcgtggttttcagtcagaagtgaaacagcttctgcacctgatgatccattctctctattccaataaagaaatcttcctgcgtgagcttatctctaacgcctccgatgcggcggacaagctgcgtttccgcgcgctctctaacccggacctgtacgaaggtgatggcgaactgcgcgttcgtgtctctttcgataaagacaagcgcacgctgaccatctccgataacggcgtggggatgacccgcgacgaagtgattgaccatctggggactatcgctaaatccggcaccaaatcattcctcgaatccctgggttctgaccaggcgaaagacagccagctgatcggtcagtttggtgttggtttctactctgcgtttatcgtggctgacaaagtgaccgtgcgtactcgcgcggcaggcgaaaaaccagaaaacggcgtcttctgggaatcggctggcgaaggtgaatacaccgttgccgacatcactaaagaagatcgtggtactgaaatcaccctgcatctgcgtgaaggcgaagacgagttcctcgatgactggcgtgtgcgttccatcatcagcaaatattccgaccatatcgcgctgccggtagagatcgaaaaacgcgaagagaaagacggcgaaaccgttatctcctgggagaaaatcaacaaagcgcaggcgctgtggactcgtaacaagtcggaaatcaccgatgaagagtacaaagagttctacaaacacatcgcccacgactttaacgatccgctgacatggagccacaaccgcgttgaaggtaagcaggagtacaccagcctgctgtacattccgtctcaggcaccgtgggatatgtggaaccgcgatcataaacacggtctgaaactgtatgttcagcgtgtgttcatcatggacgacgcagaacagttcatgccgaactatctgcgcttcgtgcgtggtctgattgactccagcgatctgccgctgaacgtttcccgtgaaatcctccaggacagcacggtaacgcgtaacctgcgcaatgcgctgaccaagcgtgtgctgcaaatgctggaaaaactggcgaaagacgacgcggaaaaataccagaccttctggcaacagtttggcctggtactgaaagaaggtccggcggaagatttcgctaaccaggaagcgatcgccaaactgctgcgttttgcttctacccataccgattcttctgcgcagaccgtgtctctggaagactacgtttcccgcatgaaagaagggcaggagaaaatctactatatcaccgcagacagttacgcggcagcgaagagcagcccgcacctggaactgctgcgtaagaaaggcatcgaagttctgctgctttccgaccgcatcgatgagtggatgatgaactatctgactgagttcgacggtaaaccgttccagtctgtgtctaaagttgacgagtcgctggaaaaactggctgacgaagttgatgagagcgcgaaagaagcggagaaagcactgactccgttcatcgaccgtgtgaaagccctgctcggcgagcgcgtgaaagatgtccgtctgactcaccgtctgaccgatacgccagcgatcgtttcgaccgacgcggacgaaatgagcactcagatggcgaaactgttcgctgcggcgggccagaaagtgccagaagtgaaatacatcttcgaactgaacccggatcacgtactggtgaaacgtgcggcggatactgaagatgaagcgaagttcagcgagtgggtagaactgctgctggatcaggcgctgctggcagaacgcggtacgctggaagatccgaacctgtttattcgtcgtatgaaccagctgctggtttcctga

SEQ ID NO: 176 - DNA, 645 bp, Escherichia coli
atgcgtatcattctgcttggcgctccgggcgcggggaaagggactcaggctcagttcatcatggagaaatatggtattccgcaaatctccactggcgatatgctgcgtgctgcggtcaaatctggctccgagctgggtaaacaagcaaaagacattatggatgctggcaaactggtcaccgacgaactggtgatcgcgctggttaaagagcgcattgctcaggaagactgccgcaacggtttcctgttggacggcttcccgcgtaccattccgcaggcagacgcgatgaaagaagcgggcatcaatgttgattacgttctggaattcgacgtaccggacgaactgattgttgaccgtatcgtaggccgccgcgttcacgcgccgtctggtcgtgtttatcacgttaaactcaatccgccgaaagtagaaggcaaagacgacgttaccggtgaagagctgactacccgtaaagacgatcaggaagagaccgtacgtaaacgtctggttgaataccatcagatgactgcaccgctgatcggctactactccaaagaagcggaagcgggtaacaccaaatacgcgaaagttgacggcaccaagccggtggctgaagttcgcgcagctctggaaaaaattctcggctaa

SEQ ID NO: 177 - DNA, 963 bp, Escherichia coli
atgcgtcagactaaaaccggtatcctgctggcaaacctgggtacgcccgatgcccccacacctgaagcggtaaaacgctatctgaaacaatttttaagcgacagacgcgtggttgatacctcacggttgttatggtggccgttgctgcgcggcgtgattttgccgctgcgttcgccgcgtgtggcgaagctgtatgcctctgtctggatggaaggtggctcgccgctgatggtttacagccgccagcaacagcaggcgctggcgcaacgtttaccggagacgcccgtggcgctgggaatgagctacggctcgccatcactggaaagcgccgtagatgaacttctggcagagcatgtagatcatattgtggtgctgccgctttatccgcaatactcctgttcaacggtcggtgcggtatgggatgaactggcacgcattctggcgcgcaaacgtagcattccggggatatcgtttattcgtgattacgccgataaccacgattatattaatgcactggcgaacagcgtacgtgcttcttttgccaaacatggcgaaccggatctgttgttgctctcttatcatggcattccccagcgttatgcagatgaaggcgatgattacccgcaacgttgccgcacaacaactcgcgaactcgcttccgcactggagatggcaccggaaaaagtgatgatgacctttcagtcgcgctttggccgggaaccctggctgatgccttataccgacgaaacgctgaaaatgctcggagaaaaaggcgtgggtcatattcaggtgatgtgcccgggctttgctgcggattgtctggagacgctggaagagattgccgagcaaaaccgtgaagtcttcctcggcgctggcgggaaaaaatacgaatatattccggcgcttaatgctacaccggagcatatcgaaatgatggctaatcttgttgcagcctatcgctaa

SEQ ID NO: 178 - DNA, 969 bp, Escherichia coli
atgaagccggaaaacaaattacccgttctggaccttatctctgctgaaatgaagaccgttgtgaatactcttcagccggatttaccgccctggcctgcaacgggaacgattgctgagcaacgacagtattacacgcttgagcgccgattctggaatgtgggcgctccagaaatggcaaccagagcttacagggttccaacaaaatatgggcaggtgaaaacacgtatcttttatccgcagccagatagcccggcgacgctattttatttgcatggaggcggttttattctcggcaatctcgatacccacgatcgcatcatgcgcctgctggcaagctacagccaatgtacggtgattggcattgattacaccctttcacctgaagcgcgttttccgcaagcgatagaggaaattgtggctgcctgttgttatttccaccagcaggcggaggattatcaaatcaatatgtcccgcattggttttgctggtgattccgcaggtgccatgctggcgctcgccagtgcgttgtggttgcgcgataaacagatcgattgcggtaaagttgcgggcgttttgctgtggtatgggctttacggattacgggattccgtgactcgtcgtctgttgggtggtgtctgggatggcttaacgcaacaggatttgcagatgtatgaagaggcgtatttaagcaacgacgcggaccgcgagtcgccatattactgcctgtttaataatgatctcactcgcgaagttccgccctgttttattgccggggcggagttcgatccactgctggatgacagccgtctgctttaccagacgttagcggcacaccagcaaccttgtgagttcaaactctactccggtatgctgcacgcctttttgcattattcacggatgatgaaaaccgccgacgatgctctacgcgacggtgctcgattctttagcgataggctgcaacaagattag

SEQ ID NO: 179 - DNA, 1305 bp, Escherichia coli
atgaaatttcccggtaaacgtaaatccaaacattacttccccgtaaacgcacgcgatccgctgcttcagcaattccagccagaaaacgaaaccagcgccgcctgggtagtgggtatcgatcaaacgctggtcgatattgaagcgaaagtggatgatgaattcattgagcgttatggattaagcgccgggcattcattggtgattgaggatgacgttgccgaagcgctttatcaggaactaaaacagaaaaacctgattacccatcagtttgcgggtggcaccattggtaacaccatgcacaactattcggtgctcgcggacgaccgttcggtgcttctgggcgtcatgtgcagcaatattgaaattggcagctacgcctatcgttacctgtgtaacacctccagccgtaccgatcttaactatctacaaggcgtggatggcccgattggtcgttgctttacgctgattggcgagtccggggaacgtacctttgctatcagcccgggccacatgaaccagctgcgggctgaaagtattccggaagatgtgattgccggagcctcggcactggttctcacctcttatctggtgcgttgcaagccgggtgaacccatgccggaagcaaccatgaaagccattgagtacgcgaagaaatataatgtaccggtggtgctgacgctgggcaccaagtttgtcattgccgagaatccgcagtggtggcagcaattcctcaaagaccacgtctctatccttgcgatgaacgaagatgaagccgaagcgttgaccggagaaagcgatccgttgttggcatctgacaaggcgctggactgggtagatctggtgctgtgcaccgccgggccaatcggcttgtatatggcgggctttaccgaagacgaagcgaaacgtaaaacccagcatccgctgctgccgggtgctatagcggaatttaaccagtatgagtttagccgcgccatgcgccacaaggattgccagaatccgctgcgtgtctattcgcacattgcgccgtacatgggcgggccggaaaaaatcatgaacactaatggagcaggggatggcgcactggcagcgttgctgcatgacattaccgccaacagctaccaccgtagcaacgtaccaaactccagcaaacataaattcacctggttaacttattcatcgttagcgcaggtgtgtaaatatgctaaccgtgtgagctatcaggtattgaaccagcattcacctcgtttaacgcgcggcttgccggagcgtgaagacagcctggaagagtcttactgggatcgttaa

SEQ ID NO: 180 - DNA, 1677 bp, Escherichia coli
atgcatcacgccaccccgcttatcaccaccattgttggcggccttgtgctcgcctttatcctcggcatgctggccaataaactacgtatttctcctctggtgggatatctgttagcgggtgtgctggcaggaccattcactccgggctttgttgccgataccaagcttgcgccggaactggctgaactgggcgttattttgctgatgttcggcgtcggtttgcatttttcgctcaaggatttgatggcggtaaagtccatcgccattcccggcgcgatcgcccagatagccgtggcgacgctgctgggtatggcgctctccgccgtgctgggctggtcgttaatgaccggtatcgtgttcggcttatgtctttccaccgccagtaccgtggtgttactgcgcgcacttgaagaacggcaattaattgacagtcagcgtgggcaaatcgccatcggttggttgattgtggaagacctggtgatggtcctgacgctggtattgctacccgcggtagcaggaatgatggaacagggcgatgtgggctttgccactcttgcagtcgatatggggatcaccatcggcaaggtgatcgcatttatcgccattatgatgctggtaggtcgccgtctggtgccgtggattatggcacgcagcgcagcaaccggttcccgcgagctgtttaccctgtcggtgctggcgctggcgttagggattgcctttggtgcggtagagctgtttgatgtctcctttgcactcggtgcgttctttgccgggatggtactgaatgagtctgaactgagtcaccgtgccgcccacgatacgctgccattgcgcgatgcgttcgcggtgctgttttttgtctccgtcgggatgttgtttgatccgttaattctgattcagcaaccgctggcagtactggcgacgctggcaattattctgtttggtaaatcggtcgcggccctgttccttgtgcgtttgtttggtcactcccagcgcacggcgttaaccatcgccgccagcctggcgcagattggtgagttcgcgtttatcctggcgggactaggaatggcattaaatttactgccgcaggccggacaaaacctggtactggcaggggcgatcctgtcgattatgctcaacccggtactgttcgcactactggaaaaatatctggcgaagaccgaaacgctggaagagcagacgctggaagaggcaatcgaagaagagaagcagatcccagtggatatttgcaaccatgcgctactggtgggttacggtcgtgtaggcagcctgctgggggagaaattgctcgcctctgatattccgctggtggtgattgagacgtcacgaacccgtgttgatgagctgcgcgagcgcggggtccgcgcagtattgggcaatgcggcgaacgaagaaattatgcaactggcgcatctggaatgtgcaaaatggctgatcctgacgattcccaacggctatgaagcgggcgagattgtggcatctgcccgcgcgaaaaatccggatattgagattattgcccgcgcccattatgacgatgaagtggcgtatatcaccgaacgtggtgcgaatcaggtagtgatgggtgagcgtgaaattgcccgtactatgctggaactgctggaaacgccaccggcgggtgaggtggtgacgaggtaa

SEQ ID NO: 181 - DNA, 1221 bp, Escherichia coli
atggcaatgagtgaacaaacccagcctgtggcgggcgctactgcgtcaacgactaaggcccgaacatcgtttggtattttaggtgctatcagcctctcacatctgctgaacgacatgatccaatcgctgattctggcgatttatccactgcttcagtcagaattttctctgacatttatgcagattggcatgataaccctcaccttccagctcgcctcttcgctactgcaaccggtggtcggctactggaccgataaatatccgatgccgtggtcgttgccgattggcatgtgttttaccttaagtggtctggtgctgctggcgctggcgggcagttttggcgcagttctgctggcagcggcgctggtcggtaccggttcatcggtctttcatccggaatcttctcgcgtggcccgtatggcttccggcgggcgtcatggcctggcgcaatctatatttcaggtcggcggcaactttggcagttccctgggccccttgctggcggcggtgattatcgcgccttatggcaaaggcaacgttgcctggtttgtgcttgcggcactgctggcgatcgtggtgttggcgcaaatcagccgttggtactcggcacagcaccgaatgaataaaggaaaacccaaagcgacgattatcaatccactgccgcgcaataaagttgttctggcggtcagcattctgttaatcctcattttctcgaaatatttctatatggcgagcatcagcagctattacaccttttatctgatgcaaaaattcggattatctatccagaatgctcagcttcatttgtttgccttcctgtttgccgttgcggcaggtacggtgattggcgggcctgtaggggataaaattggacggaaatatgtgatttggggctctatcctcggcgttgcgccgtttacgctgattttaccctacgccagcctgcactggacgggggttttaacggtgattattggatttatcctcgcttcggcattctctgccattctggtctatgcccaggagctgcttccggaacgtatcggtatggtttctggactatttttcggttttgctttcggcatgggaggtctgggggcggcagttctggggcttatcgccgaccacaccagcatagagttagtctataaaatctgtgctttcctgccactattggggatgttgaccatattcctgcctgataaccggcataaagactga

SEQ ID NO: 182 - DNA, 1653 bp, Escherichia coli
atgaaattattacagcggggcgtggcgttagcactgttaaccacatttacactggcgagtgaaactgctctggcgtacgagcaggataaaacctacaaaattacagttctgcataccaatgatcatcatgggcatttttggcgcaatgaatatggtgaatatggtctggcggtgcaaaaaacgctggtggatggtatccgcaaagaggttgcggctgaaggcggtagcgtgctgctactttccggtggcgacattaacactggcgtgcccgagtccgacttacaggatgccgaacctgattttcgcggtatgaatctggtgggctatgacgcgatggcgatcggtaatcatgaatttgataacccgctcaccgtattacgccagcaggaaaagtgggctaagttcccgttgctttccgccaatatctaccagaaaagtaccggcgagcgcctgtttaaaccatgggcgctgtttaagcgtcaggatctgaaaattgccgttattggcctgacgacggatgacacagccaaaattggtaatccggaatatttcactgatatcgaatttcgtaagcccgctgatgaagcgaagctggtgattcaggagctgcaacagacagaaaagccagacattattatcgcggcgacccatatggggcattacgacaatggtgagcacggctctaacgcaccgggcgatgtggagatggcacgcgcgctgcctgccggatcgctggcgatgatcgtcggtggtcactcgcaagatccagtctgtatggcggcagaaaacaaaaaacaggtcgattacgtgccgggtacgccatgcaaaccggatcaacaaaacggcatctggattgtgcaggcgcatgagtggggcaaatacgtgggacgggctgattttgagtttcgtaatggcgaaatgaaaatggttaactaccagctgattccggtgaacctgaagaagaaagtgacctgggaagacgggaaaagcgagcgcgtgctgtacacccctgaaatcgctgaaaaccagcaaatgatctcgctgttatcaccgttccagaacaaaggcaaagcgcagctggaagtgaaaataggcgaaaccaatggtcgtctggaaggcgatcgtgacaaagtacgttttgtacagaccaatatggggcggttgattctggcagcacaaatggatcgcactggtgccgactttgcggtgatgagcggaggcggaattcgtgattctatcgaagcaggtgatatcagctataaaaacgtactgaaagtgcagccattcggcaatgtggtggtgtatgccgacatgaccggtaaagaggtgattgattacttgaccgccgtcgcgcagatgaagccagattcaggtgcctacccgcaatttgccaacgttagctttgtggcgaaagacggtaaactgaacgacctgaaaatcaaaggcgaaccggtcgatccggcgaaaacttaccgcatggcgacattaaacttcaatgccaccggcggggatggctatccgcgccttgataacaaaccgggctatgtgaataccggctttattgatgccgaagtgctgaaagcgtatatccagaaaagctcgccgctggatgtgagtgtttatgaaccgaaaggtgaggtgagctggcagtaa

SEQ ID NO: 183 - DNA, 480 bp, Escherichia coli
atgacacccgcagttaaattactcgaaaaaaacaagatttcgtttcaaatccacacctacgagcacgatccggctgaaaccaattttggcgatgaagtcgtcaaaaaattaggtttgaatccggatcaggtctacaaaacgctgctggtcgcagtgaacggtgatatgaaacaccttgccgtggccgttacgccggtcgcaggtcaactggatcttaaaaaagtagcaaaagcgctgggtgccaagaaagttgagatggccgatccgatggtcgcgcagcgttcgacgggatatctggttggagggattagcccactggggcagaaaaaacgtctgccaacgattatcgacgcccccgcacaagaatttgccactatttatgtttccggcggcaagcgcggactggatatcgaactggcggcaagcgacctggcaaagatactcgatgccaaatttgctgatatcgcccgtcgcgattaa

SEQ ID NO: 184 - DNA, 795 bp, Escherichia coli
atggatctgttgtaccgggtaaaaacgctttgggccgcgctgcgcggtaatcattacacctggcctgctatcgatatctctcttcccggcaatcgccattttcatctgatcggcagtattcatatgggtagccacgatatggctcccctgcccacccgtttgctcaaaaagctcaaaaacgccgatgcgctgatcgtcgaggcggatgtttccaccagcgatacgccttttgccaatttgcctgcctgcgaggcactggaagagcgcattagcgaggagcaactccaaaacctgcagcacattagccaggagatgggcatttctccgtcgctcttttctacccaaccgctgtggcaaatcgcgatggttcttcaggcgacgcaggcgcaaaaactggggctgcgggcagaatacggtatcgattaccagctattgcaggcggctaagcaacaacataaacccgtgattgaactggaaggggctgaaaaccagattgccatgttgctccagctccctgacaaaggactggcgctgctggacgatacgctgacccactggcacaccaacgcacggttgctgcaacaaatgatgagctggtggctgaatgcaccgccgcaaaataatgaaataacgttgcccaatacgttcagtcagtcgctgtacgatgtgctgatgcatcagcgaaatctcgcctggcgggataaattacgcgccatgccgtcggggcgctatgtggtcgcggtcggtgcactacacctgtatggcgaagggaatttgccacaaatgttgcgctaa

SEQ ID NO: 185 - DNA, 303 bp, Escherichia coli
atggctcaaaagaaaaatataaggagttttcgtgatgcctggttggctgatttttttgtccattcaacgccacatcgaaagatccctgctgaaatccataccacgttatcacgaaagttggacatcattaatgctgccacttctcatcgggatttacgctcccctccggggaaccgatacgaagagttatccgggaaattacaggaatactcctccattagagtgaataaacagtaccgactgatttttaaatgggttaatggcaaggccgaagaattgtttttagacccacacaactactaa

SEQ ID NO: 186 - DNA, 342 bp, Escherichia coli
atgaaacaggcaacaagaaaaccgacgacacccggagatattcttctctatgaatatctggaaccgctcgatttgaaaatcaatgagttagcagagttgctgcatgttcatcgtaatagcgtcagtgcactgatcaataacaatcgtaaactcaccactgagatggcattccgtctggcgaaagtttttgataccacagtcgatttttggctaaacctccaggcggcagttgatctttgggaagttgaaaacaacatgcgtacccaggaagaattgggacggattgaaacagtggctgaatatttggcacgccgtgaagagcgtgcaaaaaaggtcgcgtag

SEQ ID NO: 187 - DNA, 2505 bp, Escherichia coli
atgtcacaaactatcgacctgaccctggacggcctgtcctgcggtcactgcgttaaacgcgtgaaagaaagtctcgaacagcgcccggatgttgaacaggcggatgtgtctatcactgaagcgcacgttaccgggactgccagtgcagaacagctgatcgaaaccatcaaacaagcgggttatgacgcatctgtaagccacccaaaggctaaaccgctggcggagtcatcaatcccgtcggaagcactgacagcggtttctgaggcgcttccggcagcgaccgccgatgacgatgacagccagcagttgctgctgagcggcatgagctgcgccagctgtgtcacccgcgtacaaaatgcgttgcaaagcgtaccgggcgtcactcaggcacgggtaaacctggcggagcgtactgcgctggtgatgggcagtgcctccccacaagatttagtgcaggcggtggaaaaagcgggctacggcgcggaagcgattgaagatgacgctaaacgccgcgagcgccagcaagaaaccgccgtcgctacgatgaagcgcttccgctggcaggcaattgtcgcgctggcggtgggtatcccggtgatggtctgggggatgatcggcgataacatgatggtcaccgctgacaaccgcagcctgtggttagttatcggcctgataaccctggcggtaatggttttcgccggcgggcatttttaccgcagcgcatggaaaagcctgctgaacggtgcagcgacgatggatacgctggtggcgctgggtactggcgtggcgtggctctattcgatgagcgtcaacctgtggccgcagtggttcccgatggaagcgcgacatctttattacgaagccagcgcgatgattatcggtctgatcaatctcggccatatgctggaagcgcgcgcgcgtcagcgttcttctaaggcgctggagaaattactcgatttaaccccaccgacggcgcgcctggttaccgacgaaggtgaaaaaaacgtgccgctggcagatgttcagccaggtatgttactgcgcctgacgaccggcgaccgtgtgccggtagatggtgagattactcaaggcgaagcgtggctggatgaagcgatgctgacgggcgaacctatcccgcagcaaaaaggcgaaggcgatggcgtccatgccgggacagtggtgcaggacggtagcgtgctgtttcgcgccagtgcggttggcagccatactacgctgtcgcggattattcgtatggtgcgccaggcccagagcagtaagccagaaatcggtcagctggcggataaaatctcagccgtatttgtgccggtagtggtggtgattgcgctgatcagtgcggcaatctggtatttctttggtccggcaccgcagattgtctacaccctggtgattgccaccacggtgctgattattgcctgtccgtgtgcgctggggctggcgacgccgatgtcgattatttcgggcgtcgggcgggcggctgagtttggcgtgctggtacgggacgccgacgcgctgcaacgcgccagtacactcgataccgtcgtgttcgataaaaccgggacgctgaccgaagggaagccgcaggttgtcgcagtaaaaacatttgctgatattgatgaagcgcaagcattgcgtctggcagcggcgctggagcaaggttccagccatccgctggcacgagcgatcctcgataaagcaggtgatatgcagctaccgcaggtcaacggtttccgcacattgcgcgggctgggcgtgagcggtgaagctgaaggtcatgcgttattgctgggcaatcaggcgctgttaaatgaccaacaggtcgataccaaagcaattgaagcagatatttcagctcaggcatcgcaaggggcaacgcctgtgctgctggcggttgacgggaaagcggtagccctgctggctgtacgcgatccgttgcgtagtgatagcgtggcggcgctgcaacgcctgcataaagcgggatatcgcctggtgatgctaaccggggataacccgaccaccgccaatgcgatcgccaaagaagcagggattgatgaggtgatagccggcgtgctgccggacggtaaagccgaagcgatcaaacgtctgcaaagtgaaggacgtcaggtggcaatggtgggcgacggcattaacgatgcgccagcgctggctcaggcggatgtcggtattgcgatgggtggcggcagtgatgttgccattgaaaccgcggcgattaccctgatgcgccatagcctgatgggtgttgcggatgcgctcgcaatttcccgcgcaacgctgcgcaacatgaagcagaacctgctcggtgcgtttatctacaacagcattggtattccggtcgccgccggtattttgtggccgttcactggaacactgcttaacccggtggttgccggagcggcaatggcgctctcgtcgatcaccgtagtgagtaacgccaaccgcttgctgcggtttaaaccgaaggaataa

SEQ ID NO: 188 - DNA, 933 bp, Escherichia coli
atgttagatgcaaacaaattacagcaggcagtggatcaggcttacacccaatttcactcacttaacggcggacaaaatgccgattacattccctttctggcgaatgtccctggtcaactggcggcagtggctatcgtgaccagcgatggcaacgtctatagtgcgggtgacagtgattaccgctttgcgctggaatccatctcgaaagtctgtacgttagcccttgcgttagaagatgtcggcccgcaggcggtacaggacaaagttggcgctgacccgaccggattgccctttaactcagttatcgccttagagttgcatggcggcaaaccgctttcgccactggtaaatgctggcgctattgccaccaccagcctgattaacgctgaaaatactgaacaacgctggcagcgaattttacatatccaacaacaactggctggtgagcaggtagcgctctctgatgaagtcaaccagtcggaacaaacaaccaacttccataaccgggccattgcctggctgctgtactccgccggatatctctattgtgatgcaatggaagcctgtgacgtgtacacccgtcagtgctccacgctcatcaatactattgaactggcaacgcttggcgcgacgctggcggcgggtggtgtgaatccgctgacacataaacgcgttcttcaggccgacaatgtgccgtacattctggccgaaatgatgatggaagggctgtatggtcgctccggtgactgggcgtatcgcgttggtttaccgggcaaaagcggtgtaggtggcggtattctggcggtcgttcctggcgtgatgggaattgccgcgttttcaccaccgctggacgaagaaggcaacagtgttcgcggtcaaaaaatggtggcatcggtcgctaagcaactcggctataacgtgtttaagggctga

SEQ ID NO: 189 - DNA, 1290 bp, Escherichia coli
atgaacacggaaggtaataacggtaacaaacccctcggtctatggaacgtcgtttccatcggcattggggcaatggtgggggcggggatcttcgcgctgctggggcaggctgcgttgctaatggaagcctcgacctgggtcgcctttgcttttggcggtattgtggcgatgttttccggttatgcctatgcgcgtctgggggcgagctatcccagcaatggcggtattatcgacttctttcgtcgcggattaggcaacggcgttttttcgctggcgctctcgttattgtacctgttgacgctggcggtgagtatcgccatggtcgctcgtgcttttggcgcctatgccgtgcagtttttgcatgaaggcagccaggaggagcaccttattttgctctacgcgttggggatcattgcggtgatgacgcttttcaactccttaagcaaccatgcggtagggcggctggaagtgatcctcgtcggcattaaaatgatgatcctgttattgctgattattgccggtgtctggtcgctgcaaccggcgcatatttccgtttctgcgccccccagctccggggcgtttttctcctgtatcgggataaccttccttgcctatgcgggctttggcatgatggcgaacgcggcggataaagtgaaagatccggaggtcataatgccacgggcgtttctggtggcgattggcgttaccacgttgctttatatctcgctggcgctggttttgcttagcgatgtatcggcattagagttagaaaaatatgccgataccgccgtagcgcaggctgcttctccgctcctcgggcatgtggggtatgtgatcgtcgtcatcggcgctttactggcgacggcttcagccatcaacgcaaacctgttcgccgtgtttaacattatggacaacatgggcagcgaacgcgaactgccgaagctaatgaataaacctctgtggcggcagagtacctggggcaacatcatcgtcgtggtgttgattatgctgatgacggcggcgctgaatttaggctcactcgccagcgttgccagcgccacctttttgatctgctatctggcggtgtttgtggtggcgatccgcctgcgtcatgatattcacgcctcgttgccgattcttatcgttggtacgttggttatgttgttggtgatcgttggctttatctacagtctctggtcccagggcagccgtgcgctgatatggattattggcgcactcttactcagccttattgtggcaatggtcatgaagcgcaataaaaccgtataa

SEQ ID NO: 190 - DNA, 408 bp, Escherichia coli
atgaacattagcgatgtagcaaaaattaccggcctgaccagcaaagccattcgcttctatgaagagaaggggctggtgacgccgccgatgcgcagcgaaaacggttatcgcacctacacgcagcagcatctcaacgaactgaccttactgcgccaggcacgccaggtgggctttaacctggaggagagcggcgaactggtaaatctgtttaacgatccgcagcgtcacagcgccgacgtcaaacgtcgtacgctggagaaagtagcggagatcgaacagcatatcgaagaactgcaatccatgcgtaaccagctgctggcgctggcgaatgcctgccccggtgatgacagcgccgactgcccgattatcgaaaatctctccggctgctgtcatcatcgggcggggtga

SEQ ID NO: 191 - DNA, 480 bp, Escherichia coli
atgaacagggagccgcccggtttttgtctgctctcgaaaactggaatcgcccgcgctctggcctggtatctccctgattcctatctctgcgttctgctcgacggacaccataaggctactgccgccgcgctggaagggcgaccgctcaaaacactggtgctcagcacggcaacccattttaatgatgagcaacaaaccctggtatttcctggcggggaatgtctgcacaaaacagagctgcaataccacataccaaaactcaccgcgtgcaaaacattaccgcccagcgcatgggagagtttcggccctgataagcacatcagcccatccgaaacctggtcaggccccctcaccttccggttgatggcgcaaaagcgaacgccgcaagcagatgctttttttctggattttgccatcaatgatgacggggaatgtccggagctgacgaaaataatggacgactattttcgcaagccttaa

SEQ ID NO: 192 - DNA, 207 bp, Escherichia coli
atgaaggagcaaaggaaaatccccctgacgcatattatgattatcggtgcgtttatttttgccttcttgcaagtggtgttattagcctccctggttcacgctgtgaatgttaacaatgaaatccaggaaggcttatttcagtcggggcgcattatggtagaaagtttgcagcatattctttcggtacaaacggggattaatgggtaa

SEQ ID NO: 193 - DNA, 423 bp, Escherichia coli
atgatgaatagctccattaaatccttttccctgctggcggttatattactggctggctgtagctcacccgcttcccgcatcgcagattgtcaggcgcagggcgtcagccatgacacctgttatctcgcagaacagcagcgccagacggctattttaagtgcttctgaagcgcaggcatttaaaaatgcagaagccgcacaacatgcccaggcggcaaaaaaagccatttataaaggatttggcatgacctttagaatgagtagtaagaactttgcttatctcaatgattcattatgtgccatagatgaagataatgccgatgccacggtttatcagtcgggtctgtataatgtcattgtttatcatcacacaggaaaagtcgccttaatgaaagaaggccagtttgtgggttatttaaaatga

SEQ ID NO: 194 - DNA, 1017 bp, Escherichia coli
atgaaaactgtaaacgtagctttactggcactcataatttcagcaacatccagccctgttgttttagctggtgataccattgaagcggcggcaacagagctttcagccattaactctggcatgtcgcaatcggagattgagcagaagattacccgctttttagaacgcacagacaacagccccgctgcgtatacctatttgactgaacatcactacatcccttctgaaacacctgataccactcagactccccctgtccagacagatcctgacgcaggacaaaaaaccgttgccgctacaggtgatgcacagacacctgcccgttatcagagcatgatcaacgcccgacagtctgcggtaactgatgcccagcaaacgcaaattacagagcaacaggcgcagatcgtagccacacaaaaaacgctcgccgcgactggagatacgcaaaataccgcgcattatcaggagatgattaatgccagactggcggctcaaaatgaggctaatcagcgcactaccacggaacaagggcagaaaatgaatgcactgacaaccgatgtggcagcacaacagcaaaaagaaagggctcaatacgataaacaaatgcaaaatctggcgcagaagtctgtccaggcacatgagcaaattgaaagtctgagacaagattccgcacaaacgcagcaacagttaagcaacacgcaaaaacgggtcgcagataacagccaacaaattaacacgctcaataaccatttcagttcgctgaaaaacgaagttgaggacaaccgtaaagaagccaatgcgggaactgcatcagccatcgctatcgcctcacaaccacaggtgaaaaccgatgacttgatgatggtgtcagcgggagcgggaaccttcaacggtgaatctgcggtgtctgtcggaacatcttttaatgccggaacgcatacggtacttaaagccggtatttctgcggatacgcaatctgatttcggcgcaggtgtcggcgtaggatattcgttctaa

SEQ ID NO: 195 - DNA, 363 bp, Escherichia coli
atgaatgaatttgagaagatttttaatgaaatgaatctggaccgggcattgctaccgatcctttttcgttcgaaccggtcgacagtgtggaagtatttaagcggcgatagtacggctcctgcctctgccatgtcgctgattatgctgttgcagctgatccagaaacgaaaccccgatctgttagccgaatggttaacgctttctgatttcaccattccgccagaagtttacctggaccaacctgattactggaaagggtgggtgtatacccaacacaaggtcaataaaaacgtcctggaatatctaaaaaaacactatccggatgaagaccaaaaaagtatgggtaaaggccgggaagagtaa

SEQ ID NO: 196 - DNA, 459 bp, Escherichia coli
atgatggagttaatggtcgttcatccacatattttctggctaagtctcggcggtttgctgctggcagccgagatgttgggcggcaatggttatctgttgtggagcggcgtggcagcggtgattaccggtctggtggtctggttgctgccgctgggttgggagtggcaaggggtaatgtttgccgtcctgacgctgctcgccgcctggctgtggtggaaatggttgtcgcggcgggtgcgcgaacaaaagcacagcgacagtcatttaaaccagcgcgggcagcagttgattggccgacgttttgttctggaatctccgctggtcaacgggcgcggtcatatgcgcgtcggtgacagttcatggcctgtcagcgccagcgaggatctcggcgctggtacgcatgttgaggtgattgcgatagaaggaataacgctgattatccgtgcggtcatcgcctga

SEQ ID NO: 197 - DNA, 918 bp, Escherichia coli
atgcttatctttatcccgattctcatttttgtcgcgctggtcattgtcggcgcgggcgtcaaaatcgtgccgcagggctatcaatggacggtagaacgctttggtcgctataccaaaacgttacagccaggtctaagcctggtggtgccgtttatggatcgcattggtcgcaagatcaatatgatggagcaagtgctcgacatcccttcccaggaagttatctcgaaagataacgccaacgttaccatcgacgccgtgtgctttattcaggtgattgacgcgccgcgcgcggcttatgaagtcagcaatctggagctggcgatcatcaacctgaccatgactaacattcgtaccgtgctgggttcaatggaacttgatgaaatgctctctcagcgcgacagcattaactcgcgtctgctgcatattgtcgatgaagccactaacccgtgggggattaaagtcacccgtattgaaattcgtgatgtgcgcccgcccgcagagcttatctcttcaatgaacgcgcagatgaaagcggaacgtaccaaacgcgcttacatccttgaagcggaagggatccgtcaggcggaaatcctcaaagccgaaggtgaaaaacagtcacaaatcctgaaagcggaaggcgaacgtcagtcggcgtttttacaggctgaagcgcgtgaacgttccgctgaagcagaagcccgcgccaccaaaatggtgtctgaagccatcgcctccggcgatattcaggcggtgaactacttcgtcgcacagaaatacaccgaagcgttacagcagatcggttcgtccagtaacagcaaagtggtgatgatgccattagaggccagcagcctgatggggtcgattgccgggattgctgagctggtgaaagacagcgccaacaaacggactcagccatga

SEQ ID NO: 198 - DNA, 678 bp, Escherichia coli
atgcaggaaaatagtcctttgcttcagctacaaaacgtaggatatctggcgggtgatacgaagattcttaataacatcaatttttcgctgcgtgctggcgaatttaagttaattaccggtccttctggttgtggcaaaagtacactgctaaaaatagttgcttcattgatcagcccaaccagcggaacgttactgtttgaaggtgaggatgtcagcacactaaagccagaaatctaccgtcagcaagtctcttactgcgcccagacgccgacgctgtttggcgatacggtatacgataacctgatttttccctggcagatccgtaaccagcagcctgacccggccatttttctcgattttcttgaacgcttcgctttaccggacagcattttgacgaagaatatcgccgagctatctggtggtgaaaaacaacgcatctcattgattcgtaacctgcaatttatgccgaaggttttattgctggatgaaatcaccagtgcgctggatgaaagtaataaacataacgttaatgagatgatccaccgttatgtacgcgagcaaaatattgctgtgctgtgggtgacacacgataaagacgaaattaatcatgcggataaagtgattacactgcaaccgcatgctggagaaatgcaggaagcacgctatgaactcgcataa

SEQ ID NO: 199 - DNA, 780 bp, Escherichia coli
atgaactcgcataatattactaacgaatcattagcactggcattaatgctggtggtggtggcaatcttaattagccataaagaaaagctggcgctggagaaagacattctctggagcgtcgggcgcgcgataattcagctgattattgtcggctatgtgctgaagtatattttcagcgtggatgatgccagcctgacattattgatggtgttatttatctgctttaatgcggcgtggaacgcgcaaaaacgcagtaaatatattgctaaagcttttatctcatcgtttattgccattacggtcggagcgggaattaccctggcggtactgatcctctccgggtcgattgaatttatcccgatgcaggtgatccctatcgccgggatgatagccggcaacgccatggtagcggtggggttgtgttacaacaatttagggcaaagggtcattagcgaacagcaacagattcaggagaaactgagtcttggcgcgacgccgaaacaggcttcagcgatattgattcgcgacagtattcgcgcggctttaattccgacggtcgattcagcaaaaacggtaggcttagtgagtttaccaggaatgatgtccgggctgatatttgccgggattgatccggtgaaggcgattaaatatcagattatggtgacctttatgctgctctcaaccgccagcttgtcgaccattattgcctgctatttaacctatcgtaagttttacaattcgcgccaccaattggtggtgacgcaattgaagaagaaatga

SEQ ID NO: 200 - DNA, 855 bp, Escherichia coli
atgtccgtagaaaatattgtcaacattaacgaatctaacctgcaacaggttcttgaacagtcgatgaccactccggtgctgttctatttttggtctgaacgtagccagcactgtttgcagttaaccccaattctggaaagcctcgcggcgcagtacaacgggcaatttattctggcgaagctggactgcgacgcggagcagatgattgccgcccagtttggtctgcgcgcgattccgaccgtatatctgttccagaacgggcaaccagtagacggcttccaggggccgcaaccggaagaggcgatccgtgccctgctggataaagtgctgccgcgcgaagaagagctgaaagcgcagcaggcgatgcagctgatgcaggaaggcaattacaccgacgccttgccattgctgaaagacgcctggcagttgtcgaatcagaacggggagatcggcctgctgttggcagaaacgctgattgcgctgaaccgttctgaagatgcagaagcggtgcttaaaaccattccattgcaggatcaggacacccgctaccaggggctggtggcgcaaatcgaactgctgaagcaggcggcagatacgccggaaattcaacagttgcaacagcaggtggcggagaatccagaagatgccgcactggcgacgcaactggcactgcaactgcaccaggttgggcgcaatgaagaggcgctggagttactgtttgggcatctgcgtaaagatctcaccgccgcagatggtcagacacgtaaaacattccaggagatcctcgctgcgctgggtacgggtgatgcactggcgtcgaagtatcgccgccagctgtacgcgttgttgtattga

SEQ ID NO: 201 - DNA, 771 bp, Escherichia coli
atgcaaaaatcggtcttaattaccggatgttccagtggtattggcctggaaagcgcgctcgaattaaaacgccagggttttcatgtgctggcaggttgccggaaaccggatgatgttgagcgcatgaacagcatgggatttaccggcgtgttgatcgatctggattcgccagaaagtgttgatcgcgcagccgacgaagtgatcgccctgaccgataattgtctgtatgggatctttaacaatgccggattcggcatgtatggccccctttccaccatcagccgtgcgcagatggaacagcagttttccgccaactttttcggcgcacaccagctcaccatgcgcctgttacccgcgatgttgccgcacggtgaagggcgtattgtgatgacctcatcggtgatgggattaatctccacaccgggtcgtggcgcttacgcggccagtaaatatgcgctggaggcgtggtcagacgcactgcgcatggagctgcgccacagcggaattaaagtcagcctgatcgaacctggtcccattcgtactcgcttcaccgacaacgtcaatcagacgcaaagtgataaaccagtcgaaaatcctggcatcgccgcccgctttacgttgggaccggaagcggtggtcgacaaagtgcgccatgcttttattagcgagaagccgaagatgcgctatccggtgacgctggtgacctgggcggtaatggtgcttaagcgcctgctgccggggcgcgtgatggacaaaatattgcaggggtga

SEQ ID NO: 202 - DNA, 594 bp, Escherichia coli
ttgcccttcctgttcctggtcctgttaaccttccgtgccgccgcagcggacacgttattgattctgggtgatagcctgagcgccgggtatcgaatgtctgccagcgcggcctggcctgccttgttgaatgataagtggcagagtaaaacgtcggtagtcaatgccagcatcagcggtgacacctcgcaacaagggctggcgcgccttccggctctgctgaaacagcatcagccgcgctgggtgctggttgaactgggcggcaatgacggtttgcgtggttttcagccacagcaaaccgagcaaacgctgcgccagattttgcaggatgtcaaagccgccaacgctgaaccattgttaatgcaaatacgtctgcctgcaaactatggtcgccgttataatgaagcctttagcgccatttaccccaaactcgccaaagagtttgatgttccgctgctgcccttttttatggaagaggtctacctcaagccacaatggatgcaggatgacggtattcatcccaaccgcgacgcccagccgtttattgccgactggatggcgaagcagttgcagcctttagtaaatcatgactcataa

SEQ ID NO: 203 - DNA, 687 bp, Escherichia coli
atgccagcggaaaacattgttgaagttcatcatcttaagaagtccgtcggtcagggggagcatgaactctccatcctcaccggagttgagctggttgtcaaacgtggcgagaccatcgcactggtgggcgagtcgggatcgggtaagtcaaccttgctggcgatcctcgccgggctggatgacggcagcagtggcgaagtgagactggtgggacaaccgctacataatatggacgaagaagcgcgggcaaagttgcgcgcgaagcacgtaggctttgtttttcagtcatttatgttaattcctacccttaacgcgctggaaaacgtcgagcttccggcgctgctgcgcggtgagagtagcgcagaaagtcgtaacggggcgaaagcgttgctcgaacagttagggctgggtaaacgtcttgatcatcttccggcacagctttctggcggcgaacagcaacgagtggcgctggcgcgagcctttaatggtcgacctgatgtgctgtttgccgacgaacccaccggcaaccttgaccgccagacgggcgataaaattgccgatctgcttttttccctcaaccgtgagcatggcaccacgttgattatggtgacccacgacctgcaactggcggcacgctgtgaccgctgcttacggctggtgaacgggcagttgcaggaggaagtatga

SEQ ID NO: 204 - DNA, 2415 bp, Escherichia coli
atgattgcacgttggttctggcgcgaatggcgctcgccgtcgctattaattgtctggctggcgcttagcctggcggtggcctgcgtgctggcgctgggcaatatcagcgatcgcatggagaaaggtttaagccagcaaagccgtgagtttatggcgggcgatagggcgttgcgcagttcgcgcgaagtgccgcaagcgtggctggaggaagcgcaaaagcgcggcctgaaagttggcaagcagctgactttcgccaccatgacctttgcaggcgacacgccgcagctggcgaacgtcaaagcggtggatgatatctacccgatgtatggcgatctgcaaactaatccccctggcctgaaaccgcaggcgggcagcgtattgctggccccacgcctgatggcactgcttaacctgaaaacgggcgacaccattgacgtgggcgatgccaccttgcggattgccggagaagtgattcaggaaccggattccggttttaatcctttccagatagccccacgcctgatgatgaatctggcggatgttgataaaaccggagccgtgcagccggggagtcgggtcacctggcgttataaattcggcggcagcgagaaccagctcgacggctatgagaaatggttgttaccccagcttaaacctgaacaacgctggtacggtctggaacaggacgaaggcgcgctggggcgatcgatagaacgttcgcaacagttcctgctgctttcggcgcttctgaccttgctgctggcggtggcggcggttgcggtggcgatgaatcattactgtcgcagtcgctacgacttggtggcgatcctcaagacgctgggggcagggcgagcgcaactgcgtaagttaatcgtcggtcagtggttgatggtgctggtgctttcagccgttaccggtggggcgataggcctgttgttcgaaaacgtgttgatggtgctgctcaagcccgttctgcctgctgcactaccgccagccagcctctggccgtggctgtgggcgctcggcaccatgacggttatttcgctgctggtggggctacgaccgtaccgactgttactggccacgcagcctttacgcgtattacgtaatgatgtggtagcgaacgtctggccgctgaagttttatctgccgattgtcaccgtggtggttgtgctgctgctcgccggactgatgggtggcagtatgctgctctgggcggtgctggcgggcgcggtagtactggctttgctgtgcggtgtgctgggctggatgctgctgaatgtacttcgccgcatgacgctgaaatcgctacctctgtgcctggcggttagccgcctgttacgtcagccgtggtcaacgttaagccagctttcggcattttcgctctcctttatgctgctggcactgttgctggtgttgcgtggcgatctgctcgaccgttggcaacaacaactgccgccagaaagcccgaactactttttaatcaacatcgctacggaacaggttacgccgctgaaagcgtttctcgcggaacatcagatagtcccggaatcgttttatccggtggtgcgggcgcggttgacggcgattaacgacaagccgacagaaggcaatggagatgaggcgctcaaccgcgagctgaatctcacctggcaaaatacgcggcctgatcataacccgatcgtcgccggtaactggccgccaaaagccgatgaagtgtcgatggaagaggggctggcgaaaagcttaaacgttgccctcggcgataccgtgacttttatgggcgatacccaggagttccgcgctaaagtgaccagcctgcgcaaagtggactgggaaagtctgcggcctaatttctattttattttcccggaaggggcattagacgggcaaccgcagagctggcttaccagtttccgctgggagaatggcaacggcatgttgacgcaactcaaccgccagttcccgaccattagcctgttagacattggcgcgattttaaaacaggtcggtcaggtgctggagcaggtaagtcgggcgctggaagtgatggtggtgctggtcaccgcctgcggtatgttgttgttgctggcacaggtgcaggtgggaatgcgtcagcgtcatcaggagctggtggtgtggcgcacacttggtgcggggaaaaaactgctgcgcacgacattgtggtgtgagttcgccatgctcgggtttgtatccggcctggtggccgcaattggtgcggaaacggcactggcggtactgcaatcgaaagtgtttgatttcccgtgggagccagactggcgattgtggattgttctgccgtgcagcggtgcgctactgctgtcgctttgcggcggctggctgggtgcgcgactgcttaagggtaaggcgctgttcaggcagtttgcggggtga

SEQ ID NO: 205 - DNA, 1095 bp, Escherichia coli
atgcaagagagacacacggaacgggactatcgtgccctgctgattgctgatacgcccattattgatgttcgcgcccccatcgagtttgagcaaggcgcaatgcccgccgctatcaacctaccgttaatgaataacgatgaacgcgccgccgttggcatctgctataaacagcaagggtcagacgcggcgctggcgctggggcataaactggtggcgggtgaaattcgtcagcagcgcatggacgcctggcgggtagcgtgcctgcaaaatccgcacggtattctctgctgcgcccgtggcggtcagcgctcacatattgtgcaacgctggttgcatgacgcggggattgattatccgctggtggaaggcggttataaggcactgcgccagaccgcgattcaggcgaccattgaactgtcacaaaaaccgatagtgctgattggcggttgtaccggctgcggcaaaacgctgttagtgcaacaacaaccgaacggtgttgatctggaagggctggcgcgccatcgcggttctgcttttggtcgcacgttacaaccacaacttagccaggcgagttttgaaaacctgctggctgccgaaatgctaaaaaccgacgcccgtcagaatttgcgcctgtgggtgctggaagatgaaagccggatgatcggttcgaatcacctgccggaatgtctgcgcgaacgaatgactcaggcggcaattgcggtggtagaagatccgtttgagatccgtcttgaacgcctgaacgaagagtatttcttgcgtatgcatcatgattttacccacgcttatggcgacgaacagggctggcaggagtattgcgaatacctgcatcacgggctttcggcgattaaacgtcggctgggactacaacgctataacgaactggctgcaaggctggatgcggcgctgacaacgcaactcaccaccggcagcaccgacggtcatctggcctggctggtgccgttacttgaagaatattacgacccgatgtatcgctatcagcttgagaaaaaagcggaaaaagttgtctttcgcggtgagtgggcggaagtggcggaatgggttaaggcgcagtga

SEQ ID NO: 206 - DNA, 927 bp, Escherichia coli
atgttcgatccagaaaccttgcggactttcattgcggttgctgaaacaggaagtttttcaaaagcggcagaacgattatgtaaaaccacggcgacgatcagttatcgcattaaacttctggaagagaataccggagtggcgctgtttttccgcacgactcgcagcgtgacgttgacggcggctggcgagcatctactttgtcaggccagagactggctgagctggctggaaagtatgcccagcgagttacaacaggtgaatgatggcgtggaacgccaggtgaatatcgtcatcaacaacctgctctataaccctcaggccgttgccaggctgctggcgtggctaaatgaacgttacccgtttacccaatttcacatctcccgacaaatctatatgggcgtctgggactcgctattgtacgaaggtttttcactggctatcggcgtcacgggaaccgaggcgctggcaaatacctttagtcttgatcccttaggatcggtgcaatggcgctttgtcatggcggcggatcatccgctggcgaacgttgaagagccgctaacagaagcacagttgcggcgctttccggcggtcaatattgaagacagcgcccgcaccttaaccaaacgcgtcgcctggcgattgccggggcaaaaagagattattgttcccgatatggaaacgaaaatcgccgcccatctggcgggcgttggcattggttttttgccaaaatcactttgccagtcaatgatcgataatcaacaactggtcagccgggtaatcccaacgatgcgccctccttcgccattgagtctggcatggcgcaaatttggcagcggcaaagcggtagaagatattgtgaccttgtttacccagcgcaggccggaaatcagcggatttttagaaattttcggcaacccacgcagttaa

SEQ ID NO: 207 - DNA, 483 bp, Escherichia coli
atgaaacttcaggtattaccgttaagtcaggaagccttctgtgcttatggcgacgtaatcgaaacgcagaaacgggattttttccatattaacaatggcctggtggagcgctatcacgatttagcgctggttgagattcttgagcaagaccgtacgcttatcagcattaaccgcgcgcaaccggcgaatctgccgctgaccattcacgaactcgaacgtcatccgttgggcactcaggcctttatcccgatgaaaggtgaagtgtttgtggtagtcgtggcgttaggtgacgacaaaccagacctgtcaaccctgcgggcgtttattaccaacggcgaacagggagtgaattaccatcgtaacgtctggcatcacccacttttcgcctggcagcgcgtcaccgattttctgaccatcgatcgcggcggcagtgacaactgtgatgttgaaagtattcctgaacaggaactctgttttgcgtga

SEQ ID NO: 208 - DNA, 816 bp, Escherichia coli
atgacggaagttagacggcgcggcaggccaggacaggcggagcctgtggcacagaagggtgcacaggcgttagagcggggaattgcgattctgcaatatctggaaaaaagtgggggaagttcgtcggttagcgatatctctctcaatctggatttgccgctctccacgacctttcgcttgctgaaggttttacaggcagcggattttgtctatcaggacagtcagttaggctggtggcatataggattaggtgtctttaacgtcggtgcagcgtacatccataaccgcgatgtactctccgtcgccgggccgtttatgcgccgcctgatgttactttccggcgaaacggtcaatgtcgcgatccgtaacggcaatgaagcggtattaattggtcagttagagtgtaaatcgatggtcaggatgtgtgcgccgctgggcagtcgtctgccgctgcatgcttccggagcgggcaaggcgctgctttatccgctggcggaagaagagttgatgagcatcattctgcaaaccggtttgcagcagtttacgccaacgacgcttgtggatatgcccaccttgctgaaggacctggaacaagcgcgtgaactgggctataccgtagataaagaagagcatgttgtcggcctgaattgcatagcttcagcaatttacgatgatgtaggtagtgttgttgccgctatctccatctccgggccttcatcaagactgacagaagatcgttttgtcagtcagggtgagctggtcagagacaccgcccgcgatataagcacggcgttgggactgaaagcacatccatag

SEQ ID NO: 209 - DNA, 1782 bp, Escherichia coli
atggcaaaaatgagagccgttgacgcggcaatgtatgtgctggagaaagaaggtatcaccaccgccttcggtgttccgggagctgcaatcaatccgttctactcagcgatgcgtaagcacggcggtattcgtcacattctggcgcgtcatgtggaaggtgcttcgcacatggcggaaggttatacccgcgcaacggcagggaatatcggcgtatgtctggggacttccggtcctgcgggcacggacatgatcaccgcgctctattccgcttctgctgattccattcctattctgtgtattaccggccaggctccgcgcgcccgtctgcataaagaagatttccaggccgttgatattgaagcaattgctaaaccggtcagcaaaatggcggttacagttcgtgaagcggcgctggtgcctcgtgtgctgcaacaggcgtttcacctgatgcgttctggtcgaccgggtccggtactggtggatttaccgttcgacgtacaggttgcggaaatcgagtttgatcctgatatgtacgaaccgctgccggtctacaaacctgctgccagccgtatgcagatcgaaaaagcggtagaaatgttaatccaggccgaacgtccggtgattgttgccggaggcggggtaattaatgctgacgcagctgtactgttacaacagtttgctgaactgaccagcattccggtgatcccaacgctgatgggctggggctgtatcccggacgatcatgaactgatggccgggatggtgggcctgcaaaccgcgcatcgttacggtaatgcaacgttgctggcgtccgacatggtgtttggtatcggtaaccgttttgctaaccgtcataccggttcggtagagaaatacaccgaagggcgcaaaatcgttcatatcgatattgagccgacgcaaattggccgcgtactgtgtccggatcttggcattgtctctgatgctaaagcggcgctgacgctgctggttgaagtggcgcaggagatgcaaaaagccggtcgtctgccgtgtcgtaaagagtgggtcgccgactgccagcagcgcaaacgcactttgctgcgcaaaacccacttcgacaacgtgccggtgaaaccgcagcgcgtgtatgaagagatgaacaaagcctttggccgcgatgtttgttatgtcaccaccattggcctgtcacaaatcgctgcggcacaaatgctgcatgtctttaaagaccgccactggatcaactgtgggcaggcaggcccgctgggctggacgattccggcggcgctgggggtttgtgccgctgatccagagcgcaatgtggtggcgatttccggtgacttcgacttccagttcctgattgaagaattagccgttggcgcacagttcaacattccgtacatccatgtactggtcaataacgcctatctgggtctgattcgccagtcgcaacgtgcctttgatatggattactgcgtacagctcgcgttcgaaaatattaactccagcgaagtgaacggttatggcgtcgaccacgtaaaagtagcggaaggtttaggttgtaaagcaattcgcgttttcaaaccggaagatattgcaccagcctttgaacaggcaaaagtcttaatggcgcaatatcgggtaccggtagtcgtggaagttattctcgagcgcgtgaccaatatttcgatgggcagtgaactggataacgtcatggaatttgaagatatcaccgataacgcagcggatgcaccgactgaaacctgtttcatgcactatgaataa

SEQ ID NO: 210 - DNA, 777 bp, Escherichia coli
atgttacgtttctctgctaatttatcgatgttatttggtgaatatgattttctcgcccgttttgagaaagctgcgcagtgtggttttcgcggcgttgaatttatgttcccttatgactacgacattgaagaattaaaacaggtgctggcgagtaataaactcgagcatacgctgcacaatttaccagcgggtgactgggcggcgggcgagcggggtattgcctgtattcctggccgtgaagaagagtttcgggatggcgtagcagcagcgattcgttatgctcgtgctctgggtaataaaaaaattaactgtctggtcggtaaaacgccgactggtttcagcagtgaacagattcacacaacgcttgtagaaaacctgcgttatgctgcgaatatgctgatgaaagaagatattttattactgattgaacctattaaccattttgatattcctggtttccatctcaccggaacccggcaggcactgaaactgattgacgatgttggttgctgcaatttgaaaattcagtatgacatttatcacatgcagcggatggaaggtgaattaactaataccatgactcagtgggccgataaaattggtcacctgcaaattgctgataatccgcatcgcggcgaaccgggaaccggagaaattaattacgaatatctctttacggtaattgaaaattctgactacaacggttgggttggctgtgaatataaaccccaaaccaccacggaagccggtttacgctggatggatccgtaccgttaa

SEQ ID NO: 211 - DNA, 879 bp, Escherichia coli
atgaaactgggatttattggcttaggcattatgggtacaccgatggccattaatctggcgcgtgccggtcatcaactgcatgtcacaaccattggtccggttgctgatgaattactgtcactgggcgccgttagtgttgaaactgcgcgccaggtaacagatgcatcggacatcatttttattatggtgccggatacgccacaggttgaagacgttctgtttggtgaaaatggttgtaccaaagcctcgctgaagggcaaaaccattgttgatatgagctccatttccccgattgaaactaaacgtttcgctcgtcaggtgaatgaactgggcggcgattatctcgatgcgccagtctccggcggtgaaatcggcgcgcgtgaagggacgttatcgattatggttggcggtgatgaagcagtatttgaacgtgtaaaaccgctgtttgaactgctcggtaaaaatatcactctcgtgggcggtaacggcgacggtcaaacctgcaaagtggcaaatcagattatcgtggcgctcaatattgaagcggtttctgaagccttgttgtttgcttcaaaagccggtgcggacccggtacgtgtgcgccaggcgctgatgggcggctttgcttcctcacgtattctggaagttcacggtgagcgcatgattaaacgcacctttaatccaggtttcaaaattgcgctgcaccagaaagatctcaacctggcactgcaaagtgcgaaagcactggcgctgaacctgccaaacaccgcgacctgccaggaattgtttaatacctgtgcggcaaacggtggcagccagttggatcactctgcattagtgcaggcgctggaattaatggctaaccataaactggcctga

SEQ ID NO: 212 - DNA, 1455 bp, Escherichia coli
atggaacatcagagaaaactattccagcaacgcggctatagcgaagatctactgccgaaaacgcaaagtcagcggacctggaaaacatttaactattttaccttatggatgggttcggttcataacgttcccaattatgtgatggttggcggcttttttattctcggcttgtctacctttagtattatgctggcaattatcctcagtgcctttttcattgccgcggtaatggtattaaacggtgctgcgggcagtaaatacggcgtaccgtttgccatgatcctgcgtgcttcttacggcgtacgtggtgcactgtttcccggattattaagaggcggtattgctgccattatgtggtttggcctgcaatgttacgcggggtcactggcctgcttgattctgattggcaaaatctggccgggatttttgactctcggtggcgatttcacgctgttaggcctttctctaccgggattaattacttttttactcttctggctggttaacgttggtattggttttggcggcggaaaagttttaaataaattcactgccattcttaacccgtgcatctatatcgttttcggcggtatggcgatttgggcgatttcgctggtcgggatcggtccaatctttgactacattccgggcggtattcagaaagcagaaaacagtggcttcctgtttctggtggtgataaacgcggtggttgcggtctgggcggcaccggcggtgagcgcatccgactttacgcaaaacgcccactcgtttcgtgagcaggcgctggggcaaacgctgggtttagttgtggcctatattctgtttgcggtcgccggggtatgtattattgccggagccagtattcattacggcgctgacacctggaacgtgctggatattgttcagcgttgggacagcctgtttgcttcgttctttgcggtactggttattctgatgacaaccatttccactaacgccaccggtaatattattccggccggttatcagattgccgccattgcaccgacgaaactgacctataaaaacggcgtactgattgccagtattatcagcctgctgatctgcccgtggaaattaatggaaaatcaggacagtatttatctgttcctcgatattatcggcggaatgcttggtccggtcattggtgtgatgatggcgcattattttgtggtgatgcgtgggcaaattaatcttgatgaactgtacaccgcacctggcgattataaatattacgataacggttttaacctcaccgcgttttcagtaactctggtggccgttattttatctcttggcggtaagtttattccctttatggaaccgttatcacgtgtttcatggtttgtcggcatcatcgtcgcctttgcggcctacgccttattaaagaaacgtacaacagcagaaaaaacaggagaacaaaaaaccataggttaa

SEQ ID NO: 213 - DNA, 1362 bp, Escherichia coli
atgtcttttgatttaatcattaaaaacggcaccgttattttagaaaacgaagctcgcgttgtagatatcgccgttaaagacggaaaaattgctgctatcggccaggatctgggcgatgcaaaagacgttatggatgcgtctggtctggtggtttcgccgggcatggttgatgcgcacacccatatttctgaaccgggtcgcagccactgggaaggttatgaaaccggtactcgcgcagcagcaaaaggtggtatcaccaccatgatcgaaatgccgctcaaccagctgccagcaacggttgaccgcgcctcaattgaactgaagttcgatgccgctaaaggaaagctgactatcgatgcggcacaactcggtggcctggtgtcttacaacattgaccgtctgcatgagttggatgaagtgggtgttgtcggtttcaaatgcttcgttgcgacctgtggcgatcgcggtatcgacaacgacttccgtgacgtcaatgactggcaattcttcaaaggcgcgcagaagctgggtgaactaggccagccggtgctggtgcactgcgaaaacgcgctgatctgtgacgcactgggcgaagaagcgaagcgtgaaggtcgcgtaactgcccatgactatgtggcttcgcgtccggtatttaccgaagtggaagcgattcgccgcgtactgtacctggcgaaagtcgctggttgccgtctgcacgtttgccacgtcagcagcccggaaggtgttgaggaagtgactcgtgcacgtcaggaaggtcaggatgttacttgtgaatcctgcccgcattactttgtgctggataccgatcagttcgaagaaatcggtactctggcgaagtgttcaccgccgatccgcgatctggaaaaccagaaaggcatgtgggaaaaactgtttaacggtgaaatagactgcctggtttccgaccactctccatgcccgccggaaatgaaagccggtaacatcatgaaagcgtggggcggtatcgctggtctgcaaagctgcatggacgtgatgttcgatgaagcggtacagaaacgcggaatgtctctgccaatgttcggcaaattaatggcgactaacgcagcagatattttcggtctgcagcaaaaaggccgtatcgccccaggaaaagatgccgacttcgccttcattcagccgaatagcagctatgttcttaccaatgacgatctggaatatcgccacaaagtcagcccgtatgttggccgtactattggcgcgcgtatcacgaaaaccatcttacgtggtgatgtgatttacgatatcgaacagggcttccctgttgcgccgaaaggtcaatttatccttaaacatcagcagtaa

SEQ ID NO: 214 - DNA, 1302 bp, Escherichia coli
atgttcaattttgcagtgggccgcgaaagcctgttatcaggatttcagtggtttttctttattttttgcaacacggttgtggttcctcctacgctactttctgcttttcagttgccgcaaagtagcctgcttacgctcacgcaatatgcttttcttgctaccgcactggcctgcttcgctcaggcgttctgcggtcatcgtcgcgctattatggaggggccgggcggcctgtggtggggaaccatcctgactatcacccttggcgaagcatcgcgcgggacaccgatcaacgatatcgctaccagtctggcggtggggattgcgctctccggcgtgctgacgatgttgattggttttagcggattaggccatcgcctggcacggttatttacgccgtctgtgatggtcttgtttatgttgatgctgggtgcgcaactgaccactatctttttcaaaggtatgctcgggctgccgtttggcatagccgacccgaattttaaaattcaattaccgccgttcgcgctctcggtggcggtgatgtgcctggtactggcgatgattattttcctgccacaacgttttgcccgttacggcctgctggtcggtacaataaccggctggttgttgtggtacttttgctttccttcttcgcattcgctctccggtgagttgcactggcagtggttcccgctcggcagtggcggtgctttgtcgccggggattattctgacggcggtgattacaggtctggtaaatatcagcaatacctacggtgcgattcggggcacggatgttttttatccgcagcagggcgcggggaatacgcgttatcgtcgcagctttgtggcgaccggatttatgacactgataaccgtgccgctggcggtaattccattttcaccgtttgtttcatccattggtttattaacccagactggcgattacacgcggcgttcgtttatttatggcagcgttatttgcctgctggtggcgctggttccggcactcacgcgactgttttgcagtatccctttacccgtgagtagtgcggtcatgctggtttcttatctgcctttactcttttccgcgctggtgtttagccagcaaataacgtttaccgctcgcaatatttatcgactcgcattgccgttatttgtcggcatatttttaatggcattaccgcctgtgtatctgcaagaccttccattaacgcttcgtcctctgctcagtaacggcttactggtcggaattttactggctgttcttatggataaccttattccgtgggaacgcatcgaataa

SEQ ID NO: 215 - DNA, 1146 bp, Escherichia coli
atgaagattgtcattgcgccagactcttttaaagagagcttaagtgcagaaaaatgttgtcaggcaattaaagccgggttttcgaccctctttcccgatgcgcactatatctgtttgccgatagcggatggcggcgaagggacggtggaggcgatggtcgccgcgacggacggtaacatcgtgaagcttgaagtctgcgggccgatgggcgaaaaagtgaaagctttttatggcattaccggcgacgggaaaacggcggtgattgagatggcggcagcaagtggcctgatgctggtcgcgcctgaaaagcgtaatccgttgctggcctccagttttggtacgggggagttaattcgccatgcgctggataacggcattcgccatattattctcggcattggcggcagtgcgacggtcgacggcggtatgggcatggcgcaggcgctcggtgtgcgtttccttgatgctgacggtcaggtgctggcggctaacggcggcaatttagcgcgcgtggcaagcattgagatggatgaatgcgatccgcgtctggcgaactgccatattgaagtagcatgtgatgttgataacccgctggtaggggcacgcggcgcggcggcggtgtttggtccgcaaaaaggggcaacgccggaaatggtcgaagaactggaacaggggctgcaaaattacgcccgtgttttacaacagcaaactgaaattaatgtctgccagatggcgggcggcggcgctgcgggcggtatgggcattgcggcggcggtattcctcaatgcggatattaaaccgggtattgagattgtgttgaatgcggtcaatctggcgcaggcggtgcagggtgcagcactggtgatcaccggggaagggcgcatcgactcgcaaacggcaggcggtaaagctccgctgggcgtggcgtcggtggcgaagcagtttaatgtcccggtgattgggattgctggcgtattgggtgatggcgtggaagtggtgcaccagtacggcattgatgcggtattcagcattttgccacgtctggcacctttagccgaagtgctcgccagcggtgaaaccaatctcttcaacagtgcgcgaaatattgcctgcgccattaaaataggtcagggaattaaaaactga

SEQ ID NO: 216 - DNA, 786 bp, Escherichia coli
atgggatatttaaataacgtcaccggttaccgcgaagatttactggctaaccgtgcgattgttaaacacggtaatttcgcactgttaacaccagacggtctggtaaaaaatattattccgggctttgaaaattgtgacgcgacaatcctctccacgccaaagctgggtgcctcttttgttgattatctggtcacactgcatcaaaacggcggcaaccaacagggcttcggtggcgaaggcattgaaacgttcctgtatgtgatctctggaaatatcactgccaaagccgaagggaaaacatttaccttaagtgaaggtggctatctttattgcccgccaggctccttaatgacgtttgttaacgcccaggccgaagacagccaaatctttttatataagcgtcgctatattccggtagaaggtcatgcgccgtggctggtttctggcaatgccagcgaactggaacgcattcattatgaaggcatggacgatgttattctgctggattttctgcccaaagagttaggttttgatatgaacatgcatatcctctcttttgcaccaggtgccagccacggttatatcgaaacccacgttcaggaacacggtgcctatattctttccggtcagggggtttataacctcgacaataactggatcccggtgaaaaaaggcgattacatctttatgggcgcttattctttacaggctggttatggcgtagggcgtggtgaagcgttcagctatatttactcgaaagattgcaaccgcgacgtagagatttaa

SEQ ID NO: 217 - DNA, 1236 bp, Escherichia coli
atgattacacatttccgtcaagctatagaagaaacgctgccctggctttcctcttttggcgctgacccagcgggtgggatgacccgtttactttattcgccggaatggctggaaacccagcagcagtttaaaaaaagaatggcagcaagcgggctggaaacacgtttcgatgaagtggggaatttatacggtcgcctgagtggcaccgaatatccacaggaagtggttctgagcggttcgcatatcgataccgtggttaacggcggtaacctcgacgggcaattcggtgcgctggcggcgtggctggcaattgactggctgaaaacgcaatacggcgcgccgttacgtacggtcgaagtggtggcgatggcagaagaagaaggcagccgcttcccgtatgtcttctggggcagtaaaaatatctttgggctggcgaatcctgacgacgtgcggaatatctgtgatgccaaaggaaatagttttgtcgatgcgatgaaggcttgcggatttactctgccgaacgccccactaactccgcgtcaggatattaaagcctttgtcgaactgcatatcgaacagggctgtgtgctggaaagtaatgggcagtcaattggcgtggtgaatgcaattgtcgggcaacgtcgctatacggtgacgctgaacggtgaatcaaaccatgcaggcaccacgccgatgggttatcgtcgtgatacggtttacgctttcagtcgcatttgccatcagtctgtcgaaaaagcgaaaaagatgggcgacccgctggttctgacctttggcaaagtagagccgcgcccgaatacggtgaatgtagtgccgggtaaaaccacgttcaccattgattgtcgtcataccgatgctaccgtgctgcgcgatttcacccaacagttagaaaacgacatgcgggcgatttgcgatgaaatggatattggtattgatatcgatttatggatggacgaagaacccgtgccgatgaataaggagctggtcgccaccctgacagaattgtgtgaaagcgaaaaactgaattaccgggtgatgcacagtggtgccgggcacgacgcgcaaattttcgcgcctcgcgtgccgacctgcatgattttcattcccagcatcaacgggatcagccataacccggcggaacgcaccaatattaccgaccttgccgaaggggtcaaaacgttggcactcatgctttatcaacttgcctggcagaaataa

SEQ ID NO: 218 - DNA, 1050 bp, Escherichia coli
atgaaaatcagtcgggaaacactccaccagctaatcgagaataaactctgccaggctgggttaaaacgtgagcacgctgcaaccgtggctgaagtattggtttacgccgatgccagagggatccactctcatggcgcggtgcgcgttgaatactacgccgaacgcatttcaaaaggcggcaccaaccgcgaaccggagtttcgtcttgaggaaaccggaccgtgctcggcaattttacatgccgacaatgccgccggacaggtcgcagcgaaaatgggtatggaacatgccatcaaaaccgcccagcaaaaaggcgttgcggtggtcggtatcagccggatgggtcacagcggcgcaatctcatattttgtgcagcaggcagcccgcgccggattaattggcatttcgctgtgccagtccgatccaatggtggtgccgtttggcggcgcggaaatttactacggcactaacccactggcctttgccgcgccgggagaaggcgatgagatccttaccttcgatatggcgactaccgtacaggcatggggaaaagtgctcgacgcccgctcgcgcaatatgtctatcccggatacctgggcagtcgataaaaacggtgcaccaacaaccgatccgttcgcggtacatgctctgctccccgccgctgggccgaaagggtatggcctgatgatgatgattgacgtcctctcaggcgtcttactcggcttaccgttcgggcgacaggttagttcgatgtatgacgatttacacgccgggcgtaatttggggcaattacatatagttattaacccgaactttttctcctccagcgaattattccgtcaacatcttagccagaccatgcgcgaattaaataccattacccccgcgcccggttttaatcaggtttattatcccggacaggatcaggatattaaacaacgcaaagccgccgtcgaaggcatcgaaattgttgatgatatttaccagtatttaatttccgacgcgctttataacacgtcatacgaaacgaaaaatccctttgcgcaataa

SEQ ID NO: 219 - DNA, 1668 bp, Escherichia coli
atgatccacgcctttattaaaaaagggtgttttcaggattcggtcagtttaatgattatttcacgaaaactcagcgaatcagaaaatgttgatgatgtttccgtaatgatgggtacgcccgccaataaagcgttattagatactacaggtttctggcatgacgattttaataatgccacgccgaacgatatttgcgtggcaattcgtagcgaagcggcggatgcggggatcgcgcaggcggttatgcagcagcttgaagaggcgctaaaacaactggcgcagggttcaggcagcagccaggcgttgacgcaggtgcgtcgctgggacagtgcctgtcagaaattacccgatgccaatctggcgctgatttcagtggctggtgagtatgcggcggagctggcgaaccaggcgctggatcgcaacctcaacgtgatgatgttttccgataacgtcacgctggaagatgaaatccaacttaaaacccgcgcgcgggaaaaaggcttgctggtgatggggccagactgcggtacgtcgatgattgccgccacgccgctggcttttgctaacgtgatgccggaaggcaacattggcgtcataggcgcttccggtaccgggattcaggagctgtgctcacagattgcgctggcaggggagggaattactcacgcgattggtcttggcgggcgcgatctcagccgtgaagtgggcggcatcagtgcgctaacggcgctggaaatgctcagtgcagacgagaaaagcgaagtgctggcatttgtttcaaaaccacctgccgaaactgtgcgtctgaaaattgttaatgccatgaaagcaactggcaaaccgacggtggcgctgtttttaggttataccccggcggtggcccgcgacgagaatgtctggtttgcctcctcgctggatgaggccgctcgtctggcttgtctgctttcacgcgtcactgcgcgacgtaacgcgatagcgcctgtcagcagcggatttatttgcggtttgtataccggcggtacgctggctgctgaagcggcgggattacttgccggacaccttggcgtggaagccgacgatacccatcaacatggcatgatgctggacgccgacggacatcagatcctcgacctgggcgatgatttttacaccgtcgggcgtccccatccgatgatcgacccgaccttacgcaacctgttaattgccgatctcggcgctaaaccgcaagtgcgcgtgttgctgcttgatgtcgtgattggcttcggtgcgaccgccgatcctgccgcctcgctggtgagcgcctggcaaaaagcctgtgccgcgcgttcagacaatcaaccactgtatgccattgccacggtgacaggcactgaacgtgacccgcaatgccgctcgcagcaaatcgccacgctggaagatgcggggatcgcggtagtgagttcgctaccggaagccaccttgctggctgcggcgttaattcatccgctctcgtcagccacacagcaacacacaccgtcattactggaaaacgtcgccgtgattaacatcggattacgcagctttgcgctggagctacaaagcgccagcaaaccggttgtgcattaccaatggtcgccagtcgccggcggcaataaaaaactggctcgtttattagaacgtttgcaataa

SEQ ID NO: 220 - DNA, 1260 bp, Escherichia coli
atgtttacatcagtggcgcaagccaatgctgcggttatcgaacaaattcgtcgcgctcgtccacactggctggatgtgcaaccggcttcttcacttatcagcgaactaaacaagggcaaaacactgcttcacgccgggccgccaatgcgctggcaggagatgaccggacccatgaaaggggcgtgcgtgggcgcatgtctgttcgaaggctgggcgaaagatgaagcgcaggcgctggcaatactggagcagggggaagtgaacttcattccttgtcaccatgtaaatgccgtcgggccaatgggcggtattacttctgccagtatgccgatgctggtggtcgagaacgtgaccgacggcaaccgggcgtactgcaacctcaacgaaggtatcggcaaagtgatgcgttttggcgcttacggcgaagatgtcctgactcgccatcgctggatgcgcgatgtgttaatgccagtattaagcgcggcgctggggcgcatggagcgcggtatcgatctcacggcaatgatggcgcagggcattaccatgggcgatgagttccatcaacgcaatattgcttcctctgcactgttaatgcgtgcgctggccccacaaattgctcgcctcgatcatgataaacagcacatcgccgaagtgatggatttcctcagcgtgaccgatcagttcttcctcaatctcgcgatggcctactgcaaggcggcgatggatgcaggcgcgatgatccgcgcaggcagcatcgttacggctatgacccgcaacggcaatatgttcgggattcgggtaagcgggctgggtgaacgctggtttactgcgcctgtaaacactccgcaaggtctgtttttcaccggcttctcgcaggagcaggcgaacccggatatgggcgatagcgcgattaccgaaacctttggtatcggaggtgcggcaatgatcgccgcacctggcgtaacgcgctttgtcggtgcgggtggcatggaagcggccagagcggtatctgaagagatggcggaaatttaccttgaacgcaatatgcaattgcagatccccggctgggatttccagggggcgtgcctggggctggacattcgtcgcgtggtagaaaccggcattacgccactcatcaataccggtatcgcccataaagaggcggggatcgggcagattggcgcaggcaccgtgcgggcaccgctggcgtgctttgaacaggcgctggaagcactggctgaaagcatggggattggttga

SEQ ID NO: 221 - DNA, 816 bp, Escherichia coli
atgacgatcatccatcctctacttgccagccgtagcgcaccgaattatcgccagtcctggcggttagcgggagtgtggcggcgggcgattaacctgatgacggaaagcggcgaactgttaacgctgcatcgtcaggggagtggtttcggccccggcggatgggtgcttcgccgcgcgcaattcgatgcgttatgcggtggattatgcggcaatgaacgaccacaggttgtggcacaagggattcgcctcgggcgtttcacggttaaacagccacagcgttattgtttgctacgtattacgccgcctgcgcatcctcaagcgcttgccgttgcatggatgcaacgcgcggaggaaaccgggcttttcgggccactggcattggcggcaagcgatccgctgcctgctgaattacgccagtttcgtcactgttttcaggccgcgctcaatggcgttaagaccgactggcggcactggctgggtaaaggccccggattaacgccaagtcatgatgacacgctgagcggaatgctgctggcggcctggtattatggcgctttagatgcgcgctccggtcgcccgttttttgcctgttccgacaatcttcaactcgttaccactgcggtgagcgtcagttatttacgttatgccgcgcaaggatatttcgcctcgccactcctgcactttgttcatgctctgagttgcccgaaacgtaccgcagcggcgatcgattcgctgctggcgctggggcatacgtcaggggccgatacgctgctggggttctggcttggccaacaattattacaagggaaaccatga

SEQ ID NO: 222 - DNA, 894 bp, Escherichia coli
atgaaaacactggttgtggctcttgggggcaacgccttactccagcgcggtgaggcgctgacggcaaaaaatcaatatcgcaatattgccagtgctgtgcccgcgctggcgcgcctggcccgttcttatcggctggcgattgttcacggcaacgggccgcaggtggggctgctggcgttacagaatctggcgtggaaagaggtagaaccgtatccgctggatgtactggtggcggaaagccaggggatgattggctatatgctggcgcagagcttgagcgcacagccgcagatgccgcctgtcacgacggtgctgacgcgcattgaggtttcgcctgatgatccggcgtttttgcagccagagaagtttattggtccggtttatcagccagaagaacaagaggcactggaagcggcttacggctggcagatgaaacgtgatggtaaatatttgcgccgggtggtggcgtctccgcaaccgcgtaaaattctcgacagcgaagccatcgagttgttgctcaaagaggggcatgtggtgatttgcagtggcggcggcggtgtgcctgtgacggaagacggggcagggagtgaagcggtgattgataaagatctcgccgctgcgttgctcgccgagcagattaatgccgatggactggtgatcctcaccgatgctgatgcggtatatgaaaactggggaacgccgcagcaacgtgccattcgccatgccacaccggatgagttagcgccatttgccaaagccgatggttcgatggggccgaaggtaacggcggtgagtggctatgtcagaagccgtggtaaacccgcgtggattggggcgttatcgcggattgaagagacgctggcgggcgaagcggggacttgtatttcgctgtag

SEQ ID NO: 223 - DNA, 1068 bp, Escherichia coli
atgaaacaggtttgcgtcctcgggaacgggcagttaggccgtatgctacgtcaggcaggagaaccgttaggcattgctgtctggccggtcgggctggacgctgaaccggcggcggtgccttttcaacaaagcgtgattaccgctgagatcgaacgctggccggaaactgcattaacccgcgagctggcgcgccagccggcctttgtgaaccgcgatgtgttcccgattattgccgaccgtctgactcagaagcagcttttcgataagctccacctgccgaccgcaccgtggcagttactttccgaacgcagcgagtggcctgcggtgtttgatcgtttaggtgagctggcgattgttaagcgccgcactggtggctatgacggacgcggtcaatggcgtttacgcgccgctgaaaccgaacagttacctgctgaatgctacggcgaatgtattgtcgagcagggcataaacttctctggtgaagtgtcgctggttggcgcgcgcggctttgatggtagtaccgtgttttatccgctgacgcataacctgcatcaggacggtattttgcgcaccagcgtcgctttcccgcaggccaacgcgcagcagcaggcgcaggccgaagagatgctgtcggcgattatgcaggagctgggctatgtgggcgtgatggcgatggagtgttttgtcaccccgcaaggtctgctgatcaacgaactggctccgcgtgtgcataacagcggtcactggacacaaaacggtgccagcatcagccagtttgagctgcatctgcgggcgattaccgatctgccgttaccacaaccggtggtgaatagtccgtcggtgatgatcaacctgattggtagcgatgtgaattatgactggctgaaactgccgcttgtgcatctgcactggtacgacaaagaagtccgtccgggccgtaaagtggggcatttaaatttgaccgacagcgacacatcgcgtctgaccgcgacgctggaagccttaatcccactgctgccgccggagtatgccagcggcgtgatgtgggcgcagagcaagttcagttaa

SEQ ID NO: 224 - DNA, 510 bp, Escherichia coli
atgtcttcccgcaataatccggcgcgtgtcgccatcgtgatggggtccaaaagcgactgggctaccatgcagttcgccgccgaaatcttcgaaatcctgaatgtcccgcaccacgttgaagtggtttctgctcaccgcacccccgataaactgttcagcttcgccgaaagcgccgaagagaacggttatcaggtgattattgcgggcgcaggcggcgcagcgcacctgcctggcatgattgccgccaaaacgctggtgccggtgctgggcgtgccagtacagagcgccgcactgagcggtgtcgatagcctctactccatcgtacaaatgccgcgcggcattccggtgggtacgctagcgattggtaaagctggcgcggcaaacgcggcgttactggcagcacaaattcttgcgaatcatgataaagaactgcaccagcgtctgaatgactggcgcaaagcacaaactgatgaagtgctggaaaacccggacccgcgaggtgcggcatga

SEQ ID NO: 225 - DNA, 330 bp, Escherichia coli
atgcaacgctgcaacggatttttgatttctggcatcgcccttacggcaggagcgccactgtgtattagctggttcggtcttgtcggcttctattttggcgcattgtcactggtagctgcggcggtcatttcctggatagtctatttctggctcatttatttagtactcacccgcccccataaccaacgttttgtagaaagatttatattgattgtcggtatttgcttttttccatggagcattgtgttgatatgggcattctttgccagttcagccagagcgcataatcaacacgcagaacaaattaaaaactcaacaactgacggttaa

SEQ ID NO: 226 - DNA, 723 bp, Escherichia coli
gtggcgacactctttattgcagatcttcatctctgcgcggaagaaccggcgatcaccgccggttttctgcgttttttagcgggggaggcccgcaaggccgatgcgctgtatattcttggcgatctgtttgaagcctggatcggcgacgacgatcccaacccacttcatcaccagatggccgcagcgatcaaagcggtatccgattccggcgttccctgttatttcattcatggcaaccgtgattttctgctcggcaaacgctttgcccgtgaaagcggcatgacgttattgccggaagaaaaggtgctcgaactttatggtcgtcgggtgttgattatgcatggcgacacgctgtgcaccgatgacgcgggttatcaggcttttcgtgccaaagtccacaaaccctggctgcaaacgctattcctcgccctgccgttgtttgtgcgcaaacgcattgccgcgcgaatgcgcgcgaacagtaaagaagccaacagcagtaaatcgctggcgatcatggacgttaaccaaaacgcggtggtcagtgcgatggaaaaacatcaagtgcaatggctgatccacgggcatacccatcgcccggcggtgcatgaacttatcgccaatcagcaaacggcttttcgcgtggtactgggtgcctggcatacagaaggttcgatggtgaaagtcacggcggatgacgttgagctaatccattttcctttctga

SEQ ID NO: 227 - DNA, 495 bp, Escherichia coli
atggttactttccacaccaatcacggcgatattgtcatcaaaacttttgacgataaagcacctgaaacagttaaaaacttcctggactactgccgcgaaggtttttacaacaacaccattttccaccgtgttatcaacggctttatgattcagggcggcggttttgaaccgggcatgaaacaaaaagccaccaaagaaccgatcaaaaacgaagccaacaacggtctgaaaaatacccgtggtacgctggcaatggcccgtactcaggcaccgcactctgcaactgcccagttcttcatcaacgtggttgataacgacttcctgaacttctctggcgaaagcctgcaaggttggggctactgcgtatttgctgaagtggttgaaggcatggacgtggtagacaaaatcaaaggtgtggcaaccggtcgtagcggtatgcaccaggacgtgccaaaagaagacgttatcattgaaagcgtgaccgttagcgagtaa

SEQ ID NO: 228 - DNA, 1386 bp, Escherichia coli
atgctaaaaatcttcaatactctgacacgccaaaaagaggaatttaagcctattcacgccggggaagtcggcatgtacgtgtgtggaatcaccgtttacgatctctgtcatatcggtcacgggcgtacttttgttgcttttgacgtggttgcgcgctatctgcgtttcctcggctataagctgaagtatgtgcgcaacattaccgatatcgacgacaaaatcatcaaacgcgccaatgaaaatggcgaaagctttgtggcgctggtggatcgcatgatcgccgaaatgcacaaagattttgatgctttgaacattctgcgcccggatatggagccgcgcgcgacgcaccatatcgccgaaattattgaactcactgaacaactgatcgctaaaggtcacgcttatgtggcggacaacggcgacgtgatgttcgacgtcccgaccgatccgacatatggcgtgctgtcgcgtcaggatctcgatcagctgcaggcaggcgcgcgcgttgacgtggtcgacgacaaacgcaacccgatggacttcgttctgtggaagatgtcgaaagagggcgaaccgagctggccgtctccgtggggcgcgggccgtcctggctggcacattgagtgttcggcaatgaactgcaaacagttgggtaaccactttgatatccacggcggcggttctgacctgatgttcccgcaccacgagaacgaaattgcccagtccacctgtgcgcacgatggccagtatgtgaattactggatgcactccggtatggtgatggttgaccgcgagaagatgtctaaatcgctgggtaacttcttcaccgtgcgtgacgtgctgaaatactacgatgcggaaactgtgcgttacttcctgatgtcgggtcactatcgcagccagctgaactacagcgaagagaacctgaaacaggcgcgtgcggcgctggaacgtctctatactgccttgcgcggcacagacaaaaccgttgcgcctgccggtggcgaagcgtttgaagcgcgctttattgaagcaatggacgacgatttcaacaccccggaagcctattccgtgctgtttgatatggcgcgtgaagtaaaccgtctgaaagcagaagatatggcagcggcgaatgcaatggcgtctcacctgcgtaaactttctgccgtattgggcctgctggagcaagaaccggaagcgttcctgcaaagcggtgcgcaggcagacgacagcgaagtggctgagattgaagcgttaattcaacagcgtttggatgcccgtaaagcgaaagactgggcggcggcagatgcggcgcgtgaccgccttaacgagatggggatcgtgctggaagatggcccgcaagggaccacctggcgtcgtaagtaa

SEQ ID NO: 229 - DNA, 522 bp, Escherichia coli
atgccaaccgttattacgcacgccgccgttcccctatgcattggtttagggttgggttcgaaagccatccctccgcgtctgttatttgccggaatcatcctggcgatgctgcccgatgctgatgtattgtcgtttaaatttggcgttgcttacggcaatgtttttggtcatcgcgggtttacccattcgctggtgtttgcgtttgttgtcccgctgttatgtgtgctgattggacgtcgatggttcagggctgggctgattcgctgctggctgtttttaaccgtctcgttgctatcgcacagcttgctggattcggtaaccactggcggtaaaggggttggctggctgtggccgtggtcagatgaacgctttttcgctccctggcaggtgattaaagtcgcgccgtttgcattgtctcgttacaccacgccgtacgggcatcaggtgattatttctgaattgatgtgggtgtggttgccggggatgctactgatgggaatgttgtggtggcgcagacgataa

SEQ ID NO: 230 - DNA, 213 bp, Escherichia coli
atggcgacattttctttaggtaaacatccgcacgttgagctgtgcgacttgctgaaactggaaggctggagcgaaagcggcgcgcaggcgaaaatcgcgattgccgaaggccaggtgaaagtcgacggtgcggttgaaacgcgcaaacgctgcaaaatcgtcgccggtcagacagtgagttttgcaggtcacagcgtacaggttgttgcctga

SEQ ID NO: 231 - DNA, 867 bp, Escherichia coli
atggcagcaaagattattgacggtaaaacgattgcgcagcaggtgcgctctgaagttgctcaaaaagttcaggcgcgtattgcagccggactgcgggcgccaggactggccgttgtgctggtgggtagcaaccctgcatcgcaaatttatgtcgcaagcaaacgcaaggcttgtgaagaagtcgggttcgtctcccgctcttatgacctcccggaaaccaccagcgaagcggagctgctggagcttatcgatgcgctgaatgccgacaacaccattgatggcattctggttcaactgccgttaccggcgggtattgataacgtcaaagtgctggaacgtattcatccggacaaagacgtggacggtttccatccttacaacgtcggtcgtctgtgccagcgcgcgccacgtctgcgtccctgtaccccgcgcggtatcgtcacgctgcttgagcgttacaacattgataccttcggccttaacgccgtggtgattggcgcatcgaatatcgtcggtcgcccaatgagcatggaactgctgctggcaggttgcaccaccaccgtgactcaccgtttcactaaaaatctgcgtcaccacgtagaaaatgccgatctactgatcgttgccgtcggcaagccgggctttattcctggtgactggatcaaagaaggcgcaattgtgattgatgttggcatcaaccgtctggaaaatggcaaagttgtgggcgacgtcgtgtttgaagacgcggctaaacgcgcctcatacattacgcctgttccgggcggcgttggcccgatgacggttgccacgctgattgaaaacacgctacaggcgtgcgttgaatatcatgatccacaggatgagtaa

SEQ ID NO: 232 - DNA, 300 bp, Escherichia coli
atgaggtggaatggcacaagagacttacaaaagaatcaggaaaaacgcctgattgatgagagccccaaaccactgaaatctgtcgtcaaatttgcgctggtaactgttctgagaaagtcgaacatcataaatctggagtggcaacagattgacatgcagcgacaagttgccagggtgaatccagaagatagcaaatcaaactgcgccattggtgtggcgctgaacgataccgcctctaaagtgttgcgtgatcaaacaggcaagcatcacaaatgtgggtgtacataccagggcggctaa

SEQ ID NO: 233 - DNA, 657 bp, Escherichia coli
atgaaaaaaaacacagatgatggggctaaaatttacacaccacttaccctaaagctttatgactggtgggttttgggagtatcaaatcggcttgcatggggatgtcctacaaaggaacaccttcttccacactttctggaacatttaggtaacaaccatctggatattggcgttggaactgggttttaccttactcacgtacctgagagtagtctgatatctttaatggatttgaacgaagctagcctgaacgcggcatcgacaagggctggggaatcaaaaattaaacataaaattagccatgatgtttttgatccttatcccgcggcgttacatggtcaatttgattccatttccatgttttaccttcttcactgcctgcctggaaatatatctacaaaaagctgtgtaatacgcaatgcggcgcaggccttaactgacgatggaactctatacggagccacaattcttggtgacggcgttgtgcacaatagcttcggtcaaaaactgatgcgcatttacaatcagaaaggcatcttttcaaacacaaaagattccgaagaaggcttaacacatatactctcagagcatttcgagaatgttaaaaccaaggttaaaggtactgtagtaatgttttccgcttcagggaaaaaatag

SEQ ID NO: 234 - DNA, 954 bp, Escherichia coli
atgcgggcgaaacttctgggaatagtcctgacaacccctattgcgatcagctcttttgcttctaccgagactttatcgtttactcctgacaacataaatgcggacattagtcttggaactctgagcggaaaaacaaaagagcgtgtttatctagccgaagaaggaggccgaaaagtcagtcaacttgactggaaattcaataacgctgcaattattaaaggggcaattaattgggatttgatgccccagatatctatcggggctgctggctggacaacactcggcagccgaggtggcaatatggtcgatcgggactggatggattccagtaaccccggaacctggacggatgaaagtagacaccctgatacacaactcaattatgccaacgaatttgatctgaatatcaaaggctggctcctcaacgaacccaattaccgcctgggactcatggccggatatcaggaaagccgttatagctttacagccagaggtggttcctatatctacagttctgaggagggattcagagatgatatcggctccttcccgaatggagaaagagcaatcggctacaaacaacgttttaaaatgccctacattggcttgactggaagttatcgttatgaagattttgagctaggtggcacatttaaatacagcggctgggtggaagcatctgataacgatgagcactatgacccaggaaaaagaatcacttatcgcagtaaagtcaaagaccaaaattactattctgttgcagtcaatgcaggttattacgtaactcctaatgcaaaagtttatattgaaggcgcatggaatcgggttacgaataaaaaaggtgatacttcactttatgatcacaatgataacacttctgactacagcaaaaatggtgcaggcatagaaaactataacttcatcactactgctggtcttaagtacaccttttaa

SEQ ID NO: 235 - DNA, 891 bp, Escherichia coli
atgcgtaagttcattttcgtattgctgacactgcttttggtcagccctttttcctttgcgatgaaaggtattatctggcaaccacagaaccgtgatagtcaggttaccgatacccagtggcaggggctgatgagtcagttacgtttgcaaggcttcgataccctggttttgcaatggacccgttacggcgatgcattcacccagccagaacagcgcgcgttattgtttaagcgtgccgcagctgcgcaacaggctggcctgaagctgattgtcgggctgaacgccgatccggaattttttatacaccagaaacagtcctccgcagcgctggaaagctatcttaatcgcctgctggctgccgatctccagcaagccagattatggagcgccgtgcctggcgtaacgccggatggctggtacatcagcgcggaaattgacgacctgaactggcgcagcgaagccgcccgtcagcctttgctaacatggttaaacaacgcgcagcggttgattagcgatgtttcagcaaaaccggtttatatcagtagttttttcgccggaaacatgtcgccagatggctatcgccaactgctggaacaagttaaagcaaccggtgttaatgtctgggtacaggatggcagcggcgtggataaactgaccgctgaacagcgtgaacgttatctacaggccagcgccgattgccaaagttccgccccagcaagcggcattgtttatgaactgtttgtcgctggtaaaggtaaaacgtttacagcgaaaccgaaaccggatgcagagatcgcctcgctgttagcgaaacgttcctcttgcggtaaagacacgctctatttctctctgcgctatttgcccgtcgcgcagagtatccttgagtattaa

SEQ ID NO: 236 - DNA, 2973 bp, Escherichia coli
atgaaggagaataaccttaatcgcgtcatcggatggtctggtttactgctgacatctttattgagtaccagcgcactcgcagacaatatcggcaccagcgcagaagagctggggctgagcgattatcgccattttgttatttatccccgtctcgataaggcgctgaaggcacagaaaaataacgacgaagcaaccgccatccgcgaatttgaatatatacaccagcaggtgccggataatattccgctgactttataccttgcggaagcctatcgtcattttggtcatgatgaccgggcgcggctgttgcttgaggatcaactgaaacgtcacccaggagatgatcggcttgagcgcagtctggcggctattcctgttgaagtgaaaagcgttacgactgttgaagaactgcttgcccagcaaaaagcgtgcgatgctgcgccgaccctgcgttgtcgcagtgaagtcgggcagaatgccctgcggctggcacaattacctgtcgccagagcgcaactgaacgatgcgacgtttgctgcatcgccggaaggaaaaacgctgcgaaccgatctgctgcaacgggcaatctacctgaaacaatggtcccaggcagatacgctatataatgaagcacgccagcagaacacattaagcgcggcagaacgccgtcagtggtttgacgtgcttcttgccgggcagttggatgatcggatcctggcgctgcaatcacaggggatcttcaccgatcctcagtcatatattacttacgcgaccgcgctggcttatcgtggcgaaaaagcacgcctccagcattatctcattgaaaataagccgctgtttaccacggacgcacaagagaaaagttggctctatctgttatctaaatacagcgccaaccccgttcaggcgttggcgaattatacggtgcagtttgccgataaccgccagtatgttgttggcgtgacgctaccggtgctgttaaaagaaggtcagtacgacgcagcgcaaaaactactcgccaccctccccgccaatgaaatgcttgaggagcgttatgccgttagcgtagcgacccgtaacaaggctgaagctctgcgtctggcacgattgctgtatcagcaagaaccggcaaatcttacccgcctggatcaactgacctggcaactgatgcagaacgggcagtcacgcgaagctgccgatttattgctgcaacgctatcctttccaggacgatgcgcgtgtcagccagacgttaatggcgcgactggcgtctctgctggaaagtcatccttacctggcaacgccggcgaaggtggcaattttatcgaaacctttaccgctggcggagcaacgtcagtggcaaagtcagttgccgggtattgctgataattgcccgtcaatagttcgcttgctgggcgatatgtcgccttcctacgatgctgccgcctggaaccgtctggcaaagtgttatcgggacacgctacccggtgtggcgttgtatgcatggcttcaggccgaacaacgacaaccgaacgcctggcaacatcgtgcggtagcctatcaggcgtatcaggttgaggactacgccaccgcactggcggcctggcagaaaatcagtcttcacgacatgagcaatgaggatctgcttgctgccgccaataccgcccaggcggcaggaaatggcgcggctcgcgatcgctggttacaacaggcagaacaacgtggactgggaaacaatgccctctactggtggctgcatgcgcaacgttacattccaggtcagccggaactcgcactgaacgatctcacgcgctcaatcaatattacgccttctgccaacgcttacgttgcgcgggcaacaatttatcgccaacgtcataatatcccggcggcggtgagtgatttgcgcgccgcgctggaactggaaccgaataatagcaacacccaggcagcgcttggttacgccttgtgggatagcggtgatatcgcacagtcgcgggaaatgctcgaacaggcgcataaagggctaccggacgatccggcacttatccgacaactggcctacgtgaaccagcgtctggatgacatgcctgcgacgcagcactacgcccggctggtgattgatgacattgataatcaggcgctgataaccccactgaccccagagcaaaatcagcaacgcttcaatttccgccgtctgcatgaggaggtcggtcgccgctggacgttcagcttcgattcttctatcggcttgcgttccggcgcaatgagtaccgctaacaataatgtcggcggcgcagcgccagggaaaagctatcgtagctacgggcaactggaagccgagtaccgcctcggacgcaatatgctgctggaaggcgacctgctctcagtttatagccgcgtctttgccgataccggtgaaaacggggtgatgatgccggtgaaaaatccgatgtccggcaccggtctgcgctggaagccgctgcgcgatcagatctttttcctcgccgtcgaacagcagttgccgctgaacggacaaaatggcgcatccgataccatgctgcgcgccagcgcctcattctttaatggcggcaaatacagcgacgaatggcacccgaacggttcaggctggtttgcccaaaacctgtacctcgatgcggcgcaatatatccgccaggatattcaggcgtggacggcagattatcgcgtaagctggcatcagaaggtggcgaacggacagactattgagccttacgctcacgttcaggacaacggttatcgtgataaaggcactcagggcgcgcagcttggcggtgtcggggtccgctggaatatctggaccggcgagacgcactacgacgcctggccgcacaaagtcagtctcggcgtcgaatatcaacatacctttaaggcgattaatcaacgtaacggagagcgcaacaacgcgtttctcaccattggagtgcactggtaa

SEQ ID NO: 237 - DNA, 2238 bp, Escherichia coli
gtggactggcttcttgatgtttttgctacctggctctacggcttaaaagtaatcgcgataacgttagcggtcattatgttcatcagcgggctggacgatttttttattgatgtcgtctactgggtacgccgcattaaacgcaagttgagtgtttatcgccgctacccgcgaatgagttaccgcgaactgtataaaccagatgaaaaaccgttagcgattatggttccggcgtggaatgaaacgggcgtcatcggcaatatggccgagctggcggcgaccacgctcgactacgaaaactatcatatctttgttggcacctaccccaacgaccccgatactcagcgtgatgttgacgaagtgtgcgctcgcttcccgaacgtgcataaggtaatctgcgcgcgtcctggccccaccagcaaagccgactgtctgaacaacgtgctggacgccatcacccagtttgaacgtagcgccaatttcgcttttgctggttttattctgcatgacgccgaagatgtgatttcaccgatggaattgcgtctgttcaactatctggtcgagcgtaaagatctgattcagatcccagtgtatccgttcgaacgcgaatggacgcacttcaccagcatgacctacattgatgagttttcagaactgcatggcaaagatgttccggtgcgtgaagccctcgccggacaggtgcccagcgcaggcgtcggtacctgtttcagccgccgcgccgtgaccgcactgttagctgacggtgacggtattgctttcgacgtgcagagtctgactgaagattacgacattggcttccgcctgaaagagaaaggtatgacggaaatttttgtccgttttccggtggtggacgaagccaaagaacgcgagcagcgtaaatttttacagcatgcgcggacgtcaaacatgatctgcgtgcgcgaatatttccccgataccttttcgactgcggttcggcaaaaatctcgctggatcatcggcattgttttccagggctttaaaacccacaaatggacctccagcctgacgctgaactactttctctggcgcgaccgcaaaggggcaatcagtaactttgtcagcttcctcgcgatgctggtgatgatacagcttttgctgttgctggcgtatgaaagtttgtggcccgatgcctggcatttcctttctattttcagcggcagcgcatggttaatgactctgctgtggctaaactttggcttgatgattaaccgcatcgtgcagcgggtgattttcgttactggctactacggcctgacgcaggggctgctatctgtcctgcgtcttttctggggcaacctgattaacttcatggccaactggcgcgcgttaaaacaggtacttcaacacggcgatccacgtcgcgtcgcgtgggataaaacaacgcatgacttccccagcgtgactggcgatacccgctcgttgcgtccgttaggtcaaatcctgctggaaaatcaggtcatcactgaagaacaactcgatacagcactgcgtaatcgcgtcgaaggtctacgcctgggcggttcaatgctgatgcaggggctgattagcgccgagcaactggcacaggcgctggcagagcaaaacggcgtggcgtgggaatccatcgatgcctggcagatcccttcctcgctgattgccgaaatgccggcctccgtggcgttgcattatgcggtactgccgctgcgtctggacaatgatgagttaattgtcggcagtgaagatggtattgacccggtttcgctggcggccctgacgcgtaaagtcggacgcaaagtgcgttacgtcattgttctgcggggacaaattgtcaccggattacgccactggtatgcacgccgacgcggtcacgatccgcgggcaatgttgtacaatgcagttcagcatcagtggctcacggaacagcaggccggtgaaatctggcggcaatatgtgccgcatcagttcctgttcgccgaaatactgaccacgctcggtcatattaatcgttcagcaattaacgtgttgttattgcgccatgaacgcagttctctgccgctcggcaagtttttggtcaccgaaggcgttatcagccaggaaacgttggatcgcgtcctgacaattcaacgcgaattacaagtttcgatgcaatcactattactcaaagcaggtttaaacactgaacaggttgcacaactggagtccgaaaatgaaggagaataa

SEQ ID NO: 238 - DNA, 1443 bp, Escherichia coli
atggtcagtaagccatttcagcgcccgttttcgctggcaacccgcctgaccttttttatcagcctcgccaccatcgcggcgtttttcgcctttgcatggatcatgatccactcggtaaaagtgcattttgccgagcaggatattaatgatttaaaggagattagcgccacccttgaacgggtacttaatcaccctgacgaaacgcaagcccgacgcttaatgacgctggaagatatcgtcagtggttattccaatgtgttgatctccctggcaaatagccacggtaaaacggtgtatcactcccccggtgcgccggatatccgcgagtttacgcgtgacgccatacccgataaagacgcgcagggcggcgaggtgtatctcctttccggcccgacgatgatgatgccagggcacggtcacgggcatatggaacacagcaactggcggatgattaacttgccggttggcccgctggttgacggcaaaccgatttatacgctctacatcgcgctttcgatcgattttcatcttcattacatcaatgatttgatgaataaacttattatgaccgcatcggtaatcagcatcctgatcgtctttatcgtgctgttggcggtacataaaggtcacgcgccgatccgcagcgtcagccgtcaaatccagaatatcacctcgaaagatctcgacgttcgccttgacccgcagaccgtgcccattgagctggaacagctggtactgtcgttcaaccatatgatcgagcgtattgaggatgtctttacccgacagtccaatttctcagcggatatcgcccacgaaattcgcacacctattactaatctcattacgcaaacggaaatcgccctcagccagtcgcgcagccagaaggagctggaagatgtgctctactctaatctcgaagaactgacgcgaatggcgaaaatggtcagcgatatgctgtttctcgctcaggccgataacaaccagctaatccccgaaaagaaaatgctcaacctggcggatgaagtcggcaaagtgttcgattttttcgaggcgttagcagaagatcgcggcgtggagctgcggtttgttggcgacgagtgtcaggttgcgggcgatccgctgatgctgcgtcgggcgttaagcaacctgctttctaatgccctgcgtaatacgccaaccggagagacaattgttgtgcgctgccagacggtcgatcacctggtgcaagttaccgtcgaaaaccccggtacgcccattgcgcccgaacacttaccgcgattgtttgaccgtttctaccgcgttgatccttcccgccagcgaaaaggcgaaggtagcggcattggcctggcgatagtgaaatcgattgttgtcgcgcataaaggcacagttgcggtaacgtcagatgtgcgggggacaaggtttgttatcatattacccgcttaa

SEQ ID NO: 239 - DNA, 684 bp, Escherichia coli
atgaaactgttgattgtcgaagatgaaaagaaaaccggagaatacttgaccaaagggttaaccgaagccggttttgtggtcgatttggccgacaacgggctgaatggctaccatctggcgatgaccggtgattatgatctgataatcctcgatattatgctgccggacgtgaacggctgggatatcgtgcgcatgttgcgttccgccaataaggggatgccgattctgttgcttaccgcgcttggcaccattgaacatcgcgtcaaggggctggagttgggggcggatgactatctggtgaagccgttcgcttttgctgaactgctggcgcgggtgcgcactctactgcggcgcggagcggcggtaattatcgaaagtcagtttcaggttgccgatctgatggtcgatctcgtcagccgcaaagtcacccgcagcggcacgcgcatcactctgaccagtaaagaatttactctgctggagtttttcctccgccatcagggcgaagtgctgccccgctcgcttatcgcctcgcaggtatgggacatgaattttgacagcgataccaacgccattgatgtggcggtgaagcggctgcgcggcaaaatcgacaacgactttgagccaaagttgattcagaccgtgcgcggcgtgggttacatgctagaggtgccggatggtcagtaa

SEQ ID NO: 240 - DNA, 1383 bp, Escherichia coli
atgtctccttgtaaacttctgccattttgtgtggcccttgcgctaaccggttgttcactggcaccggattatcagcgtccggcaatgcccgtgccgcagcagttctcactcagccagaacggtctggttaacgcagcagataactaccagaacgcgggctggcgcaccttttttgttgataatcaggtgaagacgctgattagcgaggcgttggtgaataaccgggatttgcgcatggcggcgctgaaagtgcaggaagcgcgggcgcaatatcgtctgaccgatgccgaccgctacccacagctcaatggcgagggcagcggcagctggagcggcaatcttaaaggcgattcagccacgacgcgggagttatcgactggccttaacgccagctttgatctcgattttttcggtcgcttaaagaacatgagcgaagccgagcgccaaaattattttgccactgaggaagctcagcgcgcggtgcatattctgctggtttctaatgtcgcgcaaagctatttcaatcagcaactggcgtatgcgcaattgcaaatagccgaagaaacgctgcgtaattatcagcagtcatatgcgtttgtcgaaaaacaactgttgaccggtagcagcaatgttctggcgctggaacaggctcgcggggtgatagaaagtacccgcagcgacatcgctaaacgtcagggggaactggcgcaggcgaataatgcattgcaactgttattgggaagctacggcaagctgccgcaagcgcagacagtaaacagcgacagcctgcaaagcgttaaattaccggcgggcttgtcgtcgcaaatcttattgcagcgccctgatattatggaagctgaacacgcgttaatggcggctaatgccaatattggtgctgcgcgtgcggcatttttcccgtctatcagcctgaccagcggaatatcaaccgccagcagcgatctgtcgtcattatttaacgccagcagcgggatgtggaattttattcctaaaattgagatccccgtttttaatgccggacgcaaccaggccaatctggatatcgccgaaattcgccagcagcagtcggtggtgaattatgaacagaaagtccagaacgcctttaaagaagtggcagatgcgctggcattacgtcaaaccctgaacgctcaaatcagcgcccagcagcgttatcttgcgtcgctgcaaattactttgcaacgggcgcgggcattatatcagcacggcgcggtaagttatctggaagtgctggatgccgagcgttctttatttgcaacccgacaaactttacttgacctgaattatgcccgtcaggttaacgaaatttctttatataccgccttagggggcggttggcagcaataa

SEQ ID NO: 241 - DNA, 333 bp, Escherichia coli
atgaaaaaaacactgcaagtcgcaatgttcagtctgtttaccgttattggctttaatgcccaggctaacgaacatcatcatgaaaccatgagcgaagcacaaccaaaggttattagcgccactggcgtggtaaaaggtgttgatctggaaagcaaaaaaatcaccatccatcacgatccgattgctgccgtgaactggccggagatgactatgcgctttaccatcaccccgcagacgaaaatgagcgaaattaaaaccggcgacaaagtggcgtttaattttgtccagcagggcagcctttctttattacaggatattaaagtcagccagtaa

SEQ ID NO: 242 - DNA, 1224 bp, Escherichia coli
atgaaaaaaatcgcgcttattatcggcagcatgatcgcgggcggtattatttctgcggcaggttttatctggtttgcaaaggaggaaccgcccgcagaaaaaacgtcgaccgcagaacgtaaagtcttattctggtacgacccgatgtatcccaatacgcggttcgataaaccagggaaatcgccgtttatggatatggatctggtgccgaaatatgccgatgaagagagttctgcgtctggtgtgcgcattgacccgactcagacgcagaatctgggggtgaaaacggcgaccgtcacgcgcgggccgctgactttttcccagagtttcccggcgaatgtcagttacaacgagtatcagtatgccattgtgcaggcccgcgccgccgggtttatcgacaaggtgtatccgcttaccgtgggcgataaagtgcaaaagggcgcgccgcttctcgacctgaccattcccaactgggtggaagcgcagagtgagtatttactgctgcgcgaaaccggcggtacggcgacccagactgaaggcattcttgagcgactgcgactggcgggaatgccggaggctgatattcgccgcctgatcgccacgcaaaaaatccagactcgctttacgctcaaagcgcccattgatggcgtgatcaccgcgtttgatctgcgcgcgggaatgaatatcgccaaagataacgtggtcgcgaaaattcagggtatggacccggtgtgggtcactgctgcgatcccggagtccatcgcctggctggtgaaagatgcctcgcagtttacgctcaccgttccggcgcgacctgataaaacactcaccatccgcaaatggacgctgctacctggcgtggatgctgcgacccgcacgctgcaactgcgtctggaagtcgacaacgccgacgaggcgctaaaaccgggcatgaacgcctggttgcaactcaataccgccagcgaaccgatgctgctcattccgtcacaggcgctgattgataccggcaacgaacagcgggtgattaccgttgatgctgacgggcgctttgtaccgaaacgcgttgccgttttccaggcatcgcaaggcgtcaccgcgttacgctctggtctggcggaaggtgaaaaggtggtttccagcggcctgttcctgattgattctgaagccaatatttctggcgcactggagcggatgcgctctgaaagtgctacccatgcgcattga

SEQ ID NO: 243 - DNA, 3144 bp, Escherichia coli
atgattgaatggattattcgtcgctcggtggcgaaccgttttctggtgctgatgggcgcgttgtttctgagtatctggggcacctggaccatcattaacacgccagtggatgcactgccggatctctctgatgtacaggtgattattaaaaccagctatcccggtcaggcaccgcaaatcgttgaaaatcaggtgacttatccgctaaccaccaccatgttgtcggtgcctggcgcgaagactgtgcgcggtttctcgcagtttggcgactcttatgtgtatgtcattttcgaagatggcaccgatccgtactgggcgcgctcgcgggtgctggagtacctcaaccaggtacagggtaagctgcctgcgggagtcagcgccgagctggggccagatgccacgggtgttggctggatctatgaatatgcactggtggatcgcagcggtaagcacgatctggccgatttacgctcattgcaggactggtttctcaaatatgagctaaaaaccatccctgacgttgcggaagtggcgtcggtgggcggtgtggtgaaagagtatcaggtggttatcgatcctcagcgcctggcgcagtatggcatcagtctcgccgacgtaaaaagcgcgctggatgcttcaaaccaggaagcgggcggttcgtcgatcgaactggcggaagcggaatatatggtgcgcgccagcggctatctgcaaacgctcgacgactttaatcacatcgttttaaaagccagtgaaaatggcgtgcccgtttatctgcgtgatgttgcgaaggtccaggttggcccggagatgcgccggggcattgccgaactgaacggcgaaggcgaagtggcgggcggggtggtgatcctgcgttccggcaaaaacgcccgtgaagtgatcgccgccgtgaaggacaaactggaaacgctgaaaagcagtctgccggaaggtgtggagatagttacaacatacgatcgcagccagctcattgaccgcgccattgacaacctcagcggcaagttgctggaagagtttattgtggtggcggtagtctgtgcgctgtttctctggcatgtgcgctcggcgctggtagcgattatttcgttgccgctggggttgtgtattgcttttattgtcatgcactttcagggactgaacgccaatattatgtcgttgggtggcattgcgattgccgtcggggcgatggtcgatgccgctatcgtcatgatcgagaatgcgcataaacggctggaagagtggcagcaccagcatcctgacgccacgctggataataaaacgcgctggcaggtgatcaccgatgcatctgttgaagtgggtccggcgctgtttatcagtctgctgattatcacgctgtcgtttatcccgatcttcaccctggaagggcaggaaggtcgtctgtttggcccgctggcgttcaccaaaacctatgcgatggcgggcgcggcgctactggcgatcgtagtgatcccgatcctgatgggctactggatccgtggcaaaattccgccggaaagcagtaacccgctcaatcgctttttgattcgtgtttatcatccgctgttgctgaaagtactgcactggccgaaaaccacgctgttggtggcagcgctttcggtgctgacggttctctggccgctcaataaagttggcggggaatttttaccgcagatcaatgaaggcgacttgttgtatatgccatcgacgctgccggggatttccgcagcggaggcggcgagtatgctgcaaaaaaccgacaagctgattatgagcgtaccggaagtggcgcgggtatttggcaaaaccggaaaagcggaaaccgccaccgattctgctccgctggagatggtagaaacgaccattcagcttaagccgcaggatcagtggcggcctggcatgacgatggacaaaatcattgaggaactggataacaccgtgcgtctgccggggctggcgaatctgtgggtgccgccaattcgtaaccgtatcgatatgctctcgactggcattaaaagccctatcggcattaaagtttccggcactgtgctggcggatatcgacacgatggcggagcaaattgaagaagtggcgcgaacggtgccaggcgtggcttctgcgcttgctgagcgtctggaaggtgggcgctatatcaacgttgagattaaccgtgaaaaagccgcgcgttacggtatgacggtggcggatgtgcagttgtttgtgacttctgcggtgggcggggcgatggttggcgaaacggtggaagggattgcccgttatccaattaatctgcgttatccgcaaagctggcgcgatagcccgcaggcactgcgccagttgccgatcctcacgccgatgaagcagcaaatcaccctggcagacgtggccgacgttaaagtctctaccggaccgtcgatgctgaaaaccgagaatgcgcgcccgacgagctggatttatatcgatgcccgcgatcgtgacatggtgtcggtggttcacgatctgcaaaaagcgatagctgaaaaagtgcagttaaaaccgggcaccagcgtggcattctccgggcagttcgagctactggagcgcgccaaccataagctgaaactgatggtgccgatgacgctgatgatcatcttcgtgctgttgtatctggcgttccgtcgggtgggcgaagcgttgctgattatcagcagcgtaccgtttgcgctggtgggcggcatctggttgctgtggtggatgggctttcatctttccgtggcgacgggcaccggttttattgcccttgccggggtcgccgccgaatttggcgtggtgatgctgatgtatttacgtcacgccatagaggccgagccgtcgttgaataatccgcaaacattcagcgagcagaagctggatgaggcgttatatcacggcgcggtactgcgcgtgcgcccgaaagcgatgacggtggtggtgattatcgctggtctgctgccgattctgtggggaacaggagcagggtcagaggtgatgagccggattgccgcgccgatgattggcggcatgatcaccgcgcctttgctgtcgctgtttattatcccggcggcgtataagctgatgtggctgcaccgacatcgggtacggaaataa

SEQ ID NO: 244 - DNA, 1383 bp, Escherichia coli
gtgaaaaacgcgtcaaccgtatcggaagatactgcgtcgaatcaagagccgacgcttcatcgcggattacataaccgtcatattcaactgattgcgctgggtggcgcaattggtactggtctgtttcttggcattggcccggcgattcagatggcgggtccggctgtattgctgggctacggcgtcgccgggatcatcgctttcctgattatgcgccagctcggcgagatggtggtcgaagagccggtatccggttcatttgcccactttgcctataaatactggggaccgtttgcgggcttcctctctggctggaactactgggtaatgttcgtgctggtgggaatggcagagctgaccgctgcgggcatctatatgcagtactggttcccggatgttccaacgtggatttgggctgccgccttctttattatcatcaacgccgttaacctggtgaacgtgcgcttatatggcgaaaccgagttctggtttgcgctgattaaagtgctggcgatcatcggtatgatcggctttggcctgtggctgctgttttctgggcacggcggtgagaaagccagtatcgataacctctggcgctacggcggtttctttgccaccggctggaatggattgattttgtcgctggcggtaattatgttctccttcggcggtctggagctgattgggattactgcggctgaagcgcgcgatccggaaaaaagcatccctaaagcagtgaatcaggtggtgtatcgcatcctgctgttttatatcggttcactggtggttttactggcgctctacccgtgggtggaagtgaaatccaacagtagcccgtttgtgatgattttccataatctcgacagcaacgtggtagcttctgcgctgaacttcgtcattctggtggcatcgctgtcggtgtataacagcggggtttactctaacagccgcatgctgtttggcctttctgtgcagggtaatgcgccaaagtttttgactcgcgtcagccgtcgcggcgtgccgattaactcgctgatgctttccggagcgatcacttcgctggtggtgttaatcaactatctgctgccgcaaaaagcgtttggtctgctgatggcgctggtggtagcaacgctgctgttgaactggattatgatctgcctggcgcatctgcgttttcgtgcagcgatgcgtcgtcaggggcgtgaaacacagtttaaggcgctgctctatccgttcggcaactatctttgcatcgccttcctcggcatgattttgctgctgatgtgcacgatggatgatatgcgcttgtcagcgattctgctgccggtgtggattgtgttcctgtttgtggcgtttaaaacattgcgtaggaaagtgaattaa

SEQ ID NO: 245 - DNA, 1248 bp, Escherichia coli
atgcaggatttaatatcccaggttgaagatttagcgggtattgagattgatcacaccacctcgatggtgatgattttcggtattatttttctgaccgccgtcgtggtgcatatttttttgcactgggtggtactgcggaccttcgaaaaacgcgccatcgccagttcacggctttggttgcaaatcattacccagaataaactcttccaccgtttagcttttaccttgcaggggattatcgtcaatattcaggcggtattctggctacaaaaaggcaccgaagcggcagatattctgactacctgcgcgcagttgtggatcatgatgtatgcgctgctttcagtcttctcgttgctggatgtgattttgaatctggcgcagaaattcccggcggcatctcagttaccgctgaaagggatttttcaggggattaaactgatcggcgcgattctggtcggcattttgatgatctcgctgctgattggtcagtcgccagcgattctgatcagcggtcttggtgcaatggctgccgtgctgatgttggtatttaaagatccgattcttggtctggtggcaggtattcagctttccgcgaacgatatgctgaaactgggcgactggctggagatgccgaaatacggcgcggatggcgcggtgatcgatattgggttaaccaccgtcaaagtacgtaactgggacaataccattaccactattcccacctggtctctggtttctgactcctttaaaaactggagcgggatgtcagcatctggcgggcgacgtattaagcgcagtatcagtattgatgtcaccagtattcgttttcttgatgaagacgaaatgcaacgtctgaataaagcgcatttgttaaagccttatttaaccagccgccatcaggaaattaatgagtggaatcgccagcaaggttctacggagtcggtattaaacctgcgccgaatgaccaatattggaacctttcgtgcctatctgaacgaatatctgcggaatcatccgcggattcgcaaagatatgaccttaatggtacgccaactggctcctggtgataacggtttaccgcttgagatctatgcgtttaccaacaccgtggtgtggctggaatatgaaagcattcaggctgatatattcgatcacatatttgcgattgtcgaagagtttggtctgcgacttcatcagtcgccaaccggcaatgatattcgctctctggcgggtgcatttaagcagtaa

SEQ ID NO: 246 - DNA, 654 bp, Escherichia coli
atggatatcatttctgtcgccttaaagcgtcattccactaaggcatttgatgccagcaaaaaacttaccccggaacaggccgagcagatcaaaactctactgcaatacagcccatccagcaccaactcccagccgtggcattttattgttgccagcacggaagaaggtaaagcgcgtgttgccaaatccgctgccgataattacgtgttcaacgagcgtaaaatgcttgatgcctcgcacgtcgtggtgttctgtgcaaaaaccgcgatggacgatgcctggctgaagctggttgttgaccaggaagatgccgatggccgctttgccacgccggaagcgaaagccgcgaacgataaaggtcgcaagttcttcgccgatatgcaccgtaaagatctgcatgatgatgcagagtggatggcaaaacaggtttatctcaacgtcggtaacttcctgctgggcgtggcggcgctgggtctggacgcggtgcccatcgaaggttttgacgccgccatcctcgatgaagaatttggtctgaaagagaaaggctacaccagtctggtggttgttccggtgggtcatcacagcgttgaagattttaacgctacgctgccgaaatctcgtctgccgcagaacattaccttaaccgaagtgtaa

SEQ ID NO: 247 - DNA, 384 bp, Escherichia coli
atggataagcaatcactgcacgaaacggcgaaacgcctggctcttgagttaccctttgtcgagctttgctggccttttggcccggagttcgatgtttttaaaattggcggcaagatttttatgctgtcgtcggagctgcgcggcgtcccctttatcaatctgaagtccgatccacaaaaatccctgctaaatcagcaaatatacccaagcatcaagcctgggtatcacatgaataaaaagcactggatttcagtgtatcccggcgaggaaatctccgaagcgttacttcgcgatctgatcaacgattcgtggaatctggtggttgatggtctggctaaacgcgatcaaaaacgactgcgtcctgactcaaccgtaaatcaatag

SEQ ID NO: 248 - DNA, 249 bp, Escherichia coli
atgaaacaccctttagaaaccttgaccaccgcagcaggcattttgctgatggctttcctctcttgcctgctgctgcccgcccccgcactggggctaacgctggcacaaaaactggtgaccacgttccatctgatggatcttagccagctttacactttattgttttgtctgtggtttttagtgctgggcgctattgagtattttgttctacgctttatctggcgacgctggttctcgctggcggattaa

SEQ ID NO: 249 - DNA, 1119 bp, Escherichia coli
atgccattacccgattttcatgtttctgaaccttttaccctcggtattgaactggaaatgcaggtggttaatccgccgggctatgacttaagccaggactcttcaatgctgattgacgcggttaaaaataagatcacggccggagaggtaaagcacgatatcaccgaaagtatgctggagctggcgacggatgtttgccgtgatatcaaccaggctgccgggcaattttcagcgatgcagaaagtcgtattgcaggcagccgcagatcatcatctggaaatttgcggcggtggcacgcatccgtttcagaaatggcagcgtcaggaggtgtgcgataacgaacgctatcaacgaacgctgcaaaactttggctatctcatccagcaggcgaccgtttttggtcagcatgtccatgttggctgcgccagtggcgatgacgccatttatttgctgcacggcttgtcacggtttgtgccgcactttatcgccctttccgccgcgtcgccatatatgcaaggaacggatacgcgttttgcctcctcacgaccgaatattttttccgcctttcctgataatggcccgatgccgtgggtcagtaactggcaacaatttgaagccctgtttcgctgcctgagttacaccacgatgatcgacagcattaaagatctgcactgggatattcgccccagcccccattttggtacggtggaagttcgggtgatggataccccgttaacccttagccacgcggtaaatatggcgggattaattcaggccaccgcccactggttactgacggaacgcccgtttaaacatcaggagaaagattacctgctgtataaattcaaccgtttccaggcctgtcgctatgggctggaaggcgtcattaccgatccgcatactggcgatcgtcggtcactaacggaagccaccttgcgtttactggaaaaaatcaccccttctgcacataaaattggcgcatcgagcgcaattgaagcactgcaccgtcaggtcgtcagtggtctgaatgaagcgcagctaatgcgtgatttcgtcgccgatggtggctcgctaattgggctggtgaaaaagcattgtgagatctgggccggagaataa

SEQ ID NO: 250 - DNA, 153 bp, Escherichia coli
atgctgacgaaatatgcccttgtggcagtcatagtgctgtgtttaacggtgctgggatttacgcttctggtcggagactcgctgtgtgagtttaccgtaaaggaacgtaatattgagtttaaggctgttctcgcttacgaaccgaagaagtag

SEQ ID NO: 251 - DNA, 744 bp, Escherichia coli
gtgaacgccttatccggcctacaaaaatcttgccaattcaatatattgcaggaccacgtaggcctgataagcgtagcgcatcaggcagttttgcgtttgtcatcattctctaatatggttgacatgaaaactacgcatacctccctcccctttgtaggacatacgctgcattttgttgagtttgatccggcgagttttcgcgagcaggatttactctggctgccgcactacgcacaacttcaacacgctggacgtaaacgtaaaacagagcatttagccgggcggatcgctgcaatttatgcactgcgggaatatggctataaatgtgtgcctgcaatcggcgagctacgccaacctgtgtggcctgcgggggtatacggcagcattagtcactgtgggactacggcattagccgtggtttcccgtcaaccaattggcattgatattgaagagattttctctgcacaaaccgcaagagaattgacagacaacattattacaccagcggaacacaagcgacttgcagactgcggtttagcctttcctctggcgctgacactggcattttccgccaaagagagcgcatttaaggcaagtgagatacaggccgctcaaggttttctggattatcagataattagctggaataaacagcagatcatcattcgactagaggatgagcagtttgctgtgcactggcagataaaagaaaaaatagtcataacgctgtgccaacacgattaa

SEQ ID NO: 252 - DNA, 2241 bp, Escherichia coli
atgaacaagaagattcattccctggccttgttggtcaatctggggatttatggggtagcacaggcacaagagccgaccgatactcctgtttcacatgacgatactattgttgttaccgccgccgagcagaacttgcaggcacctggcgtttcgaccatcaccgcagatgaaatccgcaaaaacccggttgcccgcgatgtatcggagatcattcgtaccatgcctggcgttaacctgaccggtaactccaccagtggtcagcgtggtaataaccgccagattgatattcgcggcatgggtccggaaaacacgctgattttgattgacggcaagccggtaagcagccgtaactctgtgcgtcagggctggcgtggcgagcgcgatacccgtggtgatacctcctgggtgccgcctgaaatgattgaacgtattgaagttctacgtggtccggcagctgcgcgttatggcaacggcgcggcgggcggcgtggttaacatcattaccaaaaaaggcagtggtgagtggcacggctcctgggatgcttatttcaatgcgccagaacataaagaggaaggtgccaccaaacgcaccaacttcagcctgaccggtccgctgggcgacgaattcagcttccgcttgtatggcaacctcgacaaaacccaggctgacgcgtgggatatcaaccagggccatcagtccgcgcgtgccggaacgtatgccacgacgttaccagccgggcgcgaaggggtgatcaacaaagatattaatggcgtggtgcgctgggacttcgcgcctctgcagtcactcgaactggaagcgggctacagccgccagggtaacctgtatgcgggtgatacgcagaacaccaactctgacgcttacactcgctcgaaatatggcgatgaaaccaaccgcctgtatcgccagaactactcgctgacctggaacggtggctgggataacggcgtgaccaccagcaactgggtgcagtacgaacacacccgtaactcgcgtattccggaaggtctggcgggcggtaccgaagggaaatttaacgaaaaagcggcacaggattttgtagatatcgatcttgatgacgtgatgctgcacagcgaagttaacctgccgattgatttcctcgttaaccaaacgctgacgctgggtacagagtggaatcagcaacggatgaaggacttgagttccaacacccaggcactgaccggaacgaataccggcggtgctattgatggcgtgagtgccaccgaccgtagcccatattcaaaagcagaaattttctcgctgtttgccgaaaacaatatggagctgactgacagcaccatcgtaacgccggggctgcgtttcgatcatcacagtattgtcggcaataactggagcccggcgctgaacatatcgcaaggtttaggcgatgacttcacgctcaaaatgggcatcgcccgcgcttataaagcgccgagcctgtaccagactaacccaaactacattctctacagtaaaggtcagggctgctatgccagcgcgggcggctgctatctgcaaggtaatgatgacctgaaagcagaaaccagcatcaacaaggagattggtctggagttcaaacgcgacggctggctggcgggcgtgacctggttccgtaacgattatcgcaataagattgaagcgggctatgtggctgtagggcaaaacgcagtcggcaccgatctctatcagtgggataacgtgccgaaagcggtggttgaaggtctggaaggatcgttaaacgtaccggttagcgaaacggtgatgtggaccaataacatcacttatatgctgaagagtgaaaacaaaaccacgggcgaccgtttgtcgatcatcccggagtatacgttgaactcaacgctgagctggcaggcacgggaagatttgtcgatgcaaacgaccttcacctggtacggcaaacagcagccgaagaagtacaactataaaggtcagccagcggttggaccggaaaccaaagaaatcagtccgtacagcattgttggcctgagcgcgacctgggatgtgaccaagaatgtcagtctgaccggcggcgtggacaacctgttcgacaaacgtttgtggcgtgcgggtaatgcccagaccacgggcgatctggcaggagccaactatatcgcaggtgccggggcgtatacctataacgagccgggacgtacgtggtatatgagcattaatactcacttctga

SEQ ID NO: 253 - DNA, 1203 bp, Escherichia coli
gtgacggcgttaaaagtaggaagtgagagctggtggcagtcgaaacatggcccggaatggcaacgtctgaatgacgaaatgtttgaggtcactttctggtggcgtgatctccagggttctgaagaatactcgacgataaagcgcgtatgggtctatatcactggcgtgaccgatcaccatcagaacagccagccccggtcgatgcagcgaattgcaggaaccgatgtttggcagtggacgacacaactcaatgccaactggcgtggcagctactgctttattcctactgaacgcgatgacattttttctgcaccatcccccgatcgcctcgaattacgcgaaggctggcgaaaactattaccccaggcgatagccgatccgctgaatccacaaagctggaaaggcgggcgagggcacgctgtttctgcactcgaaatgccgcaagcgtctctgcaaccgggatgggattgtccgcaagcgccagaaacgcctgccaaagaaattatctggaaaagtgaacggttgaaaaattcacgccgtgtatggatttttaccaccggcgatgcaacagcagaagaacgcccgctggcagttttgcttgatggcgaattttgggcgcagagtatgcccgtctggcctgcgctgacttcgctgacccatcgtcggcaacttccgcccgccgtgtatgtgttgatcgacgctatcgacaccacgcaccgcgcccacgaactgccgtgtaatgcggatttctggctggcagtacagcaagagttattaccccaggtgaaagctattgccccttttagcgatcgcgccgatcgcaccgtggtcgccggacagagttttggtgggctttccgcgctgtatgccggactgcactggcctgaacgctttggctgtgtattaagccagtcaggttcgtactggtggccgcatcggggcgggcaccaagagggcatgttacttgaacagctaaatactggtgaagttagcgccgaaggtctgcgcattgtgctggaagcgggtgttcgcgagccgatgatcatgcaggccaatcaggcgctgtatgcgcaattacaccccctaaaagaatccattttctggcgtcaggttgacggcggacatgatgcgctttgttggcgcggtggcttgatgcaggggctaatcgacctctggcaaccacttttccatgacaggagttga

SEQ ID NO: 254 - DNA, 219 bp, Escherichia coli
atggcattcagtaatcccttcgatgatccacagggagcgttttacattttgcgcaatgcgcaggggcaattcagtctgtggccgcaacaatgcgccttaccggcaggctgggacgttgtgtgtcagtcgcagtcacaggcgtcctgccagcagtggctggaagcccactggcgtactctgacaccggcgaatttcatccagttgcaggaggcacaatga

SEQ ID NO: 255 - DNA, 3882 bp, Escherichia coli
atgagccagcatttacctttggtcgccgcacagcccggcatctggatggcagaaaaactgtcggatttaccctccgcctggagcgtggcgcattacgttgagttaaccggagaggttgatgcgccactactggcccgcgcggtggttgccggactagcgcaagcagatacgttgcggatgcgttttacggaagataacggcgaagtctggcagtgggtcgatgatgcgcagacgttcgaactgccagaaattatcgacctgcgaaccaacattgatccgcacggtactgcgcgggcattaatgcaggcggatttgcaacaagatctgcgcgtcgatagtggtaaaccactggtctttcatcagctgatacaggtggcggataaccgctggtactggtatcagcgttatcaccatttgctggtcgatggcttcagtttcccggccattacacgccagatcgccaatatttactgcgcatggctgcgtggcgaaccaacgcctgcttcgccgtttacgcctttcgctgatgtagtggaagagtatcagcagtaccgcgaaagtgaagcctggcagcgtgatgcggcattctgggcggaacagcgtcgtcaactgccaccgcccgcgtcactttctccggcacctttaccggggcgcagcgcttcggcagatattttgcgcctgaaactggaatttaccgacggggaattccgccagctggctacgcaactttcaggtgtgcagcgtaccgatttagcccttgcgttggcagctttgtggctggggcgattgtgcaaccgcatggactacgctgccggatttatctttatgcgtcgactgggctcggcggcgctgacggctaccggacccgtgctcaacgttttgccgttgggtattcacattacggcgcaagaaacgctgccgcaactggcaacccgactggcggctcaactgaaaaaaatgcgtcgccatcaacgttacgatgccgaacaaattgtccgtgacagcgggcgagcggcaggagaggaaccgctgttcggtccggtactcaatatcaaggtatttgattaccaactggatattcctggtgttcaggcgcaaacccataccctggcaaccggtccggttaatgaccttgaactggccctgttcccggatgaacacggtgatttgagtattgaaatcctcgccaataaacagcgttacgatgagccaacgttaattcaacacgctgaacgcctgaaaatgctgattgcgcagttcgccgcggatccggcgctgttgtgcggcgatgtcgatattatgctgccaggtgagtatgcgcagctggcgcagatcaacgccactcagattgagattccagaaaccacgctgagcgcgctggtggcagaacaagcggcaaaaacaccggatgctccggcgctggcagatgcgcgttaccagttcagctatcgggaaatgcgcgagcaggtggtggcgctggcgaatctgctgcgtgagcgcggcgttaaaccgggcgacagcgtggcggtggctctaccgcgctcggtctttttgaccctggcgctacatgcgatagttgaagctggtgcggcctggttaccgttggataccggctatccggacgatcgcctgaaaatgatgctggaagatgcgcgtccgtcgctgttaatcaccactgacgatcaactgccgcgctttagcgatatccctaatttaaccagcctttgctataacgccccgcttacaccgcagggcagtgcgccgctgcagctttcacaaccgcaccacacggcttatatcatcttcacctccggttccaccggcagaccaaaaggggtaatggtcgggcagacggctatcgttaatcgcctgctttggatgcaaaaccattacccgcttacaggcgaagatgtcgttgcccaaaaaacgccgtgcagttttgatgtctcggtgtgggagtttttctggccatttattgccggggcaaaactggtgatggctgaaccggaagcgcaccgcgacccgctcgctatgcagcaattctttgccgaatatggcgtaacgaccacgcactttgtgccgtcgatgctggcggcatttgttgcatcgctgacgccgcaaaccgctcgccagagttgcgcgacgttgaaacaggttttctgtagtggtgaagccttaccggctgatttatgccgcgaatggcaacagttaaccggcgcgccgttgcataatctatatggcccgacggaagcggcggtagatgtcagttggtatccggcttttggcgaggaactggcagaggtgcgcggcagcagtgtgccgattggttatccggtgtggaatacgggcctgcgcattctcgatgcgatgatgcatccggtgccgccgggtgtggcgggagatctctatctcaccggtattcaactggcgcaggggtatcttggacgacccgatctgaccgccagccgctttattgccgatccttttgcccctggcgaacggatgtaccgtaccggagacgttgcccgctggctggataacggcgcggtggagtacctcgggcgcagtgacgatcagctaaaaattcgcgggcagcgtattgaactgggcgaaatcgatcgcgtgatgcaggcactgccggatgtcgaacaggccgttacccacgcctgtgtgattaaccaggcggcagccactggtggtgatgcgcgtcagttggtgggctatctggtgtcgcaatcaggtctgccgttggataccagcgcattacaggcgcagcttcgtgaaacattaccaccacatatggtaccggtggttctgctgcaacttccacagttaccacttagcgccaacggcaagctggatcgcaaagccttaccgttgcctgaactgaaggcacaagcgccggggcgtgcgccgaaagcgggcagtgaaacgattatcgccgcggcattctcgtcgttactgggttgtgacgtgcaggatgccgatgctgatttctttgcgcttggcggtcattcgctactggcaatgaaactggcagcgcagttaagtcggcagtttgcccgtcaggtgacgccgggtcaggtgatggtcgcgtcaactgtcgccaaactggcaacgattattgatggtgaagaagacagcacccagcgcatgggattcgaaaccattctgccgttgcgtgaaggtaatggcccgacgctgttttgtttccatccggcatccggttttgcctggcagttcagcgtgctctcgcgttatctcgatccacaatggtcgattatcggcattcagtcgccgcgccctcatggccccatgcagacggcggcaagccaggatgaagtctgcgaagcgcatctggcaaccttacttgaacaacaaccgcacggcccatattacctgctgggttattcacttggcggtacgctggcgcagggcattgcggcgcgactgcgtgcccgtggcgaacaggtggcatttcttggcttgctggatacctggccgccagaaacgcaaaactggcaggaaaaagaagccaatggtctggacccggaagtgctggcggagattaaccgcgagcgcgaagccttcctggcggcacagcagggaagtacttcaacggagttgtttaccaccattgaaggcaactacgctgatgctgtgcgcctgctgacgacagctcatagcgtagcgtttgatggtaaagcgacgctatttgttgccgaacgcacgcttcaggaaggtatgactcctgaacaggcctgggcaccgtggattgctgagctggatatctatcgtcaggattgtgcgcatgtggatattatctctccggtggcgtttgaaaaaattgggccgattattcgtgcgacgctaaataagtaa

SEQ ID NO: 256 - DNA, 1134 bp, Escherichia coli
atgtcatcactgaatattaaacagggaagtgaagctcattttcccgagtatcctctggcgtcgcccagtaataatgaaattgatttacttagtctaattgaagttttatggcgggccaaaaaaacggtcatggcggtcgtttttgcgtttgcctgcgcaggcttgctgatctctttcatcctgccgcaaaaatggactagcgcggcggttgtcacgcctccagaacctgttcagtggcaagagctggagaaaacattcactaagcttcgtgtgctggatctggatatcaaaattgatcgtacagaagcatttaacctgtttatcaagaagtttcagtctgttagcttactagaagagtacctgcgctcatcaccttatgtaatggaccaattaaaagaggcgaaaatcgacgaactggatttgcatcgcgcaattgtcgcattgagcgaaaaaatgaaagcggttgatgacaatgccagtaagaaaaaagatgaaccgtcactgtatacctcctggacgctaagttttaccgcgccaaccagtgaagaggcgcagaccgttttgagcgggtatatcgattatatctctgcgttggtggtgaaagagtcgatagaaaacgtccgtaataaactggagatcaaaacccagtttgaaaaagaaaaactggctcaggatcgcattaaaacgaaaaatcaacttgatgcaaacattcagcgcctcaattattcactcgacattgccaacgcggcaggaattaaaaagcccgtatacagtaatggtcaggccgttaaagatgaccccgatttctctatttctctcggtgctgacggtattgaacgcaaactggaaattgaaaaagcggttactgacgttgcggaactgaacggcgaattacgtaatcgccagtatcttgttgagcagttaacaaaagcaaatatcaacgatgtgaattttacgccgtttaaatatcagttaagaccgtcattgccagtaaaaaaagacggtccgggtaagtcgattattgtgatcctttccgcgttgatcggcgggatggtggcttgtggtggtgtgctgttgcgccatgcgatggcatccagaaaacaggatgccatgatggcagaccacttagtttaa

SEQ ID NO: 257 - DNA, 816 bp, Escherichia coli
atgaccgaatcagtagcccgtttgcgcggcgaacagttaaccctcggatatggcaaatataccgttgcggaaaatctgactgtagaaatacctgatggtcacttcacggcaattatcgggccaaatggctgcggtaaatccacgttactgcgtaccttaagccgcctgatgacgcctgctcacgggcatgtctggctggatggcgagcacattcaacattacgccagtaaagaggttgcacgccggattggtctgttggcgcaaaatgctaccacaccgggcgatatcaccgtgcaggagctggtggcgcgtgggcgttacccgcatcaaccgctgtttacccgctggcggaaagaagatgaagaggcagtcacaaaagcgatgcaggccacgggaataactcatctggcggatcaaagcgtggacaccctttctggcggacaacgccagcgagcgtggatcgctatggtgctggcccaggaaacggcaattatgctgctcgatgaacccacgacctggctggatatcagtcatcagattgatttgctggaactgttaagcgaactgaaccgcgagaaaggctataccctggcggcggtgctgcacgatcttaatcaggcctgtcgttacgccagccatttgattgcattgcgggaagggaaaattgttgctcagggagcaccgaaggagattgtcactgctgaactgatcgagcgcatttatggtctgcgctgcatgattattgacgatccggttgccggaacgccgctcgtggtgccgctcggacgaacggcaccttcaaccgcaaagatttaa

SEQ ID NO: 258 - DNA, 993 bp, Escherichia coli
atgatttacgtctctcgccgattaattatcacctgtctgctgttgctaatagcttgtgtgatggcaggcgtgtggggattacgtagcggtgccgtcacgctggaaacttcgcaggtattcgccgcgttgatgggcgacacgccgcgcagtatgacgatggtggtcaccgaatggcgtttaccacgcgtgctgatggcgctgttgattggcgcggcgctgggcgtcagcggcgcgatttttcagtcgctgatgcgtaacccgctcggcagccctgacgtaatgggctttaacaccggggcatggagcggcgtactggtggcgatggtgctgtttggtcaggatctgacggctatcgcgctggcagcaatggcggggggtattgtcacctcgctgttggtctggctgctcgcctggcgtaacggtatcgacacctttcggttgattattatcggtatcggtgttcgcgccatgctggtggcctttaatacctggctgttgctgaaagcgtctttagaaacggcgctaacagcgggtttgtggaatgccggatcgctcaatggcctgacgtgggcaaaaacctcgccttccgcacccatcattatattaatgttaattgccgccgccttactggtgcggcgaatgcgcttgctggaaatgggcgatgataccgcatgtgcgctgggcgtcagcgtcgaacgttcgcgactgttaatgatgctggtcgccgtagtgcttaccgcagctgccactgccctggcggggccaatttcctttattgctttagtcgcgccacacattgcccgccgcatcagtggcaccgctcgctgggggctgacccaggcggcgctgtgcggggcgttgttactgctggtggccgatctctgcgcccaacaactgtttatgccgtatcaacttccggttggcgtcgttaccgtcagcctcggcggtatttaccttatcgtcttgttaattcaggagtctcgcaaaaaatga

SEQ ID NO: 259 - DNA, 1005 bp, Escherichia coli
atgtctggttctgttgccgtgacacgcgccattgccgtgcccggattgctgttattactgattatcgcgacggcattaagcctactcattggggcaaaatcactccccgcttccgtagtgctggaggcgctctccggcacctgccagagcgccgactgcaccattgtgctcgacgcccgtctgccgcgcacccttgccggtttactggcaggcggtgcgcttggccttgccggggcgttaatgcaaaccctcacccgaaacccacttgccgatcctggtttgcttggcgtgaacgccggtgccagttttgccattgtgctgggcgcggcgctgtttggttactcttccgcgcaggagcaactggcgatggccttcgccggggcgctggtggcctcattgattgttgcctttaccggcagtcagggcggcgggcagttaagtccggtgcgtttaaccctggcaggcgtggcgctggcggcggtgctggaagggctgaccagcggcatcgccctgcttaatcccgacgtctacgatcaactgcgtttctggcaagccggttcgctggatattcgcaatctacataccttaaaagtggtgctaatcccggtgcttaccgctggagcaactgcgctattactgagccgcgcgctgaacagtttaagccttggcagtgacaccgcgacggcactgggcagtcgcgtagcgcgcacacagttgattggtctgctggcaattaccgtgctttgtggtagtgcgacggcggtagttggcccgattgcctttattggcctgatgatgccgcacatggcgcgctggctggtaggtgccgatcatcgctggtcgctgcccgtcacgctactcgctacccctgccctgctgctgtttgccgatatcattgggcgggtgattgttcccggcgaactgcgcgtttctgtagtcagtgcctttattggcgcaccagtgctgatcttcctcgtacgacgtaaaacgcgaggtggcgcatga

SEQ ID NO: 260 - DNA, 1251 bp, Escherichia coli
atgaataaacaatcctggctgcttaacctcagcctgttgaaaacgcacccggcgtttcgcgcagtattcctcgctcgttttatctcaattgtttctctgggtttgctcggcgtcgcggtgccggtgcagatccagatgatgacgcattctacctggcaggtggggctttcagtgacgctgaccggcggcgcgatgtttgttggcctgatggtcggcggtgtgctggcggatcgctatgagcgtaaaaaagtgattttgctggcgcgtggcacctgtggcattggcttcattggactgtgcctgaatgcgctgctgccggagccgtctttgctggcaatctatttacttggtttatgggatggttttttcgcatcacttggcgttacggcgctactggcggcgacacctgcactggtagggcgtgaaaacctaatgcaggccggggcgatcaccatgttgaccgtgcgtctgggatcggtgatttcgcccatgattggcggtttactgctggcgaccggaggcgtagcctggaactacgggctggcggcggcgggcacgtttattaccttgctaccgttgttaagccttccggcgttgccaccaccgccgcagccgcgtgagcatccgttgaaatcattactggcaggatttcgttttctactcgccagcccgctggtgggagggattgcgttgctgggggggttattgacgatggcgagcgcggtgcgggtcctgtatccggcgctggctgacaactggcagatgtcggcggcgcaaattggctttctctatgcggcaatcccgctcggtgcggctattggcgcgttaaccagtggaaaactggcgcatagcgtacggccaggtctgttgatgttgctctccacattgggggcgttcctcgccattggtctgtttggcctgatgccgatgtggattttaggcgtggtttgtctggcactgttcggctggctgagtgcggttagttcgttgctgcaatatacaatgctgcaaacgcaaaccccggaagcgatgttagggcggattaacggtttgtggacggcgcaaaacgtgacgggcgatgccataggcgcggcgctgctgggcggtttgggagcgatgatgacaccggttgcttccgcaagtgcgagcggttttggtttgttgattatcggcgtgttgttgctgctggtactagtggagttgcgacgttttcgccagacgccgccgcaggtgacagcgtccgacagttaa

SEQ ID NO: 261 - DNA, 957 bp, Escherichia coli
gtgagactcgccccgctctaccgcaacgcccttctattaacaggacttttgctttcaggaatagccgcagttcaggccgccgactggccgcgtcagattactgacagccgtggcactcataccctggaaagccagccgcagcgtattgtttccaccagcgtcaccctgaccggctcactgctggcgattgatgctccggtgatcgccagcggcgcgaccacgccaaataaccgcgtagcggatgaccagggctttttacgccagtggagcaaggtggcgaaagaacgcaaactgcaacggctctatatcggcgaaccgagtgcagaagccgttgccgcgcaaatgccggatctgattttaattagcgcaaccggcggcgattcggcgctggcgctgtacgatcagctttctactatcgccccaacattaatcatcaattacgacgacaaaagctggcagtcgctgttaacgcagcttggcgaaattaccgggcatgagaaacaagcggcagagcggattgcacagtttgataagcaactggcggcggcgaaagagcaaatcaaattaccgccgcagccggtcactgccatcgtctataccgccgctgcacacagtgccaatctctggacgccggaatcagcacaagggcagatgctggaacaactcggctttacgctggcgaagttgcccgcaggcttaaacgccagccaaagccagggcaaacgccatgacatcattcagcttggtggagaaaatctggctgcagggttaaatggcgagtcactattcctgttcgccggtgatcagaaagacgccgatgctatttatgctaatccgctgctcgcgcacctgcctgcagtacaaaacaagcaggtttatgcgctgggaaccgagacgttccgcctggattactacagcgccatgcaagtgctggatagacttaaggcgctgttttaa

SEQ ID NO: 262 - DNA, 1176 bp, Escherichia coli
atggatacgtcactggctgaggaagtacagcagaccatggcaacacttgcgcccaatcgctttttctttatgtcgccgtaccgcagttttacgacgtcaggatgtttcgcccgcttcgatgaaccggctgtgaacggggattcgcccgacagtcccttccagcaaaaactcgccgcgttgtttgccgatgccaaagcgcagggcatcaaaaatccggtgatggtcggggcgattcccttcgatccacgtcagccttcgtcgctgtatatacctgaatcctggcagtcgttctcccgtcaggaaaaacaagcttccgcacgccgtttcacccgcagccagtcgctgaacgtggtggaacgtcaggccattccggaacaaaccacgtttgaacagatggttgcccgtgctgccgcacttaccgccacgccgcaggtcgacaaagtggtgttgtcacggttgattgatatcaccactgacgccgccattgatagtggcgtattgctggaacggttgattgcgcaaaacccggttagttacaacttccatgttccgttggctgatggtggcgttctgctgggggccagcccggaactgctgctacgtaaagacggcgagcgttttagctccattccgttagccggttccgcgcgtcgtcagccggatgaagtgctcgatcgcgaagcgggtaatcgtctgctggcgtcagaaaaagatcgccatgaacatgaactggtgactcaggcgatgaaagaggtactgcgcaaacgcagtagtgagttacacgttccctcctctccacaattgattaccacgccgacgctgtggcatctcgcaactccctttgaaggtaaagcgaattcgcaagaaaacgcactgactttggcttgtctgctgcatccgacccccgcgctgagcggtttcccgcatcaggccgcgactcaggttattgctgaactggagccgttcgaccgcgaactgtttggcggcattgtgggttggtgtgacagcgaaggtaacggtgaatgggtggtgaccatccgctgcgcgaagctgcgggaaaatcaggtgcgtctgtttgccggagcggggatcgtgcctgcgtcctcaccgttgggtgagtggcgcgaaacaggcgtcaaactttctaccatgttgaacgtttttggattgcattaa

SEQ ID NO: 263 - DNA, 1611 bp, Escherichia coli
atgagcattccattcacccgctggccggaagagtttgcccgtcgctatcgggaaaaaggctactggcaggatttgccactgaccgacattctgactcgccacgctacgagtgacagcatcgcggttatcgacggcgagcggcagttgagttaccgggagctgaatcaggcggcggataacctcgcctgtagtttgcgccgtcagggcattaaacctggtgaaaccgcgctggtacaactgggtaacgtcgctgaactttacattacctttttcgcgctgctgaaactgggcgttgcgccggtgctggcgctgttcagccatcagcgtagtgaactgaacgcctatgccagccagattgaaccggcgttactgattgccgatcgccaacatgcgctatttagcggggatgatttcctcaacacatttgttgcagagcattcttcgattcgcgtggtgcagctgctcaacgacagcggtgagcataacttgcaggatgcgattaaccatccggctgaggattttactgccacgccatctcctgctgatgaagtggcctatttccagctttccggcggcaccaccggcactccgaaactgatcccgcgcactcataacgactactactacagcgtgcgtcgtagcgtcgagatttgtcagttcacacaacagacgcgctacctgtgcgcgatcccggcggctcataactacgccatgagttcaccgggatcgttgggggtatttctcgctggcggcactgtcgttctggctgccgaccccagcgccacgctttgcttcccattgattgaaaaacatcaggtgaacgtcaccgcgctggtgccgccagcagtcagcctgtggttgcaggcactggctgaaggcgaaagccgggcgcagcttgcctcgctgaaactgttacaggtcggcggcgcccgtctttctgccacccttgcggcgcgtattcccgctgagattggctgtcagttgcagcaggtgtttggcatggcggaagggctggtgaactacacccgtcttgatgatagtgcggagaaaattatccatacccagggttacccaatgtgtccggacgatgaagtgtgggttgccgatgccgaaggaaatccactgccgcaaggggaagttggacgcctgatgacccgcggtccgtataccttccgtggctattacaaaagcccgcagcacaatgccagcgcctttgatgccaacggtttttactgttccggcgatctgatctctattgatccagagggttacatcactgtgcaggggcgcgagaaagatcagatcaaccgtggcggcgagaagatcgctgccgaagagatcgaaaacctgctgctgcgccatccggcggtgatctacgccgcactggtgagcatggaagatgagctgatgggcgaaaaaagctgtgcttatctggtggtaaaagagccgctgcgcgcggtgcaggtgcgtcgtttcctgcgtgaacagggtattgccgaatttaaattaccggatcgcgtggagtgtgtagattcacttccgctgacggcggtcgggaaagtcgataaaaaacaattacgtcagtggctggcgtcacgcgcatcagcctga

SEQ ID NO: 264 - DNA, 858 bp, Escherichia coli
atggctattccaaaattacaggcttacgcactgccggagtctcacgatattccgcagaataaagtcgactgggcctttgaaccgcaacgtgccgcgttgttaatccatgatatgcaggactattttgtcagcttctggggcgagaactgcccgatgatggagcaggtgatcgcgaatattgcggcactacgcgactactgcaaacagcacaatatcccggtttattacaccgcccagccgaaagagcagagcgatgaagatcgggcgctgttgaatgatatgtgggggcctggcctgacccgttcgccggaacagcaaaaggtggtggatagcctgacgccagatgccgacgacacggtgctggtgaagtggcgctacagcgcgtttcatcgttccccgctggagcaaatgctgaaagagagtggacgtaaccagctgattattaccggggtatatgcccacattggctgtatgaccaccgcaaccgacgcatttatgcgcgatattaaaccgtttatggtggcggatgcgctggccgatttcagccgtgacgagcatttgatgtcgctgaaatatgtggccggacgttctggccgggtggtgatgaccgaagaattactgccagcacctatccccgccagcaaagcggcgctgcgtgaggtgatcctgccgttgctggacgagtccgatgaaccgttcgatgacgacaacctgatcgactacggtctggattcggtgcggatgatggcgctggcggcgcgctggcgcaaagtgcatggcgatatcgactttgtcatgctggcgaaaaacccgaccatcgacgcctggtggaagctactctcccgcgaggtgaaataa

SEQ ID NO: 265 - DNA, 747 bp, Escherichia coli
atggatttcagcggtaaaaatgtctgggtaactggcgcggggaaaggtatcggctacgccacggcgctggcgtttgttgaggcgggagcgaaagttacaggttttgatcaagcgttcactcaggagcaatatccctttgcgaccgaagtgatggatgttgccgacgctgcgcaggtggcgcaggtatgtcagcgactgttagctgaaacggagcgactggacgtgctggtcaatgcggcgggaattttgcgcatgggcgcgaccgatcagctcagtaaggaggactggcagcagacttttgcggtcaatgtcggcggtgcgtttaacctgttccagcagaccatgaaccagtttcgccgtcagcggggcggggcgattgttactgttgcgtccgacgccgcacacacgccgcgcattggtatgagtgcttatggcgcgtcgaaagcggcgctgaaaagcctggcgttgagcgttgggctggaactggcgggtagcggcgtgcgctgtaatgtggtttcgccaggctccaccgacaccgatatgcaacgcacgctgtgggtgagcgatgacgccgaagagcagcgtattcgcggctttggcgagcagtttaaacttggcattccgctggggaaaatcgcccgtccacaagagatcgccaacacgattttgttcctcgcctctgatctcgccagccatatcaccctacaggatattgtggtggatggcggctcgacgctgggggcataa

SEQ ID NO: 266 - DNA, 414 bp, Escherichia coli
atgatctggaaacgccatttaacgctcgacgagctgaacgccaccagcgataacacaatggtggcgcatctgggaattgtgtatacccgtctgggcgatgatgtgctggaagccgaaatgccggttgatacccgtactcatcagccgttcggtttactacatggcggcgcgtcggcggcgctggcggaaacgctgggatcgatggccggatttatgatgactcgcgacgggcagtgtgtggtaggcacagaacttaatgcaacacaccatcgcccggtgtctgaaggcaaggtgcgcggcgtctgccagccgctgcatcttgggcggcaaaatcagagctgggaaatcgtcgttttcgatgaacaggggcggcgttgctgcacctgtcggctgggtacggcagttttgggatga

SEQ ID NO: 267 - DNA, 2106 bp, Escherichia coli
atgaacaaatcagggaaatacctcgtctggacagtgctctctgtaatgggagcatttgctctgggatacattgctttaaatcgtggggaacagatcaacgcgctgtggattgtggtggcgtcggtctgtatctatctgatcgcttaccgtttttatgggctgtatatcgccaaaaatgtgctggcggttgacccgacgcgtatgacgccagcggtgcgccataacgacgggctggactatgtgccgacggacaaaaaagtgctgttcggtcaccattttgcggccattgccggagcaggtccgctggttgggccggtgctggcagcgcaaatgggttacctgccagggatgatctggctgctcgccggggtggttctcgccggtgcggtgcaggatttcatggtgctgtttgtttctacgcgccgtgacggtcgctcgctgggtgagctggtcaaagaagagatggggccaaccgccggggtgattgcgctggtggcctgctttatgatcatggtcattatccttgccgtgctggcgatgatcgtggtgaaagccctgactcatagcccgtggggaacgtataccgttgcgttcactattccgctggcgctgtttatggggatctatctgcgctatctgcgtccggggcgtattggcgaagtgtcggtgattggtctggtgttcctgattttcgccattatctctggcggctgggtggcagaaagcccgacctgggcaccgtactttgactttaccggcgtgcagctgacctggatgctggtgggttacggttttgtggcggcggtgctgccggtgtggctgctgctggctccgcgtgactacctctcaaccttcctgaaaatcgggactatcgtcggtctggcggtgggcattttgattatgcgcccgacgctgaccatgccggcactgaccaaatttgttgatggcactggcccggtatggaccggtaacctgttcccgttcctgtttatcaccatcgcctgtggcgcggtgtctggcttccatgcactgatctcttccggcactacaccgaagatgctggcgaacgaagggcaggcgtgctttatcggctacggtgggatgttgatggaatccttcgtggcgattatggcgctggtttccgcctgtatcatcgatccgggtgtgtacttcgccatgaacagcccgatggcggtgctggctccggcagggacggcggatgtggttgcttctgccgcgcaggtggtgagtagctggggctttgcgattaccccggatacgctaaaccagattgccagcgaagtgggtgaacagtcgatcatttcccgtgcgggcggtgcgccgaccctggcggtggggatggcctacattctgcacggtgcgctgggcggcatgatggatgtggcgttctggtatcacttcgccattctgtttgaagcactgtttattctgacggcggtggatgcaggtacgcgtgctgcgcgctttatgttgcaggatctgctgggcgtggtgtctccgggcctgaaacggaccgattcactgcctgctaacctgctggcaacggcgctgtgcgtactggcgtggggctacttcctgcatcagggtgtggtcgatccgctgggcggtattaacactctgtggccgctgtttggtattgccaaccagatgctggcagggatggcgctgatgctctgtgctgtggtgctgttcaaaatgaaacgtcaacgttacgcctgggtggcgctggtaccaacggcctggctgctgatttgtaccctgaccgcaggctggcagaaagcgtttagcccggatgcgaaagtcggcttcttggcgattgctaacaagttccaggcaatgatcgacagcggcaatattccatcgcagtatactgagtcacaactggcgcaactggtgttcaacaaccgtctggatgccggattaaccatcttctttatggtggttgtggtggttctggcgctgttctcgattaagacggcactggcggcattgaaagagccgaagccaacggcgaaagaaacgccatatgagccgatgccggaaaatgtcgaggagatcgtggcgcaggcgaaaggcgcgcactaa

SEQ ID NO: 268 - DNA, 198 bp, Escherichia coli
atgtttgattcactggcaaaagccggaaaatatttaggtcaggcggcgaaactgatgattggtatgcctgattacgacaactatgtcgaacatatgcgggttaaccatcccgatcaaacgccgatgacctacgaagagtttttccgtgagcggcaggacgcgcgctacggtggaaaaggcggcgcgcgctgctgctaa

SEQ ID NO: 269 - DNA, 1089 bp, Escherichia coli
atgcctcacaatcctatccgcgtggtcgtcggcccggctaactacttttcacatccaggaagtttcaatcacctgcacgattttttcactgatgaacaactttctcgcgcggtgtggatctacggtgaacgcgccattgctgcggcgcaaacaaaacttccgccagcgtttgaactgccaggggcaaagcatattttgtttcgcggccattgcagcgaaagcgatgtacaacaactggcggctgagtccggtgacgatcgcagcgtggtgattggcgtcggcggcggcgcactactcgacaccgcgaaagccctcgcccgccgtctcggtctgccgtttgttgccgttccgacgatcgccgctacctgcgccgcctggacaccgctctctgtctggtataacgatgccggacaggcgctgcattatgagattttcgacgacgccaattttatggtgctggtggaaccggagattatcctcaacgcgccgcaacaatatctgctggcggggatcggtgacacgctggcgaaatggtatgaagcggtggtgctggccccgcaaccagaaacgttgccgctaaccgtgcggctagggatcaataatgcgcaggctattcgcgacgtcttgttaaacagtagcgaacaggcgctgagcgatcagcaaaatcaccagttaacgcaatcattttgcgatgtggtggatgccattattgctggtggtgggatggttggtggtctgggcgatcgttttacgcgtgtggcggcagctcatgccgtgcataacggtctgaccgtgctgccgcaaaccgagaagtttctccacggcaccaaagtcgcctacggaattctggtgcaaagcgccttgctgggtcaggatgatgtgctggcgcaattaactggagcgtatcagcgttttcatctgccgactacgctggcggagctggaagtggatatcaataatcaggcggagatcgacaaagtgattgcccacaccttgcgtccggtggaatccattcattacctgccggtcacgctgacaccagatacgttgcgtgcagcgttcgaaaaagtggaatcgtttaaagcctga

SEQ ID NO: 270 - DNA, 1161 bp, Escherichia coli
atgacaaataaccctctgattccacaaagcaaacttccacaacttggcaccactattttcacccggatgagcgcgctggcgcagcaacaccaggcgattaacctttcgcaaggctttcctgattttgatggtccgcgctatttacaggagcggctggcgtaccacgttgcccagggggcaaaccaatacgcacccatgaccggcgtgcaggccttgcgtgaggcgattgctcagaaaacggaacgtctgtatggctatcaaccggatgtcgacagcaatatcaccgtgacggcaggggcgacggaggcgttatacgcggcgataaccgcattggtgcgcaatggcgacgaagtgatttgttttgatcccagctatgacagttacgcccccgccatcgcactttcggggggaatagtgaaacgtattgcactgcaaccgccgcattttcgcgttgactggcaggaatttgccgcattgttaagcgagcgcacccgactggtgatcctcaacaccccgcataaccccagtgcaactgtctggcagcagactgatttcgccgctctgtggcaggcgatcgccgggcacgagatttttgtcattagcgatgaagtctacgagcacatcaatttttcacaacagggccatgccagcgtgctggcgcatccgcaattgtgtgagcgagcggtggcggtgtcatcgtttggcaagacctatcatatgaccggctggaaagtgggttattgcgttgcgcctgcgcccatcagcgccgagatccgcaaagtgcatcagtatctgaccttttcggtgaataccccggcacaactggcgcttgccgatatgctacgtgcagaacctgagcattatcttgcgttaccggacttttatcgccagaagcgcgatattctggtgaatgccttaaatgaaagtcggctggagattttaccgtgcgaaggtacatactttttgctggtggattacagcgccgtatctacgatggatgatgttgagttttgccagtggctgacgcgggagcacggtgtagcggcgattccgctgtcggtgttttgcgccgatcccttcccacataaactgattcgtctctgttttgccaagaaggaatcgacgttgctggcagcagcagaacgcctgcgccagctgtag

SEQ ID NO: 271 - DNA, 630 bp, Escherichia coli
atgggggatactatgcaacaacgattaacgcaggatttaacccaatttctcgccagcttgccggaagatgatcgcatcaaagcgattaatgaaatccgcatggcgatccatcaggttagcccctttcgtgaagagccagtggattgcgttctgtgggttaaaaacagccaacttatgcctaatgattacaacccaaacaacgtggcaccacccgaaaaaaaactgctgaaaaaatccattgaaatagatggttttacccaacccattgtggtcacgcatacggataaaaatgctctggaaatcgtggatggttttcaccgccatgaaattggtaaaggctcatcatcgttaaaattacgcttaaaaggttatttgccggtgacctgtctggaaggtacgcgtaatcaacgcatcgccgcgactattcgtcataatcgcgctcgtggacgtcaccaaatcactgccatgtcagaaatcgtccgagaactcagccagttgggatgggacgataataaaataggcaaagagctgggaatggacagcgacgaagtgttacgcctgaagcaaattaacggcctgcaagagttgtttgccgaccgtcaattttcccgcgcctggacggttaaataa

SEQ ID NO: 272 - DNA, 1221 bp, Escherichia coli
atgtctatttataaaatcccgcttccactgaatattctggaagctgcaaaagaacgtattacctggacacttaataccctaccccgtatctgtgtttctttttcgggtggtaaagattccggattaatgctgcatctgacagccgaaattgcccgacaaatgggcaaaaaaatctgcgttttgtttatcgactgggaagcgcagttctcatgcactattaactatgttcagtcattacgtgagttttacgccgatgtcatcgaagagttttactgggttgcgctcccgcttacgacgcaaaattccctttctcaataccaacccgaatggcagtgctgggaacctgatgtcgaatgggtgcgtcagcccccgcaagatgcgataaccgatcctgactttttctccttttaccagcctggcatgaccttcgaacaatttgtgcgtgagtttgctgaatggttttcacaaaaacgtccggcgacgatgatgatcggcatccgtgcagatgagtcctacaaccgttttgtcgccatcgccagtttaaataaacaacgttttgccgatgataagccctggaccaccgccgcaccaggcggtcatagctggtacatttaccccatctacgactggaaagtggctgatatctggacctggtatgctaaccatcaacagctctgtaacccactgtataatataatgtatcaggcaggcgttcctctgcgtcatatgcgaatttgcgaaccttttggcccggagcaacggcaaggattatggctctatcacgttatcgaaccggatcgctgggctgctatgtgcgcacgagtcagcggggtaaaaagtggcggcatttacgccggacatgataatcatttttatggtcatcggaaaatcctcaagccagaacatttagactggcaagaatatgcattattgctgctcaatagcatgccggaaaaaacggctgagcattaccgcaataaaatcgccatttatttgcactggtatcagaaaaaaggcatcgaagttccacaaacccagcaaggggacattggcgcgaaagatatcccctcctggcggcgaatatgcaaagttttactcaataacgattactggtgccgggcattatcatttagtcctacgaaagcgaagaactatcagcgttataacgaacggataaaaggaaaacgtcaggaatgggggatactatgcaacaacgattaa

SEQ ID NO: 273 - DNA, 903 bp, Escherichia coli
atggctaatctttatgatctaaaaaaatttgacctcaatttactggtcatatttgaatgtatttatcaacatctcagcattagtaaagcggcagaatcattatatataacgccctctgctgttagtcagtcgttacaacgtttacgtgcgcaatttaatgacccgttattcattcgctcagggaaaggtatcgcgccgactacaacagggttaaacctgcatcaccatcttgagaaaaatctcagaggccttgaacaaacgatcaatatcgttaataagtctgaactaaagaaaaattttattatctacggtcctcagcttatttcttgtactaataacaacatgctaatccgctgtcttagacaagatacttcaatcgatatagaatgccatgacatactgctttcagctgaaaatgccgaagaactgttggttcaacgcaaaactgacctggcaattacgctgcaaccagtaattagtcgctctgtcatctgcatgccgttacacactattcgcaattcccttatatgtagcaacaaacatcctcgtattactgataccagtaactatgaacaaattatcgccgaagaattcaccctgttgatatctaaatcagcagggattgacgaaattcaaatggacatagatgaacgttttatgaaccgtaaagtttcatttcgcagttcttctttgatgactataattaatagtatttctgttactgacttattaggcattgtgcccaccgaactgtacgatttacatcgtgactttttgaagttaaaagaaataaaactggaacaatctcttcctgcggttaaactttatatttcctataacaaggcttcgttgaacaaccttgtcttctcccgattcatagatcgtttaaatgatagcttctga

SEQ ID NO: 274 - DNA, 747 bp, Escherichia coli
atgttaaaaaagatacttttactggctctgcttcctgcaatcgccttcgcagaggaacttcctgccccagtaaaagcgattgaaaaacagggtattacaatcatcaaaacgttcgatgcccctggaggaatgaaaggttatctcggtaagtatcaggatatgggcgtcaccatctacctgactccagatggtaagcacgctatctctggttacatgtacaacgaaaaaggtgaaaacctgagtaacacgcttatcgaaaaagaaatttacgcacccgccggacgtgaaatgtggcaacggatggaacaatcccactggctcctcgacggtaaaaaagacgcgccggtcattgtctacgtcttcgccgatccgttctgcccatattgtaaacagttctggcagcaggctcgcccgtgggtagattctggcaaagtgcaattaagaacattcttggttggggttatcaagccagaaagcccggcgacagcagcggcaattcttgcctccaaagatcccgcaaaaacctggcaagaatatgaagcctctggtggcaagcttaagctaaacgtgcctgcaaacgtaagcacagagcaaatgaaagtgttaagcgacaacgagaaactcatggacgatctgggggcaaatgtcacaccagctatctactacatgagtaaggaaaatacgctgcaacaggccgtcggattacccgatcagaaaacacttaatatcattatggggaataaatag

SEQ ID NO: 275 - DNA, 564 bp, Escherichia coli
atgtccttgattaacaccaaaattaaaccttttaaaaaccaggcattcaaaaacggcgaattcatcgaaatcaccgaaaaagataccgaaggccgctggagcgtcttcttcttctacccggctgactttactttcgtatgcccgaccgaactgggtgacgttgctgaccattacgaagaattgcagaaactgggcgtagacgtatacgcagtatctaccgatactcacttcacccacaaagcatggcacagcagctctgaaaccatcgctaaaatcaaatatgcgatgatcggcgacccgactggcgccctgacccgtaacttcgacaacatgcgtgaagatgaaggtctggctgaccgtgcgaccttcgttgttgacccgcagggtatcatccaggcaatcgaagttaccgctgaaggcattggtcgtgacgcgtctgacctgctgcgtaaaatcaaagcagcacagtacgtagcttctcacccaggtgaagtttgcccggctaaatggaaagaaggtgaagcaactctggctccgtctctggacctggttggtaaaatctaa

SEQ ID NO: 276 - DNA, 1596 bp, Escherichia coli
atgatgatgtttaaagcccaggagataaacatgctcgacacaaatatgaaaactcaactcaaggcttaccttgagaaattgaccaagcctgttgagttaattgccacgctggatgacagcgctaaatcggcagaaatcaaggaactgttggctgaaatcgcagaactgtcagacaaagtcacctttaaagaagataacagcttgccggtgcgtaagccgtctttcctgatcaccaacccaggttccaaccagggaccacgttttgcaggctccccgctgggccacgagttcacctcgctggtactggcgttgttgtggaccggtggtcatccgtcgaaagaagcgcagtctctgctggagcagattcgccatattgacggtgattttgaattcgaaacctattactcgctctcttgccacaactgcccggacgtggtgcaggcgctgaacctgatgagcgtactgaacccgcgcatcaagcacactgcaattgacggcggcaccttccagaacgaaatcaccgatcgcaacgtgatgggcgttccggcagtgttcgtaaacgggaaagagtttggtcagggccgcatgacgttgactgaaatcgttgccaaaattgatactggtgcggaaaaacgtgcggcagaagagctgaataagcgtgatgcttatgacgtattaatcgttggttccggcccggcgggtgcagcggcagcaatttactccgcacgtaaaggcatccgtaccggtctgatgggcgaacgttttggtggtcagatcctcgataccgttgatatcgaaaactacatttctgtaccgaagaccgaaggccagaaactggcaggagcgctgaaagttcacgttgatgaatacgacgttgatgtgatcgacagccagagcgccagcaaactgatcccggcagcggttgaaggtggcctgcatcagattgaaacagcttctggcgcggtactgaaagcacgcagcattatcgtggcgaccggtgcaaaatggcgcaacatgaacgttccgggcgaagatcagtatcgcaccaaaggcgtgacctactgcccgcactgcgacggcccgctgtttaaaggtaaacgcgtagcggttatcggcggcggtaactccggcgtggaagcggcaattgacctggcgggtatcgttgagcacgtaacgctgctggaatttgcgccagaaatgaaagccgaccaggttctgcaggacaaactgcgcagcctgaaaaacgtcgacattattctgaatgcgcaaaccacggaagtgaaaggcgacggtagcaaagtcgtaggtctggaatatcgagatcgtgtcagcggcgatattcacaacatcgaactggccggtattttcgtgcagattggtctgctgccgaacaccaactggctggaaggcgcagtcgaacgtaaccgcatgggcgagattatcattgatgcgaaatgcgaaaccaacgtgaaaggcgtgttcgcagcgggtgactgtacaacggttccgtacaagcagatcatcatcgccactggcgaaggtgccaaagcctctctgagtgcttttgactacctgattcgcaccaaaactgcataa

SEQ ID NO: 277 - DNA, 429 bp, Escherichia coli
atgtacaaaacaatcatcatgccagtggatgttttcgaaatggaattgagcgacaaagcgattcgccacgctgaattcctcgcccaggatgacggagttattcatctacttcacgtactaccggggtcagccagcctgagcctgcaccgttttgccgctgatgtacgtcgttttgaagagcatctgcaacatgaagcagaagaacgtctgcaaacgatggtcagccacttcaccatcgatccttcccgcattaagcaacatgtccgttttggtagtgtgcgggatgaagttaacgagttagcgaaagaacttgatgcagatgtagtagtgattggttcgcgtaacccatcaatttcaactcatctgttgggttctaacgcctcgagcgtgatccgccacgccaatttgccggtgctggttgtgcgttaa

SEQ ID NO: 278 - DNA, 411 bp, Escherichia coli
atgtccagaccaactatcatcattaacgacctggatgccgaacgcatcgatattctgctggagcaacccgcctatgctggtttgccaatcgccgacgcgttaaacgcagagttggatcgcgcccaaatgtgttcgccagaagagatgccacacgacgtggtgacaatgaacagccgggttaaattccgcaatcttagcgatggcgaagtgcgtgtgcgcacgctggtgtatccggcaaaaatgaccgacagcaatactcagctttccgttatggctccggtaggtgccgcactgctggggctgcgcgttggcgattccattcactgggaactgccgggcggcgttgcaacccaccttgaagtgctggaactcgaataccagccagaagctgctggcgattacctgctttaa

SEQ ID NO: 279 - DNA, 807 bp, Escherichia coli
atgaaagcattctggcgtaacgccgcgttgctcgcggtttctctgcttcccttctcttctgccaacgccgtggcgttgcaggcaaaacagtatggcgattttgatcgctatgtcctggccctctcctggcaaaccggattttgccagagtcaacacgatcgaaatcgtaacgaacgagatgaatgtcgcctgcaaaccgaaacgaccaacaaagctgattttttgaccgtacatggtctgtggccaggattgcctaaatcggttgctgcccgtggtgttgatgaacgccgctggatgcgcttcggttgcgctactcgcccaatcccgaatctgccagaagcacgcgccagccggatgtgttcatcgccggaaactgggttatcactggaaacggcagctaaactaagtgaagccatgccaggagctggcggacgttcctgcctggaacgctacgaatatgccaaacacggtgcctgctttggttttgatccagacgcatacttcggcacgatggtacgcctgaatcaagaaattaaagagagcgaagccggaaaattccttgcggataactacggtaaaacagtgagccgccgtgactttgatgccgcctttgccaaaagctggggaaaagagaacgtgaaagcagttaagctaacgtgccagggtaaccctgcgtatttgactgaaattcagatctcgatcaaagctgacgccatcaacgctccgctttctgccaactcattcttgccacaaccacacccaggcaactgtggcaaaacctttgtgattgataaagcaggttattaa

SEQ ID NO: 280 - DNA, 1464 bp, Escherichia coli
atgtctttagcaaaagataatatatggaaattattggcgcccctggtggtgatgggtgtcatgtttcttatccctgtacctgacggtatgccgccgcaggcgtggcattactttgcagtgtttgtggcaatgattgtcggcatgatcctcgagccaattccggcaacggcgatcagttttattgcggttactatttgcgttattggcagtaattacctgctctttgatgccaaagaattagctgacccagcgtttaatgcgcaaaaacaggcgctgaaatggggtctggctggtttttccagcaccacggtatggctggtatttggcgcatttatttttgcattagggtatgaagtttccgggttaggccgtcgtattgcccttttcctggtgaaattcatgggcaaacgcacgctgacgttgggttatgcgattgtcattatcgacattctgctggcaccgtttacaccgtccaacaccgcgcgtaccgggggtacggtttttccggtcattaaaaacctgccgccgctgtttaaatcattcccgaacgatccgtccgcgcgtcgtattggcggctatttgatgtggatgatggtcattagtaccagtctgagttcgtccatgtttgtcaccggtgcggcaccaaacgtgctgggtctggagttcgtcagcaaaattgccggtatccagattagctggttgcagtggttcctctgcttcctgccggttggggttatcttgcttatcattgcgccgtggctttcctacgtgctgtacaaaccggaaatcacacacagtgaagaagtggcaacctgggcgggtgatgaactaaaaaccatgggtgcgctgacgcgcagagagtggacgctgattggccttgtattgctcagcttaggtttgtgggtatttggcagtgaagtcattaatgctactgcggtaggtctgctggcagtttcgctgatgctggcgctgcacgttgtgccgtggaaagacattactcgctataacagcgcatggaacacgctggtcaacctggcaacgctggttgttatggcgaatggcctgacccgttctggctttatcgactggttcgccaacacgatgagtacacacctggaaggcttctcaccaaacgcaacggtgattgtactggttctggtgttctactttgcccactacctgtttgccagcctgtctgcacacaccgcaaccatgctgccggttattctggccgtcggtaaagggattccgggcgtaccaatggaacaactgtgtatcctgctggtgctgtctatcggtatcatgggctgtctgacgccttatgcaaccggtcctggggtgattatttacggctgtggctatgtgaaatcaaaagattactggcgtcttggcgcaatcttcggggtgatttacatctctatgctgctgttggttggctggccgattctcgccatgtggaactaa

SEQ ID NO: 281 - DNA, 879 bp, Escherichia coli
atgtcgatgcctgcaacgtcaactaaaaccacaaagcttgcgacgtcattaatcgatgagtacgccctgctgggctggcgcgccatgctgactgaagtcaacctgtcaccgaaaccaggcctcgtggatcgcattaactgcggtgcgcacaaagatatggcgctggaagatttccaccgcagcgcgctggcgattcagggctggttaccccgtttcattgaatttggtgcctgtagtgcagaaatggcaccggaagcggtactcaacggattacgcccaattggtatggcttgcgaaggtgatatgttccgcgccactgcgggcgtaaacacgcataaaggcagcattttttctttagggctactgtgtgcggcaattggccgtttgcttcagctcaaccagccggtaacgccaacaaccgtttgttctacggcggcaagtttctgccgtggcctgaccgatcgcgaactgcgtaccaataattcacgactgacggcaggtcaacggttgtaccagcagcttggccttaccggcgcacgcggtgaagccgaagcgggttatccactggtgatcaaccacgccttgccgcattacctcactctgctggatcaggggttagatcctgagctggcattgctcgataccttgctcctactgatggctaccaacggcgataccaacgttgcatcgcgcggtggcgaggggggcctgcgctggctacagcgcgaggcgcaaacattattgcaaaaagggggcattcgaacccccgccgatctcgattatctccggcagttcgacagggagtgtatcgaacgaaatctcagtccaggcggcagtgccgacctgctgatccttacctggtttttagcacagatttaa

SEQ ID NO: 282 - DNA, 552 bp, Escherichia coli
atgcacctgcttcctgaactcgccagccaccatgcggtgtcaattcccgagctgctcgtcagccgggatgaaaggcaagcacggcaacacgcctggctcaagcgccatcctgttccactggtctcctttaccgtggttgcgcctgggccgattaaagacagcgaggtcacacgccgaatttttaatcatggcgtgacagccttgcgtgccttagccgcaaaacagggctggcaaattcaggagcaggctgcactggtttccgccagcgggccggagggcatgttgagcattgccgccccggctcgcgacctcaagctcgccaccattgagcttgaacatagtcatcctctcgggcggttatgggatatcgatgtcctgacgcccgaaggcgacattctctcccgccgcgattattcactgccgcctcgccgctgcctgttgtgcgagcaaagcgcagctgtttgcgcgcgtggaaaaaaccatcaactgaccgatttactcaaccgcatggaggcgctgctaaacgatgtcgatgcctgcaacgtcaactaa

SEQ ID NO: 283 - DNA, 1533 bp, Escherichia coli
atgacgcagaaaattgaacaatctcaacgacaagaacgggtagcggcctggaatcgtcgcgctgaatgcgatcttgccgctttccagaactcgccaaagcaaacctaccaggctgaaaaagcgcgcgatcgcaaactgtgcgccaacctggaagaagcgattcgtcgctctggtttacaggacggcatgacggtttccttccatcacgctttccgtggcggtgacctgaccgtcaatatggtgatggacgtcatcgcgaagatgggctttaaaaacctgactctggcctccagctccctgagtgattgccatgcgccactggtagaacacattcgccagggcgtggttacccgcatttatacctctggcctgcgcggtccactggcggaagaaatctcccgtggtctgctggcggaaccggtgcaaatccactctcacggcggacgtgtgcatctggtacagagcggcgaactgaatatcgatgtggctttcctcggcgtcccgtcctgtgatgaattcggtaatgccaacggctactccggtaaagcctgctgcggctccctcggctatgcaatggttgatgccgacaacgcaaaacaggtcgtgatgcttaccgaagaactgctgccttatccgcataatccggcaagcattgagcaagatcaggttgatctgatcgtcaaagttgatcgcgttggcgatgctgcaaaaatcggcgctggtgctacccgtatgaccactaacccgcgcgaactgcttattgcccgtagcgctgcggatgtgattgttaactctggctacttcaaagaaggtttctccatgcagaccggcaccggcggcgcttcgctggcggtaacccgtttcctggaagacaaaatgcgtagccgcgatattcgcgccgacttcgccctcggcggtattaccgcaacgatggttgatctgcacgaaaaaggtttgatccgcaaactgctggatgtgcagagctttgacagccatgctgcgcaatcgctggcccgtaaccccaatcacatcgaaatcagcgccaaccagtacgctaactgggggtcgaaaggcgcagcggttgatcgtctcgacgtggtggtactgagcgcgctggaaattgacacccagttcaacgttaacgtgctgaccggctctgacggcgtactgcgtggtgcttccggtggtcactgcgataccgcgattgcttctgcgctttccatcatcgtcgcgccgctggtacgcggtcgtattccgacgctggtggataacgtgctgacctgcatcaccccgggctccagtgtcgatattctggtcacagaccacggcatcgctgttaacccggcacgtccggagctggcagaacgtctgcaggaagcggggatcaaagtggtttctattgagtggctgcgtgaacgtgcgcgtctgctgaccggtgaaccacagccgattgaattcaccgaccgcgtcgttgccgttgtgcgttaccgcgatggctcggtgatcgatgttgtgcatcaggtgaaggaataa

SEQ ID NO: 284 - DNA, 909 bp, Escherichia coli
atgatttccgcttcgctgcaacaacgtaaaactcgcacccgccgcagtatgttgtttgtgcctggtgctaatgccgcgatggtcagcaactccttcatctacccggctgatgccctgatgtttgacctcgaagactccgttgcattgcgtgaaaaagacaccgcccgccgcatggtttaccacgcgctgcaacatccgctttatcgcgatattgaaaccattgtgcgtgtaaacgcgctggattccgaatggggtgttaacgacctggaagccgtcgttcgcggtggtgcggacgttgtgcgtctgccgaaaaccgataccgctcaggatgttctggatatcgaaaaagagatcctgcgtatcgaaaaagcctgtggtcgtgaacccggcagtaccggcctgctggcggcgattgaatctccgctgggcattacccgcgcggtagaaatcgctcacgcttccgagcgtttgatcggtatcgccctcggtgcagaagactatgtgcgcaacctgcgtacagaacgctccccggaaggaactgaactgctgttcgctcgctgctccattttgcaggccgcgcgttctgcgggtattcaggcgttcgataccgtctattccgacgctaacaacgaagccggattcctgcaagaagccgcccacatcaaacagctgggctttgacggcaaatcgctgatcaacccgcgtcagattgatctgctgcacaacctctacgcaccgacccagaaagaagtggatcacgcccgccgcgtcgtagaagccgctgaagccgccgctcgcgaaggcctcggcgtggtttccctgaacggcaagatggtggacggtccggttatcgatcgcgcccgtctggtgctctcccgcgcagaactttccggcatccgcgaagaataa

SEQ ID NO: 285 - DNA, 297 bp, Escherichia coli
atgaaaataaaccagcccgccgttgcaggcacccttgagtctggggatgtgatgatacgcatcgccccactcgatacgcaggatatcgacctgcaaatcaacagcagcgttgagaaacagtttggcgatgcaattcgcaccaccattctggacgttctcgcccgctacaacgtgcgcggcgtacagctgaatgtcgatgacaaaggcgcactggactgcattttacgtgcacgactggaagccctgctggcacgcgccagcggtatcccggctctgccatgggaggattgccaatga

SEQ ID NO: 286 - DNA, 1059 bp, Escherichia coli
atgttcggcaatgatattttcacccgcgtaaaacgttcagaaaataaaaaaatggcggaaatcgcccaattcctgcatgaaaatgatttgagcgttgacaccacagtcgaagtatttattaccgtaacccgcgatgaaaagcttatcgcgtgcggtggaattgccggaaatattattaaatgcgttgctatcagtgaatccgttcgcggtgaaggactggcgctgacattagccactgaactgataaacctcgcctatgagcggcatagcacgcatctgtttatttataccaaaaccgaatacgaggcgctgttccgccagtgcggtttttccacgctgaccagcgtacccggcgtgatggtgctgatggaaaacagcgccacgcgactgaaacgctatgccgaatcgctgaaaaaatttcgtcatccagggaacaagattggctgcattgtgatgaacgccaatccctttacgaatggtcaccgttatctgattcaacaggctgcggcacagtgcgactggttgcatctgtttttagtcaaagaagattcttcacgcttcccctatgaagaccggctggatctggtgttaaaaggcaccgccgatattccacgcctgactgtgcatcgcggctccgaatacatcatctcccgcgctacgttcccttgctacttcattaaagaacagagcgtcattaaccattgttacaccgaaattgatctgaagattttccgtcagtacctcgctcccgcgctgggtgtaactcaccgctttgtcggtactgaacccttttgtcgcgttaccgcccagtacaaccaggatatgcgctactggctggaaacgccgactatctccgcaccgcccatcgaactggttgaaattgagcggctgcgttaccaggagatgccgatatccgcttcccgggtacgtcaactgctggcgaaaaacgatctcacggctatcgcgccgctggtccctgcagtcacgctgcattatttgcagaacctgcttgagcactcccgccaggacgcggcagctcgtcaaaagacccccgcatga

SEQ ID NO: 287 - DNA, 1659 bp, Escherichia coli
atgttgcagcttaaagagaataaacagtttgcatttttccaaagactggcatttccgctgcgtatctttttgctgattctggtgttctcaatatttgtcattgcagccctggcgcaatattttacagccagttttgaggactatttaacgcttcatgtgcgcgacatggcaatgaatcaggcaaaaattattgcttctaatgacagtatcatcagtgcagtgaaaacgcgtgactacaagaggctggcgaccatcgctgacaaattacaaagagatactgatttcgattatgtggtgattggcgatcggcactcgattcgtctttaccatcctaatccggagaaaattggttatcctatgcagttcaccaaaccgggcgcgctggagaaaggggagagctacttcatcaccgggaaagggtcaattggcatggcgatgcgtgccaaaacgccaatctttgatgacgatggaaaagtcatcggcgtggtgtcgattggctatctggtgagtaaaatcgatagctggcgggctgagtttttattaccgatggcaggcgtgtttgtcgtgctgttagggattttgatgttgctgtcgtggttcctggccgcgcatatccgtcggcagatgatgggcatggagccaaagcaaatcgctcgcgtagtccgtcagcaagaggcgctgtttagttcggtttatgaagggctgattgcggtggatccgcacgggtacattaccgccatcaatcgtaacgcaagaaagatgctggggctgagttcccccggacggcaatggttgggtaaacccattgctgaagtggtcaggcccgccgatttctttaccgaacagattgatgaaaaacgtcaggatgtggtggcgaactttaacggtctgagcgttattgccaaccgggaagctattcgttctggcgatgatttactgggggccattattagctttcgtagtaaagacgaaatttccaccctcaatgcgcaactgacgcaaattaaacaatacgtcgagagccttcgtacattgcgacacgagcatctcaattggatgtcgacgctcaatggtctgttgcagatgaaagagtatgatcgcgtgctggcgatggtgcagggggagtctcaggcccagcaacagcttattgacagcctgcgtgaggcgtttgccgatcgccaggtggcggggctgctttttggtaaagtgcagcgcgcccgcgaactggggctaaaaatggtcatcgtccccggtagccagctttcgcaactgccgccaggactggacagcaccgagtttgcagccattgttggcaatttacttgataacgccttcgaagcaagcctgcgtagcgatgaaggaaacaagatcgttgaattattcctcagcgatgaaggcgatgatgtggtgattgaagtcgccgatcagggctgcggcgttccagagtctctacgagacaaaatatttgagcagggggtcagtacgcgtgctgacgagcccggtgaacatggcattgggttgtacttgattgccagctacgtaacgcgctgcggtggtgttatcactctcgaagataatgatccctgcggtaccttattttcaatctatattccgaaagtgaaacctaatgacagctccattaaccctattgatcgttga

SEQ ID NO: 288 - DNA, 681 bp, Escherichia coli
atgacagctccattaaccctattgatcgttgaggacgaaacgccgctggcagagatgcatgcggaatatattcgtcacattcccggattcagccagatattactggcgggaaacctggcgcaggcccgaatgatgatcgagcgttttaagccggggctaatcttgctcgataactatcttcctgacggtagagggattaatttactgcatgaactggtgcaggcgcattatcccggcgacgtggtgtttaccactgctgccagcgatatggaaacggtgtctgaagccgtacgttgtggtgtatttgattatctcattaagcccattgcctatgaacggttggggcaaacgctaacccgtttccgccagcgtaaacatatgctggaaagtattgatagcgccagccagaagcaaattgatgagatgtttaatgcctatgctcgcggtgaacccaaagacgaactgccgaccggcattgaccccttgacgctaaacgcggtgcgaaaactgttcaaagagcctggtgtgcaacatacggcagaaacggtggcgcaggcactgaccatcagtcgcaccactgccaggcgttatcttgaatattgcgccagccgccatctgattattgctgaaattgttcacggcaaagttggcagaccgcaacgcatataccacagtgggtga

SEQ ID NO: 289 - DNA, 1386 bp, Escherichia coli
atgctgacattcattgaactccttattggggttgtggttattgtgggtgtagctcgctacatcattaaagggtattctgccactggcgtgttatttgtcggtggcctgttattgctgattatcagtgccattatggggcacaaagtgttaccgtccagccaggcttcaacaggctacagcgccacggatatcgttgaatacgttaaaatattgctaatgagccgcggtggcgacctcggcatgatgattatgatgctgtgtggctttgccgcttacatgacccatatcggcgcgaatgatatggtggtcaagctggcgtcaaaaccattgcagtatattaactccccttaccttctgatgattgccgcctattttgttgcctgtctgatgtcactggccgtctcttccgcaaccggtctgggtgttttgctgatggcaaccctgtttccggtgatggtaaacgttggtatcagtcgtggcgcagctgctgccatttgtgcctccccggcggcgattattctcgcaccgacttcaggggatgtggtgctggcggcgcaggcttccgaaatgtcgctgattgacttcgccttcaaaacaacgctgcctatctcaattgctgcaattatcggcatggcgatcgcccacttcttctggcaacgttatctggataaaaaagagcacatctctcatgaaatgttagatgtcagtgaaatcaccaccactgcccctgcgttttatgccattttgccgttcacgccgatcatcggagtactgatttttgacggcaaatggggtccgcaattacacatcatcactattctggtgatttgtatgctaattgcctccattctggagttcatccgcagctttaatacccagaaagttttctctggtctggaagtggcttatcgcgggatggcagatgcatttgctaacgtggtgatgctgctggttgccgctggggtattcgctcaggggcttagcaccatcggctttattcaaagtctgatttctatcgctacctcgtttggttcggcgagtatcatcctgatgctggtattggtgatcctgacaatgctggcggcagtcacgaccggttcaggcaatgcgccgttttatgcgtttgttgagatgatcccgaaactggcgcactcctccggcattaacccggcgtatttgactatcccgatgctgcaggcgtcaaacctgggtcgtaccctatcacccgtttctggcgtagtcgttgcggttgccgggatggcgaagatctcgccgtttgaagtcgtaaaacgcacctcggtgccggtgcttgttggtttggtgattgttatcgttgctacagagctgatggtgccaggaacggcagcagcggtcacaggcaagtaa

SEQ ID NO: 290 - DNA, 561 bp, Escherichia coli
atgaacgtgagtaaatatgtcgctatatttttctttgtttttattcagttaatcagtgttggtaaagtttttgctaacgctgatgagtggatgacaacgtttagagaaaatattgcacaaacctggcaacagccagaacattatgatttatatattcctgccatcacctggcatgcacgttttgcttacgacaaagaaaaaaccgatcgctataacgagcgaccgtggggtggcggttttggtcagtcgcgttgggatgaaaaaggaaactggcatggcctgtatgcaatggcatttaaggactcgtggaacaaatgggaaccgattgccggatacggatgggaaagtacctggcgaccgctggcggatgaaaattttcatttaggcctgggatttaccgctggcgtaacggcgcgcgataactggaattacatccctcttccggttctactgccattggcctctgtggggtatggccccgcgacgtttcagatgacctacattccgggtacctataacaatggcaatgtgtactttgcctggatgcgctttcagttttga

SEQ ID NO: 291 - DNA, 210 bp, Escherichia coli
atgtctaagattaaaggtaacgttaagtggtttaatgagtccaaaggattcggtttcattactccggaagacggcagcaaagacgtgttcgtacacttctctgcaatccagactaatggttttaaaactcttgctgaaggtcagcgcgtagagttcgaaatcactaacggtgccaaaggcccttctgctgcaaacgtaatcgctctgtaa

SEQ ID NO: 292 - DNA, 384 bp, Escherichia coli
gtgttacaacttcttttagcagtttttattggcggtggtacgggaagcgtggcgagatggctgttaagtatgcgatttaacccgctgcatcaggcgattccgttggggacgctggctgcaaacctgattggggcattcatcataggaatgggattcgcctggttcagcaggatgacgaacattgatccagtgtggaaagtattaatcaccaccggattttgtggcggtctaacaaccttctcaacattttcggcagaagtggtgtttttgttacaagagggccgctttggctgggcgttactgaacgttttcgtcaaccttttggggtcttttgccatgaccgcactggctttctggctgttttccgcctcaaccgcacactaa

SEQ ID NO: 293 - DNA, 789 bp, Escherichia coli
atgctggttgccgcaggacagtttgctgttacatctgtgtgggaaaagaacgctgagatttgtgcctcgttgatggcgcaggcggcggaaaacgacgtatcgctgtttgtcctgccggaagcattgctggcgcgcgatgatcatgatgcagatctatcggttaaatcagcacagctgctggaaggcgaattcctcggacgtttacggcgagaaagtaaacgtaacatgatgacgacaattctgacgattcatgttccttcaacgccgggtcgcgcatggaatatgctggtggcacttcaggcaggaaacatcgtcgcccgttatgccaaactgcatctctatgatgcatttgccattcaggaatcacgccatgttgatgccggtaatgaaatagctccgttactggaggtggaagggatgaaggtcggtctgatgacctgttatgacttacgctttccagagctggcgctggcacaggcattacagggagctgaaatcctggtacttcctgccgcctgggttcgtgggccgctcaaagagcatcactggtcaacgttgcttgccgctcgtgcgctggataccacctgttatatggtggctgcgggggagtgcgggaacaaaaatatcgggcaaagccggattatagatccctttggcgtcaccattgcggcagcgtcagaaatgcctgcactcattatggcggaagtgacgcccgaacgtgtgcgtcaggtacgcgcgcaactgcccgtcttaaacaaccgtcgctttgcgccgccgcaattattatga

SEQ ID NO: 294 - DNA, 204 bp, Escherichia coli
atgggtgagattagtattaccaaactgctggtagttgcggcgctggtcgttctgctgtttgggactaagaagttacgtacgctgggcggagaccttggagcggccattaaagggttcaagaaggcgatgaatgatgacgatgctgcggcgaaaaaaggcgcagacgttgatcttcaggctgaaaagctctctcataaagagtga

SEQ ID NO: 295 - DNA, 966 bp, Escherichia coli
atgagtaaacccattgtgatggaacgcggtgttaaataccgcgatgccgataagatggcccttatcccggttaaaaacgtggcaacagagcgcgaagccctgctgcgcaagccggaatggatgaaaatcaagcttccagcggactctacacgtatccagggcatcaaagccgcaatgcgcaaaaatggcctgcattctgtctgcgaggaagcctcctgccctaacctggcggaatgcttcaaccacggcacagcaacgtttatgatcctcggcgctatttgtacccgccgttgtccgttctgtgacgttgcccacggtcgcccggtagctccggatgccaatgaaccagtgaaactggcgcagaccattgccgatatggcgctacgttatgtggttatcacctccgttgaccgtgatgacctgcgcgatggcggtgcccagcactttgcggattgcattactgccattcgggaaaaaagcccgcaaatcaaaattgaaactctggtgccggatttccgcggtcgtatggatcgtgctctggatattctgaccgccacaccaccagatgtgttcaaccataacctggaaaacgtaccgcgtatttaccgtcaggtacggcctggtgcagattacaactggtcgctgaagctgctggaacgctttaaagaagcgcatccagaaatcccgaccaagtctggtctgatggtgggtctgggtgaaaccaatgaagaaattattgaggtaatgcgcgacctgcgccgtcatggtgtgacgatgctaacgctggggcaatatttgcagccaagccgccatcacctgccggttcaacgttacgttagcccggatgagttcgacgaaatgaaagccgaagcgctggcgatgggctttacccatgctgcatgcggtccgtttgtccgctcgtcttaccacgccgatttgcaggcgaaagggatggaagttaagtaa

SEQ ID NO: 296 - DNA, 162 bp, Escherichia coli
atgttatccgtaatgcattttgaaaaagtattgttacagccagatcacagcgaagagcgaaaaaatggcacaatccaacaacaattttacattttcgcgaccgctttggctgctttcaggtccgtttcaatgatatactgccagtcgttaattcaaaaatag

SEQ ID NO: 297 - DNA, 189 bp, Escherichia coli
atgcagcgaaagtgcttaatctgccccccctcggtcggagccccggtccttcctgtcatctatcgggcgattaaaactcactatccacagcttttactgcgcaacccgcccatcggcggcgcggaaaaccaactcagtcagtttcaaaccgatctcatcaccgataacatgttttgcacaggaccatag

SEQ ID NO: 298 - DNA, 642 bp, Escherichia coli
ttgtatcaggataaaattcttgtccgccagctcggtcttcagccttacgagccaatctcccaggctatgcatgaattcaccgatacccgcgatgatagtacccttgatgaaatctggctggtcgagcactatccggtattcacccaagggcaggcaggaaaggcggagcatattttaatgccgggtgatattccggtgatccagagcgatcgcggtgggcaggtgacttatcacgggccggggcaacaggtgatgtatgtgttgcttaacctgaaacgccgtaaactcggtgtgcgtgaactggtgaccttgcttgagcaaacagtggtgaataccctggctgaactgggtatagaagcgcatcctcgggctgacgcgcctggtgtctatgtcggggaaaagaaaatttgctcactgggtttacgtattcgacgcggttgttcattccacggtctggcattaaacgtcaatatggatctttcaccatttttacgtattaatccttgtgggtatgcaggaatggaaatggctaaaatatcacaatggagacccgaagcgacgactaataatattgcaccgcgtttactggaaaatattttagcgctactaaacaatcctgacttcgaatatattaccgcttaa

SEQ ID NO: 299 - DNA, 264 bp, Escherichia coli
atgaaaaccaaacttaacgaactgcttgaattccctactccttttacttacaaagttatggggcaggcgttacctgagctggttgatcaggtggttgaagtggtacagcgccatgcgccaggtgactacaccccaacggtaaaaccaagcagcaaaggcaactaccactcggtatctatcactatcaacgccactcatatcgagcaggttgaaacactgtatgaagaactgggcaaaatcgatattgtccgcatggttctgtaa

SEQ ID NO: 300 - DNA, 1212 bp, Escherichia coli
atgaataccattttttccgctcgtatcatgaagcgcctggcgctcaccacggctctttgcacagcctttatctctgctgcacatgccgatgacctgaatatcaaaaccatgatcccgggtgtaccgcagatcgacgcggagtcctacatcctgattgactacaactccggcaaagtactcgccgaacagaacgctgatgtccgccgcgatcctgccagcctgaccaaaatgatgaccagttacgttatcggccaggcaatgaaagccggtaaatttaaagaaactgatttagtcactatcggcaacgacgcatgggccaccggtaacccggtgtttaaaggttcttcgctgatgttcctcaaaccgggcatgcaggttccggtttctcagctgatccgcggtattaacctgcaatcgggtaacgatgcttgtgtcgccatggccgattttgccgctggtagccaggacgcttttgttggcttgatgaacagctacgttaacgccctgggcctgaaaaatacccacttccagacggtacacggtctggatgctgatggtcagtacagctccgcgcgagatatggcgctgatcggccaggcgttgatccgtgacgtaccgaatgaatactcgatctataaagaaaaagaatttacgtttaacggtattcgccagctgaaccgtaacggcctgttatgggataacagcctgaatgtcgacggcatcaaaaccggacacactgacaaagcagggtacaaccttgttgcttctgcgactgaaggccagatgcgcttgatctctgcggtgatgggcggacgtacttttaaaggccgtgaagccgaaagtaaaaaattgctaacctggggcttccgtttcttcgaaaccgttaacccactgaaagtaggtaaagagttcgcctctgaaccggtttggtttggtgattctgatcgcgcttcgttaggggttgataaagacgtgtacctgaccattccgcgtggtcgcatgaaagatctgaaagccagctatgtgctgaacagcagtgaattgcatgcgccgctgcaaaagaatcaggtcgtcggaactatcaacttccagcttgatggcaaaacgatcgaacaacgcccgctggttgtgctgcaagaaataccggaaggtaacttcttcggcaaaatcattgattacattaaattaatgttccatcactggtttggttaa

SEQ ID NO: 301 - DNA, 1089 bp, Escherichia coli
atgcgtaagcagtggctcgggatctgcatcgcggcaggaatgctcgcggcatgtacaagcgatgatggtcagcaacagacggtaagtgtaccgcagcctgcggtatgtaacggccccatagttgaaattagcggggcagacccgcgtttcgaaccactgaacgcgacggcaaatcaggattaccagcgcgacggtaaaagctacaaaatcgtgcaggatccgtctcgatttagccaggcgggactggcggcaatctatgatgccgaacccggcagtaacctgacggcctctggcgaagctttcgatccgacacagttgacggcggcccatccaacgcttccaatccccagctacgccagaatcactaacctggctaacgggcgaatgatcgtggtgcgcattaatgatcgcggcccttatggcaacgaccgcgtgatttcgctttctcgcgcggcagctgaccgtcttaacacgtcaaacaacaccaaagttcgtatcgatccgattattgtcgcccaggatggttcgctttctggtcctggtatggcttgtaccacagtcgccaaacagacttacgccctgccagcacctcccgatttaagcggtggcgcgggaacaagttcagtgcctgtcccgcagggtgacattcttccggtcagtaattcgacgctaaaaagcgaagatccgaccggcgcgccggtaaccagcagcggtttcctcggcgcaccaacgaccttagcgcctggtgtactggaaggcagcgaaccgacgcctgcgccacagcccgttgttacagctccgtcgacaacgcctgcaacctcgcctgcaatggtgacaccgcaagccgcctcgcaaagcgccagcggcaactttatggtgcaagtcggggccgttagcgatcaggctcgtgcgcaacagtaccaacagcaactgggacagaagttcggcgtccccggtcgcgtaactcaaaatggcgcggtctggcggatccagcttggcccattcgccagcaaagccgaagccagtaccttgcagcaacgtttgcaaaccgaagcccaattacagtcatttattaccaccgcgcagtag

SEQ ID NO: 302 - DNA, 1113 bp, Escherichia coli
atgacggataatccgaataaaaaaacattctgggataaagtccatctcgatcccacaatgctgctgatcttactggcattgctggtttacagcgccctggttatctggagcgccagcggtcaggatattggcatgatggagcgtaaaatcggccagattgcgatgggtctggtcatcatggtggtgatggcgcaaattcctccacgcgtttatgaaggctgggccccctatctctatatcatctgtattattttgctggtggcggtagatgctttcggtgccatctctaaaggcgctcaacgctggctggacctcggtattgttcgttttcaaccgtcggaaattgccaagatagccgtaccgttgatggttgcacgctttatcaaccgcgacgtttgcccaccttcattgaagaatacagctatcgcgctggtgctgatatttatgcccacgctgctggtggctgcacagcctgacttgggaacatcaatcctcgttgcgctttccggcctgtttgtactgttcctctctggccttagctggcgtctgattggcgtcgcagtagtgctggtagcggcgttcattccgattctgtggttcttcctgatgcatgattaccagcgccagcgcgtaatgatgctcctggacccggaatcagacccactcggcgcaggctatcacattattcagtctaaaattgctattggctccggcggattacgcggcaaaggctggctgcacggcactcagtcacagcttgaatttctccccgaacgccataccgactttatcttcgcggtactggcggaagagctgggattagtgggcattttgattctgctcgctctctacattctgctgatcatgcgcgggctgtggatagccgccagagcgcaaaccacctttggtcgcgtcatggctggcggcttaatgctgatattattcgtttatgtcttcgtaaatattggtatggtaagcggtattctgccggttgtaggggttccgctcccactggtcagttatggaggatcggcgctaattgtgctgatggctgggttcgggattgtaatgtcaatccacacccacaggaaaatgttgtcgaaaagcgtgtaa

SEQ ID NO: 303 - DNA, 1902 bp, Escherichia coli
atgaaactacagaactcttttcgcgactatacggcagagtccgcgctgtttgtgcgccgggcgctggtcgcctttttggggattttgctgctgaccggcgtacttatcgccaacctgtataatctgcaaattgttcgctttaccgattaccagacccgctctaatgaaaaccgcattaagctggtgcctatcgcgcccagccgcggcattatctacgaccgtaacggtatccctctggccctcaaccgcactatctaccagatagaaatgatgccggagaaagtcgataacgtgcagcaaacgctggacgctttgcgcagcgtggttgatctgaccgatgacgatattgctgcattccgaaaagagcgcgcacgttcacaccgtttcacctccattccggtgaaaactaacctgaccgaagtacaagtggcgcgctttgccgtcaatcagtaccgttttccgggtgtcgaagttaaaggctataagcgtcgttactatccttacggttcggcgttgacccacgtcatcggctatgtgtcgaaaatcaacgataaagacgtcgaacgcctgaataatgacggcaaactggccaactatgcggcaacgcatgatatcggtaagctgggcattgagcgttactatgaagacgtgctgcacggtcagaccggttatgaagaggttgaagttaacaaccgtgggcgtgttatccgccagttaaaagaagtgccaccgcaagccggacacgatatttacctgacgctggatctcaaactccagcaatatattgaaacgctgctggcgggtagccgcgcagctgtggtagtcaccgatccgcgtacaggtggggtgttggcgctggtttccacgcctagttatgacccaaacctgtttgttgacggtatctccagcaaagattattccgccttgctgaacgacccgaatacaccgctggtgaaccgcgccacacagggggtttatcctcccgcgtctacagttaaaccctatgtggcggtttcggcattgagtgccggggtgatcacgcgcaatacgacgctgtttgaccccggctggtggcaactgccagggtcggaaaaacgttatcgtgactggaaaaaatggggccacgggcgtctgaatgtcacaagatcgctggaagaatctgcggataccttcttctatcaggtggcctacgatatggggatcgatcgcctctccgaatggatggggaaattcggttatggtcattacaccggtatcgacctggcggaagaacgttccggcaacatgcctacccgcgaatggaaacagaaacgctttaaaaaaccgtggtatcagggtgacaccattccggttggtatcggtcagggttactggacggcgacccctatccagatgagtaaggcactgatgatcctgattaatgacggtatcgtgaaggttccgcatttgctgatgagcaccgccgaagacggcaaacaggtgccatgggtacaaccgcatgaaccgcccgtcggcgatattcattccggttactgggagctggcgaaagacggtatgtacggtgttgctaaccgccctaacggtacggcgcataaatattttgccagcgcaccgtacaaaattgcggcgaaatccggtaccgctcaggtcttcggtctgaaagcgaacgaaacctataatgcgcacaaaattgccgagcgtttacgtgaccacaaactgatgaccgcctttgcgccatacaacaatccgcaagtggctgtcgccatgattctggagaacggtggcgcgggtccggcggttggtacgctgatgcgccagatcctcgaccacattatgctgggtgataacaacaccgatctgcctgcggaaaatccagcggttgccgcagcggaggaccattaa

SEQ ID NO: 304 - DNA, 468 bp, Escherichia coli
gtgaagctgcaacttgtcgccgtgggaacgaaaatgccggactgggtacaaaccggttttaccgagtacctgcgtcgttttccgaaagatatgcccttcgagctgattgaaattccggccggaaaacgcggcaagaatgcggacatcaagcgcatactcgacaaagagggtgagcagatgttggcggccgcaggcaaaaaccgcattgtcaccctcgatattccaggcaagccctgggatacgccgcagttagccgctgagctggaacgctggaagctggatggtcgcgacgtcagtctactgattggcgggcctgaagggttgtcgcctgcctgtaaagcggcggcggagcagagttggtcgctgtcggcacttacccttccccatccgctggttcgcgtgctggtcgcagagagtctgtaccgggcgtggagcatcaccaccaaccatccttatcaccgtgagtga

SEQ ID NO: 305 - DNA, 318 bp, Escherichia coli
ttgcagggtaaagcactccaggattttgttatcgacaaaattgatgacctcaaaggtcaggacatcatcgccttagacgttcagggcaaatccagcatcaccgactgcatgatcatctgtacgggtacgtccagccgccatgttatgtccattgctgatcacgttatgcaggagtctcgcgcagcgggcctgttaccgctcggcgtagaaggtgaaaacagcgccgactggattgtcgtggatttgggcgatgtgattgtccatgtcatgcaggaagagagccgtcgcctgtatgaactggaaaaactctggagttaa

SEQ ID NO: 306 - DNA, 612 bp, Escherichia coli
atgcgactgtggttaattcgtcatggtgaaacgcaagcgaatgtcgatggtctgtacagcggtcatgcgcccacacccctgaccgcgcgcggtattgagcaggcgcaaaatctgcatacgctgctacatgatgtttcctttgacctggttttatgcagtgaactggaacgggcacagcataccgcgcgactggttcttagtgaccgccagcaccccgttcatatcatccctgaactcaatgaaatgttttttggcgactgggagatgcgacatcatcgtgacctcatgcaagaagatgccgaaaactatagcgcgtggtgcaatgactggcagcatgctatccccacgaacggtgaaggatttcaggcattttcgcaacgtgtggaacgatttatcgcaaggcttagtgaatatcagcactatcagaatattttagtcgtcagccatcagggcgtactgagtctgttaattgctcgtttaattggcatgcctgccgagtctatgtggcatttccgcgttgaccaggggggttggagcgccattgatatcaaccaaaaattcgcgacgctacgcgtcctcaatagccgtgccatcggggtcgagaatgcatga

SEQ ID NO: 307 - DNA, 642 bp, Escherichia coli
atgaaatctttacaggctctgtttggcggcacctttgatccggtgcactatggtcatcttaaacccgtggaaacgctggcgaatttgattggtctgacgcgggtcacaatcatccctaataatgttcctccgcatcgtccccagccggaagcaaacagcatgcagcgtaaacacatgcttgaactggcgattgccgacaagccattatttactcttgatgaacgcgagctaaagcgcaatgccccctcttacactgcgcaaacactgaaagagtggcggcaggagcaaggaccggacgtgccgctggcgtttattattggtcaggattcattgctgacctttccgacctggtacgaatacgaaacgatactcgacaatgcacatttgatcgtctgtcggcgtccaggttacccacttgaaatggcacaaccgcaataccagcaatggctggaagatcatttgacacataacccggaagatcttcaccttcagcctgccggtaaaatttatctggctgaaacgccgtggtttaacatctcggcgaccatcatccgcgaacgtttgcaaaacggtgaatcgtgtgaggatttattaccggaaccggtactgacttacattaaccaacaaggcttgtatcgctga

SEQ ID NO: 308 - DNA, 1032 bp, Escherichia coli
atgattcggttgtacccggaacaactccgcgcgcagctcaatgaagggctgcgcgcggcgtatcttttacttggtaacgatcctctgttattgcaggaaagccaggacgctgttcgtcaggtcgctgcggcgcaagggttcgaagaacaccacactttttccattgatcccaacaccgactggaatgcgattttttcgttatgccaggccatgagcctgtttgccagtcgacaaacgctattgctgttgttacccgaaaacggaccgaatgcggcgatcaatgaacaacttctcacactcaccggacttctgcatgacgatctactgttgatcgtccgcggtaataaattaagcaaagcgcaagaaaatgccgcctggtttactgctcttgcgaatcgcagcgtgcaggtgacctgtcagacaccggagcaggctcagctgccccgctgggttgctgcgcgcgcaaaacagctcaacttagaactggatgacgctgcaaatcaggtgctctgctactgttatgaaggtaacctgctggcgatggcccaggcactggagcgtttatcgctactctggccggacggcaaactgacattaccgcgcgttgaacaggcggtgaatgatgccgcgcatttcaccccttttcattgggttgatgctttgttgatgggaaaaagtaagcgcgcgttgcatattcttcaacaactgcgtctggaaggcagcgaaccggttattttgttgcgcacattacaacgtgaactgttgttactggttaacctgaaacgccagtctgcccatacgccactgcgtgcgttgtttgataagcatcgggtatggcagaaccgccggggcatgatgagcgaggcgttaaatcgcttaagccagtcgcagttacgtcagaccgtgcaactcctgacacgaacggaactcaccctcaaacaagattacggtcagtcagtgtgggcagagcttgaagggttatctcttctgttgtgccataaacccctggcggacgtatttatcgacggttga

SEQ ID NO: 309 - DNA, 582 bp, Escherichia coli
gtgcgatatctggcaacattgttgttatctctggcggtgttaatcaccgccgggtgtggctggcatctgcgtgacaccacgcaggttccttccactatgaaggtcatgatcctggactcaggcgatccgaacgggccattaagccgtgcggtgcgtaatcagttacgtctgaatggtgtcgagttgcttgataaagaaaccacgcgtaaggacgttccatccttgcgtttgggtaaagtgagcatcgcgaaagataccgcatcggtattccgtaacggtcaaacagcagagtatcagatgatcatgacggtgaatgcgaccgtgttgatccccggccgtgatatctacccgattagcgccaaagtcttccgttcgttcttcgataacccgcaaatggcgttagcgaaagataacgaacaagacatgatcgtaaaagagatgtacgaccgtgctgccgaacagctgattcgtaagctgccaagcatccgtgctgcggatattcgttccgacgaagaacagacgtcgaccacaacggatactccggcaacgcctgcacgcgtctccaccacgctgggtaactga

SEQ ID NO: 310 - DNA, 2583 bp, Escherichia coli
atgcaagagcaataccgcccggaagagatagaatccaaagtacagcttcactgggatgagaagcgcacatttgaagtaaccgaagacgagagcaaagagaagtattactgcctgtctatgcttccctatccttctggtcgactacacatgggccacgttcgcaactacaccatcggtgacgtgatcgcccgctaccagcgcatgctgggcaaaaacgtcctgcagccaatcggctgggacgcatttggtctgcctgcggaaggcgcggcggtgaaaaacaacaccgcgccagcaccgtggacgtacgacaacatcgcgtatatgaaaaaccagctcaaaatgctgggctttggttatgactggagccgcgagctggcgacctgtacgccggaatactaccgttgggaacagaaattcttcaccgaactgtataaaaaaggcctggtatataagaagacttctgcggtcaactggtgcccgaacgaccagaccgtactggcgaacgaacaagttatcgacggctgctgctggcgctgcgataccaaagttgagcgtaaagagatcccgcagtggtttatcaaaatcactgcttacgctgacgagctgctcaacgatctggataaactggatcactggccagacaccgttaaaacaatgcagcgtaactggatcggtcgttccgaaggcgtggaaatcaccttcaacgttaacgactatgacaacacgctgaccgtttacactacccgcccggacacctttatgggttgtacctacctggcggtggctgcgggtcatccactggcacagaaagcggcggaaaataatcctgaactggccgcctttattgacgaatgccgtaacaccaaagttgccgaagctgaaatggcgacgatggagaaaaaaggcgtcgatactggctttaaagcggttcacccattaacgggcgaagaaattcccgtttgggcagcaaacttcgtattgatggaatacggcacgggcgcagttatggcggttccgggtcacgaccagcgcgactacgagtttgcctctaaatacggcctgaacatcaaaccggttatcctggcagctgacggctctgagccagatctttctcagcaagccctgactgaaaaaggcgtgctgttcaactctggcgagtttaatggtcttgaccatgaagcggccttcaacgccattgccgacaaactgactgaaatgggcgttggcgagcgtaaagtgaactaccgcctgcgcgactggggtgtttctcgtcagcgttactggggcgcgccgattccgatggtgacgctggaagacggtaccgtaatgccgaccccggacgaccagctgccggtgatcctgccggaagatgtggtgatggacggcattaccagcccgattaaagcagatccggagtgggcaaaaactaccgttaacggtatgccagcgctgcgtgaaaccgacactttcgacacctttatggagtcctcctggtactatgcgcgctacacttgcccgcagtacaaagaaggtatgctggattccaaagcggctaactactggctgccggtggatatctacattggtggtatcgaacacgccattatgcacctgctctacttccgcttcttccacaaactgatgcgtgatgcaggcatggtgaactctgacgaaccagcgaaacagttgctgtgtcagggtatggtgctggcagatgccttctactatgttggcgaaaacggcgaacgtaactgggtttccccggttgatgctatcgttgaacgtgacgagaaaggccgtatcgtgaaagcgaaagacgcggcaggccatgaactggtttataccggcatgagcaaaatgtccaagtcgaagaacaacggtatcgacccgcaggtgatggttgaacgttacggcgcggacaccgttcgtctgtttatgatgtttgcttctccggctgatatgactctcgaatggcaggaatccggcgtggaaggggctaaccgcttcctgaaacgtgtctggaaactggtgtacgagcacacagcaaaaggtgatgttgcggcactgaacgtcgatgcgctgactgaagatcagaaagcgctgcgtcgcgatgtgcataaaactatcgctaaagtaaccgatgatatcggccgtcgtcagaccttcaacaccgcaattgcggcgattatggagctgatgaacaaactggcgaaagcaccgaccgatggcgagcaggatcgcgccctgatgcaggaagcgctgctggcggtagtccgtatgcttaacccgttcaccccgcacatctgcttcacgctgtggcaggaactgaaaggcgaaggcgatatcgacaacgcgccgtggccggttgctgacgaaaaagcgatggtggaagactccacgctggtcgtggtgcaggttaacggtaaagtccgtgcaaaaatcaccgttccggtggacgcaacggaagaacaggttcgcgaacgtgctggccaggaacatctggtagcaaaatatcttgatggcgttactgtacgtaaagtgatttacgtaccaggtaaactcctcaatctggtcgttggctaa

SEQ ID NO: 311 - DNA, 483 bp, Escherichia coli
atgaacaaggttgctcaatattaccgtgaactggtcgcgtcactgagcgaacgcctgcgcaatggcgaacgtgatatcgacgcactggtggaacaggcgcgcgagcgcgtaataaaaacaggggagttaacgcgaaccgaggtcgatgagctgacgcgagctgtcagacgtgacctggaagagttcgccatgagctatgaagagagcctgaaagaagagtctgacagcgtctttatgcgggtgattaaagaaagcttgtggcaggagctggcagacatcaccgataaaacgcagcttgaatggcgcgaagttttccaggacctcaatcatcatggggtttatcacagcggagaagtggtagggctgggaaatctagtctgcgagaaatgtcacttccatctcccgatctatacaccggaagtgctgacgctatgcccgaaatgtggtcatgatcagttccagagacgtccgttcgagccgtaa

SEQ ID NO: 312 - DNA, 936 bp, Escherichia coli
atggcactgccaattctgttagattgcgacccaggtcatgacgacgctatcgcaatcgttctcgccctcgcctcaccagagcttgatgtcaaagcaattacgtcttccgccggaaaccagacaccagaaaaaaccttacgcaatgttctgcgtatgctgaccttgcttaatcgcaccgatattccggtagcaagcggtgcggtaaaaccgttaatgcgtaatttgattattgcggacaacgtgcacggcgaaagcggtctcgacggcccggcattaccggaaccgacgttcgcaccgcaaaactgtacggcggtggagctgatggcgaaaacgctgcgtgaaagtgaggaacctgtcaccattgtttctaccggaccgcaaactaacgttgccttgctgctcaatagccacccggaactgcatagcaaaattgcccgtatcgtgattatgggcggcgcaatggggcttggtaactggacgcctgcggctgaatttaatatttacgttgacccggaagcggcagaaattgtcttccagtcaggaattccggtggtgatggccggtctggatgttactcacaaagcacaaattcacgttgaggacaccgagcgtttccgcgccattggcaaccctgtttcaaccattgttgccgaactgctggatttcttcctcgaatatcataaagacgaaaaatggggttttgtcggcgcaccgctgcatgacccatgcaccatcgcctggttgttgaaaccggagttgtttaccactgttgagcgctgggttggcgtggaaacacaggggaaatatacccagggtatgacggttgttgattattattatctgactggcaataaaccgaatgccaccgtaatggtcgatgttgatcgtcagggctttgttgatttactggctgatcgtctgaaattttacgcttaa

SEQ ID NO: 313 - DNA, 726 bp, Escherichia coli
atgattaccctgaaaaatgtttcaaaatggtatggtcactttcaggtgctgaccgactgctcaaccgaagtgaaaaaaggcgaagtggtggtggtttgcggcccgtctggttcaggcaaatcaacgctgattaaaaccgtcaacggcctcgaaccggtgcagcaaggtgaaatcaccgtcgatggcatcgtggttaacgacaagaaaaccgatctggcgaaactgcgttcccgcgtcgggatggtgtttcagcatttcgagctgttcccccatctgtcgattatcgaaaacctgaccctggcgcaggtgaaagtgcttaaacgcaataaagcgccggctcgtgaaaaagcattgaaattgctggagcgcgtcgggctttccgcacatgccaataagtttccggcgcagctttccggcggccagcagcagcgtgtggcgatcgctcgcgcattgtgcatggatcctattgccatgctgttcgacgaaccaacgtcggcgctggatccggagatgatcaacgaagtgctggacgtgatggtcgaactggcgaacgaaggaatgacgatgatggtggtgacccacgaaatgggctttgcccgtaaagtggcgaatcgggtgatctttatggacgagggtaaaattgtcgaagactcgccgaaagacgctttcttcgatgatccgaaatcggaccgcgcaaaagacttcctcgcaaaaatcctgcattaa

SEQ ID NO: 314 - DNA, 675 bp, Escherichia coli
atgtacgagtttgactggagttccattgttccttccctgccatatctgctcgacgggctggtgatcacgctgaaaatcaccgtcacggcagtggtgattggtattttgtggggcaccatgctggcggtgatgcgcttgtccagctttgcgcccgtagcgtggtttgccaaagcctacgttaacgtattccgctcgattcctttagttatggttttgctgtggttttacctgatcgtaccgggttttctgcaaaacgtgctgggattatcacccaaaaatgatatccgtttaatttcggcgatggtggcgttttcgatgtttgaagcggcctactattcagagattatccgtgctggtattcaaagtatttctcgtggtcagtcgagcgccgcgctggcgttgggaatgactcactggcagtcgatgaaactgattattctgccgcaggcgttccgcgcgatggtgccgctgttgctcactcagggcatcgtactgtttcaggatacctcactggtgtatgtgttatctctggccgatttcttccgtaccgcctcaaccattggtgagcgtgatggtacgcaggttgagatgatcctgtttgccggatttgtttatttcgttattagccttagcgcgtcgttgttggtcagctacttgaaaagaaggacagcataa

SEQ ID NO: 315 - DNA, 741 bp, Escherichia coli
atgtctatagactggaactggggtatttttttacaacaagccccgttcggcaacaccacctatcttggttggatctggagtggttttcaggtgacgatcgctttgtcgatctgcgcctggattatcgctttcctcgtcggttcatttttcggcattttacgtaccgttccaaaccgttttctctccggtctgggtacgttgtatgtcgaactgttccgcaacgtgccgttgattgtgcaattctttacctggtacctggtgatcccggagctgctgccagagaaaatcggcatgtggtttaaggcagagctggatcccaatattcagtttttcctttcatccatgctctgcctggggctgtttaccgccgcccgtgtttgcgaacaggtacgcgcagctattcagtcgctgccgcgtgggcaaaaaaatgccgcgctggcgatgggtctgacgctaccgcaggcctaccgctacgtactgctgcctaatgcttatcgcgttatcgtcccgccgatgacctcagagatgatgaacctggtgaaaaactccgccatcgcctcgactatcggtctggtggatatggcggcgcaggcgggtaaattgctcgattactcggcccacgcctgggagtcgtttaccgccattacgctggcgtatgtattgattaacgcttttatcatgctggtgatgacgctggttgaacgtaaagttcgcctgcccggcaacatggggggcaaataa

SEQ ID NO: 316 - DNA, 909 bp, Escherichia coli
atgcaattacgtaaacctgccacagcaatcctggccctggcgctttccgcaggactggtacaggcagatgacgccgccccggcagcaggcagcacgctggacaaaatcgccaaaaacggcgtgattgtcgtcggtcaccgtgaatcttcagtacctttctcttattacgacaatcagcaaaaagtggtgggctactcgcaggattactccaacgccattgttgaagcagtgaaaaagaaactcaacaaaccagacttacaggtgaaattgattccgatcacctcacaaaaccgtattccactgctgcaaaacggcactttcgattttgaatgcggttctaccaccaacaatgccgaacgccaaaaacaggcggctttctctgacactattttcgtggtcggtacgcgcctgctgaccaaaaagggcggcgatatcaaagattttgccgacctgaaaggcaaagccgtagtcgtcacttccggcaccacctctgaagttttgctcaacaaactgaatgaagagcaaaaaatgaatatgcgcatcatcagcgccaaagatcacggtgactctttccgtaccctggaaagcggtcgtgccgttgcctttatgatggatgatgccctgctggccggtgaacgtgcgaaagcgaagaaaccagacaactgggaaatcgtcggcaagccgcagtctcaggaagcctacggttgcatgttgcgtaaagacgatccgcagttcaaaaagctgatggatgacactatcgctcaggtgcagacctccggtgaagcggaaaaatggtttgataaatggttcaaaaacccaattccgccgaaaaacctgaacatgaatttcgaactgtcagacgaaatgaaagcactgttcaaagaaccgaatgacaaggcactgaactaa

SEQ ID NO: 317 - DNA, 1878 bp, Escherichia coli
atgtctgcatcttcggttaagccgttaaatgttcaattacccgcaataaccctgatcctttttgcgctctgtgttgggatattttgttacctcgcacaatggatgagttacgaagaagtcgatcaatccgcactcatccatctcggcgctaacgttgcttctctcacgttgtcggatgaatcctggcgcttattgagcagtgtttttctgcacagtagtttttcccatttgctgatgaatatgtttgcactcctggcggtggggacagtagcggaacggatactggggaaatggcgactcctgattatctggttattctccggcatctttggtgggctgatcagcgcctgttatgcgttacgcgaaagtgagcagatagtcatcagcgttggggcatccggggcaattatgggaatagcgggcgctgcgatagcaacacagcttgcttcaggtgcgggcacacaccataaaaaccagcggcgagtatttcctctgttgggtatggtggcgctgacactgttgtatggtacccggcaaacaggaatagataacgcttgccacattggcggcctgattgcggggggcgcgttgggttggctgagtgcgcgtttagttgggcaaaatcggctcgttacggaaggcgggattattgttgcggtcactcttcttctgaccgggactatctggtttgtgcagcagcagattgatgaatcagttttacaggtcaggcaaagcctgcgtgaagcgttttatccgcaggagattgaacaagagcgacgacaaaaaaagcagcagttagtggaggagcgcaacgccctcagggaaacattatccgctccggtaagtcgtgagcaggccagtggtgatttactcgctgagattgccgatatccatgatatggcgatcagtcgggatggtaatacgttgtatgccgcaattgaaaacacgaacagcattgttgttttcgacctcggacaaaagaaaatcctgcatacctttacagcgcccatagcgaaagaaaagtcagtcaaacattgtggtggctgtaaagatcagggcgtcagatcgctggcattaagcctggatgaaaagttgatttatgcgacttcatttgaagcgaatgcgttatcggtcattaacgtggcgacgggggagattattcagtcgattaccaccggcgcacatcctgacagctttatcctctcgcgtgatggcacaaaagcctgggtgatgaatcgcaccagcaatagtgtgtcagcgattgatctggtggcttatcagcatgtggcggatatcccgctggagaaatacgacgggacggggatgagcggtaaacctggcgcctgggttatggcactttccccggatgaaaaaacattactggttccgggagcaggcagaggtaacatcgtgcggatcaataccatcacgcatcagaaagaagactttcccgcaggtgatgcgcgtggtgtcgtttctgcgatgggattccgaccaaaaaatggtgaggttatttttgccgatagccaggggatttcacgtataagagctgaggatcaacaagccagcattatgacgcaatggtgtagcaggagcgtttattccgttgagggtattagcccggacggtcagtatttagcgttggtgtcatatggcctgcaaggttatgtcatcctgctcaatattaatgccgggcagattattggcgtttatcccgccagctacgttaataatcttcgtttttcagcggatggtagaaagatatttgttatggcgaagaacaggttaatccaaatggacaggacgcgctcgcttgatccgcaggcaattattcggcatccccaatatggcgatgtggcttgtatccctgaaccgtaa

SEQ ID NO: 318 - DNA, 1539 bp, Escherichia coli
atggcttttgcctcattaattgaacgccagcgcattcgcctgctgctggcgttattattcggtgcctgcggaacgctggccttctctccttacgacgtctggcctgcggcgattatttcgctgatggggcttcaggcgttgacctttaaccgccgtccactccagtctgctgctattggcttttgctggggatttggcctctttggcagcggtattaactgggtctatgtcagcatcgcgacctttggcggaatgcctggcccggttaacatcttcctggtggtactgctggcggcgtatttgtcgctgtataccggactgtttgctggcgtgctgtcgcgtctgtggccgaaaaccacctggctgcgcgtggcgattgccgcccctgctctctggcaagtgaccgagtttctgcgcggttgggtactaacaggcttcccgtggttacagttcggctatagccagattgatggcccgttaaaagggctggcaccgataatgggcgtggaagccattaacttcctgctgatgatggttagcggcctgctggcactggcgttggtcaaacgcaactggcgtccgctggtggtggccgtcgtgctgtttgcccttcccttcccgctgcgttacatccagtggtttaccccgcaaccggaaaaaactattcaggtttcgatggttcagggcgatattccgcaatcgctgaaatgggacggagaccagctacttaatacgctgaagatttactacaacgcaacggcaccgctgatgggcaaatcatcgctgattatctggccggagtcggcgataaccgatctggaaattaatcagcaaccgttcctcaaagctctggacggtgagttgcgcgataaaggtagctcgctggtcaccgggattgtcgacgcgcgtctcaataaacagaaccgctacgatacctacaacaccatcatcacactgggtaaaggcgcaccgtacagctatgaatcagccgatcgctataacaaaaaccatctggtgccgtttggcgagtttgtcccactggagtcgatactgcgtccgttagcaccgttctttgatttgccgatgtcgtcattcagccgcggaccatatattcagccaccgctgtcggtaaatggcattcaacttactgcggccatttgctacgaaatcattctcggcgagcaagtgcgcgataacttccgcccggataccgactatctgctgactatctccaacgatgcgtggtttggtaagtctattggtccatggcagcacttccagatggcgcgaatgcgtgcgctggagctggcgcgcccactgttgcgcagcaccaacaacggcattacggcggtgattggcccgcagggtgagattcaggcgatgatcccgcagttcacccgcgaggtgttaaccactaacgtaacgccgaccaccggactcaccccgtacgcacgtaccggcaactggccgctgtgggtgctgacggcgctgtttggttttgccgctgtactgatgagtctgcgtgctcgcaaacgttaa

SEQ ID NO: 319 - DNA, 879 bp, Escherichia coli
atgagcgacgacaattcacacagtagtgacacgataagcaacaagaagggatttttctccctgttactcagccaacttttccacggtgaaccgaaaaaccgtgacgaactgctggcgctgatccgtgattccgggcagaacgaccttatcgacgaagatacgcgcgatatgctcgaaggggtgatggacatcgcagaccaacgcgttcgcgacatcatgatcccccgctcccagatgattaccctgaaacgcaaccagacgctggacgaatgccttgatgtcatcattgagtccgcccactcacgtttcccggtgattagcgaagacaaagatcacattgaagggattctgatggcgaaagacttgctgccgtttatgcgcagcgatgctgaagccttcagcatggacaaagtgttacgtcaggcggttgtcgttcctgaaagtaagcgcgtagaccggatgctgaaagagtttcgctctcagcgttaccacatggcgatcgtcattgacgaattcggtggggtttccggtctggtgaccattgaagacatcctggaactgattgttggtgagattgaagacgagtatgacgaagaagatgatatcgacttccgtcagctgagtcgtcatacctggaccgtgcgcgcactggcttctattgaagacttcaacgaagcgttcggcacccactttagcgatgaagaggttgacactatcggtggtctggtgatgcaggcatttgggcatcttccggcgcgtggcgaaaccatcgacatcgacggttaccagttcaaagtggcgatggccgacagtcggcgtattattcaggttcatgtcaaaatcccggatgactcaccccagccgaagctggatgaataa

SEQ ID NO: 320 - DNA, 468 bp, Escherichia coli
atgagtcaggtgatcctcgatttacaactggcatgtgaagataattccgggttaccggaagagagccagtttcagacatggctgaatgcggtgatcccgcagtttcaggaagaatcggaagtgactattcgcgtggtcgataccgccgaaagccacagtctgaatctgacctatcgcggtaaggataagccgaccaacgtgctctccttcccgtttgaagtaccgcctggcatggaaatgtcgctactgggcgatctggttatctgccgtcaggtggttgagaaggaagctcaggagcaaggcaaaccactggaggcgcactgggcgcatatggtggtgcacggcagtctgcatttgttaggttacgatcacatcgaagatgacgaagcagaagaaatggaagccatcgaaacagagattatgcttgctctgggctatgaggatccgtacattgccgagaaagaataa

SEQ ID NO: 321 - DNA, 1080 bp, Escherichia coli
atgttcagcttccggcggcatacagataagaggaacggtttgaacatagacactcgcgaaatcaccctggagccagcagacaatgcgcgtctgttgagcctgtgcggcccgtttgatgacaacatcaaacaactcgaacgccgtctcggcatcgaaatcaatcgccgtgataaccactttaaactgaccggccgtccgatttgcgtcaccgctgcggcagacattctgcgtagcctgtatgtcgatactgccccgatgcgcggtcagattcaggatatcgaaccggaacagatccaccttgcgattaaagaagcgcgggtactggagcaaagcgcggagagcgtgccggagtacggcaaagcggtcaatatcaaaaccaaacgcggcgtaattaagccgcgcacgccaaaccaggcgcagtacatcgccaatattctcgaccatgacattaccttcggcgttggcccggcgggtacgggtaaaacctacctggcagtggctgcggcagttgatgccctggagcgtcaggaaattcgccgtattctgctgactcgtccggcagtagaagccggtgagaaactgggcttcctgcctggcgatttaagccagaaagtagacccgtatctgcgcccgctgtacgacgcgctgtttgaaatgctgggctttgagaaagtcgagaaactgattgagcgcaacgttattgaagtcgcaccgctggcctatatgcgtggtcgtacgctgaacgacgcgtttatcattcttgatgaaagccagaacaccaccatcgaacagatgaagatgttcctgacccgtatcggttttaactcaaaagcggttatcaccggcgacgtcacacagatcgacctgccgcgtaataccaagtctggtttgcgtcatgccatcgaagtgctggccgatgtcgaagagatcagctttaacttcttccacagcgaagacgtggttcgtcacccggtggtggcgcgtatcgttaacgcctatgaagcctgggaagaagccgaacaaaaacgtaaagcggcgctggcagcagaacgcaagcgcgaagaacaggaacaaaaatga

SEQ ID NO: 322 - DNA, 1425 bp, Escherichia coli
atgaccaaaaaactccatattaaaacctggggctgtcagatgaacgagtacgattcatcgaagatggccgatctgctggatgccacccacggctatcaactgaccgacgtggcggaagaagcggatgtgctgctgctgaacacctgctcaatccgcgagaaggctcaggaaaaagtcttccatcagttgggtcgctggaaactgttaaaagagaagaatccagacctgattatcggcgtcggcggttgcgtggcatcgcaagaaggcgagcacattcgccagcgcgcccactatgtcgatattatttttgggccgcaaacgctgcaccgcctgccggagatgatcaactccgtgcgcggcgaccgcagcccggttgtagatatcagcttcccggaaatcgagaagtttgaccgtctaccagaaccgcgcgccgaagggccgaccgcgtttgtctccatcatggaaggctgcaataaatattgcacctactgcgtagtgccttacacccgtggtgaagaggtaagccgtccgtccgacgatattctgtttgagattgcccagcttgctgctcagggcgtgcgtgaagttaacctgctcggccagaacgtgaacgcctggcgcggtgagaactacgacggcaccaccggatcgtttgccgatctgctgcgtctggttgcggcgatcgacgggatcgatcgtattcgctttaccaccagccatccgatcgaattcaccgacgatatcatcgaagtgtaccgcgacacgccggagctggtgagcttcctgcatctgccggtacagagcggttccgatcgcattctgaacctgatgggacgtacccatacggcgctggagtacaaagcgatcatccgtaaactgcgtgcggcgcgcccggatattcagatcagctctgacttcatcgtcggcttccctggcgaaaccaccgacgacttcgagaaaacgatgaagctgattgccgacgtcaatttcgacatgagctacagctttatcttctctgcacgtccgggtacaccagccgccgatatggttgatgatgttccggaagaagagaagaagcagcgtctgtatattctgcaagagcgcattaatcagcaagcgatggcatggagccgccggatgctcggcaccacccagcgcattctggtagaagggacttcacgtaagagcatcatggagctttccggtcgcactgaaaataaccgcgtggttaacttcgagggcacgccggatatgatcggtaaattcgtcgatgtagaaattaccgacgtctacccgaactctctgcgcggtaaagtggtgcgaactgaagatgaaatgggtctgcgcgtggcagaaacaccggaatcggtgattgcccgtacccgcaaagaaaacgaccttggcgtgggttattatcagccgtaa

SEQ ID NO: 323 - DNA, 1176 bp, Escherichia coli
atgacaaatcaaccaacggaaattgccattgtcggcggaggaatggtcggcggcgcactggcgctgggactggcacagcacgggtttacggtaacggttattgaacatgcccagcctgcgccgtttgttgcggacagccagccggacgtgcggatctcggcgatcagcgcggcttcggtatcattgcttaaaggggtaggggtctgggatgcagtacaggctatgcgttgccatccttaccgcagactggaaacgtgggagtgggaaacggcgcatgtcgtgtttgacgccgctgaacttaagctaccgttgcttggctacatggtggaaaacactgtcctgcaacaggcgttgtggcaggcgctggaagcgcatccgaaagtaacgttacgtgtgccaggctcgctgattgcactgcatcgccataatgatcttcaggagctggaactgaagggcggtgaaacgatcctcgcgaagctggtgattggtgccgacggcgcaaattcgcaggtgcgacagatggcgggaattggcgttcatgcctggcagtatgcgcagtcgtgtatgttgattagcgtacagtgtgagaacgatcccggcgacagcacctggcagcaatttaccccggacggaccgcgtgcgtttctgccgttgtttgataactgggcatcgctggtgtggtatgactctccggcgcgcattcgccagttgcagaatatgaatatggcgcagctacaggcggaaatcgcgaagcatttcccgtcgcgtctgggttacgtgacaccgcttgccgctggtgcgtttccgctgatacgtcgccatgcgttgcagtatgtgcaaccagggcttgctctggtgggcgatgccgcgcataccatccatccgctggcgggacagggagtgaatcttggttatcgtgatgtcgatgccctgattgacgttctggtgaacgcccgcagctacggcgaagcgtgggccagttatcctgtgctcaagcgttaccagatgcggcgtatggcggataacttcatgatgcaaagtggtatggatctgttttatgccggattcagcaataatctgccaccgctgcgttttgtgcgtaatcttggtttgatggcggcggagcgtgctggcgtgttgaaacgtaaggcgctgaaatatgcgttagggttgtag

SEQ ID NO: 324 - DNA, 1665 bp, Escherichia coli
atgtgttcaatttttggcgtattcgatatcaaaacagacgcagttgagctgcgtaagaaagcactcgagctgtcacgcctgatgcgtcatcgtggcccggactggtccggtatttatgccagcgataacgccattctcgcccacgaacgtctgtcaattgttgacgttaacgcgggggcgcaacctctctacaaccaacaaaaaactcatgtgctggcagtaaacggtgaaatctacaaccaccaggcattgcgcgctgaatatggcgatcgttaccaattccagaccgggtctgactgtgaagtgatcctcgcgctgtatcaggaaaaagggccggaatttctcgacgacttgcagggcatgtttgcctttgccctgtacgacagcgaaaaagatgcatatctgattggtcgcgaccatctggggatcatcccactgtatatgggctatgacgaacacggtcagctgtatgtggcctcagaaatgaaagccctcgtgccagtttgccgcacgattaaagagtttccggcggggagctatttgtggagtcaggacggcgaaatccgttcttattatcatcgcgactggttcgactacgatgcggtgaaagataacgtgaccgacaaaaacgagctgcgtcaggcactggaagattccgttaaaagccatctgatgtctgatgtgccttacggtgtgctgctttctggtggtctggattcctcaattatttccgctatcaccaagaaatacgccgcccgtcgcgtggaagatcaggaacgctctgaagcctggtggccgcagttgcactcctttgctgtaggtctgccgggttcaccggatctgaaagcagcccaggaagtggcaaaccatctgggcacggtgcatcacgaaattcacttcactgtacaggaaggtctggatgccatccgcgacgtgatttaccacatcgaaacctatgatgtgaccactattcgcgcttcaacaccgatgtatttaatgtcgcgtaagatcaaagcgatgggcattaaaatggtgctgtccggtgaaggttctgatgaagtgtttggcggttatctttacttccacaaagcgccgaatgccaaagaactgcatgaagagacggtgcgtaaactgctggccctgcatatgtatgactgcgcgcgtgccaacaaagcgatgtcagcctggggcgtggaagcacgcgttccgttcctcgacaaaaaattccttgatgtggcgatgcgcattaacccacaggataaaatgtgcggtaacggcaaaatggaaaaacacatcctgcgtgaatgttttgaagcgtatctgcctgcaagcgtggcctggcggcaaaaagagcagttctccgatggcgtcggttacagttggatcgacaccctgaaagaagtggcagcgcagcaggtttctgatcaacagctggaaactgcccgcttccgcttcccgtacaacacgccgacctcaaaagaagcgtatctgtaccgggagatctttgaagaattgttcccgcttccgagcgccgctgagtgcgtgccgggcggtccttccgtcgcttgttcttccgctaaagcgattgagtgggatgaagcgttcaagaaaatggacgatccgtctggtcgcgcggttggcgttcaccagtcggcatataaataa

SEQ ID NO: 325 - DNA, 753 bp, Escherichia coli
atgaccattaaaaatgtaatttgcgatatcgacggcgtgctgatgcacgataacgtcgccgtaccgggtgcagcggaatttttgcacgggattatggataaaggcctgccgctggtgttgctgaccaactatccttcgcagaccgggcaagatctggcgaatcgctttgccactgccggtgtcgatgtaccggatagcgtgttttatacctccgcgatggcgaccgccgattttctgcgtcgccaggaaggcaagaaagcgtatgtggtgggcgaaggcgcactgattcatgaactgtacaaagccggtttcactattaccgatgtgaaccctgattttgtgattgttggcgaaacgcgttcctacaactgggacatgatgcataaagcagcctatttcgtcgctaacggtgcacgctttatcgccaccaacccggacacccacgggcgcggtttttatcccgcctgtggcgcgttgtgtgcagggatcgagaaaatctccgggcgcaaaccgttctatgttggaaagccgagtccgtggatcatccgcgcggcattaaacaaaatgcaggcgcattcggaagaaacggtgattgtcggcgataacttgcgtaccgatattctggcgggcttccaggccggtctggagacgattctggtgctttctggtgtttcgtcgctcgacgatatcgacagtatgccgttccgcccaagttggatttacccatcggtcgctgaaatcgacgttatctga

SEQ ID NO: 326 - DNA, 1221 bp, Escherichia coli
atgacaccaggcggacaagctcagataggtaatgttgatctcgtaaaacagcttaacagcgcggcagtttatcgcctgattgaccagtacgggccaatctcgcggattcagattgccgagcaaagtcagcttgcccccgccagcgtaaccaaaattacgcgtcagcttatcgaacgcgggctgatcaaagaagttgatcagcaggcctccaccgggggccgccgcgctatctccatcgtcaccgaaacccgcaatttccacgcaatcggcgtacggcttggtcgtcacgacgccaccatcaccttgtttgatctcagcagcaaagtgttggcagaagaacattacccgttgcctgaacgcactcagcaaacgctggaacatgccctgcttaacgcgattgctcagtttattgatagctaccagcgcaaactacgcgagctgatcgcgatttcggtgatcctgccagggcttgtagacccggacagcggcaaaattcattacatgccgcatattcaggtagaaaactgggggctggttgaagcactggaagagcgttttaaagtgacctgttttgtcggccacgatatccgcagtctggcgctggcagagcactacttcggtgcaagtcaggattgcgaagactccattctggtgcgtgtccatcgcggaaccggggccgggattatctctaacgggcgaatttttatcgggcgcaacggcaacgtcggtgaaattggccatattcaggtcgaaccgctgggtgaacgctgccactgcggcaactttggctgcctggaaactatcgccgccaatgctgccattgaacaacgggtgttgaatctgttaaagcagggctaccagagccgtgtgccactggacgactgcaccatcaaaactatctgcaaagccgcgaacaaaggcgatagcctggcctcggaagtgattgaatatgtcggtcgtcatctgggtaaaaccatcgccattgctatcaacttatttaatccgcaaaaaattgttattgctggagaaatcaccgaagccgataaagtgctgctccctgctattgaaagctgcattaatacccaggcgctgaaggcgtttcgtactaatctaccggtggtacgttctgagttggatcaccgctcagcaatcggcgcttttgcgctggtaaaacgcgccatgctcaacggtattttgctccagcatttgctggaaaattaa

SEQ ID NO: 327 - DNA, 1149 bp, Escherichia coli
atgtatgcattaacccagggccggatctttaccggccacgaatttcttgatgaccacgcggttgttatcgctgatggcctgattaaaagcgtctgtccggtagcggaactgccgccagagatcgaacaacgttcactgaacggggccattctctcccccggttttatcgatgtgcagttaaacggctgcggcggcgtacagtttaacgacaccgctgaagcggtcagcgtggaaacgctggaaatcatgcagaaagccaatgagaaatcaggctgtactaactatctgccgacgcttatcaccaccagcgatgagctgatgaaacagggcgtgcgcgttatgcgcgagtacctggcaaaacatcagaaccaggcgttaggtctgcatctggaaggtccgtggctgaatctggtaaaaaaaggcacccataatccgaattttgtgcgtaagcctgatgccgcgctggtcgatttcctgtgtgagaacgccgacgtgattaccaaagtgactctggcaccggaaatggttccagcggaagtcatcagcaaactggcaaatgccgggattgtggtttctgctggtcactccaacgcgacgttgaaagaagcgaaagccggtttccgcgcggggattacctttgccacccatctgtacaacgcgatgccgtatattaccggtcgtgaaccgggcctggcgggcgcgatcctcgacgaagctgacatttattgcggtattattgctgatggcctgcatgttgattacgccaacattcgtaacgctaagcgtctgaaaggcgacaaattgtgtctggttaccgatgccaccgcgccagcaggtgccaacattgaacagttcatttttgcgggtaaaacaatatactaccgtaatggactttgtgtggatgagaacggtacgttaagcggttcatccttaaccatgattgaaggcgtgcgtaatctggtcgaacattgtggtatcgcactggatgaagtgctgcgtatggcgacgctctatccggcacgtgcgattggcgttgagaaacgtctcggcacgctcgccgcaggtaaagtagccaacctgactgcattcacacctgattttaaaatcaccaggaccatcgttaacggtaacgaggtcgtaactcaataa

SEQ ID NO: 328 - DNA, 801 bp, Escherichia coli
atgagactgatccccctgactaccgctgaacaggtcggcaaatgggctgctcgccatatcgtcaatcgtatcaatgcgttcaaaccgactgccgatcgtccgtttgtactgggcctgccgactggcggcacgccgatgaccacctataaagcgttagtcgaaatgcataaagcaggccaggtcagctttaagcacgttgtcaccttcaacatggacgaatatgtcggtctgccgaaagagcatccggaaagctactacagctttatgcaccgtaatttcttcgatcacgttgatattccagcagaaaatatcaaccttctcaacggcaacgccccggatatcgacgccgaatgccgccagtatgaagaaaaaatccgttcttacggaaaaattcatctgtttatgggcggtgtaggtaacgacggtcatattgcatttaacgaaccggcgtcttctctggcttctcgtactcgtatcaaaaccctgactcatgacactcgcgtcgcgaactctcgtttctttgataacgatgttaatcaggtgccaaaatatgccctgactgtcggtgttggtacattgctggatgccgaagaagtgatgattctggtgctgggtagccagaaagcactggcactgcaggccgccgttgaaggttgcgtgaaccacatgtggaccatcagctgtctgcaactgcatccaaaagcgatcatggtgtgcgatgaaccttccaccatggagctgaaagttaagactttaagatatttcaatgaattagaagcagaaaatatcaaaggtctgtaa

SEQ ID NO: 329 - DNA, 1947 bp, Escherichia coli
atgaatattttaggttttttccagcgactcggtagggcgttacagctccctatcgcggtgctgccggtggcggcgctgttgctgcgattcggtcagccagatttacttaacgttgcgtttattgcccaggcgggcggtgcgatttttgataacctcgcattaatcttcgccatcggcgtggcatccagctggtcgaaagacagcgcaggtgcggcggcactggcgggtgcggtaggttactttgtgttaaccaaagcgatggtgaccatcaacccagaaattaacatgggtgtactggcgggtatcattaccggtttggttggtggcgcagcctataaccgttggtccgatattaaactgccggacttcctgagcttcttcggcggcaaacgctttgtgccgatcgccaccggcttcttctgtctggtgctggcggccatttttggttacgtctggccgccggtacagcacgctatccatgcaggcggcgagtggatcgtttctgcgggcgcgctgggttccggtatctttggtttcatcaaccgtctgctgatcccaactggtctgcatcaggtgctgaacaccatcgcctggttccagattggtgaattcaccaacgcggcgggaacggttttccacggtgatatcaaccgcttctatgccggtgacggcaccgcggggatgttcatgtccggcttcttcccgattatgatgttcggtctgccgggtgcggcgctggcgatgtacttcgcagcaccgaaagagcgtcgtccgatggttggcgggatgctgctttctgttgctgttactgcgttcctgaccggtgtgactgagccgctggaattcctgttcatgttccttgcaccgctgctgtacctcctgcacgcactgctgaccggtatcagcctgtttgtggcaacgctgctgggtatccatgccggcttctctttctctgcgggggctatcgactacgcgttgatgtataacctgccggccgccagccagaacgtctggatgctgctggtgatgggggttgtcttcttcgctatctacttcgtggtgttcagtttggttatccgcatgttcaacctgaaaacgccgggtcgtgaagataaagaagacgagatcgttactgaagaggctaacagcaatactgaagaaggtctcaatcaactggcaaccaactatattgctgcggttggcggtactgacaacctgaaagccattgacgcctgtattactcgtctgcgccttaccgtggttgactcagctcgcgtcaacgatgcgatgtgtaaacgtctgggtgcttctggggtagtgaaactgaacaaacagactattcaggtgattgttggcgcgaaagcagaatccatcggcgatgcgatgaagaaagtcgttgcccgtggtccggtagccgctgcgtcagctgaagcaactccggcaactgccgctcctgtagcaaaaccgcaggctgtaccaaacgcggtatctatcgcggagctggtatcgccgattaccggggatgttgtggcactggatcaggttcctgacgaagcattcgccagcaaagcggtgggtgacggtgtggcggtgaaaccgacagataaaatcgtcgtatcaccagccgcaggaacaatcgtgaaaatcttcaacaccaaccacgcattctgtctggaaaccgaaaaaggcgcggagatcgtcgtccatatgggtatcgacaccgtagcgctggaaggtaaaggctttaaacgtctggtggaagagggcgcgcaggtaagcgcagggcaaccgattctggaaatggatctggattacctgaacgctaacgctcgctcgatgattagcccggtggtttgcagcaatatcgacgatttcagcggccttatcattaaagctcagggccatgttgtggcgggtcaaacaccgctgtatgaaatcaaaaagtaa

SEQ ID NO: 330 - DNA, 1281 bp, Escherichia coli
atgacaatggaaatgatcctggcattaggaatactggtcctgatgatcgtgctgatcatgtcggacaaaatgccttttggcgcaccgccactgcttgcgtgtttattgctggttgtatcgggactttcgaccgttcaacaggcttttgccggattcgtcaatccaagcgtggtgatgattgcagggtttatggtggtcatggcggcgctacaaaaaacccggcttatcagcaacgttaaatctgcgatgataagcctggtcaataaaggcagttaccgcagctatgggctgttgttagtcattgttatgctgggtgccagtcttgccggcaccggagcgaccggttattacgtgctaattctgtcgctggtatccaccattccgtacagtaaaaagctaccaacatcgaaattaatgatgcccctgggatttgccaccaaccacccgcttcttcctatcaatctcgcgcttctctttggcgttacggcgaccgtactcgaaaccgcggggtttcatcaggagatttcgatggggcgctttgcgctggtgaatctcatcatgtcagcggctttcctcgcatggagtcttattgcctaccgttttcttccggatcatcccattgcggatgcttccgaggatgcgctggcggcacgcgaggaaacgtttaacgcccttcctgcctggaaagaatattgcactattgccgcattcgctgtcagcgttatcggcatgatgctaatgaacattctgggaaatatcgccttcgttattccgggtcttgcgggtgcgtttgttctgatgatcgatgtactggacttcaaagaagttcgcgatcatatgggggctccggtcattttaatgatggcgggggtgatcggtgtagctgatgcactggcgggcaccggctttacggcgatggttggcgatgccgttgcaggtgtgctcggttctggcgtctcaccgtttgtatttattgtcgcctttgctttgcttaccagtacctgcgccaccttcacgggttcgaatatggggtcagtatatatttttgcccccatcgccattgccgcctgtactagccttgggcttaacccgaccgctgccgcgattgcggtggtgatttctggctggaatggcggctatatgcctattgacggaatgccagccatgatcctcggaatggggaaatacaaacttcccgaattctgggtgttctctgtaccaatgtatctcatccgcattctggcgctttgtgcaggcgctgtttttatcttcccaatgtaa

SEQ ID NO: 331 - DNA, 471 bp, Escherichia coli
atgattatcggtaatctcaaccatttgtcgctggcggggcttcctgcctgggtgagaaatattctgctgcgcccggagtgttcgttatcggcgttatccaccagagaggacggtcgctggcaacctgaaggatgtcggtggttctgcacgctgggaacttcagacacgcaacccgccgaactccgccatacggagtatcaccatttatgggccgatatacaggtggtgattactggttgtgagggcattaatgcgggaacgcggcccatcgctcgcgaaaacgatgaagaacgtaagcccgatctgtttatcgccccatcccctgaaaacagtgtcgccatcaccctacacgccggtgatttcgccgtctttatgcctgaggaacctcaccaggcgctgtgcgcaattggcacggctacttcaatacgcaaagcggtctttaaagtaccgcgcgacatgctggaagcctaa

SEQ ID NO: 332 - DNA, 1170 bp, Escherichia coli
atgtctgtagcccttattcgtgacggcgtcatccgtccatccgaaaacgattcgcatgtgcttaccgccatgctgccctcgtcctgcccgcaaaaccacgcggcgaatattctgcctttgccggatggcgcgttaatgtgcgtctggtttgcgggaacgcaggaaggtattgccgatatttctgtctggggatcgcgattgcccgctggcgggatgcagtggagcgatgcggtcaaactttcccacgatgacacgcgttcagagcaaaacccagtgctgtttctcgcgccggataacgtgctgtggctgctatggaccgcacaaatatccggtaatcaggacacggccatcgtccgctaccgtaagtcagacgaccttgggcaaacctggggcgagattgccaccctgctcgataaacccggcacgttcattcgccagccgatcacggtgcttgataacggtaactggctgcttcccgtcttttattgccgtacccaacccggcgaaaaatgggtcggcaatgatgatatcagcgcagtgaaaatttccgctgacggtggtcactcatggcgcgatgtcgaggtgccgcaaagtctcggctgcgttcatatgaatattacaatgctgcacgacggtacgttggttgctctctttcgcagccgttgggcagacaacatctatatcagccattcagtggacaacggcgagagttggtcggtgccgcaagcaaccgaattgcccaacaacaattcgtctattcaggtaacgacgcttgccagcggcgaactggcgctggtgtacaacgcgatgagtgcggcaggcgcagtagaacgtcgcgcgtcgctttatgacgaaatcgacgatggcgacgacagccgcaaagaaccgacagccgtcggacgctccgctttctggggggccccacgcgcgccgatgacggtagcgatttctgccgatggtgggaaaagctggccgtggcggcgcaatctcgatgaaggcgacggctactgcatgaccaacaattccctggaaaagctaaatcgtgagttctcctaccccagcatcaaacaaagcccggacggtacgctacatatcgcttacacctggtggcgtcaggccatcaagtacgtacgcatctcccccgagtgggttaaggggcaggcatcatga

SEQ ID NO: 333 - DNA, 759 bp, Escherichia coli
atgtttttgtggtttatgcagccagatatctggctcactttaattaccctcacctttctggaaattattcttggggtggataatattatttttctttcactggtggtggcaaaacttccgttatcacaacaaaatatggcgcgtaaactgggtttaagctgcgcgatgattatgcggatattattgctgatatccattgcgtggctttcacatattacccagccgctttttaccgtgctgacgctggagatttcgttccgcaccttgattctgctcgggggcgggctgttcctgatttataaagcgatacaggagatacgcgaagagctgtcgcccgcgcaggaagacgaacatggcagcggatcgcggcaactgtcgttgtgcggtgccattgtacagataatgctgctcgatatcgtgtttagcctggattcggtgatcaccgccgtcggcctttctcagcatatatttatcatgattgccgccgtaatgattgccgtcggtgtcatgatgtttgcggcgaaaacaattggtgatttcgttaacgccacgccgtcaataaaaatactggcgttaacctttttattgtttgtcggtgtattgctggttgccgatagtctcaacattcatattgccaaagagtatctctacttcgcgatatttttctcattaagtgttgagacactcaatattatccgtgaaagaaaaaataaaaaagtttcgacattgatcgaaacgcatgaatcgcactcgcattaa

SEQ ID NO: 334 - DNA, 888 bp, Escherichia coli
atgccgaaaaccattgaaggtgtattaaccgctatcgtcaccccgtttaccgcgaccggcagtctgaatatcccggcgttaaaagtgcaggtgaatcgtcaactggaagcgggtaacgcgattttttgcggcggcaccaacggcgagttttttgtgttgaatgaacaggagaagctcagcgttacgcaaacctgcgtggatgaagtggctggtcgtgcgccggtcgtggcacacattggcgagatctctacgcgcgaaacgattcgtctgggtcagcagattgaaaaacttggcgtagatgccgtgtcggtcattgccccttacttcgtaccgctgaaacaggaagagttgattgcgcattacagcgcaattgccgacgcactgagcattccgatgtttctctataacatcccggcccgcactggcaatacgatccagccagaaaccgcgcgtgctctggcgtcgcaccccaatatcattgggattaaagacagcgccggaagcgacgaaagcctgaagggttttctcgatgcggtgcgcgacattgacggctttaatgtgctcaacggcccggattcgctgatccataaagggtttgtcgagggatgttcagcctgtatctctgggctcgccaacatcgcgccgcgagaaatcaatgccatctggtctcgcttccatgccagtgatattgaagggtcttatgaagcacaggagagtgtaacgggcctgcgtaccgatctttataaagtagcattctccccggctgcggtgaaaaaagcgttgcagcttatggggcatgatgttggtgatagccgctacgcggttaatttcacgcctgaacagatcagcgagattcaacaaattattcgtcattataacattaattaa

SEQ ID NO: 335 - DNA, 1158 bp, Escherichia coli
gtggtaattatcaatagcacgatactgagcggcgcaggcgctatcccttccctgacgtcgctcttacccgacatcagaaaaatgctgctggtcactgaccgtaatattgcgcagctcgacggtgtgcagcagattcgcgccttactggaaaagcactgcccgcaggttaacgttatcgataatgtgcccgcagagcccacgcatcatgatgtgcgccagctaatggatgcccttggcgatgcctcttttgatgtggtggtcgggatcggcggtggcagcgtgttggatgtggcgaagctgctatcggtgctttgccatccacaatcaccggggctggatgcgctgcttgcgggtgaaaaaccgactcagcgggtgcaatcatggttgattcctacaaccgccggaaccggctcagaagccacgccgaatgcgattctggcaatccctgagcaaagcacgaaggtgggtattatttcccaggtgctgttaccagactatgtggcgcttttcccggaactgaccaccagcatgcccgcgcatattgcggcgtccacgggcattgatgctctttgccacttactggagtgttttaccgcgaccgtggcaaatccggtcagcgataacgtggcgctgactggtttaagtaaacttttccggcacattcaacccgccgtgaacgatcctcaggatctgcgcgcaaaactggaaatgctgtgggcgtcttactatggcggcgtagcgataacccatgcgggcacgcatctcgttcatgcgctctcctacccgttaggtggcaaatatcatctgccgcatggcgtcgcgaatgccatcttgctggcgccgtgcatggcgtttgttcgcccctgggcggtcgagaaatttgcccgggtctgggattgcattcccgatgcggaaaccgccctgagcacggaagaaaaatctcatgccctggtgacctggttacaggcattagtccatcaactcaagctacccaacaatctcgcggatctcggcgtaccgccagaggatattgcctctcttagcgaggcggcactgaacgtgaagcgccttatgaacaatgtgccgtgccagcttgatctacaggacgtacaggccatttaccaaacactgtttccgcaacatcaatttaaggaataa

SEQ ID NO: 336 - DNA, 1236 bp, Escherichia coli
atggaaaagggaatcactaagccgagcattctcgtcgttgccgatgatttcacgggagccaacgacgcgggggtaagcctggcgcaggtggggcatacagttgatgtggcctttgaaatgcattatcgcggtgatgccagcgtatgggtgattaacagcgacagccgggcgatggatcctaagctggcggcgatgaaaataacctcgctgatgagtcatctccctctggcgaataatccgccgctcgtgattaaaaagatagattccacgctgcgaggcaatatcggcgcagaaattgaagccctgatgaaggcatgcggtataacgggcgcagtggttgcccccgcatttcctcaggcgggaaggaccacagtggccggtgagtgttgggtaaacggtgtgcggataacggaaaccgagtttgccagcgatccgaaaaccccggtattgagcgcccgaattgcggacatcatccggttgcagacggccattccatgccagcccgttacggtttctcagctcagccatttgtcttatgagcaaccgtggattagcgtgatagatgcgcagacggacagcgacctggatcgcatcgctgccgctgtgatgcaggctaaacaaccgctgctgctggtcggctccgctggtatttgtgatgccgttgcccggcgctccgcgattatgccgccacccaccgtgctggccattattggttcaatgagcgaaatcgctcaacggcagatcgccacacttcattcacacccacgtatcacacagatatacgtcgatgttgaacacattctggcaggcaatgccagtgactatgacgcgcgtattgtgcaggccttgcagaaaggcgaccactgcattgtccacacctgtaacgattctgtagcaaggcatcagatcgacaccctttgccagcgttggcagatgagtcgcgctgcacttggggaaaaaatttgccggtttcttggcgaacttacccggcaagttctgcttcgcacaatgcccgatgcgctttatctctctggtggtgatgtcgcaatggcaacagccagtgcgttaggcgcgaccggatttcgtattacggggaaggtggcgcaatgcgttccatacggtcactttctgggcggtgtctggtcccgttcggtgatgacgaaagccggtgggtttggcgatgagaccacgttgcatcaggttctgaattttatcgaggagaagtgtagtgaataa

SEQ ID NO: 337 - DNA, 987 bp, Escherichia coli
gtgaataatattattgcggtaacgatgggtgacccggcgggtattggcccggagatcattattaaatccctgagcgaagccgggcttgctggtgccccggtggtggtggtgggctgtgtgcgcacgctgcgacgtattatggcgatgaatatcacgccgcaggcagagttacgcgtcattcaaaaggtgtgcgacgcccattttgctcccggcgtgattaacgtgatggatgagccgctggctaaccccgatgcgctgacacccggagtggtacaggctgcggcaggcgatttagcgtatcgctgtatcaaacgtgcaacggctctggccttatcaggcgaggttaaagccatagccactgcgccgctgaataaagaagcgctgcatcttggcgggcataactatccggggcatacggaattgctggcccatcttaccggcagcaaagagtacgcgatggtgctctataccgataagctcaaggttatccatatttcgactcacatctcactgcgtaaattcctggatactttgaatggtgaaagggtcaaaacggttattcgagttgcgaaccacttcctgaaacgtgttggtattgagcgtccgcgtattgccgtggcgggtgtaaatccacatgcaggggaacatggtttattcggcactgaggaaatcgagattatcgcgcctgcgattgaagcaatgcaggccgaagatattgatgttactggcccgtgcccgccagataccgtgtttatgcaatgccatgaagggctattcgatatggtagtggctatgtaccacgatcaggggcatatccctttaaaactgcttggattttatgatggggtgaatatcaccgccgggttgccatttattcgcacttctgccgaccacggcaccgcgtttgatattgcctggacaggaaaagccaagtctgagagcatggcagtttccatccagttagcaatgcagatttcgcgagaataa

SEQ ID NO: 338 - DNA, 762 bp, Escherichia coli
atgaagggatataaccggttagagcagatcatggattacctgaaaagccataatctggtcaccgttgatgagctggtggcggtaaccaatgcgtcgccggctacgattcgtcgagacctgataaaactcgatgagcagggtgttatcagccgtacacacggcggtgtgaccctcaaccggtttattcctacccaaccgactacccatgagaaaatgcagcgcagcctggcggaaaaacatgccatcgccagcgcagcggcgtcaatggtcaaagcgggggattccgtcgtccttgatgccggtacgacaatgattgaacttgcgcggcagattacacatttaccgcttcgcgtgatcaccagcgacctgcatatcgcgctttttttggctgaattcaagcagattgaagtgacgattatcggtggacgtatcgacgactccagccagtcctgcattggcgaacatggtcgtaaattgctgcaaaatacctggccggacgtggcatttttaagctgtaacagctgggatcttgaaaagggtattacagcacccacggaagagaaagccgcactaaaacgcgatcttatcgcgcatgcttcgcgcaaaattctcctggctgacagctcaaaatacggttcatggtcgctgtttaatatcgcgcatcttaatgaactgacagagattattacggataatcagcttgatgggcagacgcgtagaacgcttgcgtccttatcgacgcgtttaatcatagccgattaa

SEQ ID NO: 339 - DNA, 1665 bp, Escherichia coli
atgagtgaggcagaagcccgcccgactaactttattcgtcagatcatcgatgaagatctggccagtggtaagcacaccacagtacacacccgtttcccgccggagccgaatggctatctgcatattggccatgcgaaatctatctgcctgaacttcgggatcgcccaggactataaaggccagtgcaacctgcgtttcgacgacactaacccggtaaaagaagatatcgagtatgttgagtcgatcaaaaacgacgttgagtggttaggttttcactggtctggtaacgtccgttactcctccgattattttgatcagctccacgcctatgcgatcgaactgatcaataaaggcctggcgtacgttgatgaactgacaccggaacagatccgcgaataccgcggtaccctgacgcagccgggtaaaaacagcccgtaccgcgaccgcagcgttgaagagaacctggcgctgttcgagaaaatgcgtaccggcggttttgaagaaggtaaagcctgcctgcgtgcgaaaatcgacatggcgtcgccatttattgtaatgcgcgatccggtgctgtaccgcattaaatttgctgaacaccaccagactggcaacaagtggtgcatctacccgatgtacgacttcacccattgcatcagcgatgcgctggaaggtattacgcactctctgtgtacgctggagttccaggacaaccgtcgcctgtacgactgggtgctggacaacatcacgattcctgttcacccgcgccagtacgaattctcgcgcctgaatctggaatacactgtgatgtccaagcgtaagctgaacctgctggtgaccgacaagcacgttgaaggctgggatgacccgcgtatgccgaccatttccggtctgcgtcgtcgtggttacactgcggcttctattcgtgagttctgcaaacgcattggtgtgaccaagcaggacaacaccattgagatggcgtcactggaatcctgcatccgtgaagatctcaacgaaaatgcgccgcgcgcaatggcggttatcgatccggtgaaactggttatcgaaaactaccagggcgaaggcgaaatggttaccatgccgaaccatccgaataaaccggaaatgggcagccgccaggtgccatttagcggtgagatttggatcgatcgcgccgatttccgcgaagaagctaacaagcagtacaaacgtctggtgctgggtaaagaagtgcgtctgcgtaatgcttacgtcattaaggctgaacgcgtggagaaagatgccgaaggcaatatcaccaccatcttctgtacttatgacgccgacaccttaagcaaagatccggcagatggtcgtaaagtcaaaggtgttattcactgggtgagcgcggcacatgcgctgccggttgaaatccgtttgtatgaccgtttgttcagcgtgccgaaccctggtgctgcggatgatttcctgtcggtgattaacccggaatcgctggtgatcaaacagggctttgctgaaccgtcgctgaaagatgcggttgcgggtaaagcattccagtttgagcgtgaaggttacttctgcctcgacagccgccattctacggcggaaaaaccggtatttaaccgcaccgttgggctgcgtgatacctgggcgaaagtaggcgagtaa

SEQ ID NO: 340 - DNA, 1407 bp, Escherichia coli
atgcgtgcgtttagtggcaaacgtagtacgctggcgctggctatcgccggtgttacagctatgtcgggctttatggcaattccggaggctcgcgccgaaggattcatcgacgattcaaccttaaccggcggtatctattactggcagcgtgaacgcgaccgtaaagatgttaccgacggtgataaatacaaaaccaacctttctcactccacctggaacgccaacctcgattttcagtctggttatgctgctgatatgttcggccttgatattgccgcgtttacggcgattgaaatggcggaaaacggcgacagctctcacccgaacgaaatcgcgttttcaaaaagtaataaagcctatgacgaagactggtccggcgataaaagcggtataagcctgtataaagcagcggccaaatttaaatacggtccggtttgggcgagggcaggttatattcagccaaccggtcagacgctgttagcgccacactggagctttatgccgggtacttatcagggggcggaggccggggcgaattttgattacggcgatgctggtgcgttgagtttctcctacatgtggaccaacgaatacaaagcaccgtggcatctggaaatggatgagttttatcagaacgataaaaccaccaaagttgattatctacactcccttggggcgaagtacgacttcaaaaataacttcgtactggaagcggcgtttggtcaggccgaagggtatatcgatcaatattttgccaaagccagctacaaatttgatatcgccggtagcccgttaaccaccagctaccagttctatggtacgcgcgataaagttgacgatcgcagcgtcaacgatctttatgacggcaccgcctggctgcaggcgttgacctttggttaccgggcggctgacgtagtggatttgcgcctcgaaggtacctgggttaaggctgacggtcagcaaggatacttcctgcaacgtatgactccaacctacgcttcctcgaacggtcgcctggatatctggtgggataaccgttctgacttcaacgccaacggcgaaaaagcgatcttcttcggtgcgatgtatgacctgaaaaactggaatcttccaggcttcgccatcggcgcttcctacgtttacgcatgggatgctaaacctgcgacctggcagagcaatccggatgcgtactacgataaaaaccggactattgaagagtctgcctacagcctggatgcggtgtacaccattcaggacggtcgcgccaaaggcacgatgttcaaactgcacttcaccgaatacgacaaccactccgacatcccaagctggggcggtggttacggcaacatcttccaggatgagcgtgacgtgaaatttatggtaatcgcaccattcaccatcttctga

SEQ ID NO: 341 - DNA, 327 bp, Escherichia coli
atgaaaaaactgattctcatcgccatgatggcaacggggctggtagcttgtgcgcaatcaaccgcaccgctggaagacagccgtctgaaagaggcttacagcgcctgtatcaacaccgcgcaaggttcgccggaaaaaattgaagcctgccagagcgtgttaaacgtgctgaagaaagagaaacaacatcagcagtttgccgagcaggaaagtgtccgcgtactggattatcagcagtgtattcaggcaacgcaaaccggaaatgatcaggcggtgaaagccgattgtgataaggtctggcaggaaattcgcagtaataacaaataa

SEQ ID NO: 342 - DNA, 447 bp, Escherichia coli
atgactgataacaataccgccctaaagaaagctggcctgaaagtaacgcttcctcgtttaaaaatcctggaagttcttcaggagccggacaaccatcacgtcagtgcggaagatttatacaaacgtctgatcgatatgggtgaagaaattggtctggctacggtatatcgcgtactgaaccagtttgacgacgctggtatcgtcacccgccacaattttgaaggcggtaaatccgtatttgaactgacacagcaacatcaccacgatcacctgatctgcctcgactgcggtaaggttatcgaatttagtgatgattccatcgaagcgcgtcagcgtgaaatcgccgcaaaacatggcattcgcctgactaaccacagtctctatctttacggtcactgtgccgaaggcgattgccgcgaagatgagcacgcgcacgaaggcaaataa

SEQ ID NO: 343 - DNA, 531 bp, Escherichia coli
atggctatcactggcatctttttcggcagcgacaccggtaataccgaaaatatcgcaaaaatgattcaaaaacagcttggtaaagacgttgccgatgtccatgacattgcaaaaagcagcaaagaagatctggaagcatatgacattctgctgctgggcatcccaacctggtattacggcgaagcgcagtgtgactgggatgacttcttcccgactctcgaagagattgattttaatggtaaactggttgcgctgtttggttgtggcgaccaggaagattacgcagaatacttctgcgatgcattgggcaccatccgcgacatcattgaaccgcgcggcgcaactatcgttggtcactggccaaccgcgggctaccacttcgaagcgtcaaaaggtctggctgatgatgaccactttgtcggtctggctatcgacgaagatcgtcagccggaactgaccgctgaacgtgtagaaaaatgggttaaacaaatttctgaagagctgcatctcgacgaaattctcaatgcctga

SEQ ID NO: 344 - DNA, 363 bp, Escherichia coli
atgtattatggcgcgctatccatccgggcaggcgcctggctgattgtttcccccgaagtcaccaagatcatggccaaagaacaaacggaccgtacgacattagatctgttcgcgcacgagcgtcgaccgggacgaccgaaaactaatccgctttcgcgcgatgagcagctgcgtattaataaacgcaaccaactaaaacgcgacaaagtacgtggccttaagcgtgtcgaactgaagctgaacgcggaagctgtcgaggcactgaacgagctggcggaatcgcgcaatatgagccgtagcgagctgatcgaagagatgttaatgcagcaactggcggcgctgcgtagtcagggcatcgtttaa

SEQ ID NO: 345 - DNA, 765 bp, Escherichia coli
atgaaattgaatatccgcgcgcaaactgcacaaaaccagcacaataattctcccatcgttcttgtccatggtctgtttggcagcctcgacaaccttggcgtactggctcgcgatctggtaaacgatcacaatatcatccaggttgatatgcgtaaccacggtctttcaccgagagatccggtaatgaattacccggcgatggcgcaggatcttgttgataccctggatgcacagcagatcgacaaagcaacatttatcggtcactccatgggcggtaaagcggtaatggctcttactgcactagcccccgatcgcattgacaagctggtggcgattgatattgcgccggtcgattatcacgttcgccgtcatgatgagattttcgcggccatcaacgcagtcagtgaatcagacgcacaaacacgccagcaagcagcggcaataatgcgccagcatcttaatgaagaaggggtgattcagtttctgttgaaatcttttgttgacggggagtggcgctttaacgtgccagtattgtgggatcagtatccgcatattgtgggttgggagaaaatcccggcatgggatcatcctaccctgtttatccctggcggcaattctccgtatgttagcgagcagtaccgtgatgatttactggcacaatttccacaggctcgggcgcatgtgattgcaggcgcaggtcactgggtccatgctgaaaaaccggatgcggtattacgcgctatccgtcgctatctcaatgattaa

SEQ ID NO: 346 - DNA, 546 bp, Escherichia coli
atgaaaacgattgaagttgatgatgaactctacagctatattgccagccacactaagcatatcggcgagagcgcatccgacattttacggcgtatgttgaaattttccgccgcatcacagcctgctgctccggtgacgaaagaggttcgcgttgcgtcacctgctatcgtcgaagcgaagccggtcaaaacgattaaagacaaggttcgcgcaatgcgtgaacttctgctttcggacgaatacgcagagcaaaagcgagcggtcaatcgctttatgctgctgttgtctacactatattctcttgacgcccaggcgtttgccgaagcaacggaatcgttgcacggtcgtacacgcgtttactttgcggcagatgaacaaacgctgctgaaaaatggtaatcagaccaagccgaaacatgtgcctggtacgccgtattgggtgatcaccaacaccaacaccggccgtaaatgcagcatgatcgaacacatcatgcagtcgatgcaattcccggcggaattgattgagaaggtttgcggaactatctaa

SEQ ID NO: 347 - DNA, 1641 bp, Escherichia coli
atggcaatccacaatcgtgcaggccaacctgcacaacagagtgatttgattaacgtcgcccaactgacggcgcaatattatgtactgaaaccagaagcagggaatgcggagcacgcggtgaaattcggtacttccggtcaccgtggcagtgcagcgcgccacagctttaacgagccgcacattctggcgatcgctcaggcaattgctgaagaacgtgcgaaaaacggcatcactggcccttgctatgtgggtaaagatactcacgccctgtccgagcctgcgttcatttccgtactggaagtgctggcagcgaacggcgttgatgtcattgtgcaggaaaacaatggcttcactccgacacctgccatttccaatgccattctggttcacaataaaaaaggtggcccgctggcagacggtatcgtgattacaccgtcccataacccgccggaagatggtggtatcaagtacaatccgccaaatggtggcccggctgataccaacgtcactaaagtggtggaagacagagcaaacgcactgctggctgatggcctgaaaggcgtgaagcgtatctccctcgacgaagcgatggcatccggtcatgtgaaagagcaggatctggtgcagccgtttgtggaagggctggccgatatcgttgatatggcggcgattcagaaagcgggcctgacgctgggcgttgatccgctgggtggttccggtatcgaatactggaagcgcattggcgagtattacaacctcaacctgaccatcgttaacgatcaggtcgatcaaaccttccgctttatgcacctcgataaagacggtgcgatccgtatggactgctcctccgagtgtgcgatggcgggcctgctggcactgcgtgataagttcgatctggcgtttgctaacgacccggattatgaccgtcacggtatcgtcactccggcaggtttgatgaatccgaaccactacctggcggtggcgatcaactacctgttccagcatcgtccgcagtggggcaaagatgttgctgtcggtaaaacgctggtttcatctgcgatgatcgaccgtgtggtcaatgatttgggccgtaagctggtagaagtaccggtaggtttcaaatggtttgttgatggtttgttcgatggcagcttcggctttggcggcgaagagagtgcaggcgcttccttcctgcgtttcgacggcacgccgtggtccaccgataaagacggcatcattatgtgtctgctggcggcggaaatcaccgctgtcaccggtaagaacccgcaggaacactataacgaactggcaaaacgctttggtgcgccgagctataaccgtttgcaggcagcagcgacttccgcacaaaaagcggcgttgtctaagctgtctccggaaatggtgagcgccagcaccctggcaggtgacccgatcaccgcgcgtctgacggcggcaccgggtaatggcgcttctatcggcggtctgaaagtgatgactgacaacggctggttcgccgcgcgtccgtcaggcacggaagacgcatataagatctactgcgaaagcttccttggtgaagaacatcgcaagcagattgagaaagaagcggttgagattgttagcgaagttctgaaaaacgcgtaa

SEQ ID NO: 348 - DNA, 1320 bp, Escherichia coli
atgagtcaggcgaaatcgaacaaaatgggtgtcgttcagttaaccatactgacgatggtcaacatgatgggctccggtatcatcatgctgccgacaaagcttgccgaagtcgggacaatctcaattatctcctggctggtgacagccgtaggctcaatggcactggcatgggcattcgcaaaatgcggtatgttcagccgtaaatcaggaggtatgggcggttatgccgagtatgctttcggtaaatccggtaactttatggcgaactatacctacggcgtctcgctgctgattgctaacgtcgcgattgctatttcggcggttggttacggcaccgaactgctcggcgcgagtttgtcgccagtgcagattggtcttgcgaccatcggggtgctgtggatttgtaccgtggctaactttggtggtgcgcgcattaccgggcaaatcagtagcattaccgtgtggggggtcattattccggtggtaggcctgtgcattatcggctggttctggtttagcccgacactttacgttgattcctggaatccacatcatgcccccttcttcagtgcggtaggttcttccatcgctatgacgctgtgggcttttcttggtctggagtctgcgtgtgcgaatactgatgtagtggaaaacccggaacgtaatgtgccaatcgcggtactcggcggtacgttaggtgcggcggtgatttatatcgtctccaccaacgtgattgccgggattgtgccaaatatggagctggcaaattcaacggcaccatttggtctggccttcgcgcagatgttcacgccggaagtgggtaaagtcattatggcgctgatggtgatgtcctgctgcggttcgctgcttggctggcagttcaccattgcccaggtgtttaaatcttcatctgatgaaggctacttccctaaaattttctcccgtgtaaccaaagtggatgcaccggtgcagggaatgttgaccattgtgattatccagagcgggttggcgctgatgacgattagcccgtcgctaaacagtcagttcaacgtgctggttaacctggccgtggtgaccaatatcattccgtatattctgtcaatggcggcattagtcattattcagaaggtcgctaatgtgcccccctcaaaagcgaaagttgcaaactttgttgcttttgttggcgcgatgtacagcttttatgcgctgtactcatccggggaagaagccatgctatacggttccatcgtgaccttcctcggttggacactgtatggtctggtctcaccacgctttgaactgaaaaataaacacggttaa

SEQ ID NO: 349 - DNA, 2199 bp, Escherichia coli
atgtcagaattaaaaattgccgttagccgttcttgcccggattgtttttccactcatcgtgaatgcgtgaacattgacaaaagtaattatattgacgttgccgccattattttatcagtcaatgatgttgaacgtggaaaactcgatgaaatagacgctactggctatggcattcctgtttttattgcaacggaaaatgaagaacgtgtaccagcagaatatctgccacgtatttctggtgtcttcgagcattgcgaatcacggaaagagttttatggacgtcagttagaaaccgctgccagccattatgaaacgcaactgcgcccgcccttcttccgcgcactggtcgattatgtcaatcagggcaatagcgcttttgactgcccgggtcatcagggaggtgagtttttccgtcgccatccggcaggcaatcagttcgtggaatattttggcgaaatgctcttccgctccgacttgtgtaatgccgacgttgcaatgggcgatctactgattcatgaaggtgcgccatgtattgcacaacagcatgcggctaaagtctttaatgccgataaaacctatttcgttttaaacggtacttcatcttctaataaagtggtcttaaacgcattgctgacgccgggcgatctggtgttgtttgaccgcaataaccataaatctaaccaccacggtgcgttgctacaggctggtgcgacaccggtttatctggaaaccgcacgtaacccgtatggttttatcggtggtattgacgctcactgttttgaagaaagttacctgcgtgagctgattacagaagttgcaccgcagcgggcaaaagaggctcgtcctttccgcctcgccgttattcagctaggcacttacgacggtacgatttataacgcccgtcaggtggtggataaaattggtcatctgtgtgactacatcctctttgactccgcatgggtcggctatgagcagtttatcccgatgatggcggactgttcaccgctgttactggatctaaatgagaacgatccgggtattctggttacgcaatccgtacataaacaacaggctggtttttctcaaacttcacaaatccataaaaaagacagccacatcaaagggcaacagcgttatgtaccacacaaacgcatgaacaacgcctttatgatgcacgcctccaccagcccgttctatccgctgtttgccgcactagatatcaacgccaaaatgcatgaaggtgtcagcggtcgtaatatgtggatggattgtgtggtaaatggcattaatgcccgcaagctgatcctcgataactgtcagcatattcgtccgttcgtacctgaacaggtggatggtaaaccctggcagtcgtatgaaacagcgcaaattgcggttgatctgcgcttctttaaatttgtacccggtgagcactggcattcttttgaaggctacgcagagaaccaatactttgtcgatccgtgcaaactgttgctgacaactccaggtattgatgcacgtaacggcgaatatgaagcgttcggtgtacctgcaacgattcttgctaacttcctgcgcgaaaatggcgtagtgccggaaaaatgcgatcttaactccatcctcttcctgctgactccggcagaagatatggccaaactgcagcaacttgttgccctgctggtacgcttcgaaaaactactggaagctgatgcgcccctggcggaagtactgccttccatctacaaacagcatgaagagcgttacgccggttataccctgcgtcagttgtgccaggaaatgcatgatttgtatgcccgccacaacgtgaaacaactgcaaaaagagatgttccgtaaggaacacttcccacgcgtcagcatgaatccgcaagaagccaactacgcctacttacgcggtgaagtggagctggttcgtctgccggatgcagaaggccgtatcgctgccgaaggtgcgcttccttatcctccgggtgtgctgtgtgttgttcctggtgaaatctggggtggtgctgttttgcgttacttcagcgctctggaagaaggcatcaacctgctgccaggttttgcaccggagctgcagggtgtctatatcgaagaacatgatggtcgtaagcaagtttggtgctatgtcatcaagcctcgtgatgcgcaaagcaccctgttgaaaggggaaaaattatga

SEQ ID NO: 350 - DNA, 678 bp, Escherichia coli
gtgacaaacgttctgattgttgaagatgaacaggctattcgtcgctttctgcgcacggcgctggagggcgacggtatgcgcgtctttgaggccgaaacactgcaacgcggcttgctggaagcggcaacccgtaagccagatttgattattctcgatctcggcctgcccgacggtgatgggattgagtttatccgcgacctgcgccagtggagcgcggtgccggtgattgtgctttccgcacgcagcgaagagagcgataaaatcgccgcgctggatgccggagcggatgattatctgagtaagccgtttggcattggcgaattgcaggcccgtctgcgcgtcgcattacgccgccactccgccaccaccacgcccgatccgctggtgaaattttctgatgttaccgtcgatttagccgcccgcgttatccaccgcggcgaggaagaggtgcatctcacaccgattgagttccgcctgctggccgtgctgctcaacaacgccggaaaagtgctcacccagcgccagttactcaatcaggtgtggggaccaaacgcggtcgaacacagccactatttgcgtatttatatggggcatctgcgacaaaaactggagcaagatcccgcccgcccccgccattttattactgaaaccggtattgggtatcggtttatgccatga

SEQ ID NO: 351 - DNA, 2685 bp, Escherichia coli
atgaataacgaacccttacgtcccgaccccgatcgtctgctggaacaagctgccgcgccgcatcgggggaagctgaaagttttcttcggtgcctgcgcaggcgtcgggaagacctgggcgatgctggcggaagcccagcgactgcgggcgcaagggctggatattgtggttggcgtggtagaaacccacggtcggaaagataccgccgcaatgctgaaaggtctggctgttctgccgttaaaacgccaggcgtaccgtgggcggcacatcagcgagtttgatctcgatgccgccctcgcccgccgtccggcactgatcttaatggacgaactggcgcacagtaatgcgccaggttcacgtcatcctaaacgctggcaggacattgaggagctgctggaagctggcattgatgttttcactaccgtcaacgttcagcatctggaaagtctgaatgatgtggtcagcggcgtcaccggaattcaggtacgggagaccgtgcccgatcctttttttgatgccgccgacgacgtggtgctggtggacttgcccccggacgatctgcgccagcgactgaaagaaggcaaagtctatattgccgggcaggcggagcgcgccattgaacattttttccgcaaaggtaatctgatcgccctgcgcgaactggcactgcgccgtactgccgatcgcgtagatgagcaaatgcgcgcctggcgggggcatcctggcgaagagaaagtctggcacacacgcgacgcgatcctattatgcatcgggcataacaccggcagtgagaaactggtccgcgcggcggcgcggttggcctcgcgcctgggcagtgtctggcacgcggtgtatgttgaaacccctgccctgcatcgcttaccggagaaaaaacgtcgggcaattctcagcgccttacgtctggcgcaggagctgggcgcggagacggcaacactttctgatccagcggaagaaaaagcggtagtgcgttatgcccgtgaacataatctcggcaagattattctcggtcgcccggcttcgcgccgctggtggcgtcgggaaacatttgctgaccggctggcacgcatcgcccccgatctcgatcaggtgctggttgcgcttgatgaaccacccgcccgcacgattaacaacgcgccggatagccgctcttttaaagacaagtggcgggtacagattcagggatgcgtggttgccgccgcgttatgcgccgttatcaccttaattgccatgcagtggctgatggcgtttgatgccgccaacctggtgatgctgtatctgcttggcgtcgtggtggtggcactattttacggacgctggccttcggtggttgccaccgtcattaatgtggtgagtttcgatctcttttttatcgccccacgcggcacgctcgccgtctctgatgtgcaatatctgctgaccttcgcggtgatgttaaccgtcgggctggtgatcgggaaccttactgctggcgtgcgttatcaggcgcgggtagcccgttaccgcgaacaacgcacacggcacttatatgaaatgtccaaagctctggctgtgggccgtagttcgcaggatatcgccgccaccagcgaacagtttattgcctccacgtttcatgcccgtagccaggtgttgctgcctgatgacaacggtaaattgcagcctttaacacatccgcaaggaatgacgccgtgggacgatgccatcgcgcagtggagttttgataaaggcctgcctgcgggcgcgggcaccgacacgttacccggtgtaccgtaccagattttgccgctaaaaagcggcgagaaaacctacggactggtggtggtggaaccggggaatctgcgccagttgatgatcccggaacagcagcgcctgctggagacgtttacgctgttagtcgccaatgcccttgagcggctgacactgaccgccagcgaagaacaggcgcggatggcaagcgaacgtgaacagatccgcaacgccctgctggcggcactttcgcatgatttacgcacgccgcttacggtgctgttcggtcaggcagaaatcttaacgctcgatctggcaagcgaaggatcgccccacgcccgccaggccagcgagattcgtcagcatgtgctgaacaccacccgactggtgaataatctactggatatggcgcgaattcagtccggcggctttaatttgaagaaagagtggttaacgctggaagaagtggtcggcagcgcgctgcaaatgctggaaccgggtttatcgtcgcccatcaatctttctctgccagagccgctgaccttaatccacgttgacgggccactctttgaacgggtgctgattaacctgctggagaacgcggtgaaatatgcgggggcgcaggccgaaattggtatcaatgcccacgttgagggcgaaaatctacaactggatgtctgggataacggccccggtcttccaccaggccaggagcagacgatatttgataagtttgctcgcgggaataaagagtcggcggtaccgggtgtagggcttgggctggcaatttgtcgggcgatagtggatgtacacggcggcaccattaccgcattcaaccgaccggaaggtggtgcctgttttcgtgttacacttccccagcaaacagcccctgaacttgaagaatttcatgaggatatgtga

SEQ ID NO: 352 - DNA, 573 bp, Escherichia coli
atgcgtggattacgtccggcattatcgacatttctctttctgttattgattactggcggcgtttacccgctgctgaccaccgcactggggcaatggtggtttccctggcaggccaacggttcattgattcgtgaaggtgatacggtgcgcggttcggcattaatcgggcaaaattttaccggcaacggctattttcatggtcgcccgtcggcaacagcagaaatgccctataatccacaggcttctggcgggagcaacctggcggtcagtaacccggagctggataaacagatagccgcacgcgttgctgcattacgggctgctaacccggatgccagcacgaacgttccggttgaactggtgacggcgtcagcaagcgggctggacaataacatcaccccgcaagcggcggcctggcagatcccacgcgtggcgaaagcgcgtaatctcagcgttgaacagctcacgcaactgatcgcaaaatacagccaacaaccgctggtgaaatatatcggccagccggtcgtcaacattgtcgaactcaatctggcactggataagcttgatgaataa

SEQ ID NO: 353 - DNA, 2049 bp, Escherichia coli
atgagtcgtaaacaactggcgctattcgaaccaacacttgtcgttcaggcgctgaaagaagcggtgaaaaaattaaacccgcaggcgcaatggcgcaatccggtgatgtttatcgtctggatcggcagtctgctgaccacctgtattagcatcgcgatggcaagcggtgtgatgcctggcaatgcgctgtttagcgcggcaattagcggctggctgtgggtcaccgtactgttcgctaatttcgccgaggcgttggcagaaggccgcagtaaagcgcaggccaacagtctgaaaggggtgaaaaaaaccgcttttgctcgcaaactgcgcgaaccgaaatatggcgctgcggcggacaaagttcctgctgatcaactgcgtaaaggtgacatcgtgctggtagaagctggcgatattatcccctgcgatggtgaagtcattgaaggcggcgcatcggtcgatgaaagcgccatcaccggggaatcggctccggtgatccgtgaatccggcggtgattttgcctccgtcactggcggcacgcgtattctttctgactggctggtgattgagtgcagcgttaaccccggcgagacatttctggatcggatgatcgcgatggtggaaggtgcgcagcgacgtaaaacgccgaacgagattgccctgaccattctcctgattgccctgactatcgtctttttactggcaaccgccacgctgtggccgttttccgcgtggggcggtaatgcagtcagcgtaacggtactggtggcactgctggtctgtctgatcccaaccactattggcggcctgttgtcagcgattggcgtcgccgggatgagtcggatgctgggcgcgaatgttattgccaccagcgggcgagcagttgaagcagcgggtgatgttgacgttctgctgctggataaaaccggcaccatcaccctcggtaaccgtcaggcgtcagagtttatccccgcacaaggcgtggaggaaaaagcgctggccgacgccgcacaactggcttcgctggctgatgaaacgccggaaggccgcagtattgtgatcctcgccaagcagcgttttaacctgcgcgagcgcgatgtgcagtcgctccatgccacctttgtaccgtttactgcacaaagccggatgagcgggatcaacatcgacaaccgcatgatccgtaaaggttctgtcgatgccattcgccgccatgttgaggctaacggcggtcacttccctgccgatgttgatcaaaaagtcgatcaggttgcgcgtcagggagccacgccgctggtggtggtggaaggttctcgtgtgctgggcgttattgcgctgaaagatatcgtcaaaggcggtattaaagagcgcttcgcccagctgcgtaaaatgggcattaaaacggtgatgattaccggcgataaccgcctgactgccgccgcgatagctgcggaagcgggtgtcgatgattttctcgccgaagcaacaccggaggccaagctggcactgattcgtcagtatcaggcggaaggccgtttagtggcgatgaccggcgatggcaccaacgatgctccggcgctggcacaggccgatgttgcggtggcgatgaactccggcacccaggcggcgaaagaagcgggcaatatggtggatctcgactccaacccgaccaagttgatcgaggtagtgcacattggcaaacagatgctgatgacccgtggctcgttgaccaccttcagcattgccaacgatgtggcgaaatacttcgccattattccagcggcgttcgcggcaacgtatccgcagttaaatgcgctgaacatcatgcgcctgcattcgcccgactccgccattctcagtgcggtcattttcaacgccttgattatcgtctttttgattcccctggcgttaaaaggcgtgagttataaaccgcttaccgcttctgccatgttgcgccgtaacttatggatttacggtctgggtgggctgctggtgccgtttattggtatcaaagtcattgatttactgctaaccgtttgcggtctggtgtga

SEQ ID NO: 354 - DNA, 1674 bp, Escherichia coli
atggctgcgcaagggttcttactgattgccacgtttttactggtattaatggtgctggcgcgtcccttaggtagcgggctggcgcggctgattaatgatatacctcttcctggtacgacgggcgttgaacgcgtactctttagcgcgcttggcgtctctgaccgcgagatgaactggaagcagtatctctcagccattcttggcctgaatatactggggctggcggtgctgttttttatgttgctcggccagcactatctgccgcttaatccacagcagttgccggggctgtcgtgggatctggcgctcaataccgccgtcagctttgtcacgaataccaactggcaatcttatagcggtgaaaccacgttgagctatttcagccagatggcgggcttaacggtgcaaaactttctttctgccgccagcgggattgcggtgatttttgcgcttattcgcgcgtttacccgccagagcatgagcacgctcggtaatgcctgggtcgatctgctacgcatcacgttatgggtgttagcccctgtggcgttgttgatcgcgctgttttttattcaacaaggtgtgttgcaaaactttcttccctatcagttggttacgactgttgaaggggcgcaacagctgttaccaatgggtccggtggcttctcaggaagcgatcaagatgctcggtactaacggcggtggcttctttaatgccaactcggctcatccgtttgaaaacccaaccgcactgaccaacttcgtgcaaatgctggcgattttcttgatcccaacagcgctgtgctttgcctttggtgaagtggcgggcgatcgtcgccaggggcgcatgttgctgtgggcgatgtcggtgatttttgtcatctgcgtaggcgtagtgatgtgggcagaagttcagggtaatcctcatctgctggcgctcggcgcggacagcagcatcaatatggaaggtaaagagagccgtttcggcgtgctggtcagtagcctgtttgcggtcgtgactacggcggcttcctgcggcgcggtgattgcgatgcatgattcgtttaccgctcttggtggcatggtgccgatgtggttgatgcaaattggtgaagtggtattcggcggcgtcggttcaggcctttacggcatgatgctgtttgtcctgctggcggtgtttattgccgggctgatgattggtcgtacaccggaatatctgggtaaaaaaatcgacgtacgcgagatgaaactgactgcactggcgattctggtcaccccgacgctggtgctgatgggcgcggcgctggcaatgatgaccgacgccggacgtagcgccatgctcaaccctggcccgcatggttttagcgaagtgctgtatgccgtgtcatccgccgctaacaacaacggcagcgcctttgccggattaagcgccaactctccattctggaactgtttactggcgttgtgcatgtttgtcgggcgcttcggggtgattatcccggtgatggcaattgccggttcgctggtgagtaaaaagagccaacccgccagctccggcacattgccaacgcacggcccgctgtttgttggcctgttaatcggcaccgtgttgctggttggcgcactgacctttatccctgccctggcgcttggtccggtggcggaatatctctcctga

SEQ ID NO: 355 - DNA, 207 bp, Escherichia coli
atggaactctacaaagaatatcctgcatggcttatctttttacgccgtacttgtgcggttgcagcgggcgttctggcgctgcctttcatgcttttctggaaagaccgggcccgcttttatagctacctgcaccgcgtctggtcgaaaaccagcgataaaccggtgtggatggatcaggccgaaaaggcaaccggtgatttttactga

SEQ ID NO: 356 - DNA, 510 bp, Escherichia coli
atgaatcaacaactttttgatgacagcacccttatccgcatttttgctttgcatgagttacacaatctcaaagatcgaggactaacgcgcggggcgcttctcgattatcacagccgctataaactcgtctttctggcgcattctcagccggagtaccgcaaacttggcccgtttgtggctgatattcaccggtggcaaagtctggatgactattacaaccagtaccgccaacgcgtaattgttttgctttctcaccctgccaaccggcgtgatcatactaacgttttgatgcacgttcagggatattttcgcccacatattgattccacagaacgccagcagctggcggcgcttatcgacagttatcgccgtggcgagcaatcgcttcttgcgccgctgatgcgtatcaaacactatatggcgctttatcctgacgcctggctttcagggcagcgttatttcgaactttggccgcgtgtgattaacttgcgccatgcaggagttttatga

SEQ ID NO: 357 - DNA, 1419 bp, Escherichia coli
atgactacccatctggtctggtttcgccaggatttacgtcagcacgataatctcgcgctggctgccggctgccgcaattcgtctgcgcgcgtgctggcgttgtatatcgctacaccacgccagtgggcggcgcataatgtgtcgccgcgtcaggctgaacttatcaatacacaacttaatgcgctgcaaaacgcgctggcggaaaaaggcattcctttattgttccgcgaagtggatgactttgctgccagtgtcgaaacagttaaacaggtgtgcgcggaaaatcgcattacccatctgttttataactatcagtatgaggtgaatgagcgggcgcgggatgtgcaggctgagaggacgctgcgtaacgtggtgtgtgaaggatttgatgacagcgtgatcctgccgccgggggcggtgatgactggcaatcatgagatgtacaaagtctttacgccttttaaaaacgcatggttgaaacggctgcgggaagggatgccggagtgcgttgctgcaccaaaagttcgtagtagcggatcgatagagcccgcgccatccattacgctgaattatcctcgtcagtctttcgatactgcgcatttcccggtggaagaaaaagcggcgattgcgcaattacgccagttttgccagaacggtgccggagagtatgagcaacaacgagattttccggcagtggaaggcaccagtcgtttgtccgccagcctggcaacgggcgggttatcgcctcgccagtgtttacatcgcctgttggcggaacaaccgcaggtgctggaaggcggaccggggagcgtctggcttaatgagctgatatggcgcgagttctaccgccatttgatgacgtattatccttcgctgtgtaaacatcgtccgtttattgcctggacggatcgtgtacagtggcaaagcaatcccgcccatttaaaggcctggcaggagggcaaaacgggatacccgattgtcgatgctgccatgcgtcagcttaacagcactggctggatgcataaccggctacggatgattacagccagttttctggtgaaagatttgttgatcgactggcgcgaaggcgagcgatatttcatgtcgcagttgattgatggtgatttggcagctaataacggtggctggcagtgggctgcttctacgggtactgatgcagcgccgtattttcgtattttcaacccgacaactcagggcgagaaatttgaccgcgaaggcgaatttatccgccagtggctaccggagctgcgcgatgtaccggggaaagcggtgcatgagccgtggaagtgggcagagaaaacaggtgtgacgttggattatccgcaaccgatagtcgatcacaaagaggcaaggctgcgaacgctggcagcgtacgaagaagcgaggaaaggagcctga

SEQ ID NO: 358 - DNA, 1482 bp, Escherichia coli
atgaataaacacgcatcacaaccgcgcgctatttactatgtcgttgcgctgcaaatctgggaatattttagcttttacggcatgcgtgccctgctgatcctctatctcaccaatcaactaaaatatagcgataatcacgcctacgagttatttagcgcctactgttcgctggtatatgtcacgccaatcctcggtggctttttggcggataaagttctcggcaatcgcatggcggtgatgctgggggcgttgttgatggcgatcggtcatgtggtgctgggtgccagtgagatccatccgtcattcctctatctgtccctggcgattatcgtctgcggctatggtctgtttaaatccaacgtcagttgcctgctcggcgagctgtatgagccaaccgatccacgtcgtgatggcggtttctcgctgatgtatgcggcgggtaacgtggggtctattatcgcacctatcgcctgtggtttcgcccaggaagagtacagttgggcgatgggctttggcctggcggcggtgggtatgatcgcgggtctggtcattttcttatgtggcaatcgtcatttcacacatacccgcggcgttaacaaaaaggtactgcgtgcgacaaactttctcctgcccaactggggatggctactggttctgctggtggcaacgcctgcgctgattaccgtgttgttctggaaagagtggtcggtatacgccttgattgtcgcgacgatcattggccttggggttctggcaaaaatttatcgcaaagcagaaaaccaaaaacagcgtaaggagctggggctgattgttaccctcaccttcttcagcatgttgttctgggcattcgcacaacaggggggtagctcgattagcctttatatcgaccgcttcgttaaccgcgatatatttggttatatcgttccgactgctatgttccagtcgattaatgccttcgcagttatgctgtgcggtgtgttcctggcgtgggtggttaaagaaagcgtcgcaggtaatcgtaccgtgcgcatctggggaaaatttgctcttggccttggcctgatgagcgccggattctgcattctgaccttaagcgcccgctggtccgcaatgtatggtcactcttctctgccactgatggtgttaggcctggcggtgatgggctttgcggaactgtttatcgacccggttgctatgtcgcagattacgcgcattgaaatccccggcgtgaccggcgtattaaccggcatttatatgctgctttccggcgcgattgcgaactatctggcgggcgtgattgccgatcagacatcgcaggcttcgtttgatgcttccggggcgatcaactactccatcaatgcatatattgaagtatttgatcaaattacctggggcgcactggcgtgtgtaggactggtactgatgatttggctgtatcaggcgcttaagttcagaaaccgcgcgctggcgctggagtcttaa

SEQ ID NO: 359 - DNA, 744 bp, Escherichia coli
atgaaaaacaccgaactggaacaactgattaacgaaaaactgaacagcgcggcgattagtgattacgcgccgaatggtttgcaggtggaaggcaaagagacggtgcaaaaaattgttaccggtgtcactgccagccaggatttgctcgatgaggcagtgcgtctgggcgcggatgcggtcattgtgcatcatggctacttctggaaaggcgaatctccggtcattcgcggaatgaagcgtaaccgcttaaaaaaattgttggcgaatgatatcaacctgtatggctggcatttgccgcttgacgcacatcctgagctgggcaataacgcacagctggcggcgttactggggatcacggtcatgggcgaaattgagccgttggtgccgtggggcgaactgaccatgcctgtgccgggactggaactggcctcctggattgaagcgcgtctgggacgtaagccgttatggtgtggcgataccggacctgaggtggtccagcgcgtcgcctggtgcacgggcggcgggcaaagttttatcgatagcgccgcgcgttttggcgtggatgcttttattactggcgaagtttctgaacagaccattcattcagcccgcgagcagggattgcatttttatgctgcaggtcaccatgccactgaacgtggtggtattcgcgcattgagcgagtggctgaatgaaaataccgatcttgatgtgacctttattgatattcctaatcctgcataa

SEQ ID NO: 360 - DNA, 657 bp, Escherichia coli
gtgcaacgagcgcgttgttatctgataggtgaaacggcggtagtgctggaactggaaccgccggtgacgctggctagccagaaacggatctggcgactggcacagcgtctggtgaatatgccgaatgtggttgaagccattcctggcatgaacaatatcacagtgattttgcgtaatcctgagtcgctggcgctggatgccatagagcgtttgcaacgctggtgggaggagagtgaggcgctggagccggagtctcgctttattgaaattccggtggtttacggtggcgcagccggaccggatttggcggtggtcgcggcgcattgtggattgagcgaaaaacaggttgttgaattgcactcctccgtggaatacgtggtctggtttttaggttttcaaccgggcttcccgtatctcgggagtttgccggaacaactacacacgccacggcgcgctgaaccgcgcttgcacgttccagcaggttctgtcgggatcggcgggccgcagaccggtgtttatccgctggcaacgccgggtggctggcagttgattggtcatacctcactcagcctgtttgatccggagcgtgacgaacccatcttattacgtccgggagacagcgtgcgctttgtaccccagaaggagggagtatgctga

SEQ ID NO: 361 - DNA, 933 bp, Escherichia coli
atgctgaagattattcgtgcgggcatgtataccactgtgcaggatggcggtcgtcacggttttcgccagtcgggtatcagccactgcggcgcactggatatgcctgcgctgcgcattgctaacctgctggtgggtaatgacgccaacgcccccgcgctggagatcacgctcggtcagttaacggttgagttcgaaactgatgggtggtttgccctgaccggtgccggttgcgaagcgcggctggatgataacgccgtctggaccggctggcgattgccaatgagagcaggccagcgtttaacgcttaaacgcccgcagcacgggatgcgcagttatctggcggtcgcgggtggtattgatgttccgccggtaatgggatcatgcagcaccgatctcaaagtggggattggcgggctggaaggccgtttactgagggatggtgaccgactcccgattggcaaagcgaagcgtgattttatggaagcgcagggcgttaaacagctgctgtggggcaaccgcattcgcgccttgccggggccggaatatcatgagttcgatcgcgcctcgcaggatgcattctggcgttcgccctggcagcttagctcgcaaagtaaccggatgggctatcgcttacaggggcaaattttaaaacgcaccaccgatcgcgaactgttatctcacggtttgttaccaggtgtggtgcaggtgccgcataacgggcagcccattgtgttgatgaacgatgcgcaaaccaccggtggttacccgcgtattgcctgtatcattgaggctgatatgtaccatctggcgcaaattccgctcggtcagccgattcattttgtccagtgttcactggaagaggcactgaaagcacggcaagatcaacaacgttatttcgaacaattagcatggcggctgcacaatgaaaattga

SEQ ID NO: 362 - DNA, 735 bp, Escherichia coli
atgaaaattgacctgaacgccgatctgggcgaaggctgcgccagcgacgcagagctattaacgctggtttcctctgccaatattgcctgtggatttcatgcaggcgatgcgcaaaccatgcaggcttgcgtgcgtgaagcaataaaaaacggtgtcgcgattggcgcgcacccgagttttcccgacagggaaaattttggtcgcagcgccatgcagctgccgccagaaactgttttcgcccagacgctgtatcaaattggcgcgctggcagcgattacccgtgcgcaaggcggcgtaatgtgtcatgtcaaaccgcacggcatgttatacaaccaggcggcgaaagaggcacaactggcagacgccatcgccagagcggtatacgcttgcgatccggcattgattctcgtcgggctggcaggaagcgagctgattcgtgcaggcgaacgatatggcctggtaacgcgcgaggaagtgtttgccgatcgtggttatcaggcagacggttcgctggtgccgcgaagccagccaggcgcgttgattgaaaacgaagaacaggcgctggcgcaaacgttggagatggtgcaacacggcagagtcaaaagtatcaccggcgaatgggcaatggtcacggcgcaaacggtctgcctacatggcgatggcgagcacgcactggcgttcgcccgccgattacgagctacatttgctgaaaaggggattgttgtcgcagcataa

SEQ ID NO: 363 - DNA, 792 bp, Escherichia coli
atgcctgaaggcccggagatccgccgtgcagcggataacctggaggcggcgatcaaaggcaaaccactaactgatgtctggtttgccttcccgcagttaaaatcttatcaatcacgacttatcggtcaacacgttacccatgtggaaacgcgtggtaaggcgttgttaactcatttttccaacgacttaacgctctacagccataatcagctttacggcgtctggcgcgtggttgataccggcgaagagccgcagaccacgcgagtactgcgggtaaaactgcaaacggctgacaaaaccattctgctttatagcgcctcggatattgagatgttgactccggaacaactgaccacgcatccgtttttacaacgcgttggtcccgatgtgctggatccgaatctgacgccggaggtggtaaaggaacgattattgtcgccgcgctttcgtaaccgccagtttgctggattactgctcgatcaggcgtttctggcaggacttggcaattatttgcgggtggagatcctctggcaggttgggttgaccggaaatcataaagcgaaagatctcaatgcggcgcaactggatgcactcgcacacgcgttactggatattccgcgactttcttacgctacgcggggccaggtggatgaaaacaaatatcatggggcgctgtttcgctttaaggtttttcatcgtgatggcgaaccttgcgaacgctgtggcggcatcattgagaaaaccacgctgtcatcgcgcccgttttactggtgcccaggctgccagcactag

SEQ ID NO: 364 - DNA, 1047 bp, Escherichia coli
atgcctgtattgcagtggggaatgttatgtgttctgtcacttctcctttctattggcttcctcgctttacatctcccggcggcactcctgcttggcccgatgatcgccgggatcatcttcagtatgcgcggagtcactctgcaacttccccgctccgcttttctcgctgcccaagccattcttggctgcatgattgcacaaaacctcactggttcgattctcaccacgctggccgtcaactggccgatcgtgcttgcgattttactggtgacgctgctttccagcgccatcgtgggttggttattggtgcgctatagctcactgcctggaaataccggggcctggggttcttctcctggcggcgcggcggcaatggtcgcaatggcgcaagattacggcgcagatattcgcctggtggcgtttatgcaatatctgcgagtgctgttcgtcgcaggagccgctgttctggtcacccgcatgatgctgggcgataacgctgaagcggttaaccagcagatcgtctggttcccgccagtgagcattaatctcctgcttacgattttgctcgcggtcgttgccggtacggcgggatgcttgctacgtcttccttccggcacgatgctcatcccgatgctggcgggcgcagtgctccagtctggtcagctcatcacgattgaactcccggaatggctgctggcgatggcatatatggcaattggctggcggattggtcttggtttcgataagcaaatattactgcgggcattgcgcccactgccacaaatcctgctgtcgatttttgctctgctggctatttgtgcgggtatggcgtgggggctgacccggtttatgcatattgattttatgaccgcctacctcgccaccagccccggcgggcttgataccgtggcggtcatcgccgcagggagcaatgccgatatggcgctcatcatggcgatgcaaaccctgcgcctgttcagtattttgctgacggggcctgccatcgcacggtttatttcaacctatgcgccgaagcgttcggcctag

SEQ ID NO: 365 - DNA, 243 bp, Escherichia coli
gtgattgatttgggtaaatttaacttactggatattcgccgccacacaatgtcgaaaacattcagtatcaagacaacaaaatcgcaaaatgaccagtgtaccgacggatttaaggtcagctcctcgttttataccgaaaaaacgttggttgaagaagataaagcattgttgattggtaatggtctgaagctacgtatactggatgaaaacgcctcgccttatacattcaataaatatgcttaa

SEQ ID NO: 366 - DNA, 1284 bp, Escherichia coli
atggctgatacaaaagcaaaactcaccctcaacggggacacagctgttgaactggatgtgctgaaaggcacgctgggtcaagatgttattgatatccgtactctcggttcaaaaggtgtgttcacctttgacccaggcttcacttcaaccgcatcctgcgaatctaaaattacttttattgatggtgatgaaggtattttgctgcaccgcggtttcccgatcgatcagctggcgaccgattctaactacctggaagtttgttacatcctgctgaatggtgaaaaaccgactcaggaacagtatgacgaatttaaaactacggtgacccgtcataccatgatccacgagcagattacccgtctgttccatgctttccgtcgcgactcgcatccaatggcagtcatgtgtggtattaccggcgcgctggcagcgttctatcacgactcgctggatgttaacaatcctcgtcatcgtgaaattgccgcgttccgcctgctgtcaaaaatgccgaccatggccgcgatgtgttacaagtattccattggtcagccatttgtttacccgcgcaacgatctctcctacgccggtaacttcctgaatatgatgttctccacgccgtgcgaaccgtatgaagttaatccgattctggaacgtgctatggaccgtattctgatcctgcacgctgaccatgaacagaacgcctccacctccaccgtgcgtaccgctggctcttcgggtgcgaacccgtttgcctgtatcgcagcaggtattgcttcactgtggggacctgcgcacggtggtgctaacgaagcggcgctgaaaatgctggaagaaatcagctccgttaaacacattccggaatttgttcgtcgtgcgaaagacaaaaatgattctttccgcctgatgggcttcggtcatcgcgtgtacaaaaactacgacccgcgcgccaccgtaatgcgtgaaacctgccatgaagtgctgaaagagctgggcaccaaagatgacctgctggaagtggctatggagctggaaaacatcgcgctgaacgacccgtactttatcgagaaaaaactgtacccgaacgtcgatttctactctggtatcatcctgaaagcgatgggtattccgtcttctatgttcaccgtgatcttcgctatggcacgtacggttggctggatcgcccactggagcgaaatgcacagtgacggtatgaagattgcccgtccgcgtcagctgtatacaggatatgaaaaacgcgactttaaaagcgatatcaagcgttaa

SEQ ID NO: 367 - DNA, 405 bp, Escherichia coli
atgtgggcgttattcatgataagaaatgtgaaaaaacaaagacctgttaatctggacctacagaccatccggttccccgtcacggcgatagcgtccattctccatcgcgtttccggtgtgatcacctttgttgcagtgggcatcctgctgtggcttctgggtaccagcctctcttcccctgaaggtttcgagcaagcttccgcgattatgggcagcttcttcgtcaaatttatcatgtggggcatccttaccgctctggcatatcacgtcgtcgtaggtattcgccacatgatgatggattttggctatctggaagaaacattcgaagcgggtaaacgctccgccaaaatctcctttgttattactgtcgtgctttcacttctcgcaggagtcctcgtatggtaa

SEQ ID NO: 368 - DNA, 348 bp, Escherichia coli
atggtaagcaacgcctccgcattaggacgcaatggcgtacatgatttcatcctcgttcgtgctaccgctatcgtcctgacgctctacatcatttatatggtcggttttttcgctaccagtggcgaactgacatatgaagtctggattggtttcttcgcctctgcgttcaccaaagtgttcaccctgctggcgctgttttctatcttgatccatgcctggatcggcatgtggcaggtgttgaccgactacgttaaaccgctggccttgcgcctgatgctgcaactggtgattgtcgttgcactggtggtttacgtgatttatggattcgttgtggtgtggggtgtgtga

SEQ ID NO: 369 - DNA, 1767 bp, Escherichia coli
atgaaattgccagtcagagaatttgatgcagttgtgattggtgctggcggcgcaggtatgcgcgcggcgctgcaaatttcccagagtggccagacctgtgcgctgctctctaaagtcttcccgacccgttcccataccgtttctgcgcaaggtggtattaccgttgcgctgggtaatacccatgaagataactgggaatggcatatgtacgacaccgtaaaagggtcggactatatcggtgaccaggacgcgattgaatatatgtgtaaaaccgggccggaagcgattctggaactggaacatatgggcctgccgttctcgcgtcttgatgatggtcgtatctatcaacgtccgtttggcggtcagtcgaaaaacttcggcggcgagcaggcggcacgtactgcggcggctgccgaccgtaccggtcacgcactgttgcacacgctttatcagcagaacctgaaaaaccacaccaccattttctccgagtggtatgcgctggatctggtgaaaaaccaggatggcgcagtggtcggttgtaccgcactgtgcatcgaaactggtgaagtggtttactttaaagctcgcgcgacagtgctggcgactggcggggcagggcgtatttatcagtccaccaccaacgcccacattaacactggcgacggtgtcggcatggctatccgtgcaggcgtaccggtacaggatatggaaatgtggcagttccacccgaccggtattgccggtgcgggcgtactggtcaccgaaggttgccgtggtgaaggcggttatctgctgaacaaacatggcgaacgctttatggaacgttatgcgccgaacgccaaagacctggcgggccgtgacgtggtggcgcgttccatcatgatcgaaatccgtgaaggtcgcggttgtgatggtccgtgggggccacacgcaaaactgaaacttgaccatctggggaaagaagttctcgaatcccgtctgccgggtattctggaactctcccgtaccttcgctcacgtcgatccggtgaaagagccgattccggttatcccaacctgtcactacatgatgggcggtattccgaccaaagtgaccggtcaggcgctgactgtgaatgagaaaggcgaagatgtggttgttccggggctgtttgccgttggtgaaatcgcttgtgtatcggtacatggcgctaaccgtctgggcggcaactcgctgctggacctggtcgtatttggtcgtgcggcaggtctacatctgcaagagtctatcgccgagcagggcgcactgcgcgatgccagcgagtctgatgtagaagcgtctctggatcgcctgaaccgctggaacaataaccgtaacggtgaagatccggtggcgatccgtaaagcactgcaagaatgtatgcagcataacttctcggtcttccgtgaaggtgatgcgatggcgaaagggcttgagcagttgaaagttatccgcgagcgtctgaaaaatgcccgtctggatgacacttccagcgagttcaacacccagcgcgttgagtgcctggaactggataacctgatggaaacggcgtatgcaacggctgtttctgccaacttccgcaccgaaagccgtggcgcgcatagccgcttcgacttcccggatcgtgatgatgaaaactggctgtgccactccctgtatctgccagagtcggaatccatgacgcgccgaagcgtcaacatggaaccgaaactgcgcccggcattcccgccgaagattcgtacttactaa

SEQ ID NO: 370 - DNA, 717 bp, Escherichia coli
atgagactcgagttttcaatttatcgctataacccggatgttgatgatgctccgcgtatgcaggattacaccctggaagcggaagaaggtcgtgacatgatgctgctggatgcgcttatccagctgaaagagaaagatcccagcctgtcgttccgccgctcctgccgtgaaggtgtgtgcggttccgacggtctgaacatgaacggtaagaatggtctggcctgtattactccgatttcggcactcaaccagccgggcaagaagattgtgattcgcccgctgccaggtttaccggtgatccgcgatttggtggtagacatgggacaattctatgcgcaatatgagaaaattaagccttacctgttgaataatggacaaaatccgccagctcgcgagcatttacagatgccagagcagcgcgaaaaactcgacgggttgtatgaatgtattctctgcgcatgttgttcaacctcttgtccgtctttctggtggaatcccgataagtttatcggcccggcaggcttgttagcggcatatcgtttcctgatcgatagccgtgataccgagactgacagccgcctcgacggtttgagcgatgcattcagtgtattccgctgtcacagcatcatgaactgcgtcagtgtatgtccgaaggggctgaacccgacgcgcgccatcggccatatcaagtcgatgttgttgcaacgtaatgcgtaa

SEQ ID NO: 371 - DNA, 2802 bp, Escherichia coli
atgcagaacagcgctttgaaagcctggttggactcttcttacctctctggcgcaaaccagagctggatagaacagctctatgaagacttcttaaccgatcctgactcggttgacgctaactggcgttcgacgttccagcagttacctggtacgggagtcaaaccggatcaattccactctcaaacgcgtgaatatttccgccgcctggcgaaagacgcttcacgttactcttcaacgatctccgaccctgacaccaatgtgaagcaggttaaagtcctgcagctcattaacgcataccgcttccgtggtcaccagcatgcgaatctcgatccgctgggactgtggcagcaagataaagtggccgatctggatccgtctttccacgatctgaccgaagcagacttccaggagaccttcaacgtcggttcatttgccagcggcaaagaaaccatgaaactcggcgaactgctggaagcactcaagcaaacctactgcggcccgattggtgccgagtatatgcacattaccagcactgaagaaaaacgctggatccaacagcgtattgagtctggtcgcgcgactttcaatagcgaagagaaaaaacgcttcttaagcgaactgaccgccgctgaaggccttgaacgttacctcggcgcaaaattccctggcgcaaaacgcttctcgctggaaggcggtgacgcgttaatcccgatgcttaaagagatgatccgccacgctggcaacagcggcacccgcgaagtggttctcggaatggcgcaccgtggtcgtctgaacgtgctggtgaacgtgctgggtaaaaaaccgcaagacttgttcgacgagtttgccggtaaacataaagaacacctcggcacgggcgacgtgaaataccacatgggcttctcgtctgacttccagaccgatggcggcctggttcacctggcgctggcgtttaacccgtctcaccttgagattgtaagcccggtcgttatcggttctgttcgtgcccgtctggacagacttgatgagccgagcagcaacaaagtgctgccaatcaccattcatggtgacgccgcagtgaccgggcagggcgtagttcaggaaaccctgaacatgtcgaaagcgcgtggttatgaagttggcggtacggtacgtatcgttatcaacaaccaggttggcttcaccacctctaacccgctggatgcccgttctacgccgtactgtactgatatcggcaagatggtacaggcaccgattttccacgttaatgcggatgatccggaagccgttgcctttgtgacccgtctggcgctcgatttccgtaacacctttaaacgtgatgtcttcatcgatctggtgtgctaccgccgtcacggccacaacgaagccgacgagccgagcgcaacccagccgctgatgtatcagaaaatcaaaaaacatccgacgccgcgcaaaatctacgctgacaagctggagcaggaaaaagtcgcgacgctggaagatgccaccgagatggttaacctgtaccgcgatgcgctggatgctggcgattgcgttgtagcagagtggcgtccgatgaacatgcactctttcacctggtcgccgtacctcaaccacgaatgggacgaagagtacccgaacaaagttgagatgaagcgcctgcaggaactggctaaacgcatcagcacggtgccggaagcggttgaaatgcagtctcgcgttgccaagatttatggcgatcgccaggcaatggctgccggtgagaaactgttcgactggggcggcgcggaaaacctcgcttacgccacgctggttgacgaaggcattccggttcgcctgtcgggtgaagactccggtcgcggtaccttcttccaccgccacgcggtgatccacaaccagtctaacggttccacttacacgccgctgcaacatatccataacggccagggcgcgttccgcgtctgggactctgtactgtctgaagaagccgtactggcgtttgaatacggttatgccaccgcagaaccacgtaccctgaccatctgggaagcacagttcggtgacttcgccaacggtgcacaggtggttatcgaccagttcatctcctctggcgaacagaaatggggccggatgtgtggcctggtgatgttgctgccgcacggttacgaagggcaggggccggagcactcctccgcgcgtctggaacgttatctgcaactttgcgctgagcaaaacatgcaggtttgcgtaccttctaccccggcacaggtttaccacatgctgcgtcgtcaggcgttgcgcgggatgcgtcgtccactggtcgtgatgtcgccgaaatccctgctgcgtcatccgctggcggtatccagcctcgaagaactggcgaacggcaccttcctgccagccatcggtgaaatcgacgagcttgatccgaagggcgtgaagcgcgtagtgatgtgttctggtaaggtttattacgacctgctggaacaacgtcgtaagaacaatcaacacgatgtcgccattgtgcgtatcgagcaactctacccgttcccgcataaagcgatgcaggaagtgttgcagcagtttgctcacgtcaaggattttgtctggtgccaggaagagccgctcaaccagggcgcatggtactgcagccagcatcatttccgtgaagtgattccgtttggggcttctctgcgttatgcaggccgcccagcctccgcctctccggcggtagggtatatgtccgttcaccagaaacagcaacaagatctggttaatgacgcgctgaacgtcgaataa

SEQ ID NO: 372 - DNA, 1218 bp, Escherichia coli
atgagtagcgtagatattctggtccctgacctgcctgaatccgtagccgatgccaccgtcgcaacctggcataaaaaacccggcgacgcagtcgtacgtgatgaagtgctggtagaaatcgaaactgacaaagtggtactggaagtaccggcatcagcagacggcattctggatgcggttctggaagatgaaggtacaacggtaacgtctcgtcagatccttggtcgcctgcgtgaaggcaacagcgcgggtaaagaaaccagcgccaaatctgaagagaaagcgtccactccggcgcaacgccagcaggcgtctctggaagagcaaaacaacgatgcgttaagcccggcgatccgtcgcctgctggctgaacataacctcgacgccagcgctattaaaggcacgggtgtgggtggtcgtctgacccgtgaagatgtggaaaaacatctggcgaaagccccggcgaaagagtctgctccggcagcgcctgctccggcggcgcaaccggccctggctgcacgtagcgaaaaacgtgtgccgatgactcgcctgcgtaagcgtgtggcagagcgtctgctggaagcgaaaaactccaccgccatgctgaccacgttcaacgaagtcaacatgaagccgattatggatctgcgtaagcagtacggtgaagcgtttgaaaaacgccacggcatccgtctgggctttatgtccttctacgtgaaagcggtggttgaagccctgaaacgttacccggaagtgaatgcgtctatcgacggtgatgatgtggtctaccacaactatttcgacgtcagtatggcggtttctacgccgcgcggtctggtgacgccggttctgcgtgatgtcgataccctcggcatggcagacatcgagaagaaaatcaaagagctggctgttaaaggccgtgacggcaagctgacggttgaagatctgaccggtggtaacttcaccatcaccaacggtggtgtgttcggttccctgatgtcaacgcctatcatcaacccaccgcagagcgcaattctgggtatgcacgctatcaaagatcgtccgatggcagtgaatggtcaggttgagatcctgccgatgatgtacctggcgctgtcctacgatcaccgtttgatcgatggtcgcgaatccgtgggcttccttgtaacgatcaaagagttgctggaagatccgacgcgtctgctgctggacgtttag

SEQ ID NO: 373 - DNA, 1167 bp, Escherichia coli
atgaacttacatgaatatcaggcaaaacaactttttgcccgctatggcttaccagcaccggtgggttatgcctgtactactccgcgcgaagcagaagaagccgcttcaaaaatcggtgccggtccgtgggtagtgaaatgtcaggttcacgctggtggccgcggtaaagcgggcggtgtgaaagttgtaaacagcaaagaagacatccgtgcttttgcagaaaactggctgggcaagcgtctggtaacgtatcaaacagatgctaatggccaaccggttaaccagattctggttgaagcagcgaccgatatcgctaaagagctgtatctcggtgccgttgttgaccgtagttcccgtcgcgtggtctttatggcctccaccgaaggcggcgtggaaatcgaaaaagtggcggaagaaactccgcacctgatccacaaagttgcgcttgatccgctgactggcccgatgccgtatcagggacgcgaactggcgtttaaactgggtctggaaggtaaactggttcagcagttcaccaaaatcttcatgggcctggcgaccattttcctggagcgcgaccttgcgcttatcgaaatcaacccgctggttattaccaaacagggcgatctgatttgcctcgacggcaaactgggcgctgatggcaacgcactgttccgccagcctgatctgcgtgaaatgcgtgaccagtcgcaggaagatccgcgtgaagcacaggctgcacagtgggaactgaactacgttgcgctggacggtaacatcggttgtatggttaacggcgcaggtctggcgatgggtacgatggacatcgttaaactgcacggcggcgaaccggctaacttcctggacgttggcggcggcgcaaccaaagaacgtgtaaccgaagcgttcaaaatcatcctctctgacgacaaagtgaaagccgttctggttaacatcttcggcggtatcgttcgttgcgacctgatcgctgacggtatcatcggcgcggtagcagaagtgggtgttaacgtaccggtcgtggtacgtctggaaggtaacaacgccgaactcggtgcgaagaaactggctgacagcggcctgaatattattgcagcaaaaggtctgacggatgcagctcagcaggttgttgccgcagtggaggagaaataa

SEQ ID NO: 374 - DNA, 870 bp, Escherichia coli
atgtccattttaattgataaaaacaccaaggttatctgccagggctttaccggtagccaggggactttccactcagaacaggccattgcatacggcactaaaatggttggcggcgtaaccccaggtaaaggcggtactacccacctcggcctgccggtgttcaacaccgtgcgtgaagctgttgctgctactggcgctaccgcctctgttatctacgtaccagcaccgttctgcaaagactccattctggaagctatcgatgcaggcatcaaactgattatcaccatcactgaaggcatcccgacgctggatatgctgacggtgaaagtgaaactggatgaagcaggcgtttgtatgatcggcccgaactgcccaggcgttatcaccccgggggaatgcaaaatcggtatccagccgggtcacattcacaaaccgggtaaagtgggtatcgtttcccgttccggtacgctgacctatgaagcggttaaacagaccacggattacggtttcggtcagtcgacctgtgttggtatcggcggcgacccgatccctggctctaactttatcgatatcctcgaaatgttcgaaaaagatccgcagaccgaagcgatcgtgatgatcggtgagatcggcggtagcgctgaagaagaagcagcggcgtacatcaaggagcacgttaccaagccagttgtgggttacatcgctggtgtgactgcgccgaaaggcaaacgtatgggtcacgcaggtgcgatcattgccggtggtaaagggactgctgatgagaaattcgctgctctggaagccgcaggcgtgaaaaccgttcgcagcctggcggatatcggtgaagcactgaaaactgttctgaaataa

SEQ ID NO: 375 - DNA, 870 bp, Escherichia coli
atgacgctgcaacgcaatggcgcacaatctgtttctggaaccacaaatgcatcgggcagcgttaatctgggttctacatttgctgatgatcaagatgctttattgatcgtcaaaaaagagggctattctaatctggtggtcaaatgtccgtgtgctggcatgacttatgcgattagtccggcaatgactagtctggatggcatgcgtgtagttttgagctggggcgaaaagccttttgatcttgattcacatttgatcttccctggcggacatatctattttgatagtaaagaggggactgatgctaatctggatgttgatgatacggatagctatggaccagaaactgtcactatcagcaaaaagcattttggcgaaagttacatctatgccgtgcaggactatagcaataaagggttgcccaacagtaattatctctctgccagtaaggcaaaagtgtttgtttatgtagggagctccctggtgcgtagttatagtgtccctgctggaaaacgagggaacatctggaccatgtttaaactcaatccaaacggcgagtttgaagatattaactctgttaccagcgctaattttaacgacaccacattagacgtcagggatttagccactgtgataatgcctgcgacgggcacttcagcttcggcttcgcctgcgatgcaaaacagtggagatactcaactggcaagaaaatataatcgcgaaggtgaagctgtttataaaaccggtcaacttgagcaagccattcaactcttccaacaggcaacagaattagacggcaattacggacaggcatttagtaacctggggctggcgtatcagaaaaatggcaacatagcggaagcaatttag

SEQ ID NO: 376 - DNA, 273 bp, Escherichia coli
atgcattgcagcattatcaactcgctcttcacgatgccattttataacaatgaaagtggaatcatatttttaaattttatattcttgcttgtttttctggtgaagttatccatcattcactgttctattatcttaaggatgatggaaatagaaggttttttaatgataataaaacatattcttatgttatgtaatcacgaattttttaatatgattatgtatcaatacattatattacccgatgtgttactgaattatcgactattactttaa

SEQ ID NO: 377 - DNA, 1569 bp, Escherichia coli
atgttagatatagtcgaactgtcgcgcttacagtttgccttgaccgcgatgtaccacttcctttttgtgccactgacgctcggtatggcgttcctgctggccattatggaaacggtctacgtcctttccggcaaacagatttataaagatatgaccaagttctggggcaagttgtttggtatcaactttgctctgggtgtggctaccggtctgaccatggagttccagttcgggactaactggtcttactattcccactatgtaggggatatcttcggtgcgccgctggcaatcgaaggtctgatggccttcttcctcgaatccacctttgtaggtctgttcttcttcggttgggatcgtctgggtaaagttcagcatatgtgtgtcacctggctggtggcgctcggttcaaacctgtccgcactgtggattctggttgcaaacggctggatgcaaaacccaatcgcgtccgatttcaactttgaaactatgcgtatggagatggtgagcttctccgagctggtgcttaacccggttgctcaggtgaaattcgttcacaccgtagcttctggttatgtgactggcgcgatgttcatcctcggtatcagcgcatggtatatgctgaaaggtcgtgacttcgccttcgctaaacgctcctttgctatcgctgccagcttcggtatggctgccgttctgtctgttattgttctgggtgatgaatccggttacgaaatgggcgacgtgcagaaaaccaaactggctgctatcgaagccgagtgggaaacgcaacctgcacctgctgcctttactctgttcggcattcctgatcaggaagaggaaacgaacaaatttgcgatccagatcccttacgcgctgggcatcattgcaacgcgttccgtggatactccagttatcggtctgaaagaactgatggtgcagcatgaagaacgcattcgtaacgggatgaaggcgtactctctgctcgaacaactgcgttctggttctaccgaccaggccgttcgtgaccagttcaatagcatgaagaaagatctcggttacggtctgctgctgaaacgctatacgccaaacgtggctgatgcgactgaagctcagattcaacaggcaaccaaagactccattccacgtgtagcgccgctgtacttcgcgttccgtatcatggtggcgtgtggcttcctgctgctggcaatcattgcgctctctttctggagtgtcatccgcaaccgcattggcgagaaaaaatggctgctgcgcgccgcgctgtacggtattccgctgccgtggattgctgtagaagcgggctggttcgtggctgaatatggccgccaaccgtgggctatcggtgaagtgctgccgacagctgtggcgaactcgtcactgaccgcaggcgatctcatcttctcaatggtgctgatttgcggcctgtataccctgttcctggtggcagaattgttcttaatgttcaagtttgcacgcctcggcccaagcagcctgaaaaccggtcgctatcactttgagcagtcttccacgactactcagccggcacgctaa

SEQ ID NO: 378 - DNA, 1140 bp, Escherichia coli
atgatcgattatgaagtattgcgttttatctggtggctgctggttggcgttctgctgattggttttgcagtcactgacggtttcgacatgggggtgggcatgctcacccgtttcctcggtcgtaacgacaccgagcgtcgaattatgattaactccatcgcaccacactgggacggtaaccaggtttggctgatcactgcaggcggcgcactgtttgctgcctggccgatggtctatgccgctgcgttctccggcttctatgtggcgatgatcctcgtgctggcgtctttgttcttccgtccggtcggttttgactaccgctccaagattgaagaaacccgctggcgtaacatgtgggactggggcatcttcattggtagcttcgttccgccgctggtgattggtgtagcgttcggtaacctgttgcagggcgtaccattcaacgttgatgaatatctgcgtctgtactacaccggtaacttcttccagctgcttaacccgttcggcctgctggcaggtgtggtgagcgtagggatgatcattactcagggcgcaacctatctgcaaatgcgtactgtgggcgaactgcacctgcgtacccgtgcaacggctcaggtggcggcactggtgacgctggtctgcttcgcactggctggcgtatgggtgatgtacggtatcgatggttatgtcgtgaaatcgacaatggaccattacgcagcctctaacccgctgaataaagaagtggttcgtgaagctggcgcatggctggttaacttcaacaacacgccaattctgtgggctattccggcactgggtgtggttctgccgctgctgaccatcctgactgcacgtatggataaagccgcgtgggcgtttgtgttctcctccctgacgctggcctgcatcatcctgactgccggtatcgcaatgttcccgtttgtgatgccgtccagcaccatgatgaacgcaagtctgacaatgtgggatgcaacttccagccagctgacgcttaacgtcatgacctgggttgcggtggttctggtaccgatcattctgctctacaccgcctggtgttactggaaaatgttcggtcgtatcaccaaagaagatattgaacgtaacacccactctctgtactaa

SEQ ID NO: 379 - DNA, 294 bp, Escherichia coli
atgagtaagattatcgcaaccttgtatgcggtaatggacaagcgccccctgcgggcgctttccttcgtgatggcacttctgttagcaggatgtatgttttgggacccatcacgtttcgccgcgaagaccagtgaactggaaatctggcatggtttactgcttatgtgggccgtctgtgctggtgtgattcacggcgtgggctttcgtccgcagaaggttctctggcaagggattttttgcccattgcttgccgatattgttctcattgtcgggctgattttcttcttcttttaa

SEQ ID NO: 380 - DNA, 405 bp, Escherichia coli
gtgaatacaacgctgtttcgatggccggttcgtgtctactatgaagataccgatgccggtggtgtggtgtaccacgccagttacgtcgctttttatgaaagagcacgcacagagatgctgcgtcatcatcacttcagtcaacaggcgctgatggctgaacgcgttgcctttgtggtacgtaaaatgacggtggaatattacgcacctgcgcggctcgacgatatgctcgaaatacagactgaaataacatcaatgcgtggcacctctttggttttcacgcaacgtattgtcaacgccgagaatactttgttgaatgaagcagaggttctggttgtttgcgttgacccactcaaaatgaagcctcgtgcgcttcccaagtctattgtcgcggagtttaagcagtga

SEQ ID NO: 381 - DNA, 693 bp, Escherichia coli
gtgactgacatgaatatccttgatttgttcctgaaggctagccttctggttaaacttatcatgttgattttgattggtttttcaatcgcatcctgggccattattatccagcggacccgtattcttaacgcagcggcgcgcgaagccgaagcgtttgaagataaattctggtctggaatcgaactctctcgcctctatcaagagagccaggggaaacgggataatctgagcggttcggaacaaatcttttacagcggcttcaaagagtttgtgcgcctgcatcgtgccaatagccatgcgccggaagccgtagtggaaggggcgtcgcgtgcgatgcgtatttccatgaatcgtgaacttgaaaatctggaaacgcacattcctttcctcggtacggttggctccatcagcccgtatattggtctgtttggtacggtctgggggatcatgcacgcctttatcgccctcggggcggtaaaacaagcaacactgcaaatggttgcgcccggtatcgcagaagcgttgattgcgacggcaattggtttgttcgccgcaattccggcggtaatggcttataaccgcctaaaccagcgcgtaaacaaactggaactgaattacgacaactttatggaagagtttaccgcgattctgcaccgccaggcgtttaccgttagcgagagcaacaaggggtaa

SEQ ID NO: 382 - DNA, 429 bp, Escherichia coli
atggccagagcgcgtggacgaggtcgtcgcgatctcaagtccgaaatcaacattgtaccgttgctggatgtactgctggtgctgttgctgatctttatggcgacagcgcccatcatcacccagagcgtggaggtcgatctgccagacgctactgaatcacaggcggtgagcagtaacgataatccgccagtgattgttgaagtgtctggtattggtcagtacaccgtggtggttgagaaagatcgtctggagcgtttaccaccagagcaggtggtggcggaagtgtccagccgtttcaaggccaacccgaaaacggtctttctgatcggtggcgcaaaagatgtgccttacgatgaaataattaaagcactgaacttgttacatagtgcgggtgtgaaatcggttggtttaatgacgcagcctatctaa

SEQ ID NO: 383 - DNA, 1266 bp, Escherichia coli
gtgtcaaaggcaaccgaacaaaacgacaagctcaagcgggcgataattatttcagcagtgctgcatgtcatcttatttgcggcgctgatctggagttcgttcgatgagaatatagaagcttcagccggaggtggcggtggttcgtccatcgacgctgtcatggttgattcaggtgcggtagttgagcagtacaaacgtatgcaaagccaggaatcaagcgcgaagcgttctgatgagcagcgcaagatgaaggagcagcaggctgctgaagaactgcgtgagaaacaagcggctgaacaggaacgcctgaagcaacttgagaaagagcggttagcggctcaggagcagaaaaagcaggctgaagaagccgcaaaacaggccgagttaaagcagaagcaagcggaagaggcggcagcgaaagcggcggcagatgctaaagcgaaggccgaagcggatgctaaagctgcggaagaagcagcgaagaaagcggcggcagacgcgaagaaaaaagcagaagcagaagccgccaaagccgcagtcgaagcgcagaaaaaagccgaggctgctgctgcggcgctgaagaagaaagctgaagcggcagaagcagctgcagctgaagcaagaaagaaagcggcaaccgaagctgctgaaaaagccaaggcagaagctgagaagaaagcggctgctgaaaaggctgcagctgataagaaagcggcagcagagaaagcggcagccgacaaaaaagcagcagaaaaagcggctgctgaaaaggcagcagctgataagaaagcagcggcagaaaaagccgccgcagacaaaaaagcggcagcggcaaaagcagcagctgaaaaagccgctgcagcaaaagctgccgcagaggcagatgatattttcggtgagctaagctctggtaagaatgcaccgaaaacggggggaggggcgaaagggaacaatgcttcgcctgccgggagtggtaatactaaaaacaatggcgcatcaggggccgatatcaataactatgccgggcagattaaatctgctatcgaaagtaagttctatgacgcatcgtcctatgcaggcaaaacctgtacgctgcgcataaaactggcacccgatggtatgttactggatatcaaacctgaaggtggcgatcccgcactttgtcaagctgcgttggcagcagctaaacttgcgaagatcccgaaaccaccaagccaggcagtatatgaagtgttcaaaaacgcgccattggacttcaaaccgtaa

SEQ ID NO: 384 - DNA, 1293 bp, Escherichia coli
atgaagcaggcattacgagtagcatttggttttctcatactgtgggcatcagttctgcatgctgaagtccgcattgtgatcgacagcggtgtagattccggtcgtcctattggtgttgttcctttccagtgggcggggcctggtgcggcacctgaagatattggcggcatcgttgctgctgacttgcgtaacagcggtaaatttaatccgttagatcgtgctcgtctgccacagcagccgggtagtgcgcaggaagtacaaccagctgcatggtccgcgctgggcattgacgctgtggttgtcggtcaggtcactccgaatccggatggttcttacaatgtcgcttatcaacttgttgacactggcggcgcaccgggtactgtacttgctcagaactcgtacaaagtgaacaagcagtggctgcgttatgctggtcataccgccagtgacgaagtatttgaaaaactgaccggtattaaaggtgcgttccgtacccgtattgcctacgttgttcagactaacggcggtcagttcccgtatgaactgcgcgtatctgactatgacggttacaaccagtttgtcgttcaccgctcaccgcaaccgctgatgtctccggcgtggtcaccagacggttctaaactggcttatgtgaccttcgaaagcggtcgttccgcgctggttattcagacgctggcaaatggcgctgtacgtcaggtggcttcattcccgcgtcacaacggtgcacctgcattctcgccagacggcagcaaactggcattcgccttgtcgaaaaccggtagcctgaacctgtacgtaatggatttggcttctggtcagatccgccaggtaactgatggtcgcagtaacaataccgaaccgacctggttcccggacagccagaacctggcatttacttctgaccaggccggtcgtccgcaggtttataaagtgaatatcaacggcggtgcgccacaacgtattacctgggaaggttcgcagaaccaggatgcggatgtcagcagcgacggtaaatttatggtaatggtcagctccaacggtgggcagcagcacattgccaaacaagatctggcaacgggaggcgtacaagttctgtcgtccacgttcctggatgaaacgccaagtctggcacctaacggcactatggtaatctacagctcttctcaggggatgggatccgtgctgaatttggtttctacagatgggcgtttcaaagcgcgtcttccggcaactgatggacaggtcaaattccctgcctggtcgccgtatctgtga

SEQ ID NO: 385 - DNA, 522 bp, Escherichia coli
atgcaactgaacaaagtgctgaaagggctgatgattgctctgcctgttatggcaattgcggcatgttcttccaacaagaacgccagcaatgacggcagcgaaggcatgctgggtgccggcactggtatggatgcgaacggcggcaacggcaacatgtcttccgaagagcaggctcgtctgcaaatgcaacagctgcagcagaacaacatcgtttacttcgatctggacaagtacgatatccgttctgacttcgctcaaatgctggatgcacacgcaaacttcctgcgtagcaacccgtcttacaaagtcaccgtagaaggtcacgcggacgaacgtggtactccggaatacaacatctccctgggtgaacgtcgtgcgaacgctgttaagatgtatctgcagggtaaaggcgtttctgctgaccagatctccatcgtttcttacggtaaagaaaaacctgcagtactgggtcatgacgaagcggcgtatgccaaaaaccgtcgtgcggtactggtttactaa

SEQ ID NO: 386 - DNA, 792 bp, Escherichia coli
atgagcagtaacttcagacatcaactattgagtctgtcgttactggttggtatagcggccccttgggccgcttttgctcaggcaccaatcagtagtgtcggctcaggctcggtcgaagaccgcgtcactcaacttgagcgtatttctaatgctcacagccagcttttaacccaactccagcaacaactctctgataatcaatccgatattgattccctgcgtggtcagattcaggaaaatcagtatcaactgaatcaggtcgtggagcggcaaaagcagatcctgttgcagatcgacagcctcagcagcggtggtgcagcggcgcaatcaaccagcggcgatcaaagcggtgtggcggcatcaacgacgccgacagctgatgctggtgctgcgaatgctggcgcgccggtgaaaagcggtgatgcaaacacggattacaatgcagctattgcgctggtgcaggataaatcccgccaggatgacgcaatggtggcatttcagaatttcatcaaaaattaccctgattcaacttacctgccaaacgccaattattggctgggtcagttaaactacaacaagggtaaaaaagatgatgcggcgtattattttgcttcggtagtgaaaaactatccgaagtcaccgaaggctgcagatgcgatgtttaaagtcggcgtcatcatgcaggacaaaggtgacaccgcaaaagcgaaagccgtataccagcaggttatcagtaaataccctggtactgatggcgctaaacaggcgcaaaaacgtctgaacgcgatgtaa

SEQ ID NO: 387 - DNA, 1224 bp, Escherichia coli
atgaaaatactggtctacggcattaactactcgccggagttaaccggcatcggcaagtacaccggcgagatggtggaatggctggcagcacaaggtcatgaggtgcgggtcattaccgcgccgccttactacccgcagtggcaggtgggcgagaactattccgcctggcggtacaaacgggaagagggggccgccacggtgtggcgctgcccgctgtacgtgccaaaacagccgagcaccctgaaacgcctgttgcatctcggcagttttgccgtcagcagtttctttcctctgatggcgcaacgacgctggaagccggatcgcattattggcgtggtgccaacgctgttttgcacgccgggaatgcgcctgctggcgaaactctctggtgcgcgtaccgtgctgcatattcaggattacgaagtggatgccatgctggggctgggccttgccggaaaaggcaaaggcggcaaagtggcacagctggcgacggcgttcgaacgtagcggactgcataacgtcgataacgtctccacgatttcgcgttcgatgatgaataaagccatcgaaaaaggcgtggcggcggataacgtcattttcttccccaactggtcggaaatcgcccgttttcagcatgttgcagacgccgatgttgatgcccttcgtaaccagcttggcctgccggataacaaaaaaatcattctttactccggcaatattggtgaaaagcaggggctggaaaacgttattgaagctgccgaacgcctgcgcgatgaaccgctgatttttgccattgtcgggcagggcggcggcaaagcgcggcttgaaaaaatggcgcagcagcgtggactacgcaacatgcaatttttcccgctgcaatcgtatgacgctttacccgcactgctgaagatgggcgattgccatctggttgtgcaaaaacgcggcgcggcagatgccgtattgccgtcgaaactgaccaatattctggcggtaggtggtaacgcggtgattaccgcagaagcccacacagaactggggcagctttgcgaaacctttccgggcattgcggtttgcgtagagccggaatcggtcgaggcgctggtggcggggatccgtcaggcgctcctgctgcccaaacacaacacggtggcacgtgaatatgccgaacgcacgctcgataaagagaacgtgttacgtcaatttataaatgatattcggggataa

SEQ ID NO: 388 - DNA, 483 bp, Escherichia coli
atgatgtttttacgtcaggaagactttgccacggtagtgcgctccacaccgcttgtctctctcgactttattgttgagaacagtcgcggcgagtttctgcttggcaaaagaaccaaccgcccggcgcagggttactggtttgtgccgggagggcgcgtgcagaaagacgaaatgctggaggccgcatttgagcggctgacgatggcggaactggggctacgtctgccgataacagcaggccagttttacggtgtctggcagcacttttatgacgataacttctccggctcggattttaccactcactatgtggtgctcggttttcgcatcagagtcgcggaagatgagctgttactgccggatgagcagcatgacaattaccgctggctgacgccggacgcgttgctcgccagtgacaatgttcacgctaacagccgcgcctattttctctctgagaagcgtgctggagtacccggattatga

SEQ ID NO: 389 - DNA, 966 bp, Escherichia coli
atgagtaaacaacgcatttttatcgctggccatcgcgggatggtcggttccgccatcaggcggcagcttgaacagcgcggtgatgtggagctggtattacgcacccgcgatgaactgaacctgctggacagccgcgcggtgcatgatttctttgccagcgaaagcattgaccaggtctatctggcggcggcgaaagtgggcggtattgttgccaacaacacgtatccggcagatttcatctaccagaacatgatgattgagagcaatatcattcaagccgcgcatcagaacgacgtgaacaaactgctgtttctcggatcgtcctgcatctacccgaaactggcaaaacagccgatggtagaaagcgagttgttgcagggcacgctggagccgaccaacgagccttatgccattgccaaaatcgccgggatcaaactgtgtgaatcttacaaccgccagtacggacgggattaccgctcagtcatgccaaccaacctgtacgggccacacgacaacttccacccgagtaattcgcatgtgatcccagcattgctgcgtcgcttccatgaggcgacggcacagaatgcgccggacgtggtggtgtggggcagcggtacgccgatgcgcgaatttctacacgttgatgatatggcggcggcgagcattcatgtcatggagctggcgcacgaagtctggcaggagaacacccggccgatgctgtcgcacattaacgtcggcacgggcgttgactgcactatccgtgagctggcgcaaaccatcgccaaagtggtgggttacaaaggtcgggttgtttttgatgccagcaaaccggatggcacgccgcgcaaactgctggatgtgacgcggctgcatcagcttggctggtatcacgaaatctcactggaagcggggcttgccagcacttaccagtggttccttgagaatcaagaccgctttcgggggtaa

SEQ ID NO: 390 - DNA, 1122 bp, Escherichia coli
atgtcaaaagtcgctctcatcaccggtgtaaccggacaagacggttcttacctggcagagtttctgctggaaaaaggttacgaggtgcatggtatcaaacgtcgtgcatcgtcattcaacactgagcgcgtggatcacatttatcaggatccgcacacctgcaacccgaaattccatctgcattatggcgacctgagtgatacctccaacctgacgcgcattttgcgtgaagtgcagccggatgaagtgtacaacctgggcgcaatgagccacgttgcggtttcttttgagtcaccggaatataccgcagacgtcgatgcgatgggtacgctgcgcctgctcgaggcgatccgtttcctcggtctggaaaagaaaacccgtttctatcaggcttccacttctgaactgtacggtctggtgcaggaaattccgcagaaagaaaccacgccgttctatccgcgatctccgtatgcggttgccaaactgtatgcctactggatcaccgttaactaccgcgaatcctacggcatgtacgcctgtaacggcattctctttaaccatgaatccccgcgccgtggcgaaaccttcgtgacccgcaaaatcacccgcgcaatcgccaatatcgctcaagggctggagtcgtgcctgtacctcggcaatatggattccctgcgtgactggggccacgccaaagactacgtaaaaatgcagtggatgatgctgcaacaggaacagccagaagatttcgttattgccactggcgttcagtactccgtgcgtcagttcgtggaaatggcggcggcacagctgggtatcaaactgcgctttgaaggcacgggtgttgaagagaagggcattgtggtttccgtcaccgggcatgacgcgccgggcgttaaaccgggtgatgtgattatcgccgttgacccgcgctacttccgtccggctgaagttgaaacgctgctcggtgacccgaccaaagcgcacgaaaaactgggctggaaaccggaaatcaccctcagagagatggtgtctgaaatggtggctaatgaccttgaagcggcgaaaaaacactctctgctgaaatctcacggctacgacgtggcgatcgcgctggagtcataa

SEQ ID NO: 391 - DNA, 549 bp, Escherichia coli
atgcaggatttaagtggattctcggtgccgaaagggttccggggtggcaacgctattaaagtgcaattgtggtgggcagtacaggcaacaatatttgcctggtcgccacaagtattgtatcgctggcgggcatttttattacgtttattcggcgcaaaaataggaaaaaacgtagttattcgtccgtcagtaaaaattacctatccgtggaaattaaccttaggtgattacgcgtgggtcggcgatgaggtcaatttatataccctcggtgaaataaccattggcgcacattcggtgatatcgcaaaaaagttatttatgcaccgggagccacgaccatgcaagtcaacatttcaccattaacgccacgcctattgtgattggcgagaaatgctggctggcaaccgatgtctttgttgcccctggcgtcacgatcggcgacggcaccgtcgtgggtgcgcgaagcagtgtttttaaatcgcttccggcaaatgtggtttgtcgggggaaccccgcagtggtgatacgcaaacgcgttgaaactgaataa

SEQ ID NO: 392 - DNA, 747 bp, Escherichia coli
atgttgcttagcataatcactgtcgcgtttcgtaacctcgcagggatagtcaaaacacacgcctcgctggcgcatctggcgcaggcggacgatatcagcttcgaatggattgttgttgatggcggttccaacgacggcacccgtgagtatctggaaaatctcaatggtatctataacctacgctttgtcagcgaaccagataacggtatctacgacgccatgaacaaaggtattgaaatggcgcaaggcaagttcgcgctgtttctcaattcaggcgatatttttcatcaggatgccgcaaattttgtccgtaagttaaaagtgcaaaaagataacatgatgatcaccggcgatgcgctgctggattttggcgacgggcataaaattaaacgtagcgccaaaccgggttggtatatttatcacagcctgcccgccagtcatcaggcgatatttttcccggtatccggtttgaaaaaatggcgttatgacctggaatataaagtttcttccgattacgcgctggcggccaaaatgtataaagcaggttatgcatttaaaaaactcaatggcctggtgtctgaattttctatgggtggggtatcaaccaccaataatatggaattgtgtgctgacgccaaaaaagtccaacggcagatattgcacgtgcctggcttttgggctgaattatcctggcatttacgccaacgtacgacctcaaagacgaaagccttatataacaaaagctga

SEQ ID NO: 393 - DNA, 1218 bp, Escherichia coli
atgtcaacttctatcagaatctgtagctacctgctgctgccgctgatctacctgctggttaacgtcaaaatcgcccagcttggcgaaagtttccccatcaccatcgtcacttttttacctgtcctgttactgctgtttttagagcgcatcagcgttaaaaaattgatgattgccttggggattggcgcgggacttacggcgtttaactacctgtttggtcagtcgctggatgccagtaaatacgtcacttcaaccatgctgtttgtctatattgtgatcattattggcatggtgtggagtattcgctttaaaacgatttcgccacacaaccatcgcaagatattacgtttcttttatctggtggtcgggttggtggtggtgctggcggcggtggagatggcgcaaattatcctcaccggcggtagcagtattatggagtcgatttcgaaatatctgatttacagcaacagctatgtgctgaatttcattaaattcggcggcaagcgcacgacagcactttatttcgaaccggcatttttcgctctggcattaatctcaatttggctcagcatcaaacagtttggtatcaaaacgcctaaaaccgatgctatgattctcgcagggataatattatccggatcgttttcaggggttatgacctttatccttttttatttgctggagtgggcatttcaatatctgaataaagaggcgattaagaaaaagttaccgttagcattgatttctctggctgtattcctggttggtgtggtaatcgcgttcccttatatttccacccgtctgggcgatttaggtacggaaggatcgtcatcgtattatcgtattgtcggtccgctggttatggtcggttattctttgacccatattgacggtgtagtcagatttggctcactttatgaatatgtcgcatcattcggaatatttaacggtgcggatgtcggaaaaaccatagacaatggtttatatttgctgattatttatttttcctggttcgcggtgcttctatcgctgtggtacatgggaaaagtgataaaaatgatgatcaacgcttttggtgataaccgcaattttcgcgtgcaattatatctttttactccggtatcgctgttttttaccggttcgatatttagcccggaatatgcatttttaatcgtctgtccgtttattttgcgaaaagcgttaaatattacgaggtaa

SEQ ID NO: 394 - DNA, 1218 bp, Escherichia coli
atgaatattctgcaatttaatgtgcgactggcggaaggcggggccgcaggtgtggcgttagatctccaccagcgtgcgctgcaacaggggctggcgtcacattttgtctacggctacggcaaaggcggcaaagagagcgtcagccatcaaaactatccgcaggtcatcaaacatacgccgcggatgaccgcgatggcgaacattgcgttgtttcgtctgcttaatcgcgatctgttcggcaatttcaatgagttatatcgcaccattactcgcacaccgggcccggtggttctgcattttcatgtgctgcacagctactggttgaatcttaacagcgtggtgcgcttttgcgaaaaagtgaaaaaccataaaccggatgtcactctggtctggacactgcacgaccactggagcgttaccggacgctgcgcctttaccgacggttgcgaaggctggaaaacgggctgccagaaatgcccgaccttaaataattatccgccggtgaagattgatcgcgcacaccaactggtggcgggcaaacggcagttatttcgcgagatgctggcgctgggctgtcagtttatttctcccagccagcatgtggctgatgctttcaatagtctgtacggtccagggcgttgccggattatcaataacggtattgatatggcaaccgaagcgattctggcggatctgcctccggtgcgcgaaacccagggcaagccgaaaatcgcagtggtggcgcatgatctgcgttacgacggcaaaactaaccagcaactggtacgcgagatgatggcgctgggtgacaaaatcgaactgcatacctttggtaagttctcgccgttcaccgctggtaacgttgtcaatcacggctttgaaactgacaagcgcaagttaatgagcgtgctcaatcagatggatgcgctggtgttcagttctcgcgtcgataactacccgctgattttgtgtgaggcgttatcgattggcgtgccggtgatcgccacccatagcgatgcggcgcgggaagtgctgcaaaaatccggtggtaaaaccgtcagcgaagaagatgtgctgcaactggtgcagttaagcaaaccggaaatcgcacaggcgatatttggtaccacgctggctgaattcagccagcgcagccgcgccgcctacagtggacaacagatgctggaggagtatgtcaacttctatcagaatctgtag

SEQ ID NO: 395 - DNA, 489 bp, Escherichia coli
atgctggaagatctgcgcgccaacagctggagtttacgcccgtgctgcatggttctcgcctatcgcgtcgctcatttttgttcggtgtggcgcaaaaagaacgtcctcaacaatctgtgggcggccccgctgctggtgctgtatcgcattatcaccgaatgctttttcggttatgaaatccaggccgccgcgaccattggccgccgctttactatccatcacggttacgccgtagtgatcaataaaaacgtggtagcgggggatgatttcaccattcgtcacggcgtcactatcggcaatcgtggtgccgataacatggcatgtccacacattggcaacggcgtcgaactcggtgccaacgtcattattcttggtgatatcacgcttggtaacaacgtcaccgtgggcgcgggcagcgtggtgctcgactctgtcccggacaacgcgctggtggtgggagaaaaagcgcgagtgaaggtaattaaatga

SEQ ID NO: 396 - DNA, 840 bp, Escherichia coli
atgaaagacaatccgctgatttcaatctatatgccgacctggaaccgccaacaactggcgattcgggcgataaaatcggtcctgcgccaggactacaacaactgggagatgattatcgtggatgattgctccacctcctgggaacaactacaacagtacgtcaccgccctcaacgatccgcgcatcacttacattcacaacgacattaacagcggagcgtgcgcggtacgtaaccaggcgattatgctggcgcaaggggaatacatcaccgggatcgatgatgatgatgaatggacacccaaccgcctgagcgtcttcctcgcccataaacagcaactggtcacaaacgcctttttgtacgctaacgactacgtttgtcagggcgaagtctattcccaaccggcaagtttgccgctgtatcccaaatcgccgtattcacgccgcctgttttacaaacgcaatatcattggcaatcaggtctttacctgggcgtggcgtttcaaagagtgcttgttcgataccgaactgaaagcggcacaggattacgacatcttcctgcggatggtggtggagtacggcgaaccgtggaaagtggaagaggcgacgcagatcctgcatatcaatcacggcgaaatgcagatcacctcgtcaccgaaaaaattctccggatacttccacttttaccgcaagcacaaagacaaattcgaccgcgccagcaaaaaatatcagctgtttaccctctaccagatccgcaataaacgcatgacctggcgcactttgctgacgctgctgtcggtgcgtaacggcaaacgtctggctgatggtattcgggggcgctaa

SEQ ID NO: 397 - DNA, 2163 bp, Escherichia coli
atgacagaaaaagtaaaacaacatgccgctccggtaacgggcagtgatgaaatcgatattggtcgcctggtcggcaccgtcattgaagcacgctggtgggtgattggcattaccgccgtattcgccctctgtgccgtggtttacaccttcttcgctacgccgatttatagcgccgacgcactggtacaaatcgagcaaagcagcggcaattcgttagtgcaggatatcggatcggcattagccaacaaaccgccagcatcggacgccgaaatccagttgattcgttcgcgcctggtgcttggtaaaacggtggacgatctcgacctcgatattgcagtgagcaaaaacacgttcccgattttcggtgcgggctgggagcgcctgatgggacgccagaacgagacggtaaaagtgaccacctttaaccgcccgaaagagatggcggatctggtgtttacgcttaatgtgctggacgataaaaactacactctgagcagcgatggcggctttagcgcccgtgggcaagcgggccagatgctgaaaaaagaaggcgtcacgctgatggttgaagccattcacgccagcccgggcagtgagtttaccgtcaccaaatactccacgctggggatgatcaaccaactgcaaaacagcctgacggtaacggagaacggcaaagacgcaggcgttttgagcctgacttataccggtgaagatcgcgaacagatccgcgacattcttaacagcatcgcccgtaactatcaggaacaaaatattgagcgcaaatcggcggaagcgtcgaaaagcctcgctttcctcgcgcaacagttaccggaagtacgtaaccgccttgatgttgccgaaaacaaactgaatgccttccgtcaggataaagattcagttgatctgccgctggaagcgaaagcggtgctcgattcgatggtgaacatcgacgcgcagttgaacgaactgacctttaaagaggcggaaatctccaagctgtacaccaaagttcacccggcgtaccgcacgctgctggagaaacggcaggcgctggaagacgaaaaagccaaacttaatggtcgcgtaacggcgatgccgaaaacccagcaggaaattgtgcgtctgacccgcgatgtcgagtctggtcagcaggtctatatgcagctgctgaataaagagcaggagctgaaaatcaccgaagccagcaccgtcggcgatgtgcgcattgttgacccggcaatcactcagcctggtgtgctaaaaccgaagaaagggctgattatccttggggcgattatccttggcctgatgctctctatcgtgggtgtgctgctgcgctcgttgtttaatcgcggtatcgaaagcccgcaggtgctggaagaacacggtatcagcgtttatgccagcatcccgctgtcggagtggcagaaagcgcgcgatagcgtcaaaaccatcaaagggattaaacgctataaacagagccagctactggcggtggggaatccaaccgatctggcgattgaagccatccgtagtctgcgtaccagtctgcacttcgcgatgatgcaggcacagaacaatgtgttgatgatgaccggggttagcccgtcaatcggtaaaacctttgtctgtgccaacctggcggcggtgattagccagaccaataaacgggtgttgttgatcgactgcgatatgcgcaaaggctacacccacgagctgttgggcactaataacgttaatggcctgtcggaaattctgattggacagggcgatattactaccgcggctaaaccgacctctattgccaaatttgacctgatcccgcgcggtcaggtgccgccaaatccttctgaactgttgatgagcgaacgctttgccgaactggtgaagtgggcgagtaaaaactacgacctggtgttgattgatacgccgccgattctggcagtgaccgatgcggctatagttggtcgtcatgtcggaaccacgttgatggtggcgcgttatgcggtcaacacattgaaagaagtggaaaccagtctgagccgctttgagcaaaacggtattccggtgaaaggggtgattctgaactccatcttccgccgcgccagcgcgtatcaggattatggctattacgaatacgaatataagtcggatgcgaaataa

SEQ ID NO: 398 - DNA, 444 bp, Escherichia coli
atgtttaacaacattttagttgtctgtgtcggcaatatttgccgttccccgacggcggaacgcttactgcaacgttatcacccggagctgaaagtggagtccgctggactcggcgcgctggtcggtaagggcgctgaccctactgctatcagcgtcgccgcagaacatcaactgtccctggaaggtcactgtgcacggcaaatcagccgccgtctgtgtcgcaactacgacctgattctgaccatggaaaagcgccatatcgaacgcttatgcgagatggcacccgagatgcgcggcaaagtgatgctgtttggtcactgggataacgaatgtgaaatccccgatccgtatcgcaaaagccgggaaacgtttacagcggtgtacacattacttgaacggtctgcccgccagtgggcgcaggcattgaacgcagagcaggtataa

SEQ ID NO: 399 - DNA, 1140 bp, Escherichia coli
atgatgaaatccaaaatgaaattgatgccattattggtgtcagtaaccttgataagcggttgcacagtacttccgggcagcaatatgtcgacgatggggaaagacgtcatcaaacagcaggacgctgatttcgacctcgacaaaatggtgaatgtttatccgttaaccccgcgcctgattgatcaattacgcccacgacccaacgtagcgcgccccaatatgacgctggaaagtgagatcgcgaattaccagtatcgcgtcgggccgggggacgttcttaatgtcaccgtctgggatcacccggaactcaccacgccagccggtcagtaccgcagctccagcgacaccggcaactgggtacagcctgacggcaccatgttctacccgtatatcggcaaggttcacgtcgtggggaaaacgctcgctgaaatccgcagtgatattaccgggcgcttagcgacgtatatcgctgacccgcaggtggacgttaatatcgccgccttccgctcgcaaaaagcctatatctccggtcaggtgaataaatccggtcaacaggcgattaccaacgtgcctctgaccattctcgacgctatcaacgccgcaggtggcctgaccgacaccgctgactggcgcaacgtggtgctaacacacaatggtcgtgaagagcgcatttctttgcaggcgctgatgcaaaacggcgacctcaatcagaaccgactgctttaccccggcgatattctttacgtgccacgtaatgatgatctgaaagtgtttgtgatgggtgaagtgaagaaacagagcaccctgaaaatggactttagcggcatgaccctgactgaagccctgggcaatgctgaaggcatcgacatgaccacctccaacgccagcggcatctttgtcattcgtccgctgaaaggcgagggcgggcgtaacggcaagattgccaacatctaccagctggatatgtccgatgcgacgtcgctggtaatggcgacagaattccgcctgcaaccttatgacgtggtgtatgtcaccaccgccccggtatcccgctggaaccgtctgatcaatcagttgctgccaactattagcggtgtccgttacatgacggatacagccagcgacattcataactggtaa

SEQ ID NO: 400 - DNA, 1584 bp, Escherichia coli
atggaatggattgccgatccgtctatctgggctgggttaatcacgctgattgtgatcgaactggtcctcggcattgataacctggtctttattgccatcctcgccgaaaaactaccgcctaagcagcgcgaccgcgcacgggttaccgggctcctgctggcgatgttaatgcgcctgttactgctggcgtcaatctcctggctggtcaccctgactcaaccgctgttcagcttccgctcgtttacctttagcgcccgcgatttaatcatgctgtttggtggtttcttcctgttgttcaaagccacgatggagctgaacgaacggctggaagggaaagacagcaataaccccacccaacgcaaaggtgcgaagttctggggggtggtgacacaaattgtggtactggacgccatcttctcactcgactcggtgattaccgccgtcgggatggtcgaccatttactggtcatgatggccgccgtggttatcgctatcagcctgatgttgatggccagcaagccgttaacccagttcgttaacagtcacccgacgatcgttattctctgcttaagcttcctgttgatgattggctttagcctggtggcggaaggtttcggcttcgtcattccgaaaggctacctgtacgctgccattggtttctcggtgatgatcgaggcactcaatcagttggctatctttaaccgacgacgttttctttccgctaaccagacactgcgccagcggactaccgaagcggtaatgcgcctgcttagcgggcaaaaagaagatgcggaactggacgccgaaaccgcgtccatgctggtggatcatggtaaccagcagatctttaatccgcaggaacggcggatgattgagcgggtacttaatcttaaccagcgtaccgtcagcagcattatgacgtcgcgccacgatattgagcatatcgatctcaacgcgccggaagacgagatccgccagttactggagcgaaatcagcatacgcggcttgttgttactgatggcgatgacgcagaagatttgctcggtgttgttcacgttatcgacctgttacaacagtcactgcgcggcgaaccgctcaacctgcgggtgttgattcgtcagccgctggtgttcccggaaaccttgccgttgttacctgccctggagcagttccgtaatgcccgcacacactttgcttttgtggtggatgagtttggctcggtggaagggattgtgacattaagtgacgtcactgaaaccattgccggtaacttaccgaacgaagtggaagagatcgacgcccgccatgatattcagaagaatgcggacggttcctggacggcgaatggccatatgccgctggaagatctggtgcaatatgtgccgctgccgctggatgaaaaacgtgaatatcacaccattgccgggctattgatggaatatttgcagcgtattccaaaacctggcgaagaagttcaggtgggggattatttgcttaaaacgttgcaggtggaaagccatcgcgtgcagaaggtacagattattccgctgcataaggatggcgagatggagtacgaggtgtga

SEQ ID NO: 401 - DNA, 1854 bp, Escherichia coli
atgagacgatttctgacgacgctgatgatactcctggtcgtgctggtggccgggttatctgcgttagtgttgctggtgaatccgaatgatttccgcgactatatggtcaagcaagttgctgcacgtagcggttatcaattgcagctcgacgggccactgcgttggcacgtctggccgcagcttagtatcctctccgggcgaatgtctctcaccgcccagggcgcaagccagccactggttcgcgccgacaacatgcgtctggacgtggcgcttttaccactactgagtcatcaactgagcgttaagcaggtgatgctaaaaggggcagtgatccaactgacgccgcagacggaagcagtgcgcagtgaagacgctccggttgcaccgcgcgacaataccttgccggatctgtcagacgatcgcggatggtcgtttgatatatccagtcttaagatggcggacagcgtgctggtgttccagcatgaagatgacgagcaggtgacaatccgcaatatccgcctgcaaatggaacaagatccccaacatcgtggctcatttgagttctccgggcgggttaatcgcgatcagcgcgacctcacgatatcccttaacggtacggtagatgcttctgattatccgcatgatttaacggcggctattgaacaaattaactggcagttgcagggtgccgatttaccaaaacaaggtattcaggggcaggggagtttccaggcccagtggcaggagtcacataaacgcctttcatttaaccaaattagtttgaccgccaatgacagtacgctgagcgggcaagcacaggtcacgttgacagagaaaccggaatggcagctgagactgcaattcccgcaactgaatcttgacaacctcatcccgcttaaagaaacagcgaacggtgaaaacggtgccgcgcagcaagggcagagccaatcaacgttgccgcgcccggtcatttcttcgcgtattgatgaaccggcctatcagggattgcatggctttacggctgatattttgttgcaggccagtaacgtgcgctggcgcggaatgaattttacagacgttgccacgcaaatgaccaacaagtcgggtttgctggaaattactcaactgcagggcaagcttaacggtggacaggtttcgctgccgggcacgctggacgcgacatcaataaatccgcggataaacttccagccacggctggaaaacgttgagattggtaccattctgaaggcgtttaactatccgatttcgttgaccggaaagatgtcactggctggtgatttctccggtgctgacatagatgccgacgcattccgccataactggcaaggacaggcacatgtcgaaatgaccgacacgcgcatggaagggatgaacttccagcagatgattcagcaagcggtagaacgtaatggtggtgatgtgaaggccgctgaaaacttcgataacgtaacgcgtcttgaccgctttaccaccgatttgacgttgaaggatggcgtcgtgacgttaaacgacatgcaaggtcaatcgcctgtgctggcgctgacaggggaaggcatgttgaatctggcggagcaaacctgtgacacccagtttgatattcgggtcgtgggtggctggaacggggaaagcaaactgattgatttcctgaaagaaacgccagtaccgctgcgggtttatggcaactggcagcaacttaattacagcctgcaagtggatcagttactgcgtaaacatctacaggatgaagcaaaacgccgtcttaacgactgggccgagcggaataaagattcccgcaatggcaaagatgtgaagaagttgctggagaagatgtag

SEQ ID NO: 402 - DNA, 582 bp, Escherichia coli
atgcgtctgtgtgaccgagatattgaagcctggcttgatgaaggccgtttgtcgatcaacccacgtccgccagtggagcgtattaacggcgcgacggtggatgtgcgcctgggcaataaatttcgtaccttccgtggtcacacggcagcgtttatcgatctgagcggtcccaaagatgaagtgagcgccgcgcttgaccgcgtgatgagcgatgaaatcgtgctcgacgagggcgaggcgttttatcttcacccaggagagctggcgctggcggtgacgctggagtcggtgacgctgccagccgatctggtgggctggctggacgggcgttcttcactggcgcgtctggggctgatggtgcacgtcaccgcgcaccgtatcgatccgggctggtctggctgcattgtgctggagttttacaactccggtaagctgccgctggcgctgcgtccgggcatgttaattggtgcgctgagctttgagccgctctccggcccggcggcgcgaccttacaaccgccgtgaagatgcgaaatatcgcaaccagcagggcgcggtagccagccgaatcgataaagactaa

SEQ ID NO: 403 - DNA, 642 bp, Escherichia coli
atgactgatcagtctcatcagtgcgtcattatcggtatcgctggcgcatcggcttccggcaagagtcttattgccagtaccctttatcgtgaattacgtgagcaagtcggtgatgaacacatcggcgtaattcccgaagactgctattacaaagatcaaagccatctgtcgatggaagaacgcgttaagaccaactacgaccatcccagcgcgatggatcacagcctgctgcttgagcatttacaagcgttgaaacgcggctcggcaattgacctgccggtttacagctatgttgaacatacgcgtatgaaagaaacggtgacggttgagccgaagaaggtcatcattctcgaaggcattttgttgctgacggatgcgcgtttacgtgacgaacttaacttctccattttcgttgataccccgctggatatctgcctgatgcgccgcatcaagcgtgacgttaacgagcgtgggcgttcaatggactcagtgatggcgcaatatcaaaaaaccgtgcgcccgatgttcctgcaattcattgagccttctaaacaatatgcggacattatcgtgccgcgcggcgggaaaaaccgcatcgcgatcgatatattgaaagcgaaaataagtcagttctttgaataa

SEQ ID NO: 404 - DNA, 3318 bp, Escherichia coli
atgagcaaacaatcacagcatgtattaattgccctgccccacccgctgcttcacctggtcagtttaggtttagtctcgtttatcttcacccttttctcacttgagctttcgcagtttggcacccaactcgccccactgtggttcccgacctccatcatgatggtggcgttttatcgccatgccgggcgcatgtggccgggaattgcgctgagctgctcgctgggaaatatcgccgcatccatcctgcttttttccaccagctcgctgaacatgacctggacgaccatcaatattgttgaagccgtggtcggggcagtgctgctacgtaaattgctgccgtggtataaccccttgcaaaatctggctgactggctgcgtctggcactcggcagcgccattattccgcctctgttggggggtgttctggttgtcctgctgacgcccggagacgatcctctcagggcatttttgatatgggtactgtcagaatccatcggcgctctggcactggtgccgctgggattgttatttaaaccacactatctgctgcgccatcgcaacccaaggttgctttttgagtcgctgctcacgttagccatcacgctgacgttaagctggctttcgatgctgtatctgccgtggccttttactttcattattgtgctgttgatgtggagcgccgtgcgcctgccacgaatggaagcctttttgatcttccttaccacagtgatgatggtgtcgctgatgatggccgcggatccctccctgcttgctacgccgcgtacgtacctgatgagccatatgccgtggctaccgtttttgctgatcctgctgcccgccaacatcatgacgatggtgatgtatgcctttcgtacggaacgcaaacacatttccgaaagcgaaacccgctttcggaacgcgatggaatattccgctatcggcatggcgttagtgggcaccgagggacaatggctgcaatccaacaaagcgctctgccagtttctcggttacagtcaggaagagctgcgcggactcacctttcagcaactgacctggccggaggatctcaataaagatctccaacaggttgaaaagctgataagcggtgaaataaacacctattcaatggaaaaacgttactacaaccgcaatggcgatgttgtctgggcgttgcttgccgtctcactggtgcgccacacggatggcacgccgctctattttatcgctcagattgaagacattaacgagctaaaacgcaccgaacaggtcaatcaacaactgatggagcgcatcacgctggccaacgaagcgggcgggattggcatctgggagtgggagctgaagccgaatatttttagttgggataagcggatgttcgagctgtatgaaattcctccgcatatcaaaccgaactggcaggtgtggtacgagtgcgtgctgccggaagatcgccagcacgccgaaaaagtgattcgtgattcgttgcaatcacgctcgccctttaaactggaatttcgcattgccgtgaaagacggtattcgccatatccgcgctctcgccaaccgggtactgaataaagaaggcgaagttgaacgcctgctcggcattaatatggatatgacggaggttaaacagcttaacgaggcattgtttcaggaaaaagagcgcctgcacattacgctggactccatcggcgaagccgtggtctgtattgatatggcaatgaaaattacctttatgaatccagtggcggagaaaatgagcggctggacgcaggaagaagcgttaggtgttccgctcctgacggtgttgcatattacttttggcgacaacggaccattaatggagaacatttacagtgctgacacctcacgttccgcgatcgaacaagatgtggtattgcactgccggagcggcgacagctacgacgtgcattacagtattacgccgttaagtactctggacggcagcaatataggctcggtactggtgattcaggacgttaccgaatcacgcaaaatgctgcgccagctgagctacagcgcctcccatgatgcactgacgcatctcgccaatcgcgccagttttgagaagcaactgcgtatcctgctgcaaacggtaaacagtacgcatcagcgacatgccctggtgtttatcgatcttgatcgctttaaagcggtgaatgacagcgccgggcatgcggcgggcgacgctttactgcgcgaactggcgtcgttgatgctgagtatgctgcgctccagcgacgtgctggcgcggctcggtggtgatgaatttggtctgctactgccagactgcaatgttgaaagcgctcgttttatcgctacacgcattatcagtgccgtgaatgactatcactttatatgggaaggacgtgtgcatcgggtaggtgccagtgccgggattaccttgattgatgacaacaatcatcaggcagctgaagtgatgtcgcaggctgatatcgcctgttatgcctccaaaaatggtggccggggccgggtgacgatttacgaaccgcagcaagctgccgcacatagcgaacgggcagcgatatcgcttgatgaacagtggcggatgattaaagagaatcagttgatgatgatcgcccacggcatcgcttcgccacggctcccggaagcaagtaatttgtggctgatttcacttaagctctggagttgcgaaagcgagattattgatgaacaaacatttcgtcgtagcttcagcgatccggcacttagccatgctcttgaccaacgggtatgccacgattttttccagcaggccgcaaaagcggttgccagtaaaggcttaagcatcgccctccccctttccgttgctggtttgagtagcgccacgctggtgaatgaactgcttgagcagctggaaaatagccctctaccagcacggttattacatctgattattccggcagaagcgattttcgatcacgcagaaagcgtgcaaaaactgcggctggcgggatgtcggatcgtattcagtcaggtgggccgagatctgcaaatcttcaactcgctgaaagcaaatatggcagattacctgctacttgatggtgagttatgcgccaacgtgcagggtaatttgatggatgagatgctgattacgattattcaggggcacgctcagcgactcgggatgaaaaccatcgccgggccagtcgttttacccttagtgatggatacgctttcgggcatcggcgtcgatctgatttatggtgatgtgattgccaatgcccaaccgctggatttgctggtgaatagaagttatttcgcgattaactaa

SEQ ID NO: 405 - DNA, 849 bp, Escherichia coli
atgtataccctgaactggcagccgccgtatgactggtcgtggatgttgggatttctcgccgcccgtgcggtgagcggcgtggaaacggtcgcggacagttattatgcccgtagtctggcggtaggcgaatatcgcggcgtggtgactgctattccggatatagcccgccatactctgcacataaatttaagtgcaggtttagaacctgttgccgctgagtgtctggcgaaaatgagccgcctgtttgatctgcaatgtaacccgcagattgttaacggtgcgttgggcaagttaggcgcggcgcggccaggattgcatttacctggttgtgttgacgcttttgagcagggcgtgcgggcgattttaggccaactggtgagcgtggcgatggcggcaaaattgacctccagagtggcacagctttatggcgaacggctggatgattttccggattatgtctgcttccccacgcctcagcggctggcagtagccgacccgcaggcattaaaagcgttaggtatgccgttgaaacgggcagaggcgctgattcatctggcaaattcggcgctggagggcaccttaccaatgacaataccgggcgacgtagaacaagcgatgaaaacgctgcaaacctttccgggtatcggacgctggacggcaaattattttgctttgcgtggctggcaggcgaaagatgtttttctgccggatgattatctgattaaacagcgatttccgggaatgacgccggcacaaatccgccgttatgccgaacgctggaagccctggcgttcttatgcgctgttgcatatctggtatacggaaggctggcaaccagacgaagcatga

SEQ ID NO: 406 - DNA, 1353 bp, Escherichia coli
gtgtttattggttttgattacggtacagcaaactgttcagtggcggtcatgcgcgacggtaaaccgcatttgctaaaaatggaaaacgacagcacgctgctgccttcaatgctttgcgcgccaacgcgtgaagcggtaagcgaatggctgtaccgccatcatgatgttccggcagacgacgatgaaacgcaggcgctgttgcgtcgggcgattcgttataaccgcgaagaagatatcgatgtcacggcgaaaagcgtgcagttcggtctttcttcactggcacaatacattgatgatccggaagaagtgtggtttgtgaaatcaccaaaatcgttcctcggtgccagcggcttaaaaccgcagcaggtagcgctgtttgaggatctggtctgcgcaatgatgttgcacattcgccaacaggcgcaggcgcagctgccggaggcaattactcaggcggtgattggtcgcccgatcaacttccaggggctgggcggtgatgaagcaaacacccaggcgcaagggattctggaacgcgcggcgaagcgtgccggatttaaggatgtggtattccagtacgagccggtcgcggctgggctggattacgaagccaccttgcaggaagaaaaacgagtgctggtagtggatatcggcggtggtacgactgactgttcattgctgctgatggggccgcaatggcgttcgcgtctcgatcgtgaagccagcctgctgggtcatagtggttgccgtattggtggtaacgatctggatatcgcactggcgtttaagaacctgatgccgttactgggcatggggggcgaaaccgaaaaaggcatcgccctgccgattctgccgtggtggaatgcggttgccatcaacgacgtccctgcgcagagtgatttctacagtagtgccaacggtcgtctgcttaacgatctggtacgcgatgcccgtgaaccggaaaaagtggccctgttacagaaagtctggcgtcagcgtttaagctatcgcctggtgcgtagcgcagaagagagcaaaatcgccctttcaagtgtagcggaaacccgcgcctcactgccgtttatcagcgatgaactggctacgctgattagccagcaagggctggaaagcgccctcagccagccactggcgcggattctggaacaggtgcaactggcgctggataacgcccaggaaaaaccggacgttatctacctgaccggcggtagcgcccgttcgccgctgattaaaaaagcgctggcagaacagttgccgggcattccggttgcaggcggcgatgactttggctccgtcaccgccgggctggcacgctgggcggaagtggtgtttcgttaa

SEQ ID NO: 407 - DNA, 1941 bp, Escherichia coli
atgaaacccactttatatactgctactggtgagtgcgttacgccaggccgtgaactgggcaaaggcggcgaaggtgcggtttatgatatcgaggagtttgtcgatagcgtcgccaagatttatcacacgccgccacccgccttaaaacaggacaaacttgcctttatggctgcgacagctgacgcgcagttgttgaattatgtcgcctggccgcaggcaacgcttcacggtggacgaggcggaaaagttatcggttttatgatgccaaaagtttctggtaaagaaccgattcatatgatctatagcccggcacatcgtcgccagagttaccctcattgtgcgtgggattttctactctatgttgcgcgcaatattgcttcatcttttgctactgttcatgagcacgggcacgtcgtgggtgacgtaaaccagaacagctttatggtaggtcgcgacagcaaagtggtgttgattgatagcgactcctttcagattaatgccaatggtacactgcatttatgcgaagtcggcgtgtcgcattttacgccgccagagctgcaaaccatgccatcatttgtcggctttgaacgcacagaaaatcacgataattttggccttgcgttgctgatatttcacgtcttgtttggtgggcggcatccttattccggtgtaccgcttatctctgatgcgggtaatgcgctggagatggatattgcccatttccgttatgcctacgcgtcagataatcagcgacgtggtttaaaaccgccgccacgatcgattccgctgtcgatgttaccgggcgatgttgaagccatgtttcagcaggcattcacggaaagtggcgtggcaaccgggcgtccgacggcaaaagcgtgggtagcggcacttgatttactacgccaacagttaaagaaatgtaccgtttcggcaatgcatgtttaccccgctcatttgactgactgcccgtggtgtgcgctggataatcaaggcgttatctattttattgatctcggtgaagaggtcattaccaccggcggtgattttgtgctggcgagagtctgggcgatggtgatggcatcagtagcaccgccagcattgcaactgccattacccgatcatttccaaccgactggcaggccgcttccttcaggcctgttacggcgcgaatacatcattctgattgagatcgcactgtcagcgttatcgctgttgctttgcggccttcaggcagaaccgcgttatattattttgattcctgtgctggcggctatctggattattggcagcctgacaagcaaagcgtacaaagcagaaatccagcaacgccgtgaggcgtttaatcgcgcgaaaatggactatgaccatttagtcagccagatccagcagttgggcgggctggaaggttttatcgccaaacgggcgatgctcgaaaaaatgaaggacgaaattctcgggttaccggaagaagagaaacgcgctctggtagcacttcacgacaccgcaagggaacggcagaagcagaagtttctggagggattttttattgatgttgcctctattcccggcgttggccctgcgcgtaaagcggcgttacggtcctttggtattgaaacagcagcggatgttacccgacggagcgttaagcaagtaaaaggttttggtgatcatctgacccaggcggttatcgactggaaagcgagctgtgaacgccgttttgtgttcaggccgaacgaagcggtaacgcctgcagacagacaagcggtaatggcaaaaatagccgccaaacgacatcggctggaatcggcgctgactgtcggcgcgacagagttgcagcgattccgccttcatgcgccagcacggaccatgccgttgatggaaccgctacgtcaggcggcagaaaaactggctcaggcgcaggcagatttaagccgttgctga

SEQ ID NO: 408 - DNA, 681 bp, Escherichia coli
atgcaggttgcctggctaaatgaccagcagccattattgtcggtattcgtcgctgatggcgcaggcagcgtctcgcaggggggcgaaggtgcgatgctcgccgtcaatgaagcgatggcttatatgtcgcaaaaagtgcagggcggggaattggggcttaatgatgtcctcgcaacggacattgtgctgaccattcgtcagcgactttttgccgaggcggaagccaaagaattagcggttcgcgattttgcctgcacgtttttgggattgatttcatcagctaatggcaccttgattatgcagattggcgatggcggcgtggtggtagatttgggtcacggtttgcaactgccgctcacgccgatggtgggtgaatatgccaatatgacgcacttcattaccgatgaagatgccgtttccagactggaaactttcaccagcactgagcgtgcgcacaaagttgcagcatttacggatggtatccagcggctggcgttaaatatgctggataattctccgcatgtgcctttctttaccccgtttttcaatgggctggcgtcagcaacgcaggaacaactcgatttattacctgaattgttaaagcagtttttgtccagcccggcggtaaacgagcgtacggatgatgataaaacgttggcactggcgctgtggttaccatga

SEQ ID NO: 409 - DNA, 660 bp, Escherichia coli
atgagcgaacaaatcacgtttgccaccagcgattttgccagtaacccggaaccacgttgcccctgcattttgctgctggatgtttctggttctatgaacggtagacccattaatgaacttaacgccggattggttacctttcgcgatgagctgcttgccgattcgctggccttaaaaagagtggaactcggcattgtgacgttcggcccggtgcatgtggaacaaccctttaccagcgccgctaattttttcccgcccatcctgtttgcccagggcgatacaccaatgggcgctgccattaccaaagccctggatatggttgaggagcggaaacgtgaatatcgtgccaatggtatttcctattatcgtccgtggattttcctgatcaccgatggcgcaccaaccgatgagtggcaggctgccgccaacaaagtgtttcagggggaagaagataagaagtttgccttctttaccatcggtgttcagggggcggatatgaagacgctggcccaaatcagcgtccgtcagcctttgtctctgcagggattacaattccgtgaactgtttagctggttatccagttcgctgcgttcggtttcccgctccacgccgggaacggaagttgtgctggaagcgccaaaaggctggacgtcagtgtga

SEQ ID NO: 410 - DNA, 1248 bp, Escherichia coli
atgaaaggcagttataaatcccgttgggtaatcgtaatcgtggtggttatcgccgccatcgccgcattctggttctggcaaggccgcaatgactcccagagtgcagcccctggggcgacgaaacaagcgcagcaatcgccagcgggtggtcgccgtggtatgcgtgccggcccattagctccggttcaggcggcgaccgcagtagaacaggctgttccgcgttacctcaccgggcttggcaccattaccgccgctaatactgttacggtgcgcagccgcgtggacggtcaattgatggcgttacatttccaggaaggccagcaggtcaaagcaggcgatttactggcagaaattgacccaagccagttcaaagttgcattagcacaagcccagggccaactggcaaaagataaagccacgctcgccaacgcccgccgtgacctggcgcgttatcaacaactggcaaaaaccaatctcgtatctcgtcaggaactggatgcccaacaagcgctggtcagtgaaaccgaaggtaccattaaggctgatgaagcaagcgtcgccagcgcgcaattgcaactcgactggagccgtatcaccgcaccagttgatggtcgcgttggtctcaagcaggttgatgttggtaaccaaatctccagtggcgacaccaccgggattgtggtgatcacccaaacacatcctatcgatctggtctttactctgccggaaagcgatatcgccaccgttgtacaggcacaaaaagccggaaaaccgctggtggtagaagcctgggatcgcaccaactcgaagaagttaagtgaaggcacgctgttaagccttgataaccaaatcgatgccactaccggtacgattaaagtgaaagcacgctttaataatcaggatgatgcgctgtttcccaatcagtttgttaacgcgcgcatgttagtcgacaccgaacaaaacgccgtggtgatccccaccgccgctctgcaaatgggcaacgaaggccattttgtctgggtactgaatagcgaaaacaaagtcagcaaacatctggtgacaccgggcattcaggacagtcagaaagtggtgatccgcgcaggtatttctgcgggcgaccgcgtagtgacggacggaattgatcgcctgaccgaaggggcgaaagtggaagtggtggaagcccagagcgccactactccggaagagaaagccaccagccgcgaatacgcgaaaaaaggagcacgctcctga

SEQ ID NO: 411 - DNA, 1599 bp, Escherichia coli
atgcaggtgttacccccgagcagcacaggcggcccgtcgcgcctgtttattatgcgtcctgtcgccaccacgctgctgatggtggcgatcttactcgccgggattatcggttatcgcgccctgcccgtttcggcgctgccggaagtggactatccaaccattcaggtggtcacgctttatccaggtgcgagcccggatgtcatgacctctgccgttaccgcgccgctcgaacgccagttcgggcagatgtctggcctgaaacagatgtcgtcgcaaagttccggcggtgcgtcagttatcactttacagttccagctaacattgccgctggatgtcgccgagcaggaagtgcaggccgcgattaacgctgcgaccaacctgctaccgagcgatctgcctaacccgccggtttacagcaaagtgaacccggcagatccaccgatcatgacgctcgctgtcacctcaaccgccatgccgatgacgcaggtggaagatatggtggaaacccgcgtcgcgcagaaaatctcgcagatttccggcgtagggctggtgacactttccggcgggcagcgtccggcggtacgcgtaaaactcaacgctcaggcaattgccgctctcggcctgaccagcgaaagtgtgcgcaccgctattactggcgcgaacgttaactcagcgaaagggagccttgacggcccttctcgcgcggtcacgctttccgcgaacgaccagatgcaatcggcagaagagtatcgtcagctaatcatcgcctaccagaacggcgcaccaattcgtcttggcgatgtcgcaaccgtagagcaaggagcagaaaacagctggctcggcgcgtgggcgaacaaagaacaggccattgtgatgaatgttcagcgccagcccggtgctaacattatctccaccgccgacagcatccggcagatgctaccacagctcaccgagagtctgccgaaatcggtgaaggtgacggtactttctgaccgtaccaccaatatccgcgcatcggtcgacgatacccagtttgagctgatgatggctatcgcgctggtagtcatgattatctacctgtttttgcgcaatattccggcgaccatcattcccggtgttgctgtaccgctgtcgttaatcggcacctttgcggtcatggtgtttctcgatttttcaatcaataacctgacgttgatggcgttaactatcgccaccggattcgtggtcgatgacgccatcgtggtgatcgaaaacatttcccgctatatcgaaaaaggcgaaaaaccgttggcggcggcgctcaaaggcgcgggtgaaatcggctttaccattatctcgctgaccttctcgctgattgcggtgttgatccccctgctgtttatgggcgatatcgtcgggcgactgttccgcgaatttgctattaccctggcagtcgcgattttgatctcggcggtggtgtcgctgaccctgacaccgatgatgtgcgcgcggatgctcagccaggagtcgctgcgtaaacagaaccgcttctcccgtgcctcggagaaaatgttcgacaggataatcgccgcctatggtcgtggactgcgaaagtgctga

SEQ ID NO: 412 - DNA, 1530 bp, Escherichia coli
gtgctgaatcatccgtggctgaccttaagcgtggcgctcagcacgctgctgcttagcgtgctgctgtgggtgttcattccgaaaggtttcttcccggtgcaggacaacggcattattcagggcactttgcaggcaccgcaatccagctcctttgcgaatatggcccagcggcaacgccaggtcgcggacgtgattttgcaggatccggcagtgcaaagtttgacctcatttgttggcgttgatggcactaacccgtcgctgaacagtgcgcgtttacagatcaatctcaaaccactggatgaacgagatgaccgggtgcaaaaagtcatcgcccgtctgcaaacggcggtggataaagtgccgggcgtcgatctcttcctgcaaccaacgcaggacctgactattgatactcaggtcagccgcacccagtaccagtttaccttgcaggccacgtcactggatgcgctcagtacctgggtgccacagttgatggaaaaactccagcagctgccacagctttctgatgtctccagcgactggcaggacaaagggctggtggcgtatgtcaatgtcgacagggacagcgccagccgtctggggatcagcatggcggatgtcgataacgccctgtacaacgcgtttggtcagcgactgatttccactatttatactcaggctaaccagtatcgcgtggtgctggaacacaacaccgaaaataccccaggcctcgcggcgctggataccattcgcctgaccagcagcgacggtggcgtggtgccgttaagctcaattgccaaaattgagcagcgttttgcgccgctttccatcaaccatctggatcagttcccggtaacgactatctcctttaacgtgccggataactattcgctgggcgatgcggtgcaggcgattatggacacagagaagacgctgaatctgccggtggatatcaccacgcagttccagggcagcaccctcgccttccagtcggcattgggcagcactgtctggctgattgtcgcggcggtggtggcgatgtatatcgtgctcggcattctgtacgagagctttattcacccgatcaccattctctcgacgctacccaccgcaggggtcggcgcgctgctggcgttaatgattgccggtagcgaactggatgtgattgccattatcggcattattttgctgatcggtatcgtgaagaagaacgccatcatgatgatcgacttcgcgctggctgctgagcgcgagcaaggcatgtcgccgcgcgaagctatttaccaggcttgtctgttgcgttttcgtccgatcctgatgaccactctggcggctctgcttggtgcgctgccgctgatgttgagtaccggggtcggcgcggaactgcgtcgtccgttaggtatcggcatggtcggcggtctgattgtcagccaggtgctgacgctgtttaccacgccggtgatttatctgctgttcaaccgtctggcattgtggaccaaaagccgctttgcccgtcatgaagaggaggcgtaa

SEQ ID NO: 413 - DNA, 3078 bp, Escherichia coli
gtgaagttttttgccctcttcatttaccgcccggtggcgacgattttactgtcggtcgccattaccctgtgcggcatactgggtttccgtatgctgccagtcgccccgctgccgcaggtcgattttccggtgatcatggtcagcgcctcgctgcccggtgcgtcaccagaaacaatggcgtcttccgttgccacgccgctggagcgctcacttgggcgcattgccggagtcagcgaaatgacctccagcagttcgctcggcagcacgcgcattattttgcagtttgattttgaccgggatatcaacggcgcagcgcgcgatgtgcaggcggcgatcaacgccgcgcaaagtctgctacccagcgggatgcccagccgtccgacctatcgcaaagcgaacccgtcggatgcgccaattatgatcctcacgctgacatccgatacttattcgcagggtgaactgtacgatttcgcctcgacacagctggctccgacgatttcgcaaatcgacggtgtcggtgatgtcgatgttggcggcagctcgctgcccgccgtacgcgtcgggctgaacccgcaagcgctgtttaatcagggcgtgtcgctggacgatgtgcgcaccgccatcagcaatgccaacgtgcgtaaaccgcagggggcgctggaagatgatactcaccgctggcagatccagactaacgatgaactgaaaaccgccgctgaatatcagccgctgattattcattacaacaacggcggcgcggttcgtctgggcgatgtggcgacggtgaccgattcggtgcaggatgtgcgcaacgccgggatgaccaacgccaaaccggctattctgctgatgatccgcaaactgccggaagccaatattatccagacggtagacagcatccgcgcccgtctgccggaattacaatccaccatcccggcagcaattgatctgcaaattgcccaggatcgctcccctactatccgcgcgtcgctggaagaggttgagcagacgctgattatctcggtggcgctggtgattctggtggtgtttttgttcctgcgttcgggtcgcgccaccattattcccgccgttgcggtgccggtttcgctgattggtacgtttgcggcgatgtacctgtgtggtttcagtctcaataatctttcgttaatggcgctcaccatcgccactggctttgtggtggatgacgccatcgtggtgctggaaaacattgcccgtcatctggaagcggggatgaaaccgctacaggccgcgctgcaaggtactcgcgaagtcggctttacggtgctgtcgatgagtctgtcactggtggcggtgttcctgccgctgctgttgatgggcggattgccgggtcgcctgttacgcgagtttgccgtgacgctttctgtcgccattggtatttcgctgctggtttccctgacgttaacgccgatgatgtgcggctggatgctaaaagccagcaagccgcgcgagcaaaagcgactgcgtggctttggtcgcatgttggttgctctgcaacaaggctacggcaagtcgctaaaatgggtgctcaatcatacccgtctggtgggcgcggtgctgcttggcaccattgcgctgaatatctggctgtatatctcgatcccgaaaaccttcttcccggagcaggacaccggcgtactgatgggcgggatacaggctgaccagagtatttcgtttcaggcgatgcgcggtaagttgcaggacttcatgaaaattatccgtgacgatccggcggtggataatgtcaccggctttaccggcggttcacgggtgaacagtggaatgatgtttatcacccttaaaccacgcggcgagcggagcgaaacggcccaacagattatcgatcgcttgcgtaaaaaactggcgaaagaaccgggagcgaatctgttcctgatggcggtacaggatattcgcattggcggacgtcaggctaacgccagctaccagtacacattattgtccgacgatctggcggcactgcgcgaatgggagccaaaaatccgcaaaaaactggcgacattgccagagctggctgatgttaactccgatcaggaagataatggcgcggagatgaaccttatttacgatcgcgacactatggcgcgattgggaattgacgtgcaagccgccaacagcctgttaaataacgccttcggtcagcggcaaatctcgaccatttaccagccgatgaaccagtacaaagtggtgatggaagttgatccgcgctatacccaggacatcagtgcactggaaaaaatgttcgttatcaataacgaaggaaaagcgatcccgctgtcgtatttcgctaaatggcaaccggcgaacgctccactgtcggtgaatcatcagggattatcggcggcctcgaccatttcgttcaacctgccgaccgggaaatcgctctcggacgccagtgcggcgatcgatcgcgcaatgacccagcttggtgtgccttcgacggtgcgcggcagttttgccggaacagcgcaagtgttccaggagacgatgaactcacaggtgatcctgattatcgccgccatcgccacggtatatatcgtactgggtatcctttacgagagttatgtgcatccactgacgattctctccaccctaccctcggcgggcgtcggagcgctgttggcgctggagctgttcaatgccccgttcagcctaattgcgctgatagggatcatgttattaatcggcatcgtgaagaaaaacgccattatgatggtcgattttgcgcttgaagcccaacggcacggtaacctgacgccgcaggaagctattttccaggcctgtctgctgcgttttcgcccgattatgatgactaccctggcggcgctgtttggtgcgctaccgctggtattgtcgggcggtgacggctcggagttgcgccaaccattggggatcaccattgtcggcggtctggtcatgagccagcttctgacgctgtataccacgccggtggtgtatctctttttcgaccgtctgcggctgcgtttttcgcgtaaacctaaacaagcggtaaccgagtaa

SEQ ID NO: 414 - DNA, 1416 bp, Escherichia coli
atgacagatcttcccgacagcacccgctggcaattgtggattgtggctttcggcttctttatgcagtcgctggacaccaccatcgttaacaccgcgcttccctcaatggcgcaaagcctcggggaaagtccgttgcatatgcacatggtcattgtctcttatgtactgaccgtggcggtgatgctgcccgccagcggctggctggcggacaaagtcggcgtgcgcaatattttctttaccgccatcgtgctgtttactctcggttcactgttttgcgcgctttccggcacgctgaacgaactgttgctggcacgcgcgttacagggcgttggcggcgcgatgatggtgccggtcggtaggttgacggtgatgaaaatcgtaccgcgcgagcaatatatggcggcgatgacctttgtcacgctgcccggtcaggtcgggccgctgcttggcccggcgctcggcggtctgctggtggagtacgcatcgtggcactggatctttttaatcaacattccggtggggattattggcgcgatcgccacactgatgttaatgccgaactacaccatgcagacgcggcgctttgatctctccggctttctgttgctggcggttggcatggcggtattaaccctggcgctggacggcagtaaaggtacaggtttatcgccgctggcgattgctggcctggtcgcagttggcgtggtagcactggtgctttatctgctgcacgcccaaaataacaaccgcgccctgttcagtctgaaactgttccgcactcgtaccttttcgctgggcctggcggggagctttgccggacgtattggcagtggcatgttgccctttatgacaccggttttcctgcaaattggtctcggtttctcgccgtttcatgccggactgatgatgatcccgatggtactcggcagcatgggaatgaagcgaattgtggtacaggtagtgaatcgctttggttatcgtcgggtactggtggcgaccacgctgggcctgtcgctggtcaccctgttgtttatgactaccgctctgctgggctggtactacgttttgccgttcgtcctgtttttacaaggaatggtcaactcgacgcgtttctcctccatgaacaccctgacgctgaaagatctcccggacaacctggcgagcagcggcaacagcctgctgtcaatgattatgcaattgtcgatgagtattggcgtcaccatcgccgggctgttgctgggactttttggttcgcagcatgtcagcgtcgacagcggcaccacacaaaccgtctttatgtacacctggcttagcatggcgtctatcatcgcccttccggcgttcatctttgccagagtgccgaacgatacgcatcaaaatgtggctatttcacggcgaaaaaggagcgcgcaatga

SEQ ID NO: 415 - DNA, 1392 bp, Escherichia coli
atgaagttctggcgacccggtattaccggcaaactgtttctggcgattttcgccacctgcattgtcttattgatcacgatgcactgggcggtacgtatcagttttgagcgcggctttatcgattacatcaagcatggtaatgaacaacggctgcaaatgctcggcgatgcgcttggtgagcagtacgcccagcacgggaactggcgcttcctgcgtaataacgatcgctttgtatttcagatcctacgttcactggagcatgataacaacgaagataagcccggccccggtatgccaccacacggctggcgcacgcaattttgggtggttgatcaaaataataaagtgctggttggcccgcgagcaccggttccacccgacggcacacggcggcccattatggtcaatggtgcggtgatcgcctcccctgttgaacgactgacccgtaatactgatatcaattttgacagacaacagcggcaaaccagttggctgattgtggctttatctaccttattagcggcgctggcgacattcccactggcgcgcggtttgctggctccggtaaaacgactggtggatggcacgcacaaactggcagcgggtgatttcactactcgcgtagcccccaccagcgaagatgagttgggcagactggcagaggatttcaatcaactcgccagcacactggagaaaaaccagcagatgcgccgcgattttatggccgatatttctcatgaactgcgcacgcctttagcagtactgcgcggcgaactggaagccattcaggatggtgtgcgtaaattcacgccggagacgctggcttctttacaggcagaagtcggtacactgacaaaactggttgacgatctccatcagttgtcgatgtctgatgaaggcgctctcgcctatcaaaaagcaccgatagatttgatcccactgctggaagtggcgggaggcgcatttcgcgaacgattcgccagccgtggcctgaaattgcaattttccctgccagacagtattaccgtatttggcgatcgcgatcgtttaatgcagttgttcaataacttactggaaaacagcctgcgctacactgacagcggcggcagcctgaaaatctctgccgagcagcacgacaaaacggtgcgcctgacctttgccgacagtgcgccgggtgtcagtgacgatcagttacaaaaattgtttgaacgtttttatcgcaccgaaggttcccgcaaccgcgccagcggtggttccgggctggggctggcgatttgcctgaacattgttgaagcacataacggccgcattattgccgcccattcgccttttggcgggcttagcattacagtagagttaccgctggaacgggatttacagagagaagtatga

SEQ ID NO: 416 - DNA, 723 bp, Escherichia coli
atgaccgagttaccaatcgacgaaaacacaccgcgtattttgatcgtggaagatgaaccgaagctggggcagttgctcattgattatctgcgtgctgcgagctatgcgccaacgttgattagccacggcgatcaggtactgccatatgtgcgccagacaccaccggatctgatactgttggacctgatgctccctggcaccgatggcctgacgctgtgccgggaaattcgtcgtttttctgacattccgatcgtgatggtgacggcaaaaatcgaagagatcgaccgcctgctggggttggagattggcgcagatgactatatctgcaagccgtacagcccacgggaagtggtagcgcgcgtcaaaaccattttgcgccgttgcaaaccgcagcgtgagttgcagcaacaggatgctgaaagcccgttgattatcgacgaaggtcgttttcaggcttcctggcgcggtaaaatgcttgacctgacgcctgcagaatttcgtctgcttaaaacgctctctcatgaaccaggaaaagtgttctcccgcgagcagttgctgaaccatctttatgacgactaccgcgtggtaaccgaccgtaccatcgacagccacattaaaaacctgcgccgcaagctggaatctctcgacgccgaacagtcatttatccgcgccgtttacggcgtcggttaccgctgggaagccgacgcctgccgcatcatttaa

SEQ ID NO: 417 - DNA, 333 bp, Escherichia coli
atggctggttggtttgaactcagtaagagcagtgataatcagttccggtttgtgctaaaagcgggcaatggtgagactatcctcaccagcgagctgtatacctcaaaagcctctgcggaaaagggcatcgcgtcggtgcgtagcaacagcccgcaagaagaacgctatgagaaaaaaacggcaagcaatggcaaattctatttcaatctgaaagccgccaatcatcaaattatcggctccagccagatgtatgccaccgcgcaatctcgtgaaaccggaattgcctccgttaaagcaaatggcacaagccagacggtgaaagacaatacgtaa

SEQ ID NO: 418 - DNA, 606 bp, Escherichia coli
atgctgatgttaaaaaaaggaatgatgctggtggggctgatattcttttctttacccgccaatgccgggtgtacgctggaggaaacagccagaaaggtgattatgggctttcagcaagaagatgcccaattaatcaactcgttaattgataaaaaaacgggtttgtatgttcttttccaccgtggtgcttcgatggatgttgaaaatcttaagcaaattaatttcaggcaacctgttcccgagtatttcccatggccctcggcaggggaacatgttccgcgagatgacgaatttaataagaaagctatcccgaaatttaactgcgaacgtggctggaataagcaggggtattttattagcaatagcgatgttcaccataaagtcagccgtagtttggtcttcacgcagatgtttggttcaccgcaaaatactatttctgatgcgcagattgccgcagcgcgtcgaatggaatacggggccgtgcgtgtggtcgctgcgccagaagagagtaacgatggactggtattttatttaagtcaactttacagttatgacagtgactggtatctgacggtggtggatcagattggtgattgtggggcgtga

SEQ ID NO: 419 - DNA, 2109 bp, Escherichia coli
atggaacaggatgctcgtttactcagtgcaatgcaaaagatgtgtgaccaaaaaatgccacttaatactcttgagagaaaatggcaaatcgcaaatattccttatatgttacaagaaaaacgttatcaggaactagatgaaatttataaccaggcattacaggagagtttcacttctcgtcaggctgaaaagcgctattttttatcctggacccaaatgtgcaactatttttatgatatgaacacgctagttgatgccggaacagaaggtttaagactcattaaaacctggcagcaagcaagacctcattctacacatgcctggcttgccgaagcacaatactggaatcaccgtgcatggttatatcgcagttatggctgggcaaatgataccacacatgcaatgtggctttgtgctggtgcatgtaatgaacaaatggtcatcgctacacttaaagcaattgattgtgacccacgacaatggatggctgcattacttaccagcaccaactcaaaagtatttggtcagccagcctggctggcggcacaccttaacggtgatagtgtcgcaggaataccattaatgatcgcactgaaaaattatcaccgccgctccccgcaagaagtggaagcgttgatggcgtattccggactttcgtttgagcatgcaatatgccccgttttgcctcgccccaatatacttcctgagtatgatgatgatggtgggcaaaaatattggctttctgtttgcctgactatttttcctcacactttttatccttttgttgaatatataccatttcgaatgccacgctggggagggtcgcataaagaaatttccgaattgctggattcagtaacctgtaagcacttatctaccgaagaacatgactatatggatctcttactttggtgggatgattaccgagatgtcagcattgaggacattgcgcccgaggagcaacaatatgcaatcgacttagcagagaatattgctcagcacgtacaatttcaggaatgtcgccataatgccctagagtggttacttgcctgctataacaagcagaacgatcacgataagttgtggtgctgtatacagcgagcggtgatggaagacatgaagctcaataattattacactgcgtacgcgataaaatttgcattaagttattatccagattcattctggatatataattttatctgccaaaattcacagaatacaacttatgctacacctgttatttatagggggtttttccagcgagagggtattttgggttttgaaaaagatgaagggcagggcgatgcttggctggaaaaagctagtgacattaaatacaatcataattggcggtcggcaataaaagatttgagttggtttgacctttctgattatttcattccgcttgcgacaattggtaagcaaagaaatattcctgccgcattaaatttagttgctcttgaatatttggataaggaagacaatacaaaattaccttatgaaccatctacagctttggagtattttcgacgggcacttaaaatacttcaagatgacctaaatttccatagctcggtatcttatccactggtaaaaaattatggttatagcgaacatcaacaagatctacaaaatatttattttagcattgctatctgctaccaggcactaaataaacaagaaatttctaaagaaacacgggctatttatgaaaaaaatctccttgacaatttatttctggctcatgaagctggacatgaaaaagcatgggggctttttttacttaatatctttgaggtgaaagaactctcacttgctcatttgcacctccaacaggtacaagaagaagcgaataaaggtacgctcgaagcaatgattactttgtcgcgcctgtatggtaacaaagaagatgaaaaactgtttaacatgaaactcagtgcgcgctggacacattttgccgagtctttatatccagataacgaaattattgcagattgcctttatcatctccatttctccagcctgtggaaacgctgtcgttatgcctggtatacctttcgtattccagctagcgaattacccggccaggttaacagtatggtgtaa

SEQ ID NO: 420 - DNA, 717 bp, Escherichia coli
atgagtcttatcattgttctcctggtcgcaatatttatttttatctatagatacaaaaaaaacaaaccacaaatcgatgcttttattgctaaagaaaaagaaaaggatctaatcaaggacaaaagacgagcaacaaagagacgtaagtgggcattagcaattggtgatatagttgctcgtcgtaatggactgtcagtaaatggcttcacgttggatttaaagttgactgatgataagcgtcaacaacttgcactacaggttaaacaagagctaggaacagaaacttaccaaagcaacgaagatttccgtcaacaaattggcgttatattacagcgctgggctacagggcttggtaattctccacatgatttttacgaacaactggcagcacaaggccaggttctggatgggctggcgtttgactgtatgcgcactgcttttttaactcgttgcatcgccggtttaggctggtgcgatgaaaaccaggcctggatagtgttattactgaatgctcaaagagcacaagattgtttcgcttcatgggaagattatgccagtgcttatgttcgcgcccgacaaaaatggttaatgatatacgatacccccgtcgccactgcgaaccgtgatttaaaggaagtcactgcatggttgaaagatccatccagtaactggaaaaaattgccgtggaatgaatttaaaatttttgaacctaattaa

SEQ ID NO: 421 - DNA, 1215 bp, Escherichia coli
atgactggaaatattcaccagaattataatgcaagggatgtaattaatgccccggaagtaaaaacagcaattttgcaaagaagtctgtttcgccaggataatgagaccatccaaaaatggttactcaaccatttttatcgatggctaattagtgactttccaatggtgcaacaaattaactcgcttgcagaatattcactgtttaataaaaatgatgatgtaatcccggaatggctggtatcgaagtttaatactgcctcagtatcaactgcgacactttattatatcgaaaccgatcatcaacaaatattaaccaaagaacgggagttggtggaatttctttccaggaaatgtggtacccgtctggaatcaaaactacagcgcataacctgctacgttgcgttcagaatgcgtgaagaagagcatgaaaagatgcttcaacgacgcgagaaagggtggcagccgagtgaacaaaatactgtaaagtcaatacttgatgtgccagacggaaaaattgttgagtttgatgccagtcattcgaaccttcgtcgtgaaatggcttatgaatcatggcatatgcaacattgcgtaggccagtttgatgatcgaaaaaatcttaccggtggttatggtgagtattatgcaaatcaaattgagcaacataaattacggttattcagtttgcgtgataataataatattcctcatgttactattgctctcaatgttgttggtgattcacttgaaattgatcaaataaaaggtaagcaaaatcgtcatccagttaaaaaatatgcggacgatgttttgtctcttttgcaactattatcaccacaagcagttcgacatagtgattgtgaaggtatgggtattgtttatgaaaatacacctgaatatcaggggtggaaatatgtaacggaagtatacgaaaccagttttttactaagcgtactacataataactttcatttattagaacattttacaaatccttcagtggagttgcagtggttactgttacacagcgcacctgataagttacattatcttaatgctattgaccctatagttgctacttctgcggaaatgttattccctggcgctgagtggcatccgcaatttgcaggtcaaaatatcagcaacatttcctttgagatagagagtttgacattacagacatctcattacttacccctgtcagaggttgaaaaataa

SEQ ID NO: 422 - DNA, 1362 bp, Escherichia coli
atgtttaaaccggaactcctttccccggcgggaacgctgaaaaatatgcgttacgctttcgcttatggcgcagatgctgtttatgcgggccagccgcgttactccctgcgtgtgcgcaacaacgaattcaaccacgaaaatcttcagctcggcatcaatgaagcccacgcgctggggaaaaagttttatgtcgtggtcaacattgcaccgcacaacgccaagctgaaaacctttatccgtgacctgaaaccggtggtggaaatggggccggatgcgctgattatgtccgatccagggctgattatgctggtgcgtgaacacttcccggaaatgccaatccacctctcggtacaggctaacgccgtaaactgggcgacggtgaaattctggcagcaaatgggtctgacccgcgtgatcctctctcgcgaactgtcactggaagagattgaagagatccgcaatcaggtgccggatatggagatcgaaatcttcgttcacggcgcgctgtgcatggcctactccggtcgctgcctgctctctggctatatcaacaagcgcgacccgaaccagggcacctgcaccaacgcctgccgctgggagtataacgtccaggaagggaaagaagatgacgtcggcaacatcgtacacaagtacgagccgattccggtgcaaaatgttgagccgacgctgggtatcggcgcgccaaccgacaaagtgtttatgatcgaagaagcccagcgtccgggcgagtatatgaccgcgtttgaagatgagcacggcacttacatcatgaactcgaaagatctgcgcgccatcgcccatgttgaacgcctgaccaaaatgggcgtgcattcgctgaaaatcgaaggccgtaccaaatctttctactattgcgcacgcaccgcgcaggtttaccgtaaagctatcgatgacgccgctgcgggcaaaccgttcgataccagcctgctggaaactctggaaggtctggcgcatcgtggctataccgaaggtttcctgcgtcgtcatacccacgacgattatcagaactacgaatacggttattcggtttctgaccgtcagcagtttgttggtgagtttaccggtgagcgcaagggggagctcgcggcggtagcggtgaaaaataaattctccgttggcgacagccttgagctaatgacgccgcaaggcaacattaactttacccttgagcatatggaaaacgccaaaggtgaagcaatgccggtcgcaccaggcgatggttatactgtgtggctcccggtgccgcaggatctcgaactgaattacgcgctgctgatgcgtaatttctccggtgaaaccacgcgtaacccccacggtaagtga

SEQ ID NO: 423 - DNA, 318 bp, Escherichia coli
gtgaaaaagatagctgctatatcattaattagtgtttttcttatgtctggttgtgctgtgcataatgatgagacaagtatcggtaaatttggccttgcatataaaagtaatattcagcgtaaactcgataaccaatactacaccgaagccgaagcttctttagccaggggtagaatatctggtgcagaaaatatagtaaaaaatgatgcaactcatttctgtgttactcagggcaaaaaaatgcagatagttgacctgaagacagaaggtgcaggattacatggcgtcgctcgtctgacattcaaatgtggagagtga

SEQ ID NO: 424 - DNA, 900 bp, Escherichia coli
atggcagaatttcccgccagcttactgattcttaatggcaaaagtactgacaatctacccttgcgcgaagcaattatgctgttgcgtgaggaaggaatgacgatccatgtgcgggttacctgggagaaaggtgatgccgtacgatttgtagaggaggcacggaagttaggtgtcgcaacagtgattgccggtggtggcgatggcaccattaatgaagtttctacggcattgattcaatgtgagggggatgaaatacccgcgctgggaattttaccattaggaactgccaatgattttgccactagtgtagggattcctgaggcactggataaggcgctgaaactggcaattgccggtaacgccattgcgatagatatggcgcaggtcaacaaacaaacctgttttattaatatggcgacaggcgggtttgggacgcgtattaccacagaaacgccggaaaaattaaaagccgcgctgggtggagtctcttacatcattcatggcttaatgcgcatggacactctgcaaccggaccgttgtgaaatccgcggtgaaaactttcactggcaaggtgacgccctggtcattggtattggtaacgggcgtcaggccggtggcggtcaacaattgtgcccgaacgcattaattaacgatggcttgctgcaactgcgcatttttaccggcgatgaaattattccgactctcgtatcaaccttaaaatctgacgaagataacccgaatattatcgaaggagcttcgtcgtggtttgatatacaagccccacacgaaatcacttttaatcttgatggcgaaccgttgagtgggcaaaacttccatattgaaatacttccggcggcgttgcgttgtcgattaccaccagattgtccattgttgcgttaa

SEQ ID NO: 425 - DNA, 780 bp, Escherichia coli
atgacgatgaattcattcgagcgaaggaataagatcatccaattagtgaatgaacagggaaccgtgcttgttcaggatctggcgggagtatttgctgcctcggaagcgacaatccgtgccgatttgcgctttctcgaacaaaaaggcgtggttacgcgctttcatggcggtgcggcgaaaataatgtccggtaatagcgaaaccgagacccaggaagtcgggtttaaagagcgatttcagctcgccagcgcgccgaaaaacagaatagcgcaggcggcagtcaaaatgatccacgaagggatgaccgttattctcgacagcggaagtaccacaatgcttatcgccgaaggattaatgaccgccaaaaatatcacggtgattaccaacagtctcccggcggcgtttgccctttccgaaaataaagacattactctggtcgtctgcggtggcacggtccgccataaaacgcgatctatgcatggatctattgctgaacgttccctgcaggatattaatgccgatttaatgtttgtcggtgctgatggtattgatgcggttaatggtattacgacctttaatgaaggttattccgttagcggtgcgatggtgacagcggcgaataaagtgattgccgttctcgattcatcgaaatttaaccgtcgcggttttaatcaggtactgccaatcgaaaaaattgacattattattaccgatgatgctgtgtctgaggtggataaactggcattgcagaagacacgggtaaaattaattacggtgtag

SEQ ID NO: 426 - DNA, 1041 bp, Escherichia coli
atgaaatcagtggtgaatgatactgatggtatcgtgcgcgtagcagaaagcgtcattcctgaaattaaacatcaggatgaggtgcgggtaaaaattgccagctcgggcttatgtggttccgatttacccaggatatttaaaaatggtgcacattattatccaataacgttaggccatgaatttagtggctatattgatgcggtgggatccggtgttgatgatttacaccccggcgatgcggttgcctgtgtgccgttattaccctgttttacttgtccagagtgtctgaaagggttttattcccagtgcgcaaaatatgattttattggctcacggcgtgatggtggatttgccgaatatattgtcgttaagcgaaacaatgtctttgcactacctgcggatatgcctattgaggatggcgcttttattgaaccgattaccgttggcctgcatgcgttccatttagcgcaaggatgtgagaataaaaacgttattattattggtgccggaaccattggcctgctggcaattcagtgcgctgtcgcgctgggagcaaagagtgtgacggctatcgacattagctcagaaaaactggcactggcaaaatctttcggtgcgatgcaaacatttaacagccgtgaaatgagcgcgccgcaaatacagggcattttacgcgatctgcgctttaatcagcttatcctcgagacggctggcgtcccgcaaaccgtcgaactggcggtagagattgccggtcctcatgcccaactggcgctggtaggcacgttgcatcaggatctgcatttaacatctgcaacgtttggcaaaatattgcgtaaagagctgacggttatcggcagttggatgaactactccagcccttggccggggcaggagtgggaaacggcgagccggttgctgacagaacgtaagttaagcctggagccattaatcgctcaccgtggaagctttgaaagcttcgcccaggcggtgcgtgacatcgctcgtaatgccatgccgggcaaagtgttgctcattccctga

SEQ ID NO: 427 - DNA, 1356 bp, Escherichia coli
atgttttcagaagtcatgcgttatattctcgacctcggccctacggtgatgctgccgattgtcatcattattttttctaaaatattaggcatgaaggcaggcgattgctttaaagcgggtctgcatatcgggattggctttgttggcattggccttgtgattggcttaatgctggattccattggcccggcggcgaaagcgatggcggaaaatttcgacctgaatctgcatgtggtcgatgtcggctggccgggctcttcacccatgacctgggcgtcgcaaattgcgctggtggcgattccgattgcgattctggttaacgtggcgatgttactgacccgtatgacgcgggtggtaaatgttgatatctggaatatctggcatatgaccttcaccggcgcgttgctgcatctggcaaccggttcatggatgatagggatggcgggtgtggtaattcacgcggcgtttgtttataagctcggcgactggtttgcccgcgatacccgaaatttctttgagctggaaggcattgctattccgcacggtacgtcggcgtatatggggccaattgctgtgctggtcgatgctatcatcgagaaaatcccaggcgttaaccgaattaaatttagcgccgatgatattcagcgcaaatttggcccttttggcgaaccggtcaccgtgggttttgtgatggggctgattatcggcatcctcgcgggttacgatgtcaaaggtgtattgcagctggcggtaaaaacggcggcagttatgctgctgatgccacgggtgattaaacccatcatggatggtttaacgcccatcgctaagcaggcccgtagtcgtttacaggcgaagttcggcggtcaggagttcctgattggccttgatccggcgttgctgctgggacatacggcggtggtatcggcaagcctgatttttattccactcaccattttaattgctgtttgtgtgccgggtaatcaggtgctgccgtttggcgaccttgccaccatcggcttctttgtggcgatggcggtcgcggtgcatcgtggaaatctgttccgcaccttaatctcgggtgtcatcattatgagcatcaccctgtggatcgcgacgcaaactattggtttgcacacccaactggcggctaatgcgggcgcgttaaaagccggggggatggtggcttcaatggatcagggcggttctcccattacctggttactgattcaggttttctccccgcaaaatattcccggtttcattgttatcggcgcaatttatcttaccggtattttcatgacctggcgtagagctcgaggctttattaaacaagagaaagtcgttctcgcagaataa

SEQ ID NO: 428 - DNA, 285 bp, Escherichia coli
atgaaacgcaaaattattgtcgcttgcggaggcgcggttgcgacctctacgatggcggcggaagaaattaaagagttgtgtcagagtcataatattcctgttgaattaatccagtgtcgggttaatgaaatagaaacctatatggatggcgtgcatttgatatgcaccactgccagggtggatcgtagttttggcgatattccgttagttcacggcatgccttttgtttctggtgtcggtatcgaagcattacaaaataaaattctgactatcttacaggggtga

SEQ ID NO: 429 - DNA, 453 bp, Escherichia coli
atgactaacctgtttgttcgtagcggaatttcttttgtcgatcgtagcgaagttttaacccatatcggtaatgagatgctcgctaaaggtgtggttcatgatacctggccacaggcattaattgccagagaagcagaattccctaccgggataatgcttgagcagcacgccattgcaataccgcattgtgaggcgattcatgctaagtcgtcagccatttatctgttaaggccaacaaataaagttcattttcagcaaccggatgatgataacgacgtggcggtatcgtttgttattgcgttgattgtggaaaatccgcagcagcaattgaaacttttacgctgtttatttggcaagttacaacagcctgatatcgtcgagacactaatcactcttcctgaaacccagttaaaggaatacttcacaaagtatgttttagattcagacgaataa

SEQ ID NO: 430 - DNA, 1263 bp, Escherichia coli
atgaaaacgttaattgcccggcataaagctggtgaacatattggcatatgttcagtctgttctgcacatccgttggttatcgaagcggcgctggcatttgatcgcaacagcacgcgtaaagtgctgattgaagcaacgtcaaaccaggtcaatcaatttggcggttataccggaatgacaccggcagactttcgcgaatttgtttttgcgattgccgataaagtcggatttgctcgtgagcgtattattctcggcggcgaccatctgggaccaaactgctggcagcaagaaaatgcggatgcggcgatggaaaaatccgtcgagctggtaaaggcatatgttcgtgccggcttcagtaaaattcatcttgatgcgtcaatgtcctgcgctgacgattccataccgttagcgccagaaacggttgctgaacgtgccgctgtgctttgtctggcggctgaaagtgtggcgactgattgccagcgtgagcaactgaactatgtcattggcactgaagttccggttccgggcggtgaggccagcgccattcagtcagtacacatcacccaggttgaagatgccgccaatactttacgcacgcatcaaaaagcgtttattgcccgcggtctggcagaggcgttaacacgcgtgattgccatcgtggtgcagccgggtgtggaatttgaccatagcaatattattcattatcaggcgcaagaagctcaggcgttggcgcaatggatagaaaaaaccaaaatggtttatgaagcgcattccaccgattaccagactcagacggcctatcgggaattagttcgcgatcattttgcaattttgaaagtcggtccggcattaacctttgctttacgtgaggcgatatttgcgctggcacaaattgagcaggaactcatcgctccagaaaatcgtagccgttgtctggcggtgattgaagaagtgatgctcgacgaaccgcaatactggaaaaaatattatcgcacgggttttaacgattcattgctggatattcgttacagcctgtcggatcgtattcgttattactggccgcatagccggattaaaaatagcgtcgaaacgatgatggtgaatctggaaggcgtggacatcccactgggcatgattagtcagtatcttccgaaacaatttgaacgcattcagtccggggaattatcagcaataccgcatcagcttattatggataaaatttatgatgttttgcgcgcctatcgctacggctgtgcggaataa

SEQ ID NO: 431 - DNA, 855 bp, Escherichia coli
atgtacgtggtatcgacaaagcagatgctgaacaacgcgcggcgcggcggttatgcggttccggcattcaatattcacaatctcgaaacgatgcaagtggtggtggaaaccgctgccagcatgcatgcgccggtcatcatcgccggaacgcccggcacatttactcatgccggtacagaaaatctgatggcgctggtcaacgcgatggcgaagcaatatcaccatccactggcgattcatctcgaccatcacacgaaatttgacgatatcgctcagaaggttcgttctggcgtgcgctcagtcatgattgacgcctcgcatttgccttttgcgcaaaatatttcacgggtcaaagaggtggtggatttttgccatcgctttgatgtcagcgtcgaagcggagctggggcaacttggcggccaggaagatgatgtgcaagtcaatgaagccgatgctttttataccaaccccgttcaggcgcgtgaatttgccgaggcaaccgggattgattccctggcggtcgccatcggcacggctcatgggatgtatgccagcgcaccggcgcttgatttttctcgactggagaacattcgccagtgggtgaacttaccgctggtgctgcatggcgcgtcaggattatcgacaaaggatattcagcaaaccatcaaactggggatatgcaaaatcaacgttgcaacggagctgaaaaatgccttctcgcaggcgttaaaaaattacctgacagagtaccccgaagcgaccgatccccgggattatttgcagtcggctaaatctgcaatgcgcgatgtggtgagcaaagtgattgccgattgtggctgcgagggcagggcataa

SEQ ID NO: 432 - DNA, 1053 bp, Escherichia coli
atgacagatattgcgcagttgcttggcaaagacgccgacaaccttttacagcaccgttgtatgactattccttctgaccagctttatctccccggacatgactacgtagaccgcgtgatgattgacaataatcgcccgccagcggtgttacgtaatatgcagacgttgtacaacaccgggcgtctggctggcacaggatatctttctattctgccggttgaccagggcgttgagcactctgccggagcttcatttgccgctaacccgctctactttgacccgaaaaacattgttgaactggcgatcgaagcgggctgtaactgtgtggcgtcaacttacggcgtgctggcatcggtatcgcggcgctacgcgcatcgcatcccatttctcgtcaaacttaatcacaacgagacgctaagttacccgaatacctacgatcaaacgctgtatgccagcgtggagcaggcgttcaatatgggcgcggtggccgttggtgcgactatctattttggctcggaagagtcacgtcgccagattgaagaaatttctgcggcttttgaacgtgcgcacgagctgggcatggtgacagtgctgtgggcctatttgcgtaactccgcctttaagaaagatggcgttgattaccatgtttccgccgacctgaccggtcaggcgaaccatctggcggcaaccataggtgcagatatcgtcaaacaaaaaatggcggaaaataacggcggctataaagcgattaattacggttataccgacgatcgcgtgtacagcaagttgaccagcgaaaacccgattgacctggtgcgttatcagttagctaactgctatatgggccgggccgggttgataaactccggcggtgctgcaggcggtgaaactgacctcagcgatgcagtgcgtactgcggttatcaacaaacgcgcaggcggaatggggctgattcttggacgtaaggcgttcaagaaatcgatggctgacggcgtgaaactgattaacgccgtgcaggacgtttatctcgatagcaaaattactatcgcctga

SEQ ID NO: 433 - DNA, 1278 bp, Escherichia coli
atgaaaacaacagcaaagctgtcgttcatgatgtttgttgaatggtttatctggggcgcgtggtttgtgccattgtggttgtggttaagtaaaagcggttttagtgccggagaaattggctggtcgtatgcctgtaccgccattgcggcgatcctgtcgccgattctggttggctccatcactgaccgctttttctcggcgcaaaaagtgctggcggtattgatgttcgctggtgcggtgctgatgtatttcgctgcgcaacagaccacttttgccgggttcttcccgttactgctggcctactcgctaacctatatgccgaccattgcgctgactaacagtatcgcttttgccaacgtgccggatgtggagcgtgatttcccgcgcattcgtgtgatgggcactatcggctggattgcctctggtctggcatgtggattcttgccgcaaatgctggggtatgccgatatctcaccgacgaacatcccgctactgattaccgccggaagttctgctctgctcggtgtgtttgcatttttcctgcccgacacgccaccaaaaagcaccggcaaaatggatattaaagtcatgctcggcctggatgcgctgatcctgctgcgcgataagaacttcctcgtctttttcttctgttcattcctgtttgcgatgccactggcgttctattacatctttgccaacggttacctgaccgaagttggcatgaaaaacgccactggctggatgacgctcggccagttctctgaaatcttctttatgctggcattgccgtttttcactaaacgctttggtatcaaaaaggtattgttgcttggtctggtcaccgctgcgatccgctatggcttctttatttacggtagtgcggatgaatatttcacctacgcgttactgttcctcggtattttgctgcacggcgtaagttacgatttttactacgttaccgcttacatctatgtcgataaaaaagctcccgtgcatatgcgtaccgccgcgcaggggctgatcacgctctgctgccagggcttcggcagtttgctcggctatcgtcttggcggtgtgatgatggaaaagatgttcgcttatcaggaaccggtaaacggactgactttcaactgggccgggatgtggactttcggcgcggtgatgattgccattatcgccgtgctgttcatgatttttttccgcgaatccgacaacgaaattacggctatcaaggtcgatgatcgcgatattgcgttgacacaaggggaagttaaatga

SEQ ID NO: 434 - DNA, 1005 bp, Escherichia coli
atgaaaacagaacgtattctcggtgctctttatgggcaggcgttaggggatgcgatggggatgccctccgagctttggccgcgcagtcgcgtcaaagcacactttggctggattgaccgttttctgcctgggccaaaggagaataacgcagcctgttattttaaccgcgccgaattcaccgacgatacctcgatggcgctgtgtctggcggatgcgttactggaacgtgaaggcaagatcgatccggatctgattgggcgtaatattctcgactgggcgctgcgtttcgacgcctttaacaaaaacgtactaggtccgacctcgaagattgcgcttaacgccattcgcgacggtaaacccgttgctgaactggaaaataacggcgtgaccaacggcgcagcgatgcgcatctcgccattaggttgtttgcttccggcgcgtgatgttgattcctttattgatgatgtggcgctagcctccagcccgacacataaatccgatctggcggttgcgggggcggtagtcatcgcatgggcgatttctcgtgccattgacggagaaagctggtcagcaattgttgattcactgccttcaattgcgcgacatgctcaacaaaaacgcatcactaccttcagcgcctcactggctgcacgtctggagattgcgctgaaaattgtgcgcaatgctgacggcaccgaatccgccagcgaacagctttaccaggtcgttggcgcaggtaccagtactattgagtccgttccgtgcgccattgcgctggttgaactggcacaaaccgacccgaaccgttgcgccgtcctgtgcgctaaccttggcggcgacacagacaccatcggtgctatggcgacggcaatttgcggcgcgttgcatggcgttaatactatcgatcctgcgttaaaggcggaactggatacagtaaatcagcttgatttcaaccgctatgccacggcgctggcgaagtatcgccaacaacgggaggcgatatga

SEQ ID NO: 435 - DNA, 966 bp, Escherichia coli
atgagcggcgctcgattacacacgctgctgcctgaattaacctcgcgtcagccagttatggtgattggcgcggcggtcattgatgtgatcgccgacgcttatgccctcccctggcgtgggtgcgatatcgaactgaaacagcagagcgttaacgttggcggctgcgccctgaatattgccgtggcattaaagcgcctcggcatcgaagcgggtaatgccttgccgctcggtcagggggtgtgggcggagattattcgcaaccgcatggcaaaagaggacttaatcagcctgatcgataacgccgaaggtgataacggctggtgtctggcgctggttgagccggatggcgaacgcacttttatgtcgttcagcggcgtggaaaatcagtggaatcgccagtggctggcgcgattaaccgttgcgcctggcagcctgctctatttttccggttatcaactggcctcgccctgcggcgaattgttagtggaatggctggaagagctgcaagacgtgacgccatttatcgattttggcccacgtattggcgatatcccggatgcattactggcgcggatcatggcctgtcgacctttagtgtcactcaatcgtcaagaggctgagattgccgccgaacgttttgctctatccgcagagataacaacactaggcaagcaatggcaggagaaatttgccgcgccgttgatcgttcgtctcgataaagagggcgcatggtatttcagcaacgacgcttctggctgcattccggcatttccaacgcaagttgtagacaccattggggcgggcgacagtcatgccggcggcgtacttgccgggctggcctctggtctgccactggcggatgccgtattactgggcaatgcagtggcgtcgtgggttgtcgggcatcggggcggtgattgtgcgccaacgcgcgaggaactactcctcgcacacaaaaacgtatag

SEQ ID NO: 436 - DNA, 747 bp, Escherichia coli
atggaacaagcgcatacccagctgattgcccaactgaacgagcgtattttagcggcggataacacgccgctttatattaagtttgccgaaacggtaaaaaatgccgtgcgcagcggggtgctggagcatggcaatattttgcccggtgagcgtgatttaagtcagttaaccggcgtttcgcgcattacggtgcgcaaggcgatgcagtcgctggaagaagagggcgtggtgacgcgttcgcgtggttacggcacgcagatcaacaacatcttcgaatactcgctgaaagaagcgcgggggttttctcagcaggtggtattgcgcgggaaaaagcccgatacgttatgggttaacaagcgtgtcgtgaaatgtcccgaagaagtcgcgcagcagctggcggtcgaagcgggaagtgatgtctttttgcttaagcgtattcgctatgtcgatgaagaggcggtatcgattgaggaatcgtgggttccggcacatttaattcatgatgttgatgccatcgggatttctctttatgactacttccgcagccagcacatttacccacaacgtacgcgttcccgcgttagcgcccggatgccggatgccgagtttcagtcacatattcagttagatagcaaaataccggtgctggtgatcaagcaagtggcgcttgaccaacagcaacggcctattgagtacagcatcagccactgtcgcagcgatctatacgtttttgtgtgcgaggagtag

SEQ ID NO: 437 - DNA, 819 bp, Escherichia coli
atgcagttgagaatcaccagtcgaaaaaaattcaccgttttattatgcgctcttgggctaatttccatcgttgcaatttatccgcgtcagatggtgaactttttctattcgacagcaattcagattaaagactacattcacttctacggttatcgcccggttaaatctttcgctattcgcattcctgccagttacaccattcacggaatagatgtttcgcgctggcaggagcggatcgactggcagcgggtggcaaaaatgcgcgataacggtattcgcttacaatttgcctttattaaggcgacggaaggcgaaaagctggtggacccctatttttcgcgtaactggcaactaagccgcgaaaatggcctgctgcgcggggcgtatcattatttttccctgtcggtatctgcttcagttcaggcgagattatttctgcaaacggtggatttctcacaaggcgatttccctgccgtgctggacgtagaagaacggggaaaattatcggcaaaagaattacgcaagcgggtaagtcagtggctaaaaatggtcgaaaaacgtacgggaaaaaagccaattatttactcaggagccgttttttatcacaccaatctggcgggctatttcaatgaatatccgtggtgggtggctcactattatcaacgtcgcccggacaatgacggcatggcctggcgcttctggcagcattccgaccgtggacaggtcgatggcattaatggtccggtggattttaatgtgtttaatggcacggtggaggagttgcaggcattcgttgatgggattaaagaaacgccttaa

SEQ ID NO: 438 - DNA, 801 bp, Escherichia coli
atgaaacgaattaacgctctgacgattgccggtactgatccgagtggtggtgcggggattcaggccgatcttaaaaccttctcggcacttggcgcttatggttgctcagttattactgcactggtggcgcaaaatacccgtggcgtacagtcggtgtatcgcattgagcctgattttgtcgccgcccagctcgattcggtgttcagcgatgtgcgaatcgacaccactaaaatcggtatgttggcggaaaccgatattgttgaagcggtggcagaacggttgcaacgttatcagatccaaaacgtggtactcgacaccgttatgctggcaaaaagcggcgacccgctgctttcaccttcggcagttgctacgctgcgcagtcgattattgccacaggtttcattaataacgccaaacttgcccgaagcagccgccttgctcgacgcgccacacgcgcgcaccgaacaggaaatgctggaacaagggcgatcgctgttggcgatgggctgtggcgcagtgctaatgaaaggtggtcatctggatgatgagcaaagcccggactggctgtttacccgcgagggtgaacaacggtttaccgcacagcgcattatgaccaaaaacactcacggcactggttgtacgctctctgcggcgttggctgcactacgcccgcgccatacaaactgggctgacaccgtacaggaggcaaaaagctggctttcatcggcattagcccaggccgacacgctggaagttggtcacggtattggtccggttcaccacttccacgcctggtggtga

SEQ ID NO: 439 - DNA, 789 bp, Escherichia coli
atgcaagtcgacctgctgagttcagcgcaatctgcgcacgcgttacacctttttcaccaacattcccctcttgtgcactgtatgaccaacgatgtggtgcaaacttttactgccaataccttgctggcgctcggcgcatcgccagcgatggttatcgaaaccgaagaagccagtcagtttgcggctatcgccagtgccttgttgattaacgttggcacgctgacgcagccacgcgcacaggcgatgagtgctgccgttgagcaagcaacacgatcacaaacgccctggacgcttgatccggttgcggttggtgcgctcgattatcgccgccgtttttgtgtggaacttctgtcccataagccaaccgccatacgtggtaatgcttcggaaatcatggcattagctggcgttgctaatggtggacggggagtggataccactgatgccgcagctaacgcgatacccgctgcacaaacactggcacgggaaactggcgcaatcgtcgtggtcactggcgaggtggattatgttaccgatggacatcgtatcattggcattcacggtggcgatccgttaatgaccaaagtggtaggaactggctgtgcactatcggcggttgtcgctgcctgttgtgcgctaccaggcgatacgctggaaaatatcgcatctgcctgtcactggatgaaacaagccggagaacgcgcagtcgccagaagcgaggggccaggcagttttgttacacatttccttgatgcgctctggcaattgacgcaggaggtgcaggcatga

SEQ ID NO: 440 - DNA, 273 bp, Escherichia coli
atgtctcatacaatccgtgataaacagaaactgaaagcgcgtgccagtaagattcagggccaggtcgtggcgctcaagaaaatgctcgacgaaccgcatgaatgcgctgcagttttacaacagattgctgctatccgtggcgcggtaaacggtctgatgcgggaagtgattaaaggtcatctgacggaacacatcgttcaccagggggatgagctaaaacgagaagaagatctggatgtcgttctgaaggtgctggattcttatatcaaataa

SEQ ID NO: 441 - DNA, 825 bp, Escherichia coli
atgaccgaatttacaacacttcttcagcaaggaaacgcctggttcttcatccccagcgccatcttacttggtgcgcttcatggcctggaaccggggcactcaaaaacgatgatggcggcgtttatcatcgccatcaaaggcaccattaaacaggcggtgatgctcggactggcagcaactatttcgcataccgcagtggtctggttaattgcctttggcgggatggtgatcagcaaacgctttactgctcaatcagcagaaccgtggctccagttgatttccgcagtgatcattattagcaccgcgttctggatgttctggcgtacctggcgcggcgaacgcaactggctggagaatatgcacgagcatgatcatgagcatcatcaccacgatcacgaagatcaccacgaccatggacatcatcaccatcacgaacatggcgagtatcaggatgcccatgcacgagcccatgccaatgacattaaacgacgctttgatggtagagaggtcaccaactggcaaattttgctatttggcttaaccggtggccttatcccctgcccggcagcaattaccgtgctgttgatttgcattcagttgaaagccctgacactgggcgcaacactggtcgtcagtttcagcctcggcctggcgttaacgcttgtcaccgtaggcgttggcgcagcaatcagcgttcagcaggtcgcaaaacgctggagcggatttaacactctcgctaaacgcgctccctatttttccagtctgttgattggcttagttggtgtgtatatgggcgtacatggcttcatgggcataatgcgataa

SEQ ID NO: 442 - DNA, 339 bp, Escherichia coli
atgaccattaaaaataagatgttgctgggtgcgcttttgctggttaccagtgccgcctgggccgcaccagccaccgcgggttcgaccaatacctcgggaatttctaagtatgagttaagcagtttcattgctgactttaagcatttcaaaccaggtgacaccgtcccagagatgtaccgcaccgatgagtacaacattaagcagtggcagttacgtaacctgcccgcgcctgatgccgggacgcactggacctatatgggtggcgcgtacgtgttgatcagcgacaccgacggtaaaatcattaaagcctacgacggtgagattttttatcatcgctaa

SEQ ID NO: 443 - DNA, 1035 bp, Escherichia coli
atggaaattcgcataatgctatttatagtaatgatgatggttatgcctgtgagctatgcggcatgttatagtgagttatctgttcagcacaatttggttgttcagggggattttgcacttactcaaacacaaatggcgacatatgagcataattttaatgattcgtcatgcgtgagtacaaatactatcacacctatgagcccgtcggatattattgttggactttataacgataccattaaattaaatttacattttgaatggaccaataaaaacaacattacgttgtcaaataatcagaccagtttcaccagtggttattcggtgacggtgacacctgcggccagtaatgcaaaagtgaatgtttctgcggggggcggtggttcagtgatgattaatggagttgcgacattatccagtgcttcatcatcgacacgcgggagtgccgcagtacaatttctactgtgtttattaggtggtaagtcatgggatgcatgtgtaaatagctacagaaatgcattggcacaaaatgcaggtgtctattcctttaatctgacattgtcatacaacccgataaccacaacctgcaaaccggacgatttattaattacgttagagagtattcccgtttcacaattaccagccacaggtaacaaaacaacaataaatagtaaaaaaggggatattattctgcgttgtaaaaatttattaggtcaacaaaatcaaacatcacggaaaatgcaggtgtatttatcaagttctgacttgttaaccaacagcaacacgatcctgaaaggtgcggaagataatggcgtaggatttattcttgaaagtaatggtacgccagtcacacttttaaatatcactaacagcagtaaaggatatacaaatttaaaagaaattgcggcaaagtcaaaacttacagatacaacggtttcaattccgataacggccagttactacgtctacgatacaaacaaagttaaatctggcgcactggaggcaaccgcattaatcaacgtgaaatacgactaa

SEQ ID NO: 444 - DNA, 2481 bp, Escherichia coli
atgttgagaatgaccccacttgcatcagcaatcgtagcgttattgatcggcattgaagcttatgcagctgaagaaacctttgatacccatttcatgataggtggaatgaaagaccagcaggtttcaaatattcgtcttgaagataatcagcccttgccggggcagtatgacatcgatatttatgtcaataagcaatggcgtgggaaatatgagatcattgttaaagacaacccgcaagaaacatgtttatcaagggaaatgatcaagcggttaggcattaataccgatagctttgccagcggtaagcaatgtttaacatttaagcaacttattcagggcgggagctatacctgggatatcggattttttcgtctcgatttcagtgtcccgcaggcctgggtggaagaactggaaagtggctatgtaccacctgaaaactgggagcggggtattaatgcgttttatacctcttattatatgagtcagtattacagcgattataaagcgtccggtaatagcaagagtacatatgtacgttttaacagcgggttaaatttattggggtggcaactgcattctgatgccagtttcagtaaaacaaataacaatccaggggtgtggaaaagcaataccttgtatctggaacgtggatttgcccaacttctcggcacgcttcgtgtgggtgatatgtacacatcaagcgatatttttgattctgttcgcttcagcggtgtgcggttgtttcgtgatatgcagatgttgcctaactcgaaacaaaattttacgccacgggtgcaggggattgctcagagtaacgcgctggtaactattgaacagaatggttttgtggtttatcagaaagaggttcctcctggcccgtttgcgattacagatttgcagttggccggtggtggagcggatcttgatgtcagcgtgaaagaggcggacggttcggtaaccacctatctggtgccttatgcagcggtaccaaatatgctgcaacccggcgtgtcgaaatatgattttgcggcgggtcgtagccatattgaaggggcgagcaaacaaagtgattttgtccaggtgggtcatcagtatggttttaataacttattaacgctgtatggtggctcgatggtcgcgaataattattacgcgttcactttggggactggctggaatacacgcattggtgccatttccgtcgatgccacgaagtcgcatagtaaacaagacaacggcgatgtgtttgacgggcaaagttatcaaattgcctacaacaaatttgtgagccaaacgtcgacacgttttggtctggcggcctggcgttattcgtcgcgtgattatcggacatttaatgatcacgtatgggcaaacaataaagataattatcgccgtgatgaaaacgatatctatgacattgccgattattaccagaacgattttggccgtaaaaatagcttctctgccaatatgagtcagtcattgccagaaggctggggttctgtgtccttaagtacgttatggcgagattactgggggcgtagcggcagcagtaaggattatcagttgagttattccaacaacctgcgaaggataagctataccctcgcggcaagccatgcttatgacgagaatcatcatgaagagaaacgttttaatatttttatatcgattccctttgattggggtgatgacgttacgacgcctcgtcggcaaatatatatgtctaactcaacgacgtttgatgatcagggggttgcctcaaataatacgggattatcaggaaccgttggaagccgggatcagtttaactatggggtcaacctgagttatcagtatcagggaaatgaaacgacagctggggcgaatttaacctggaacgcgccggttgcgacagtgaatggcagttatagtcagtcgagtgcttatcgacaggctggagccagtgtttcagggggcattgtcgcctggtcgggtggcgttaatctggcaaaccgtctttctgaaacgtttgctgtgatgaatgcgccaggaattaaagatgcttatgtcaatgggcaaaaatatcgcacaacaaaccgtaatggagtggtggtatacgacggaatgacaccttatcgggaaaattacctgatgttggatgtgtcacaaagcgatagcgaagcagaattacgtggcaaccggaaaattgccgccccttatcgcggcgcggttgtactggttaattttgataccgatcagcgcaagccatggtttataaaagcgttaagagcggatgggcaaccattaacgtttggttatgaagtcaatgatatccatggtcataatattggtgttgtcggccagggaagccagttatttattcgcaccaatgaagtaccgccatcggttaatgtggcaattgataagcaacaagggctttcatgcacaatcaccttcggtaaagagattgatgaaagtagaaattatatttgccagtaa

SEQ ID NO: 445 - DNA, 675 bp, Escherichia coli
atgaaaggattattagctttactcatttcttctatggtccttcctgcacatgccggtattgttatctacgggacgcgtattatttacccggcagagcacaaagaagtgatggtgcagttgatgaaccagggaaaccgttcttcgctgatgcaggcgtggattgatgatggcgatacgtcattaccaccagaaaaaattcaggttcctttcatgttaacgccaccagtggcaaaaataggggcaaattccgggcagcaagtaaaaattaaaattatgccgaataaactacccactaataaagagagtattttttatctgaatgttctggatattccaccaaatagtccagaacaagaaggtaagaatgcactgaagtttgcgatgcaaaacagaattaagttgttttaccggccagctggtattgctccggtaaataaagcgacctttaaaaagttactggtaaatcgcagtggcaatggattggtgataaaaaatgactcagctaattgggtgacgatttcggatgtcaaagctaataatgtcaaagtcaattatgaaactattatgattgcccccttagaaagtcagggtgttaatgtcaaaagtaataatgcaaataactggcatctgaccattatcgatgaccatggcaattatattagtgacaaaatttaa

SEQ ID NO: 446 - DNA, 543 bp, Escherichia coli
atgaaacgttcaattattgctgccgctgttttttcttctttttttatgagcgctggggtatttgccgcagacgttgataccggaacattaaccattaaagggaatattgcagaatctccgtgtaaattcgaagcaggtggcgattcagtaagtattaatatgccaactgtaccaactacggtctttgaaggtaaagctaaatactcgacctatgatggtgcagtcggtgtaaccagcagcatgttaaaaattagctgtccgaaagaagttgctggtgtaaaactctcgttgattaccaacgataaaataaccggaaacgataaggcgatagccagtagcaacgataccgtgggttattatctctatttaggtgataacagcgatgtcctggatgtttctgcacctttcaacatcgagagttataaaacagcggacggtcaatatgccattccgtttaaagcaaaatacctgaaactgacagataactcagtgaattcaggtgatgtgttatcttccctgattatgcgtgtggcgcaggattaa

SEQ ID NO: 447 - DNA, 282 bp, Escherichia coli
atgaataagtactggctgtcaggaattatttttcttgcctatggattggcttctcccgcgttctcttcagaaactgctacattaacgattaatggtaggatcagtcccccaacatgcagtatggctatggttaatggtcaacctcaacagcattgtggtcagttaacgtataatgttgatacccgtcatcaggtttcttcgccagttaaaggtgtaacgacggaagtgattgctgcagatagcgatagcaaacgtcgaatcgtgttaaatcgctacgattaa

SEQ ID NO: 448 - DNA, 1110 bp, Escherichia coli
atgaacgaacaatcccaggccaaatcaccagaagccttgcgcgcaatggtcgccgggacactggccaattttcagcacccaaccctgaagcataacctcacaacgctgaaagcgttgcaccatgtcgcctggatggacgacacgctgcatgtggaactggttatgccattcgtctggcatagcgcgttcgaagagttaaaagagcaatgtagcgccgaactgctgcgcatcaccggagcgaaagctatcgactggaaactgtcgcataacatagccactctgcaacgcgtgaagaatcagccgggaattaacggcgtgaagaacattatcgcggtcagttccggtaaaggtggcgtgggtaaatcctccacggcggtaaacctggcgttggcactggcggcggaaggggcgaaagtcggcattctggacgccgatatctacggcccatcaatccctaccatgctgggcgcagaaaatcagcgtccaacttcgccggacggtacccatatggcaccgattatgtctcatggcctggcaactaattcaattggttatctggtgacagacgacaatgcgatggtttggcgtggcccaatggcgagcaaggcgttaatgcaaatgttgcaggaaaccttgtggccggatctcgactatctggtgcttgatatgccgccaggtaccggtgacattcaattgacattggcacaaaacattccagtaaccggtgcagtcgtggtcaccaccccgcaggacatcgcgttgatcgatgcgaaaaaaggcattgtgatgttcgagaaagtcgaagttccggtgctcggtattgtcgagaacatgagtgtgcatatttgcagtaactgtggtcaccatgaaccgattttcggtaccggtggtgcagagaaactggccgagaaataccacacgcagctgctggggcagatgccgttacacatctccttacgtgaggatctcgataaaggcacgccaacggttatcagccgtcctgagagcgaatttaccgctatctaccgccagctggctgaccgcgttgcagctcagctctactggcagggtgaagtcattccaggcgagatttccttccgcgcggtctaa

SEQ ID NO: 449 - DNA, 2034 bp, Escherichia coli
atgactcaagtcgcgaagaaaattctggtgacgtgcgcactgccgtacgctaacggctcaatccacctcggccatatgctggagcacatccaggctgatgtctgggtccgttaccagcgaatgcgcggccacgaggtcaacttcatctgcgccgacgatgcccacggcacgccgatcatgcttaaagctcagcagcttggtatcaccccggagcagatgattggcgaaatgagtcaggaacatcagactgatttcgcaggctttaacatcagctatgacaactatcactcgacgcacagcgaagagaatcgccagttgtcagaacttatctactctcgtctgaaagaaaacggttttattaaaaaccgcaccatctctcagctgtacgatccggaaaaaggcatgttcctgccggaccgttttgtaaaaggcacctgcccgaaatgtaaatccccggatcaatacggcgataactgcgaagtctgcggcgcgacctacagcccgactgaactgatcgagccgaaatcggtggtttctggtgctaccccggtaatgcgtgattctgaacacttcttctttgatctgccctctttcagcgaaatgctgcaggcatggacccgcagcggtgcgttgcaggagcaggtggcaaataaaatgcaggagtggtttgaatctggcctgcaacagtgggatatctcccgcgacgcgccttatttcggttttgaaattccgaacgcgccgggcaaatatttctatgtctggctggacgcaccgattggctatatgggctctttcaagaatctgtgtgacaagcgcggcgacagcgtaagcttcgataaatactggaagaaagattccactgccgagctgtatcacttcatcggtaaagatatcgtttacttccacagcctgttctggcctgccatgctggaaggcagcaacttccgcaagccgaccaacctgtttgttcacggctatgtgacggtgaacggcgcgaaaatgtccaagtctcgcggcacctttattaaagccagcacctggctgaatcattttgacgccgacagcctgcgctactactacaccgccaaactgtcttcgcgcattgatgatatcgatctcaacctggaagatttcgttcagcgcgtgaatgccgatatcgtgaacaaagtggttaacctggcgtcccgtaacgctggctttatcaataagcgttttgacggtgtgctggcaagcgagctggctgacccgcagttgtacaaaaccttcactgatgccgctgaagtgattggtgaagcgtgggaaagccgcgaatttggtaaagctatccgtgaaatcatggcgctggctgacctggctaaccgctatgtcgatgaacaggctccgtgggtggtggcgaagcaggaaggtcgcgatgccgatctgcaggcgatttgctcaatgggcatcaacctgttccgcgtgctgatgacttacctgaaaccggtactgccgaaactgaccgagcgcgcagaagcattcctcaatacagaactgacctgggatggtatccagcaaccgctgttgggccataaagtgaatccattcaaggcgctgtataaccgcatcgatatgaaacaggttgaagcactggtggaagcatccaaagaggaagtaaaagccgctgccgcgccagtaactggcccactggcagatgatccgattcaggaaaccatcacctttgacgactttgctaaagttgacctgcgcgtggcgctgattgaaaacgcagagtttgttgaaggttctgacaaactgctgcgcctgacgctggatctcggcggtgaaaaacgcaatgtcttctccggcattcgttctgcttacccggatccgcaagcactaattggtcgtcacaccattatggtggctaacctggcaccacgtaaaatgcgcttcggtatctccgaaggcatggtaatggctgctggtcctggtgggaaagatatcttcctgctaagcccggatgccggtgctaaaccgggtcatcaggtgaaataa

SEQ ID NO: 450 - DNA, 3795 bp, Escherichia coli
atgagacactttatctatcaggacgaaaaatcacataaattctgggcggtggagcaacagggaaacgagttgcatatcagttggggaaaagttggtacccaagggcaaagccaggtaaaaagttttgctgatgctgtggcagcggaaaaagcggagctgaagctgattgcggagaaggtgaagaagggatatgtggagcaagcgaaggataattctttgcaaccttcccaaacggtaacggactctctcaaggtagcggacttatccaccattattcaggaacaaccctctttcgtagcagaaacccgtgcggctgacaaaaatacagatgctgttttaccgtggctggcgaaagatattgctgtcgtttttccgcccgaagttgtacacaccacgttaagtcatcgccgctttcccggagttcctgttcagcaagcagacaaattgacccaattacgtcgcttagcctgtagtgtgtcgcaacgggataatacaacagccacatttgacttcagcgcctgttctttagaatggcaaaacaccgtcgcccaggcgatcagtcagatcgacgacctgaaaacaacacagctaccatcacccgtaatggctgtactcacggcacttgaaatgaaatgcacaagatataaagagcgtgaggatgttatggatcagattattcaggaaggcggtctggaatatgctactgatgtaataatacatcttcaacaaatatctattgaatgggattatgtcaacaataatattgttttcctgtcgtctggcatttcacctgattatttgcagcaatattccagctttgaattacgcctacgtaaacatttatcactggcggaagagtctctctggcaaaaatgtgcacaaaaacttattgccgcagttccacatattccagaatggcggcaaccattaattgctttgttattgcccgaaaaaccagaaattgcacatgaaattgcccagcgtctactggggcaaaagaaattaccctcgctggagtggctaaaaatagtggcgactgatgagcacattcttgcctcattagaaaaatatcacgagccatatgccatttttgatgattactattgtggtgcgatatggtcagccaccgtattacaggagcaaggtgttgcggccctgccccgatttgctccctatgtcgcaagtgactactgcgccgatgtgttgcgtcatatcaatcatccgttcgcattaacactgcttatacgtgtagcagggcatactaaacgctgtcacgatcgaatgacgaaagcctgcgctgcgttcccacacgcagcactggcagcactggcggaacttctagtgcaaaaagaagagaatagttggcgcattatgctaatgacgatgcttatctcgcaaccgacactagcagaacaggtcattccctggctttcgacacccgcagttgcagtgctgaaatcatgccagcaacaactgacacagccctcaaaccatgccagcgccgatctactgccggccatagtagtctccccaccatggctttcgaaaaagaaaaaatcgccgattccagtgctggatttagcaccattaggtattgagccaatcagttatctgacagaagaaatcagtaatcaacttttggcgaaatatatctggtattcaaaacacatcacggttagtcatgaagaaagtactgccaatctgttggcaaggatgggttttcaacgacggatcgctggtacatatattaaagctcccgaagcggtagttgaggcatggctaaatgaagattattcaaccttaataagtgaatttaaggtgtttcattcacctaccgggcattattggcatttggggattttgacaacattgccgctggagaaagcagtaagagcatggaatgcccttactctatctccgcataccgataccgaatacgccatgttacattttggattcaaagggttacctgggttagtgaactcacttgcacgctatccacaggaagccttgcccataacgaattacttcgcagcgagtgagctggcacctgccgtcgcccgcgccttcaacaaactcaaaaccctacgacaagatgcccgtagctggctgctgaaatacccgcaacacgccattaccggcctgctgcctgcagcgctcggcaaagccagtgaagcacaggacaacgcccgtgctgccttgcgtatgcttaccgaaaacggtcatcagccattgctgcaagaaatcgcccggcgttataaccagccggaagtaaccgatgcggtgaacgctctacttgcgctcgatcccttagataatcacccgacaaaaatccccactcttccgaccttttatcagccatcgctctggacgcgcccgttattaaaagcaaacgcccaatcactgcctgatagcgcactcctccacctcagtgaaatgctccgcttccctcaggaagaggcactgtatccgggattattgcaggtgaaagatgcctgtaccaccgactcactggctgaatttgcctgggatctgtttaccgcctggcagaccgctggcgcgccgtcgaaagagagttgggcgttcactgcgttaggcgttctcggtaacgatgacaccgcccgcaaactgacgcctttgattcgcgcctggcctggtgaatcccagcataaacgcgccaccgtcgggttggatattctcgctgctatcggtagtgatatcgccctgatgcagcttaacggcatcgcccagaaactgaaattcaaagcattacaggagcgggcaaaagaaaaaattgccgacattgccgagagccgcgaactcacggtggcggagcttgaagatcggttagcaccggatctcggtctggatgataatggttcgttgttgctggatttcggcccacgccagttcaccgtcagctttgatgaaaccttaaaaccgtttgtgcgtgacgcttccggcagtcgtctgaaagacctgcccaaaccaaacaaaagcgatgatgaatcacaggcgaacgatgctgttaaccgctacaaattgctgaaaaaagatgcgcgtaccgtcgccgcccagcaggtagcaaggctggaatccgccatgtgcctgcgtcgccgctggtcaccggaaaactttcagctcttcctggttgagcatccgctggtccgccacttaacccgccgtctgatttggggcgtttatagcgccgaaaaccagctactggcttgctttcgcgtagcggaagataacagctacagcaccgctgacgatgatcttttcaccctgccggaaggcgatatctctattggtattcctcacgttctggaaatatcaccgacggatgctgccgccttcgggcagctttttgccgactacgaactgttaccaccgttccgccagcttgatcgtaacagttacgcgctgacagaagccgagcgcaacgccagcgaactgacacgctggacaggcagaaaatgcccgagtggtcgggtaatggggctggcgaataaaggctggataaagggcaccccgcaggatgctggctggatcggctggatgatcaaccccctgggccgctggtcgttaatcatggaaatcgatgaaggttttgcggtaggcatgtcgccagccgaactgagtgccgagcaactcttaagcaagctgtggctatgggaaggcaaagcggaaagctatggctgggggagtaattcaacacaggaagcgcagttctccgtactcgatgccatcaccgccagcgagctaattaacgatattgaagccctgtttgaataa

SEQ ID NO: 451 - DNA, 3633 bp, Escherichia coli
atggacaaggaattaccgtggctggcggataacgcccaactggaactgaaatataaaaaaggcaaaacaccactcagccatcgcaattggccaggcgaaccggtgcctgttatcactgaaagcatcattcagacactgggtgacgaattgctacaaaaagcagagaagaaaaaaaacattgtctggcgttatgaaaacttttcactggagtggcagtccgccatcacgcaggccatcaacttgatcggcgaacacaaaccctcaatcacggcccggacaatggcggcgctagcctgtatcgcgcaaaatgatagccaacagttgctcgacgaaatcgtccaacaagaggggctggaatatgcaactgaggtggtgattgcacgccagtttattgtacggtgctatgagagtgatcctctggtagtaacattgcaatatcagaacgaggactatggctatggttatcgctcagaaacctataacgaattcgatctccgattgcgtaagcatctctctctggcagaggaaagctgctggcagcgttgcgccgacaaactcattgccgcactgccaggaataaccaaagtttgccgcccttttattgcgctgaacctcccggaaaaacccgaaatcgccaacgagctggtaagccttgaatgttcgcaaactcattttcgctcaaaagagtggttaaaagttgttgctgatgaccctaaggcggtgaaagaactcgcacgctactggagccaggatatatttagcgatcgagaagccagctacatgtcgcatgaaaaccacttcggttacgcggcctgcgctgcccttttgcgcgaacaaggactggcagccgttccgcgcctcgcgatgtatgcacataaagaagattgcggcagtctgctggtacaaattaaccatccgcaagtcatccgcaccttgctactggtggctgataaaaacaaacccagcctgcaacgtgtggctaaatacagtaaaaacttcccccatgcgacgctcgccgcactggcagaactgctggcgttaaaagccccccctgcgcgccctggttatcccatcatcgaagaccaaaagctgcctgcacagcaaaaagcacgtgatgaatactggcatacgctgttacaaacgctgatggcatcgcagccacaactggcagaagaggtgatgccgtggttaagtacacaagcccaggcagtggtgaatagttatttatcggcaccgctaaaaccggttattgatagcaccgataatagctgtctgcctgaaatcctcgtttcaccaccgtggcgtagtaagaaaaaaatgacagctccacgtcttgatttggcatcgctcgaattaactccgcaagtttactggcaaccaggcgaacgagagagacttgccgccacagagtctgcccgttatttcagcacgggatcttttacggaacgcatggaacgaaaaagtggtcgagttgtactacaggagctaggtcttggggatgatgtatggctgttccggaattatatactgcccggcaaactggatgcggcgcgcaaatcattagtggttcagtggcattactccccgcgcagagtagaggaaatcaacaatggctggcactccacggaagcaaaatcagccgaacaggcgcttcgttccggcgacgttgaagcgttaattaacatctgggaaaatgatagctactcgcattatcgtcaggaaaagagtgtctggaacctgtatttattggcgcagttgccacgtgagatggctttgactttctggctgcgtatcaatgagaaaaagcatctattcgcgggtgaggactattttctcagtatcctcgggttggatacattacctggcctgttattggctttttcacatcatccaaaagaaacatttccgttaattttaaatttcggcacaacagaactggccctgcccgttgcccacgtctggcgccgtttcacggcgcagcgtgatctggctcgccagtggattttacaatggccggaacatacggctactgcacttatccctcttgtctttacaaaacccagcgataatagcgaagctgcattacttgccctgcgtttactgtatgaacaagggcatggcgaattactgcaaaccgtggcaaaccgctggcagtgtacagatgtatggcctgccttggagcaattacttaaacagggtccaatagaaatttacccggcacgtattccaaaagctcctgatttctggcatccggcaatgtggtccaggccgcgccttatcaagaataatcagcctgttaccgatgacgctctggaaattatcggcgaaatgctgcgctttacccagggcggacgtttttatagcggactggaacagctgaaaacgttttgccagccgcaaacgctggcagcttttgcctgggatcttttcaccgcgtggcaacaagctggtgcccccgcaaaagacaactgggcatttctggcgttaagtctctttggtgacgaaagcacggctcgggagctgacgacacagatcctcgcctggccacaagaaggcaaatctgcccgtgctgtcagtggcctgaacatccttaccctgatgaataatgatatggcgctgatacagctgcaccatatatcccaacgggcgaaatcccgctccttacgtgataacgcggcggaatttcttcaggtggtcgcagaaaatcgcgggctaagccaggaagagttagcggacagattagtcccaacactgggtcttgatgatccgcaggcgttgatttttgattttggtccacggcaatttaccgttcgcttcgatgaaaacctcaacccggttatctacgatcagcaaaacgttcgccagaaaagcgttccccggttgcgcgccgatgacgatcaactgaaagcccccgaggcactggcccgactaaaagggctaaaaaaagatgccactcaggtgagcaaaaacctgctcccacgtcttgaagcagccatacgtatcacccgccgctggtcgctggcagattttcattctctgtttgttaatcatccctttacccgcctggttacccagcgattaatatggggggtttatccggcaaatgaaccgcgtcgtttactcaacgcctttcgtgtggccgcagagggggagttctgcaatgcacaagatgagcccattgacctgcctgcagatgctctgattggcattgcccacccgttagaaatggcagcagaaatgcgcagtgaatttgcacagctttttgccgattacgaaattatgccgccttttcgccagttggcgcggcgcacggtgctgctcacacctgacgagtcagccagtaacagcctgactcgctgggaaggtaaatccgctaccgttggtcaacttatgggaatgcgatacaaaggctgggagtcaggctatgaggacgcatttgtctatgacttaggtgcgtaccggctggtccttaagttttcacccggttttaaccactacaatgttgatagcaaagcgctaatgagcttccgttctcttcgggtttaccgtgacaataaatccgtcacttttgccgaacttgatgtgtttgatttgagtgaggcattaagcgcacctgacgtcattttccattaa

SEQ ID NO: 452 - DNA, 186 bp, Escherichia coli
atgatcgtgcaaaaagagctggttgctatttacgattatgagatccctgtacctgaagagccgttttccttcagacttgaaatccataaatgctctgaattatttacaggttccgtctatcgactggagcgattccggctacatccaacatttcatcaacgtgatcgagaagatgccgaccactaa

SEQ ID NO: 453 - DNA, 1089 bp, Escherichia coli
atgtcaccgcagaataatcacctgcagcgtccgcctgctgctgtgttatacgccgttgaactggcaaaattaaaacaaaatgataacgcaccttgcccgccaggttggcagttaagtttgcctgcggcccgtgcttttatccttggcgacgaagcgcaaaatattagccgtaaagtggtgattagtccctctgctgtcgaacgcatgttagtcactcttgccaccgggcgcggtttgatgttggtgggggaaccggggaccgcaaaatctctcctgtctgaattactggcaaccgctattagcggcgatgccgggttaaccatccagggcggcgcatctaccaccgaagatcaaatcaagtacggctggaactacgccctgcttatcaatcatggtccgtcaacggaagcgctggttcctgccccgctttaccagggaatgcgcgacggcaaaatcgtccgttttgaagagataacgcgtacaccgctggaagtgcaagactgtctgttaggtatgctttctgacagggtgatgacggtgccggaactcactggtgaagccagccagctctatgcacgggaaggctttaatattattgccactgccaatacgcgcgatcgcggcgtcaatgaaatgagtgccgcgctaaagcgtcgcttcgattttgaaactgtctttccgattatggatttcgcccaggagctggagcttgtcgccagtgcttcggcgcgtttgctggcccatagcggcattccgcataaagtgcctgacgcggtactggagttactggtccgcacctttcgcgatctgcgtgccaacggcgaaaagaaaacgtcaatggatacactaacagcgattatgtccaccgctgaagccgtgaacgtggcccacgcggtgggcgtccgcgcctggtttttagcgaatcgagcaggtgagccagccgatctggtggactgtattgccggaaccatcgtcaaagataacgaagaagatcgcgcgcgcctgcgccgttacttcgaacaacgtgttgctacacataaagaagctcactggcaggcttattatcaagctcgccaccgcctgccgtga

SEQ ID NO: 454 - DNA, 2280 bp, Escherichia coli
atgagcgagccgttaattgtcggcatccggcatcatagcccggcctgcgcccggctggtgaaattgttaatcgaaagccagcggccacgatacgtattgattgaaggcccggctgattttaatgaccgggtggacgaactgtttttagcccaccagcttccggtagctatttacagttattgccagtatcaggacggtgcggcccccgggcgtggtgcctggacgccatttgctgaattttcgccggagtggcaggcgctacaagccgcacgtcgtattcaggcacaaacttacttcatcgatttgccttgctgggcgcagagtgaagaagaagacgaatcacccgatacgcaagatgacagccagaccttactgctgcgtgccacctgcatggataacagcgataccctgtgggatcacttattcgaagatgaaagccagcaaactgcattaccctctacactggcgcactattttgcccaactgcggggcgattcccccggagatgctctcaatcgtcagcgcgaagcctttatggctcgctggattacatgggcgatgcagcaaaacaatggcgacgtgttagtcgtctgcggcggctggcacgctcctgcactggcaaaaatgtggcgcgaatgcccgcaggaaattaacaagccagaattgtcctcgctggcagatgccgttacaggttgttatctcacaccctacagtgaaaagcgccttgatgtgctggcaggatacctttccggaatgcctgccccggtctggcaaaactggtgctggcagtgtggcttacagcaggcaggtgaacaactactgaaaacggttcttacccgtttgcgccagcacaaattgcccgcttctaccgctgatatggctgcagctcatctgcatgtgatggcactggcacagttgcgcggccatacactacctctacgcactgactggctggatgccatagctggctcgctgattaaagaagccctgaatgcgccgttgccatggagctaccgcggagttattcatcccgataccgatccgattctgctaacgttgatagacacattagcgggtgacggattcggtaaacttgccccttctacgccacaaccgcctctgccaaaagatgtcacctgcgaactggaacgtaccggaatctctcttccggcggagcttaccttaaatcgctttacccccgatggactggcgcaaagtcaggtgttacatcggttggcaatactggagatcccaggggttgtgcgccagcagggaagtacactgacacttgcaggcaacggtaaagaatgctggaaattaacccgcccgcttagccaacatgcggcattaattgaggccgcctgctttggtgccacactccaggaagccgcacgcaataaattagaagccgatatgctggacgcgggtggaatcggcagtatcaccacatgtcttagccaggcagcgttagcgggtctggcgtctttcagtcagcaattactggaacaactcacattattaatcgcccaggaaaatcaattcgccgaaatgggccaggcgctggaagtgctatatgccttatggcggctggatgaaattagcggtatgcaaggcgcgcagatattacagacgacgttatgcgcggctatcgatcgcacactctggctatgtgaatccaacggcagaccggatgaaaaggagtttcacactcacctgcatagctggcaggcgctttgccatatcctgcgcgatctacatagcggcgttaatttacccggcgtttcgctttctgcggcagtagccttactggagcgccgcagtcaggcgattcatgccccggcgctggatcgcggcgcgactcttggcgcactgatgcgtctggaacatcccaacgccagtgccgaaacggcgctgacgatgctggcgcagttatccccgacacaatccggcgaggcgctgcacggtttgctggcgctggcccgccatcaactggcctgtcagccggcatttatcgctggtttcagcagtcatttaaatcaactgagtgatgccgattttatcaatgccctgcccgatttacgcgcggcgatagcctggctaccaccacgagaacgcgggacgctggcgcatcaggtgcttgagcattatcaactggtgcaacttcccgtttcggcactgcaaatgccgttgcattgtccaccacaagacattgcacatcatcaacaactcgaacagcaggcactggcatcgctgcaacactggggagttttccatgtctga

SEQ ID NO: 455 - DNA, 1137 bp, Escherichia coli
atgtctgaactgaacgatcttctgaccacccgtgagctacaacgctggcgattaattcttggcgaagcggcagaaacgacgctttgtgggctggatgacaacgcccggcagatagaccacgcgctggagtggctgtatgggcgcgatcctgaacggctccagcgtggtgaacgttacggtggattaggtcgttcaaatctcaccacccctgagtggatcaacagcattcacacgctgtttccgcaacgggtgatcgagcggctggaaagcgatgccgtgctgcgctacggcattgaagatgtggtgacgaatctcgacgtgctggaacgtatgcagccttctgaaagcctgctacgcgccgttttgcacaccaaacatctgatgaatcccgaagtactggctgccgcccgccggatagtacgccaggttgttgaagaaattatggctcgactggcaaaggaagttcgtcaggctttttctggtgtccgcgatcgccgtcgccgctcatttattccactggcgcgaaactttgatttcaaaagtactctgcgcgccaacctgcaacactggcacccgcaacacggcaagttgtatatcgaatccccccgctttaacagccgcattaaacgccaaagcgaacaatggcaactggtcttactggttgatcaaagcggatcaatggtggactcggtgatccactccgcggtgatggcggcctgtttatggcagttacccggtattcgtacccatctggtggcgtttgacaccagcgtggttgatctcacggcagacgttgccgatccggtagagttattaatgaaagtgcaattaggcggcggaaccaatatcgccagtgccatggaatatggtcggcaacttattgaacaaccagcgaaaagcgtcattatcctcgtgagcgatttttacgaagggggttcatcatcattactgacgcatcaggtgaaaaagtgtgtccagagcggcatcaaagtgctgggactggcggcgctcgatagcaccgcaacaccttgctatgaccacgatacggcccaggcgctggtaaatgtcggcgcacaaatagccgccatgacaccgggcgagctggcatcatggcttgcggagaatcttcagtcatga

SEQ ID NO: 456 - DNA, 2004 bp, Escherichia coli
atgaattcactacgtccggaattattagaactgacgccgcaggccctgacggcgttaagcaatgccggttttgttaagcgcagccttaaggaactggaaaatggcaacgtcccggaaatcagtcatgagaacggcgctttaatcgccaccttcagtgacggtgtccgtatccagctggcgaacggccaggcactgaaagaggctcagtgcacctgcggggccagcggcatgtgccgtcatcgcgtgatgctggtgttaagttatcaacgactttgtgccaccgcccagcctacggaaaaaaaagaagaagagtgggattcggcaatctggctgaaagaactggctaccttgcccgatgccacccgcaaacgcgcgcaggcgctggtcgctaaaggcatcaccattgagttgttctgtgcgcctggcgaaattccctctgcccgattaccgatgagcgatgtgcgtttttattcccgcagcagcattcgcttcgcacgctgtgattgcattgaaggcacactttgcgaacatgtcgtactggctgtgcaggccttcgtcgaggccaaaactcagcaagcggaatttactcatttaatctggcagatgcgcagtgaacacgtcacatcatctgatgatccgtttgccagcgaagaaggcaaaacgtgtcgtcaatatgttcagcaattaagccaggcattatggctgggcgggataagtcaaccgccaatccattacgaggccgctttcagtcgcgcgcaacaagcggcggaacgctgcaactggcgatgggtgagtgaatcgctacggcaattgcgcgccagtgttgatgccttccacgcccgtgccagccactaccatgccggagaatgcttacgtcagcttgcggcattaaacagtcgattaaattgcgtacaagagatggcgcgacgcgacagtatcggtgaagttcctcccatgccgtggcacacggtcgttggcgctggtattgccggagaagcaaaacttgatcatctgcggctggtgtctttaggtatgcgttgctggcaggatattgagcagtatggtttacgcatctggtttaccgatcccgacacaggaagtattttgcatctttcgcgtagttggcagagaagcgaacaggaaaactcaccggcagcgacgcgtcggctgtttagttttcaggctggcgcactggccggtgggcaaattatttcacaagcagcaaaacgcagtgccgatggcgagctgctgttagctacccgcaaccgcttaagcagcgttgtgccgctgtcgcctgatgcctggcaaatgttgagcgcaccgttgcgccagccgggcattgtggctttgcgggaatatttacgccagcgtccccccgcctgcatacgaccaatcaaccaggtcgataacttatttattctgccgatagcggagtgtatttcgctcggttgggatagcagccgccagacgctggatgcgcaggtaatcagcggcgaaggggaagataatgtgctgacgttatcccttccggcatctgcctgttctccttttgccgttgaacgcatggcggcgcttttgcaacaaacagacgaccccgtgagtctggtttctggctttgtcagttttgtagaggggcaattgacactggaaccacgggtgatgatgacaaaaacccgcgcctgggcgctggacgcagaaactgcgcctgtggcaccgctaccttctgccagcgttctgcctgtgccgcctaccgctcatcagttgctgatgcgctgccaggcgttacttattcaactgctccataacggctggcgctatcaggaacagagtgctattggtgaggcagagttgctggcgaatgacctcaccgcggtgggtttttatcggctggcacatgtgttgggacaatttcgtaatacagaaagcgaggcacgggtagaagcaatgaataacggtgttttgctttgcgaacaattattccccatgcttcagcaacaaggatga

SEQ ID NO: 457 - DNA, 462 bp, Escherichia coli
atgaaggctttcaataagctgttttcccttgttgttgcatctgttctggttttctctcttgctggctgcggtgacaaagaagaatcaaagaaattcagcgccaatctgaacggcactgaaattgccattacctatgtctacaaaggtgacaaggtgcttaagcaatcttctgaaaccaaaattcaatttgcctccattggtgcaaccaccaaagaagatgccgccaggacacttgagccgttaagcgctaaatacaaaaacatcgcgggtgttgaagaaaaattaacctataccgatacctacgcgcaggaaaacgtgactattgatatggaaaaagtggattttaaagccctgcagggtatttcaggaatcaacgtttctgctgaagatgccaaaaaaggtatcactatggcgcaaatggaactggtgatgaaagccgctggttttaaagaagtgaaataa

SEQ ID NO: 458 - DNA, 471 bp, Escherichia coli
atgctaagtaacgatattctgcgcagcgtgcgctacattttgaaagccaataataatgacctggtgcgtattctggcgctgggtaatgtcgaagccaccgcggaacagatcgccgtctggctacgtaaagaagacgaagagggttttcagcgttgtccggacattgttttgtcttcattcctcaatggcctgatttatgaaaaacgcggcaaggatgagtctgctccggcactggagccggaacgtcgcattaataacaacatcgtgctgaaaaaattacgcatcgcgttttcgcttaaaaccgatgacattctggcaatcctcaccgaacagcagttccgcgtttcgatgccggaaattacggcgatgatgcgtgcaccggatcataaaaacttccgcgaatgcggcgatcaatttttacgttattttctgcgtggactggcagcgcgccagcatgtgaagaaaagctaa

SEQ ID NO: 459 - DNA, 720 bp, Escherichia coli
atgattaaagtcttaattgtcgatgatgaaccgttagcacgggagaacctgcgcgtatttttgcaagagcagagcgatattgaaatcgttggagagtgttcaaacgccgtagaagggatcggcgcggtgcataaactgcgcccggatgtgctgtttctcgatatccagatgccgcgcatcagtggtctggaaatggtggggatgcttgatccggaacatcgcccgtatattgtttttctcaccgcgtttgacgaatacgccattaaagcctttgaagaacatgcctttgattatctgctgaagccaattgatgaagcgcgactggagaaaacgctggcgcgattgcgtcaggagcgcagcaagcaggatgtttcgctgttaccggaaaatcaacaggcgctgaaatttatcccttgtacggggcatagtcggatttatttgctgcaaatgaaagatgtggcatttgtcagcagtcggatgagcggtgtctacgttaccagtcacgaagggaaagagggctttaccgaactgacattacgtaccctggaaagtcgtacaccactactgcgctgccatcgtcagtatctggttaacctcgcgcatttacaggagattcgtctggaagataacggccaggccgagttgattttgcgtaatggcttaaccgtgccggtcagccgccgttatctgaaaagcttaaaagaggcgattggcctgtaa

SEQ ID NO: 460 - DNA, 1686 bp, Escherichia coli
atgtacgattttaatctggtgttgctgctgcttcagcagatgtgcgtttttttagtcattgcgtggttaatgagtaaaacgccattattcataccgttaatgcaggtcacggttcgtctgccgcataaatttctctgctacatcgtcttttccatcttctgcatcatgggcacctggtttgggttgcacattgacgattctattgccaatacccgtgcgataggtgcggtaatgggcggcttactcggcggtccggtcgtcggtgggctggttggtctgaccggcgggttacatcgatattcgatggggggcatgaccgcgctaagttgcatgatctcgaccatcgttgaaggattgctcggcggcctggtacacagcatccttatccgtcgcgggcgcactgataaagtctttaaccccattaccgccggtgccgtcacgttcgtcgctgaaatggtgcaaatgttgatcatcctggcgatcgcccgaccttatgaagatgcggtgcgtctggtgagtaatattgctgcgccaatgatggtcaccaataccgtcggcgcggcgttgtttatgcgtatattgctcgataaacgcgcgatgtttgaaaaatacacttcggctttttctgccactgcgctgaaagtggcggcctcgacggaaggcattttgcgccaggggtttaacgaagtgaacagcatgaaagtggcacaggtgctgtatcaggagctggatattggtgcagtcgcgattaccgatcgagagaaattgctggcctttaccggaattggtgatgaccaccatttacccggcaaaccaatttcttcgacttataccttaaaagcgattgaaaccggtgaagtggtctacgctgatggcaacgaagtgccttaccgttgctctttgcatccgcaatgcaaactggggtcgacgctggtcattccgttgcgtggtgaaaatcagcgagtgatgggtaccatcaaattgtatgaggccaaaaaccgtttattcagttcaatcaaccgcacgctgggcgaggggattgcgcaactgctttcggcgcagatcctcgccgggcaatatgagcggcaaaaagcgatgctcacccagtcagagatcaaactgcttcacgcccaggtgaatccccattttttgtttaatgcgcttaacaccattaaagcggtgatccgccgcgacagcgaacaggccagccagctggtgcagtatctttccacttttttccgcaaaaacttaaagcggccttcggagtttgttactctcgccgacgaaattgaacatgtgaacgcttatctgcaaattgaaaaggcgcgcttccagtcgcggttgcaggtcaacattgctattccgcaagaattatcccagcagcaattgcccgcgtttaccctgcaaccgatagtggaaaacgccattaaacatgggacatcacaactgttggatacagggcgagtggcaatcagcgcccgacgtgaggggcaacatttgatgctggagatcgaagacaatgccggtttgtatcaaccggtaaccaatgccagtgggctggggatgaatctggtggataagcgtttacgtgaacggtttggcgatgactatgggataagcgtcgcctgtgagcctgatagttacacccgaataacgttacgactaccatggagggacgaggcatga

SEQ ID NO: 461 - DNA, 732 bp, Escherichia coli
atggcgctttacacaattggtgaagtggcgttgctttgtgatattaaccctgtcacgttacgcgcgtggcagaggcgttacggattgctgaaaccgcaacggacagacggcggtcatcggctgttcaacgatgccgatattgaccggatccgcgagatcaaacgctggatcgacaacggcgtgcaggtcagcaaagtaaaaatgctgctcagtaatgaaaatgttgatgtgcagaacggctggcgcgatcagcaagaaacattactgacttacctgcaaagcggcaatctgcatagcctgcgaacgtggatcaaagagcgcggtcaggattaccccgcccagacactcaccacacatctgtttattcctctgcgccgacggcttcagtgccaacaaccgactctccaggcgctgctggcgatcctcgacggcgtactgatcaactacatctctatttgcctggcttcggcgcgcaaaaaacagggtaaagatgcactggtggttggctggaatattcaggataccactcgtctgtggctggagggctggattgccagtcaacaaggatggcgcattgatgtcctcgcccactcgctcaatcaactacgccctgaactgttcgaaggccgtacattgctggtatggtgcggtgataatcgaacctccgcccaacagcagcaactcaccagttggcaggaacaaggccatgatattttcccactcggcatttaa

SEQ ID NO: 462 - DNA, 732 bp, Escherichia coli
atgaagatgttgcgcgatccgctgttctggctcattgctctgtttgtggcgctgattttctggctgccttacagccagccgctgtttgctgccttgttcccacaactgccacgacccgtttatcagcaggaaagctttgcagctctggcactggctcatttctggctggtgggaatttcgagtttgtttgcggtgatcattggtactggtgccggaattgctgtcactcgcccttggggcgcggaatttcgtccactggtggaaactattgccgccgttggacagacttttccgcccgttgcagtgctggcgattgccgttccggtgatcggctttggtcagcaaccggcgattatcgccttgatcctttacggtgtgctgcccgtcctgcaggcgacacttgccgggctgggatcgattgatgccagcgtgaccgaagttgccaaaggcatgggaatgagctgtagtcagcgactgcgtaaggtcgagctaccgctggcggctccggtgattctggcgggcgtgcgaacttcggtgattatcaacattggtacggcgacgatcgcctcaacggtaggggccagcacgctgggtacgccgatcatcatcgggcttagcggatttaataccgcgtatgtgatccagggggcgttactggtggcactggcggcgatcatcgcagaccgcctgtttgaaaggctggtgcaggcgttcagccagcacgcaaaataa

SEQ ID NO: 463 - DNA, 927 bp, Escherichia coli
atgattgaatttagccatgtcagcaaactgttcggcacacaaaaagccgttaacgatctcaatctcaattttcaggaggggagtttttcggtgctgattggtacatcaggctccggtaaatccaccactctgaaaatgattaaccgcctggtggagcatgacagtggcgtgatccgctttgccggagaagaaattcgctcgctgccagtgctggagttgcgccgccggatgggctatgccattcaatctattggcctgtttccccactggagcgtggcgcaaaatattgccaccgtgccgcaattacaaaaatggtcgcgggcgcggatcgacgatcgtatcgatgaattaatggcgctactggggctggagccggatttgcgtgagcgttatccgcatcagctttccggcggtcagcagcaacgtgtgggagtggcccgcgcgctggctgccgatccgcaagtcttgctgatggatgagccattcggcgcactggacccggtaacgcgtggcgcgttgcaacaagagatgacgcgcatacaccgtttgctggggcgtaccattgtgctggtcactcatgatattgatgaggcgctacgactggcagaacatctggtgttgatggatcacggtgaagtggtgcagcagggcaatccgctgacgatgctgactcgtccggcgaatgattttgtccgccagttttttgggcatagtgaactgggtgtccgcctgctttcgttacgtagcgtggcggattacgtgcgtcgcgaagaacgggcagaaggtgaggcgctggcagaagagatgacgctacgcgatgcgctctccctgtttgtcgcgcggggatgtgaagtgctgccggtggtgaacacgcagggcgagccttgcggcacgctgcattttcaggatctgctggaggaggcgtaa

SEQ ID NO: 464 - DNA, 1158 bp, Escherichia coli
gtgacttatttccgtattaatcctgttctggcgctgctgctgttgctgacggcaatcgcagcggcgctgccgtttatcagttacgcacctaatcgtttagtttcgggtgaggggcgtcatctctggcagctgtggccgcaaactctctggatgctggtgggcgttggttgcgcctggctgacagcctgttttattcccgctaaaaaaggcagcatttttgcactcattctggcgcaattcgtcttcgtattgctggtgtggggagctggaaaggcggcgacacaactggcgcaaaatggcagtgcgctggcgcgtaccagcctcggcagtggtttctggctggctgcggcgctggcactgctggcctgtagcgatgccatccgccgaatctccacgcatccgctgtggcgctggttgttgcatatgcagattgccattgttccgctgtggttgctgtactccggcacgcttaacgatctctcgttaatgaaagaatacgccaaccgtcaggatgtgtttgacgacgcgctggcacaacatctgacgttgctgtttggtgcggtgctgcctgcgttagtgattggtgtgccgttgggcatctggtgctacttttccaccgcgcggcagggggcgattttttctctgctgaatgtcattcagaccgtgccttcggtagcgctctttggcctgctgattgcgccgcttgccgcgctggttacggcctttccgtggctgggaacgctcggcatagcaggaaccggaatgacacccgcactgattgcgctggtgctctatgccttgctgccgctggtgcgcggcgtggtagtcggcttaaaccagatcccgcgcgatgtgctggagagcgccagagcgatggggatgagcggggcgcagcgtttcctgcatgttcagttgccgctggcgttaccggtatttctgcgcagcctgcgggtggtgatggtgcaaaccgttggcatggcggtgattgcggcgttaatcggcgcaggcggttttggtgcgctggtttttcaggggctgttaagcagtgccattgatttagtgttgctgggggtgatcccggtaattgttctggcggtgcttaccgacgcgctgttcgatttgcttatcgcactgctgaaggtgaaacgtaatgattga

SEQ ID NO: 465 - DNA, 918 bp, Escherichia coli
atgccactctcaaagctctgggcaggttcactggttttgttggcagccgtgagcctgccgctacaggcggcttcccccgttaaggttggttcaaaaatcgatacggaaggcgcgctgctcggcaatatcattttgcaggtgctggaaagtcacggcgttcctacggtaaataaagtgcagctgggaacgactcccgtagtgcgcggggctatcacttctggcgagctggatatctatccggaatatactggcaatggcgcgtttttctttaaagatgaaaacgatacggcatggaaaaacgcgcagcaaggctatgagaaagtcaaaaaactcgatgcagagcaaaacaagttaatctggctgacgcccgcgcctgcaaataacacctggaccatcgccgtgcgtcaggatgtggcagagaaaaacaaactcacttcgcttgccgatctgagtcgttatctgaaagagggcggcacctttaaactggcagcctcggcagagtttatcgaacgcgccgatgccttacccgcgtttgaaaaagcctatggctttaagctcggtcaggatcagttgctgtcactggccggtggtgacacggcggtgacgatcaaagccgctgcccagcaaacttctggcgttaatgccgcaatggcttacggcaccgacggcccggttgcggcgctggggctgcaaaccttaagcgatccgcaaggcgtgcaacctatctacgcgcctgcgccagtggtgcgtgagtcggtgctgaaagagtatccgcaaatagcacagtggctacagccagtcttcgccagcctcgatgaaaaaacattgcagcagctgaatgccagcattgcagtggaaggactggatgccaaaaaagtggcagccgactacctgaaacaaaaagggtggacgaagtaa

SEQ ID NO: 466 - DNA, 2268 bp, Escherichia coli
gtgagtctggccctgcagccagcactggcggatgatttattcggcaaccatccattaacgcccgaagcgcgggatgcgttcgtcaccgaactgcttaagaaaatgacagttgatgagaaaattggtcagctgcgcttaatcagcgtcggcccggataacccgaaagaggcgatccgcgagatgatcaaagacggtcaggttggggcgattttcaacaccgtaacccgtcaggatatccgcgccatgcaggatcaggtgatggaattaagccgcctgaaaattcctcttttctttgcttacgacgtgctgcacggtcagcgcacggtgttcccgattagtctcggtctggcttcgtcttttaacctcgatgcggtgaaaacagtcgggcgtgtctctgcttatgaagcggcagatgatggcctgaatatgacctgggcaccgatggtcgatgtctcgcgcgatccgcgctggggacgtgcttccgaaggttttggcgaagatacgtatctcacctcaataatgggcaaaaccatggtggaagcgatgcagggtaaaagcccggcagatcgttactcggtgatgaccagcgtcaaacactttgccgcatacggcgcggtagaaggcggtaaagagtacaacaccgtcgatatgagtccgcagcgcctgtttaacggctatatgccgccgtacaaagcggggctggatgcaggcagcggtgcggtgatggtggcgctgaactcgctgaacggcacgccagccacctccgactcctggctgctgaaagatgttctgcgcgaccagtggggctttaaaggcatcaccgtttccgatcacggcgcaatcaaagaactgattaaacatggcacggcggcagacccggaagatgcggtacgtgtggcgctgaagtccggaatcaacatgagcatgagcgacgagtattactcgaagtatctgcctgggttgatcaaatccggcaaagtgacgatggaagagctggacgatgctgcccgccatgtactgaacgttaaatatgatatgggattgtttaacgacccatacagccatttggggccgaaagagtctgacccggtggataccaatgccgaaagccgcctgcaccgtaaagaagcgcgtgaagtggcgcgcgaaagcctggtgttgctgaaaaaccgtctcgaaacgctgccgctgaaaaaatctgcaaccattgcggtggttggcccgctggcagacagcaagcgtgacgtgatgggaagctggtcggcagcaggtgtcgccgatcaatctgttactgtgctaacagggattaaaaacgccgtcggtgagaacggtaaagtgctgtatgccaaaggggcgaacgttaccagtgacaaaggcattatcgatttcctgaatcagtatgaagaggcggtcaaagttgatccgcgttcgccgcaagagatgattgatgaagcggtgcaaaccgcgaaacaatctgatgtggtggtggctgtggtcggtgaagctcaggggatggcgcacgaagcttccagtcgtaccgatatcactattccgcaaagccaacgtgacttgattgcggcgctgaaagccaccggtaaaccgctggtgctggtgctgatgaatgggcgtccgctggcgctggtgaaagaagatcagcaggctgatgcgattctggaaacctggtttgcggggactgaaggcggtaatgcaattgccgatgtattgtttggcgattataacccgtccggcaagctgccgatgtccttcccgcgttctgtcgggcagatcccggtgtactacagccatctgaataccgggcgtccgtataatgccgacaagccgaacaaatacacttcgcgttattttgatgaagctaacggggcgctttatccgttcggctatggtctgagctacaccactttcaccgtctctgatgtgaaactttctgcgccgaccatgaagcgtgacggcaaagtgacggccagcgtgcaggtgacgaacaccggtaaacgcgaaggggccacggtagtacagatgtacttgcaggatgtgacggcttccatgagtcgcccggtgaagcagcttaaaggctttgagaaaatcaccctgaaaccgggcgaaactcagaccgtcagcttcccaatcgatattgaggcgctgaagttctggaatcaacagatgaaatatgacgccgagcctggcaagttcaatgtcttcatcggcactgattccgcacgcgttaagaaagccgagtttgagttgttgtaa

SEQ ID NO: 467 - DNA, 1716 bp, Escherichia coli
atgtcttccatgacaacaactgataataaagcctttttgaatgaacttgcccgtctggtcggtcattcacacctgctcaccgatcccgccaaaacggcccgctatcgcaagggcttccgttctggtcagggcgacgcgctggctgtcgttttccctggctcactactggaattgtggcgggtgctgaaagcctgcgtcaccgctgacaaaattattctgatgcaggctgccaatacaggcctgaccgaaggatcgacgccaaacggtaacgattatgatcgcgatatcgtgatcatcagcaccctgcgtctcgataagctgcacgttctcggcaagggcgaacaagtgctggcctatccgggcaccacgctctattcactggaaaaagccctcaaaccgctgggacgcgaaccgcactcagtgattggatcatcgtgtataggcgcatcggtcatcggcggtatttgtaacaactccggcggctcgctggtgcaacgtggcccggcgtataccgaaatgtcgttattcgcgcgtataaatgaagacggcaaactgacgctggtgaaccatctggggattgatctgggcgaaacgccggagcagatccttagcaagctggatgacgatcgcatcaaagatgacgatgtgcgccacgatggtcgtcacgcccacgattatgactatgtccaccgcgttcgtgatattgaagccgacacgcccgcacgttataacgctgatccggatcggttatttgaatcttctggttgcgcagggaagctggccgtctttgcagtacgtcttgataccttcgaagcggaaaaaaatcagcaggtgttttatatcggcaccaaccagccggaagtgctgaccgaaatccgccgtcatattctggctaatttcgaaaatctgccggttgccggggaatatatgcaccgggatatctacgatattgcggaaaaatacggcaaagacaccttcctgatgattgataagttaggcaccgacaagatgccgttcttctttaatctcaagggacgcaccgatgcgatgctggagaaagtgaaattcttccgtccgcattttaccgaccgtgcaatgcaaaaattcggtcacctgttccccagccatttaccgccgcgcatgaaaaactggcgcgataaatacgagcatcatctgctgttaaaaatggcgggcgatggcgtcggtgaagccaaatcgtggctggtagattatttcaaacaggccgagggcgatttctttgtctgtacgccggaggaaggcagcaaagcgtttttacaccgtttcgccgctgcgggcgcagcaattcgttatcaggctgtgcattccgatgaagtcgaagacattctggcgctggatatcgctctgcggcgtaacgacaccgaatggtatgagcatttaccgccggagatcgacagccagctggtgcacaagctctattacggccattttatgtgctatgtcttccatcaggattacatcgtgaaaaaaggcgtggatgtgcatgcgctgaaagaacagatgctggaactgcttcagcagcgtggcgcgcaataccctgccgagcataacgtcggtcatttgtataaagcaccggaaacgttgcagaagttttatcgcgagaacgatccgaccaacagtatgaatccggggattggtaaaaccagtaagcggaaaaactggcaggaagtgaaataa

SEQ ID NO: 468 - DNA, 933 bp, Escherichia coli
atgccgaaatttcgagtttctttatttagcctggccctgatgctggctgtgccttttgcaccgcaggccgttgcgaaaacggtagccgctaccaccgcgtcacaaccggaaattgcctccggtagcgcgatgattgttgatctgaataccaacaaagtgatctattcgaaccacccggatctggtgcgtccgattgcgtctatcagcaaattaatgaccgcgatggttgtgctggatgcacgactgccgctggatgaaaaactaaaagtggatatcagccagacgccggagatgaaaggggtctattcgcgcgtaagactgaacagcgaaatcagccgtaaagatatgctgttgctggcgctgatgtcttcagaaaaccgcgcggcggcaagtcttgcgcaccattatcccggtggttacaaagcctttattaaggcgatgaatgcgaaagcgaaatcgctcggaatgaacaacacgcgctttgttgaaccaaccggattgtcggtgcataacgtttcaaccgcccgtgacttaaccaaactactcattgccagcaaacaatatccgttgatcgggcagttaagtactacccgggaagatatggcaaccttctctaacccgacgtatacgctgccgttccgcaatactaaccatctggtgtatcgtgataactggaatattcagttaaccaaaaccggttttaccaatgcggcgggccattgtctggtgatgcgcacggttatcaataataaaccggtggcgctggtagtgatggacgcgtttggcaaatatacccattttgccgatgccagccgcctgcgtacctggattgaaaccggtaaagtgatgcctgttccggcagcagcgttgagctataaaaaacaaaaagccgcccaaatggcggcggcggggcagacggcacagaacgattaa

SEQ ID NO: 469 - DNA, 588 bp, Escherichia coli
atgagccatgtctggggactgttttcccatcccgatcgtgaaatgcaggtgattaatcgcgaaaacgaaacgatttctcatcactacacccaccacgttttgctgatggcggcgattccggtgatttgcgccttcattggcactacacagattggctggaattttggcgatggcactatcctgaagttatcctggtttaccggactggcgctggctgtcttgttttacggcgttatgctggctggggttgcggtgatggggcgggtcatctggtggatggcgcgtaattatccgcagcgtccgtcacttgcgcactgcatggtcttcgcgggctacgttgcaactccgctgtttttaagcggtctggtggcgctttacccgctggtctggttgtgtgcgctggtcggcacggtggcgctgttttacaccggctacctgctgtatctcggtattccgagcttcctgaatatcaacaaagaggaaggacttagcttctccagttcgacactggcgataggcgtgctggtgctggaagtgctgctcgcccttaccgttatactatggggctacggttatcgtttgttctag

SEQ ID NO: 470 - DNA, 579 bp, Escherichia coli
atggatctcaatacactcatctcacaatatggttatgccgcgctggtgatcggtagcctggcggaaggtgaaaccgtgactttgctgggaggcgttgcggcacatcaggggctattaaagttcccgctggtggtactttctgtggcgcttggcggcatgattggcgaccaggtgctttatctgtgcgggcggcggtttggcggcaagctgttacgccgtttctcgaaacatcaggataaaattgagcgggcgcagaaacttatccaacgccatccgtatctgtttgtcattggtacgcgttttatgtatggctttcgggtcattggcccgacgctgattggtgccagccagctgccaccgaaaatctttctgccgctgaatattctcggcgcatttgcctggtcgctgatttttaccactatcggttacgctggtgggcaggtgattgcgccgtggttgcacaatctcgaccagcatttgaagcactgggtctggttgattctggtcgtggttctggtggtaggcgtgcgctggtggctgaaacggcgcgggaagaaaaagccggatcatcaggcgtaa

SEQ ID NO: 471 - DNA, 762 bp, Escherichia coli
atggcacaggtcgcgataattaccgcctccgattcggggatcggcaaagagtgcgcgttattactggcgcagcaggggtttgatattggcattacctggcactcagatgaagaaggggcaaaagataccgcgcgtgaggtagttagccacggcgtacgtgcggagatcgtgcaactggatctcggcaatctaccagaaggtgcgcaggcgctggagaaacttattcaacggctggggcgtattgatgtgctggtgaataatgcgggcgcaatgaccaaagcgccgtttcttgatatggctttcgatgagtggcgcaagatttttaccgttgatgtcgatggtgcatttttatgctcgcaaattgctgcccgccagatggtgaagcaagggcagggcggtcgcatcatcaacattacatcggtacatgaacatacgccgctgccggatgccagcgcctacacagccgctaaacatgcgctcggcgggttaaccaaagcaatggcgctggagttggtcaggcataaaattttggtgaacgcagtcgcacctggggcgatcgccacgccaatgaacggcatggatggcggcgacgtgaagcctgacgcggagccttcgattcccttgcgacgttttggcacaacgcatgagattgccagcctggtggtatggctttgttcggagggcgcaaattacaccaccgggcagtcgttgatagtggatggcggctttatgttggcgaatccgcagttcaacccagaatag

SEQ ID NO: 472 - DNA, 1437 bp, Escherichia coli
atgaatcgtgattctttttatccagccatcgcctgttttccgctgttactgatgctggccgggtgtgcgcctatgcatgaaacccgccaggcgttaagccagcaaacacccgcggcacaagttgacaccgcattacccacggcgctgaaaaatggttggccagacagccaatggtggctggagtatcacgataatcaactcacctcattaattaataacgcactacagaacgcaccggatatgcaggtggctgaacagcgcattcagctggctgaagcccaggcgaaggcagttgccactcaggatggtccgcagatcgacttttctgcggatatggagcggcaaaaaatgtctgcagaagggttaatggggccgtttgctctgaacgatcctgccgcaggtacgaccggtccgtggtacaccaacggtacttttggcttaacggcgggctggcatctcgatatctggggaaagaatcgggcggaggttactgctcgcctcggtacggttaaagcacgggcggcggaacgcgagcaaacccgccaattgctggctggcagcgtagcccgcctgtactgggagtggcaaacccaggcggcgttaaacacggtcttacagcaaatcgaaaaagagcagaacaccattatcgccaccgatcgccagctatatcagaacgggattacttctgcagttgaaggtgtggaaaccgatattaatgccagcaaaacccggcagcagctcaacgatgtcgcgggtaaaatgaaaattattgaggcacggttaaatgcactcacaaatcaccagacaaagtcactgaagcttaaaccggtcgcgttgccgaaagtggcaagccagcttcctgatgaactcgggtactccttactggcgaggcgggcagatttgcaggcggcgcactggtacgttgagtcatcgttaagcactattgatgcggcaaaagcggcattttatcctgacatcaacctgatggccttcctgcaacaggatgcgttgcacttaagcgatctgttccgtcattccgcgcagcaaatgggcgttacggcaggcctgacgctacccattttcgatagtggtcgtcttaacgccaacctcgatatcgcaaaagccgaaagcaacttgtctatcgccagctacaacaaagcggtggttgaagcggtgaatgacgtggcgcgggcagccagtcaggttcagacactggcggagaaaaaccagcatcaggcgcaaattgagcgcgatgccttgcgtgtagtaggtcttgcgcaggcgcgctttaacgcgggcctcattgctggttcccgggtcagcgaagccagaatcccggcgctgcgtgagcgggcccatggcctgttattgcaagggcagtggctggatgcctccattcaactcactggtgcgctgggtggggggtacaaacgctga

SEQ ID NO: 473 - DNA, 948 bp, Escherichia coli
atgcgtgtgttactggctccgatggagggtgtacttgactctctggtgcgggaattactgaccgaagttaacgactacgatctgtgcatcaccgagtttgtccacgtggtggatcaactgctgccagtaaaagtctttcatcgcatttgccctgagctacaaaatgccagccggacaccatccggtacgctggttcgcgtgcagttgttagggcagttcccacagtggctggcagagaacgccgcccgtgcggtggagttaggttcctggggcgtggatcttaactgcggctgcccgtcgaaaacggttaacggtagcggtggtggggcaacgttactgaaagatcctgaactcatctaccagggtgcaaaagcgatgcgcgaagctgtaccggcgcatttgcctgtcagcgtaaaagtgcgtctgggctgggacagcggtgagaagaaatttgaaatcgccgatgcggtgcaacaggctggcgctacggagctggtagtacatgggcggacaaaagagcagggttaccgcgcggaacatattgactggcaggcgattggcgagattcgccagcggcttaatattccggtgattgccaacggtgaaatctgggactggcagagtgcgcaacaatgcatggcgatcagcggctgcgacgcagtgatgattggtcgcggggcgctcaatattcccaacctgagccgtgtggtgaaatataacgaaccgcgaatgccgtggccggaggtggttgctttgctgcaaaaatatacccgtctggaaaagcagggcgataccgggttatatcacgttgcgcggattaaacagtggttgagttatttgcgtaaagaatacgatgaagcaacggaattatttcagcatgttcgggtgttgaataattcccctgatattgcaagggctattcaggccattgatatcgagaaactctaa

SEQ ID NO: 474 - DNA, 399 bp, Escherichia coli
atgagtaagacactgaacattatctggcaatatttacgcgctttcgtcctgatttatgcctgcctgtatgcaggcattttcattgcttccctgctaccggtaaccattccgggcagcatcatcgggatgctgatcctgtttgtcctgctggccttgcaaattcttccggcgaaatgggtcaatccggggtgctacgtactgattcgctatatggcgctattgtttgtgccgattggcgtaggcgtcatgcaatattttgatttgctccgcgcacagtttggtccggtagtggtttcctgtgcagtcagtacgctggtggtttttctggtggtgagctggagttcacaactggtgcacggtgaacgtaaagtcgtaggtcagaaaggatcagaagaatga

SEQ ID NO: 475 - DNA, 696 bp, Escherichia coli
atgatggcgaatatctggtggtcattaccgctgacgttgattgtcttttttgccgcccgcaaactggcggcacggtataagtttcccctgcttaacccgttgctggtagcaatggtggtgatcattccttttttaatgctgactggcatctcttacgacagctactttaaaggtagcgaagtgctaaacgatctgcttcaaccggcggttgtcgcactggcctatcctttatatgagcagctgcaccagatccgcgcgcgctggaaatcgatcatcaccatctgttttatcggcagcgtggttgcgatggtgacggggacttctgtggcattgttgatgggcgcttcaccggaaatcgccgcgtcaatcctgccgaaatcagtcaccacgcctattgcaatggcggttggcggcagtattggcggtattccggcaatcagcgcagtttgcgtgattttcgtcggcatcctcggcgctgtgtttggccatacattgcttaatgcgatgcgtattcgtaccaaagctgcgcgcggtctggcaatggggacagcctcgcacgccctcggtacggcgcgctgcgccgagctggattatcaggaaggtgcatttagttcgctggcgctggtgttatgcgggattattacttcgctgatcgcaccgttccttttcccgattattttggcagtaatgggctaa

SEQ ID NO: 476 - DNA, 885 bp, Escherichia coli
atgcatccacgttttcaaaccgcttttgcccaacttgcggataacttgcaatctgcactggaacctattctggcagacaagtacttccccgctttgttgaccggggagcaagtctcatcgctgaagagcgcaacggggctggacgaagacgcgctggcattcgcactacttccgctggcggcagcctgtgcgcgtacgccattgtcgaattttaatgttggcgcaattgcgcgcggtgtgagcggaacctggtatttcggtgccaatatggaatttattggtgcgacaatgcagcaaaccgttcatgccgaacaaagcgcgatcagccacgcctggctgagtggtgaaaaagcgcttgcagccatcaccgttaactacacgccttgtggtcactgccgtcagtttatgaatgaactgaacagcggtctggatctgcgtattcatcttccgggacgcgaggcacacgcgctgcgtgactatctaccggatgcctttgggccgaaagatctggagattaaaacgctgctgatggacgagcaggatcacggctatgcgctgactggtgatgcgctttctcaggcggcaattgcggcggcaaaccgttcgcacatgccttacagtaagtcgccaagcggtgtcgcgctggaatgtaaagacggtcgtattttcagcggcagctacgctgaaaacgccgcattcaacccgactctgccgccgttgcagggggcgttaattctgttgaatctcaagggttatgattacccggatatccagcgcgcggttctggcagaaaaagccgatgcgccgttgattcagtgggatgccacctccgcaacgctgaaagctctcggctgtcacaatatcgaccgcgtgcttctcgcttaa

SEQ ID NO: 477 - DNA, 720 bp, Escherichia coli
atgttaaagcgcgtgttcctcagcctgttagtcctgatcggcttgctgctgttgactgtgctcggcctcgatcgctggatgagctggaaaaccgcgccttatatctacgacgaattgcaggatctcccctaccgccaggtcggtgtggtgctcggcacagcaaaatattatcggactggcgtaattaatcagtattatcgctaccgcattcaaggagcgattaatgcctataacagcggtaaggtaaattatctattactgagcggcgataacgcattgcaaagttataatgagccgatgaccatgcgcaaagatttaatcgcagctggtgtcgacccatcagatattgttctcgattacgcaggctttcgtacgctggattccatcgtgcgtacacgcaaagttttcgatactaatgatttcattattatcacccaacgtttccactgtgagcgggcattatttattgcgctgcatatggggattcaggctcagtgttatgccgtaccgtcaccgaaagatatgctgtcagtacgtattcgcgaatttgccgcccgtttcggtgcgctggctgacctttatatttttaaacgtgaaccgcgttttttagggccgctggtccctattccggctatgcaccaggtgccggaagatgcgcaggggtatcccgccgtcacacccgaacagttacttgaattacaaaagaaacaaggaaagtag

SEQ ID NO: 478 - DNA, 240 bp, Escherichia coli
atggatgtacagcagttttttgtcgttgccgtttttttccttattccgatattttgtttccgcgaagcatggaaaggctggcgcgcaggcgcgattgataaacgggttaaaaatgcaccagaaccggtgtatgtctggcgagcgaaaaatcccggactcttcttcgcttatatggtggcatatatcggcttcggaattttatctatcggcatgattgtttatcttattttctatcgttaa

SEQ ID NO: 479 - DNA, 1239 bp, Escherichia coli
atgccgcaacaaaattatctggatgaactcactccggcttttacgcctttactggcgattaaagaagcctctcgctgtttattatgtcatgacgctccctgtagtcaggcttgcccggcacagaccgatccggggaaatttattcgctcaatctactttcgtaattttaaaggcgctgccgagacaattcgcgaaaataatgccctcggtgccgtttgtgccagagtgtgcccgacggagaaattatgccaaagcggttgtacacgtgccggtgttgatgctcccattgatatcggtcgtttacagcgttttgttactgattttgaacaacaaactgggatggaaatttatcagcccggtactaaaacgctcggcaaagtcgccattattggcgcaggtcctgccggattgcaggccagtgtgacgctgacaaaccagggttatgacgtcacgatctatgagaaagaagcacaacccggtggctggttgcgtaacggcattccgcaattccggttaccgcaatcggtgctggatgcagaaatcgcccgtatagaaaaaatgggcgtgaccattaagtgcaataacgaaatcggtaaaacactcaccctggagcagctgaaagcggaaaaccgcgcggtactggtcaccgtagggttatcgagcggttccgggttatcgctgtttgagcatagcgacgttgagattgccgtagacttcctgcaacgtgcacgacaggcgcaaggcgatatcagcattccacaaagcgcattaattatcggcggcggtgatgtcgcgatggacgtagccagcacgctgaaagttctcggctgtcaggcggtaacctgcgtagcgcgtgaagagttagatgagtttccggcaagcgaaaaagagtttgccagcgcccgggagttgggcgtttcgatcatcgatggatttacaccagtagccgtggaaggcaataaagtcacgtttaagcatgtacggttaccgggcgaactgacgatggcggcagataaaattattctcgccatcggtcagcatgccagactggatgcctttgcggagttagagccgcagcgtaacaccatcgaaacgcaacattaccagacccgcgacccgcaagtctttgcggctggcgatattgttgagggtgacaaaaccgtggtctatgcagtgaaaaccgggaaagaagccgccggggcgattcatcactatttagagggagcttgctcatgttaa

SEQ ID NO: 480 - DNA, 1236 bp, Escherichia coli
atgttaacgaaagatctttcgattactttttgcggcgtgaagtttcccaacccgttctgcctttcttcttcgccggtaggcaactgctatgagatgtgtgccaaagcctacgacacaggttggggcggcgtggtgtttaaaacgatcggtttttttatcgccaacgaagtctcgccgcgttttgatcatctggtgaaagaagataccggttttatcggcttcaaaaatatggagcagattgctgaacatccgttggaagagaatctggccgccctgcgtcggctgaaagaagattatccggacaaagtattgatcgcttcaatcatgggcgaaaatgagcagcaatgggaagagctggcgcgtctggtgcaagaagctggcgcggatatgatcgagtgtaacttctcctgtccgcaaatgacttctcatgcgatgggtagcgatgtcgggcaaagcccggagctggtagaaaaatattgtcgggcagtaaaacgtggttccacgctgccaatgctggcgaagatgacgccgaatattggtgatatgtgcgaagtggcgctggcggcgaagcgcggcggcgcagatggcattgcggcgattaacaccgttaaatccatcaccaatatcgatcttaatcagaaaattggtatgccgatcgttaacggtaaatcgagtatttccggatattccggtaaagcggtaaaaccgatcgccctacgctttattcagcaaatgcgcacccatccagaactgcgcgatttcccgatcagcggtatcggcggcattgaaacctgggaagatgcggcggagtttttattgctcggtgcagcgacgttgcaggtgaccaccggcattatgcagtacgggtatcggatagtggaagatatggcaagcgggttgtcgcattatctcgccgatcaagggtttgattcgttgcaggagatggtaggtctggcgaatcacaatattgtcccggcggaagatttagaccgcagttatattgtctatccccatatcaatcttgataaatgtgttggctgtggacgctgttatatttcctgttacgacggcggtcaccaggcgatggaatggagcgagaaaacccgcacaccgcattgtaataccgagaaatgcgtgggttgtctgctttgtggtcatgtctgcccggtaggttgtattgatcttggggaagtgaagtttaagaaaggcgagaaagaacacccggtaacgttgtaa

SEQ ID NO: 481 - DNA, 1011 bp, Escherichia coli
atgagtgcgttaaataagaaaagttttcttacttacctgaaagagggcggtatttacgtcgttcttttagttttgctggcgattattattttccaggacccaacatttttaagtctgttgaacttaagtaatattctcacccagtcatcggtgcgtattattatcgcgcttggtgtggcagggttaattgtcacccaggggactgacctttccgcaggtcgccaggtggggctggcggcagtagtagcagcgacgttattgcagtccatggataacgccaacaaagtgttcccggaaatggcgacgatgccgattgcgctggttattctgattgtctgtgtcattggtgcggtgatcggtttgatcaacggcttgattatcgcttatctcaacgtgacgccgttcattaccacgctcggtacgatgattatcgtctacggcattaactcgctctattacgactttgtcggggcgtcgccaatttccggttttgacagtggcttctctacctttgctcaaggctttgtcgcgctggggagtttccgtctctcttacatcaccttctacgcgttgattgcggtggtgtttgtctgggtgttatggaacaaaacccgcttcggcaagaacatttttgccattggcggtaacccggaagcggcgaaagtatctggtgtcaacgtcggcctgaacctgctgatgatttacgcgttgtctggtgtgttctatgccttcggcgggatgttagaagccggacgtatcggctcagccaccaacaacctcggctttatgtatgagctggatgctatcgcggcgtgcgtggtaggcggcgtatcgttcagcggcggtgtggggacggtaattggtgtggtgaccggggtaattatttttaccgtcattaactatggcctgacgtatatcggcgtaaacccgtactggcagtacatcatcaaaggggcgattattatcttcgccgtggcgctggattcactgaaatacgcgcgtaagaagtga

SEQ ID NO: 482 - DNA, 1521 bp, Escherichia coli
atggtcagctcaacgactccgtcttccggggaatacttgttggaaatgagcggtatcaacaagtcttttcctggtgttaaggcacttgataacgttaacttaaaagtccgaccacattctatccatgcattaatgggggaaaatggtgcgggaaaatcaacattattaaaatgcctgtttggtatttatcaaaaagactccggcaccattttattccagggtaaagagatcgatttccattccgccaaagaagcactggaaaatggtatttcgatggtacaccaggagttaaacctggtattacaacgttcggtgatggacaacatgtggctggggcgatatcccaccaaaggcatgtttgtcgatcaggacaaaatgtaccgcgaaaccaaagcgatttttgatgaactggatattgatatcgatccgcgtgcgcgcgtcggcacattatccgtttcgcaaatgcagatgatcgaaattgccaaagcgttttcctataacgcgaaaattgtgattatggatgaaccgacttcttcgttaaccgaaaaagaggtcaatcatctgttcactattattcgtaaattaaaagagcgcggctgcggtattgtttatatctcgcataaaatggaagaaatcttccagttatgtgatgaagttaccgtattgcgcgacggtcagtggatcgctaccgaaccgctggcagggctgacgatggacaagatcatcgccatgatggttgggcgttctcttaaccagcgtttccctgacaaagaaaacaagccgggcgaagtgattctggaagtgcgtaacctgacgtcgctgcgccagccgtcgattcgcgatgtctcgtttgatctgcacaaaggggagattctcggtatagccggtctggtgggagcgaaacgtaccgatattgttgagacgttatttggtattcgcgagaaatcggctggcaccattacgttacacggcaaaaagatcaataaccataatgccaacgaagccataaaccacggatttgcactggtaactgaagagcgccgctcaacgggaatttatgcctatctggatattggctttaactcgttaatttccaatatccgcaactataaaaataaagttggtttactggataactcgcggatgaaaagcgatacccagtgggtcattgattcgatgcgggtaaaaacgcctggtcatcggacgcaaataggttcgctctccggtggtaatcagcaaaaagtgattattggtcgctggctgttaacgcaaccagaaatattaatgctcgatgaaccgacgcgcggtattgatgttggggctaagtttgagatttatcagttaattgccgaactggcgaagaaaggcaaggggattattattatctcctccgaaatgccagagttgttagggataacagaccgtattctggtcatgagcaatggtctcgtttccggaattgtcgatacaaaaacaacaacgcaaagcgaaattctgcgtcttgcgtctttgcacctttaa

SEQ ID NO: 483 - DNA, 999 bp, Escherichia coli
atgaataagaaggtgttaaccctgtctgctgtgatggccagcatgttattcggtgccgctgcacacgctgctgatactcgcattggtgtaacaatctataagtacgacgataactttatgtctgtagtgcgcaaggctattgagcaagatgcgaaagccgcgccagatgttcagctgctgatgaatgattctcagaatgaccagtccaagcagaacgatcagatcgacgtattgctggcgaaaggggtgaaggcactggcaatcaacctggttgacccggcagctgcgggtacggtgattgagaaagcgcgtgggcaaaacgtgccggtggttttcttcaacaaagaaccgtctcgtaaggcgctggatagctacgacaaagcctactacgttggcactgactccaaagagtccggcattattcagggcgatttgattgctaaacactgggcggcgaatcagggttgggatctgaacaaagacggtcagattcaattcgtactgctgaaaggtgagccggggcatccggatgcagaagcacgtaccacttacgtgattaaagaattgaacgacaaaggcattaaaactgaacagttacagttagatactgctatgtgggataccgctcaggcgaaagataagatggacgcctggctgtctggcccgaacgccaacaaaatcgaggtggttatcgccaacaacgacgcgatggcaatgggcgcggtagaagcactgaaagcacacaacaagtccagcattccggtgtttggcgtcgatgcgctgccagaagcgctggcgctggtgaaatccggtgcactggcgggcaccgtactgaacgatgctaacaaccaggcgaaagcgacctttgatctggcgaaaaacctggccgatggcaaaggtgcggctgatggcaccaactggaaaatcgacaacaaagtggtccgcgtaccttatgttggcgtagataaagacaacctggctgaattcagcaagaaataa

SEQ ID NO: 484 - DNA, 1041 bp, Escherichia coli
atgatcaccattcgtgatgtagcgcgtcaggctggcgtctctgtggcaacggtttcccgggtgctcaataacagcacgctggtcagtgccgatacgcgtgaagcagtaatgaaagccgttagtgagctggattatcgaccaaatgccaatgcccaggcgctggcaactcaggttagcgacaccattggcgtggtggtgatggacgtttctgatgcttttttcggcgcgctggtaaaagcggtggatctggtcgcccagcagcatcagaaatacgtgctaatcggcaatagctatcatgaagcggaaaaagagcgtcacgccattgaggtgttaattcgccagcgttgtaatgcgttgattgttcactcaaaagcattgagtgacgatgaactggcacaatttatggataacattcccggtatggtgttaatcaaccgcgttgtgccggggtacgcccatcgttgcgtttgcctggataatctcagcggtgcccgaatggcgacgcgcatgttgctgaataacggtcatcaacgtattggttatctttcttccagccacggcattgaagatgacgccatgcgtaaagcaggctggatgagtgcgttgaaagagcaggatattattccgccggaaagctggattggcactggcacgccggacatgccgggcggtgaggcggcgatggttgaactgctggggcgcaatctacaactaaccgctgtatttgcttataacgacaatatggccgctggcgcactgacagcattaaaagataatggcattgcgattccgttacatctctcaatcattggtttcgatgatattcccatcgcccgttacaccgacccgcaattaacgactgtgcgttatcccattgcttcaatggctaaattagctaccgaactggccttgcagggggcagcagacaatattgatcctcgtgccagccactgttttatgccgacgttagtgcgtcgccattctgtcgcaacacgccagaatgcggcggcgatcactaactcaacaaatcaggcgatgtaa

SEQ ID NO: 485 - DNA, 1158 bp, Escherichia coli
gtggagcgcaacgtcacgctcgattttgttcgcggcgtcgccattctggggatcctgctattaaacatcagcgcctttgggttaccaaaggcggcttatctcaatcccgcctggtacggcgctattacgccacaggatgcatggacctgggcatttctcgatctcatcggccaggtgaaattcctcacgctttttgcgctgttgtttggtgcgggcctgcaaatgttgctgccccgtggcagacgatggatccagtcgcggttaacgctgttagtcttgctgggctttattcacggtttattgttctgggacggcgatattctgctggcttacgggctggtgggcttaatctgctggcggctggtgcgcgatgcgccatcggtaaaaagcctgtttaataccggcgtcatgctttatctggtggggcttggcgttttgctgttattggggttgatttccgatagccagaccagccgcgcctggacacctgatgcatcgtctattttgtatgaaaagcactggaaacttcacggtggtgttgacgcgatcagtaatcgtgccgatggtgttggcaacagtttactggcactgggcgcacagtatggctggcaactggcagggatgatgctcattggtgccgcattgatgcgcagtggctggctgaaagggcagttcagctttcgtcactatcgtcgtactggttttgtgctggtggcgattggagtgatcattaaccttcctgccatcgccctgcaatggcgactggactgggcgtatcgttggtgcgccttcttacttcagatgccgcgggaactgagtgcgccgtttcaggcgattggctatgcgtcgctgttttatggcttctggccgcaattaagccgctttaagctggtgctggcaatcgcctgtgtcggacggatggcactgaccaactatctattgcaaacgctgatttgtactacgcttttttaccacctcggtttgtttatgcagtttgaccgtctggagctgctggcgtttgttattccggtatggttggcgaatatcttcttctctgttatctggctgcgttacttccgccaggggccggtggaatggctctggcgtcagttaactttgcgtgctgccggaccgacaatatctaaaacatcaagataa

SEQ ID NO: 486 - DNA, 669 bp, Escherichia coli
atgccatcactcagtaaagaagcggccctggttcatgaagcgttagttgcgcgaggactggaaacaccgctgcgcccgcccgtgcatgaaatggataacgaaacgcgcaaaagccttattgctggtcatatgaccgaaatcatgcagctgctgaatctcgacctggctgatgacagtttgatggaaacgccgcatcgcatcgctaaaatgtatgtcgatgaaattttctccggtctggattacgccaatttcccgaaaatcaccctcattgaaaacaaaatgaaggtcgatgaaatggtcaccgtgcgcgatatcactctgaccagcacctgtgaacaccattttgttaccatcgatggcaaagcgacggtggcctatatcccgaaagattcggtcattggtctgtcaaaaattaaccgtattgtgcagttctttgcccagcgtccgcaggtgcaggaacgtctgacgcagcaaattctcattgcgctacaaacgctgctgggcaccaataatgtggctgtctctatcgacgcagtgcattactgcgtgaaggcgcgtggcatccgcgatgcaaccagtgccacgacaacgacctctcttggtggattgttcaaatccagtcagaatacgcgccacgagtttctgcgcgctgtgcgtcatcacaactga

SEQ ID NO: 487 - DNA, 837 bp, Escherichia coli
atggaaatgctcgaagagcaccgctgttttgaaggctggcagcaacgctggcgacacgactccagtaccttaaactgcccgatgacgttcagtatctttctcccaccacctcgtgatcacaccccgccaccagtgctgtactggctttccggattaacctgcaatgacgagaacttcaccaccaaggcgggtgcccagcgcgtggcggcggaactggggattgtactggtgatgccagacaccagcccgcgcggcgaacaggttgccaacgacgatggctacgatttaggccagggcgcggggttttatcttaacgccacgcaaccaccgtgggcgacgcattaccggatgtatgattatctgcgcgatgaattaccggcgctggttcagtcgcaatttaatgtcagcgaccgctgcgctattagcggtcattccatgggcggtcacggtgcgctgattatggcgctgaaaaatccgggtaaatacaccagcgtttccgcctttgcgccaattgtgaatccgtgcagcgtcccgtggggaatcaaagcgtttagcacttatttaggtgaggacaaaaatgcatggctggaatgggacagttgcgcgctgatgtatgccagtaacgcgcaggatgcgatcccgacgcttattgatcagggtgataatgatcagtttcttgctgaccaactgcaacctgcagtactggcagaagccgcgcgccagaaagcgtggccgatgacgctgcgtattcagctgggatatgatcacagttactacttcatcgcctcttttatagaggatcacctgcgcttccatgcgcagtatttactgaagtga

SEQ ID NO: 488 - DNA, 1992 bp, Escherichia coli
atgtttaggttgaaccctttcgtacgggtcgggctgtgtttgtccgctatttcttgtgcatggcctgtgttagcggtcgatgatgatggcgaaacgatggttgtcactgcatcttccgttgaacaaaaccttaaagatgctcccgccagtatcagcgtcattacccaggaagacctgcagcgaaaaccggtacagaatctgaaggatgtcctcaaagaagtgcctggcgtacaactgacgaacgaaggggataaccgtaagggcgtaagtattcgtggtctggacagcagctacaccctgattcttgtcgacggtaaacgcgttaactcccgcaatgccgtcttccgccacaatgatttcgatctgaactggatcccggtcgattccatcgaacgtattgaagtggtccgtggcccgatgtcgtcgctgtacggttccgatgcgctcggcggtgtagtgaatatcatcaccaaaaaaatcggtcagaaatggtcgggcaccgttaccgtcgataccaccgttcaggaacatcgcgatcgcggtgatacctataacggtcaattctttaccagcggaccattaattgacggcgtgctgggaatgaaagcttacggcagcctggcaaaacgtgaaaaggatgacccgcaaaactcaacgaccaccgataccggagaaacgccgcgtattgaaggattctccagccgcgacggcaatgtcgaatttgcctggacaccgaatcaaaatcacgattttactgccggatacggtttcgaccgtcaggatcgtgattccgactcgctggacaaaaaccgcctggaacgccagaactactccgtcagccataatgggcgttgggattacggcaccagcgaactgaaatactacggtgagaaagtcgagaacaaaaaccctggcaacagcagcccgataacttccgaaagcaatacggtcgacggcaaatacacgttgccgctgacggcgattaatcagtttctcacggttggcggtgaatggcgtcacgacaaacttagcgatgcggtgaacctgaccgggggaaccagctccaaaacgtctgccagccagtacgcgctgtttgtggaagatgaatggcggatcttcgagccgctggcgctgacgaccggcgtgcgtatggacgatcacgaaacctacggtgaacactggagtccgcgtgcctacctggtttataacgccaccgacaccgtaacggtgaaagggggctgggcgacggcatttaaagccccttctctgttgcaacttagccctgactggacgagcaattcctgccgtggcgcatgtaagattgtgggtagcccggatctgaaaccagaaaccagcgaaagttgggagctggggctttactacatgggtgaagaaggctggctggaaggggttgaatccagcgttaccgttttccgtaacgatgtgaaagatcgtatcagcattagccgtacgtctgacgtcaatgctgcaccgggctaccaaaactttgtcggttttgagacgggcgctaacggacggcgcataccggtatttagctactacaacgttaacaaagctcgtattcagggcgtggaaaccgaactgaaaattccgttcaacgatgaatggaaactgtcgatcaactacacctacaacgatggtcgtgatgtcagcaacggcgaaaacaaaccgctatccgatctgccgttccatactgctaacggtacgctggactggaaaccgctggcgctggaagactggtcattctatgtttctggtcactataccgggcagaaacgcgccgacagcgcgacggctaaaacaccgggcggttataccatctggaataccggcgcggcctggcaggtgactaaagacgtcaaactgcgcgcaggcgtgctgaaccttggcgacaaggatctcagtcgtgacgactacagctataacgaagacggacgtcgttactttatggcagtggattatcgcttctga

SEQ ID NO: 489 - DNA, 1470 bp, Escherichia coli
atgggttccgaaactaaaactacagaagcgccgggcttacgccgtgaattgaaggcgcgtcacctgacgatgattgccattggcggttccatcggtacaggtctttttgttgcctctggcgcaacgatttctcaggcaggtccgggcggggcattgctctcgtatatgctgattggcctgatggtttacttcctgatgaccagtctcggtgaactggctgcatatatgccggtttccggttcgtttgccacttacggtcagaactatgttgaagaaggctttggcttcgcgctgggctggaactactggtacaactgggcggtgactattgccgttgacctggttgcagcacagctggtcatgagctggtggttcccggatacaccgggctggatctggagtgcgttgttcctcggcgttatcttcctgttgaactacatctctgttcgcggctttggtgaagcggaatactggttctcactgatcaaagtcacgacagttattgtctttatcatcgttggcgtgctgatgattatcggtatcttcaaaggcgcgcagcctgcaggctggagcaactggacaatcggcgaagcgccgtttgctggtggttttgcggcgatgatcggcgtagctatgattgtcggcttctctttccagggaaccgagctgatcggtattgctgcaggcgagtccgaagatccggcgaaaaacattccacgcgcggtacgtcaggtattctggcgaatcctgttgttctatgtgttcgcgatcctgattatcagcctgattattccgtataccgatccgagcctgctgcgtaacgatgttaaagacatcagcgtcagtccgttcaccctggtgttccagcacgcgggtctgctctctgcggcggcggtgatgaacgcagttattctgacggcggtgctgtcagcaggtaactccggtatgtatgcgtctactcgtatgctgtataccctggcgtgtgacggtaaagcgccgcgcattttcgctaaactgtcgcgtggtggcgtgccgcgtaatgcgctgtatgcgacgacggtgattgccggtttgtgcttcctgacctccatgtttggcaaccagacggtatacctgtggctgctgaacacctccgggatgacgggttttatcgcctggctggggattgccattagccactatcgtttccgtcgcgggtacgtattgcagggacacgacattaacgatctgccgtaccgttccggtttcttcccactggggccgatcttcgcattcattctgtgtctgattatcactttgggccagaactacgaagcgttcctgaaagataccattgactggggcggcgtagcggcaacgtatattggtatcccgctgttcctgattatttggttcggctacaagctgattaaaggaactcacttcgtacgctacagcgaaatgaagttcccgcagaacgataagaaataa

SEQ ID NO: 490 - DNA, 882 bp, Escherichia coli
atgcacatcaccctccggcagttggaagtttttgcagaagtattgaaaagtggatcaaccacccaggcgtcggtgatgctggcgttgtcgcaatcagcagtgagcgcagccttgaccgacctggaagggcagcttggcgttcaactgtttgatcgcgtggggaaaagactggttgttaatgaacacgggcggctgctctatccgcgtgcgttggcactgcttgaacaggcggttgaaatcgaacaactgtttcgcgaagacaacggcgcgattcgtatctatgccagtagtaccatcggtaactacattctgcctgcagttatcgcccgttatcgccatgattatccgcagttgccgattgaacttagcgttgggaatagccaggacgtgatgcaagcggtgctggatttccgcgttgatattggctttattgaaggaccgtgccacagcactgaaatcatttctgaaccgtggctggaagacgagctggtggttttcgccgcgccgacttcgccgttggctcgtggtccggtcaccttagaacagctggccgctgcgccgtggatcctgcgtgaacgcggttccggcacgcgggagattgtcgattatctgttgctatcacatttaccgaagtttgagatggcgatggaattaggtaactccgaggcaatcaaacatgcggtgcgtcatgggttgggaattagttgcctgtcgcgacgggtgattgaagatcaattgcaggcaggcacattaagtgaagttgcggtccctctgccgcgcctgatgcgtacgttgtggcgtatacatcatcggcaaaaacacctttccaacgcgctacggcgctttctggactattgcgatcccgcgaatgtaccgcgttaa

SEQ ID NO: 491 - DNA, 1050 bp, Escherichia coli
atgacgaatatcaccttacagaaacaacatcgtacactgtggcattttattccggggttagccctgagtgcagttatcaccggggtcgccctgtggggtggttccattcccgcggttgcgggtgccgggtttagtgccctcaccctcgcaatcttgttggggatggttttaggcaacaccatttacccgcacatctggaaaagctgtgacggtggtgtgctgtttgccaagcaatatttattacgtctgggtatcattctttatggcttccgtctgacgttctcgcaaattgccgatgtcggtatcagtgggatcatcattgacgtgttgacgctgtccagtaccttcctgctggcttgcttcctggggcagaaagtgtttggtctggataagcacaccagctggttgatcggtgccggtagcagtatctgtggtgctgccgcggtactggcgactgagccggtagtgaaagcagaagccagtaaagtaaccgtggctgttgcaaccgttgttatcttcgggaccgtcgcgattttcctctacccggcgatatatccgctgatgtctcaatggtttagtccggaaactttcggtatctacattggttctactgtgcacgaagtggcgcaggtggtggcggcaggtcatgccatcagtccggatgcagaaaacgcagcagttatttccaaaatgctgcgcgtgatgatgctggctccgttcctcatcctgctggcagcgcgtgtcaaacagctgtctggggcgaacagcggcgagaaaagcaaaatcactattccgtggtttgccatcttgttcatcgtcgttgccatctttaactcgttccaccttttaccgcagagcgtggtgaacatgctggtaacgctggataccttcctgctggcaatggcgatggcggcgctgggtctgaccactcacgtcagcgcgctgaaaaaagccggggcgaaacctctgctgatggcactggtactgtttgcctggctgattgttggtggtggtgcgattaactatgtgattcaaagcgtcatcgcataa

SEQ ID NO: 492 - DNA, 858 bp, Escherichia coli
atgaaatacattggagcgcacgttagtgctgctggcggtctggcaaatgccgcaattcgcgccgccgaaatcgacgcaaccgcgtttgccttgttcaccaaaaaccaacgtcagtggcgtgccgcaccgctcacgacgcaaaccatcgatgaattcaaagccgcctgtgaaaaatatcactacacatcggcgcaaattcttccccacgacagttatctgattaacctcggacatccggttgctgaagctctggaaaaatcgcgcgatgcctttatagatgaaatgcagcgttgcgaacagctggggctttctttgctcaacttccaccctggcagccatctgatgcaaatttcagaagaggattgccttgcgcgtattgccgaatccatcaacattgcgctggataaaactcaaggtgtcaccgcggtgattgaaaacaccgccggtcagggcagtaacttagggtttaaattcgaacatctcgcagcgattatcgacggcgtggaagataaatcccgcgtcggcgtctgcattgatacctgccatgctttcgctgccgggtatgatttgcgtactcctgccgaatgcgagaaaacgttcgctgattttgcccgtattgttggctttaagtatctgcgcgggatgcacctcaacgatgcgaaaagcacctttggcagccgcgttgaccgccatcatagcctcggcgaaggcaatatcggtcatgatgcgttccgctggatcatgcaagacgaccgtttcgacggcattccgctgatccttgaaaccatcaacccggatatctgggcagaagagatcgcctggctgaaagcgcaacaaactgaaaaagcggtggcctga

SEQ ID NO: 493 - DNA, 1089 bp, Escherichia coli
atgaacgacagggaaaagcagattcttaaaattttacggcgtaacccgctgattcaacagaatgaaatcgccgatattctgcaaatcagccgctcacgtgttgccgctcatattatggatttgatgcgcaagggtttgattaaaggcaaaggatatatccttaccgagcaggattactgtgtggttgtgggtgcaatcaatatggatattcgcggaatggcggatatccgttacccgcaagcagcctctcatccaggttctgttcactgttccgcaggcggcgtcggacgtaatatcgcgcataacctggctctgcttggtcgggatgtgcatttaatatcagctattggcaacgatttttacggcgagacattactggaagaaacgcgccgcgcgggcgtgaacgtttcaaactgcattcgtctgcatggacacagcactgcaacttatctcgctatcgctaataagcaggaagaaactatcctggcaatcaatgacacacatattctgcaacagctaacgcctcaactgctcaatacttcacgggacttgattcgccatgctggtgtggtgctggctgattgtaatctcacacctgaagccctggagtgggtctttaccattgctgatgaaattccgatgtttgtcgataccgtttccgaatttaaagcgaacaaagtaaaaaactggtacagccggatccacactctgaaaccaacacaaaatgaactggaaattttgtgggggcaaccgattaaagacgacaacgatcgcatcagagctgtaaattcgctgcatcaacaaggtgttaaacgcatttttgtttatctgaaagatgaatctgtattttgcagcgataaggatggagaacaatttttgctgaccgcgccagcgcatacgacagtagacagttttggtgctgacgatggttttatggcgggcctggtatatagctttcttgaaggatacagtttccgcgacagcgcccgttttgcgatggcctgcgcggcaatttcacgcgccagcggcagcttaaacaaccctaccctgtctgccgataacgcgctttcattagtgccaatggtgtaa

SEQ ID NO: 494 - DNA, 1251 bp, Escherichia coli
atggatgtcatgagaagtgttctgggaatggtggtattactggctattgcgtttttgctgtcagtaaacaaaaagaagatcagcctgcgtaccgttggcgcggcgttagtgttacaggtcgtgattggcggcataatgctttggttaccgccagggcgttgggtcgcagaaaaagtcgcttttggcgtccataaagtgatggcgtacagcgacgcgggtagcgcatttattttcggttctctggtcggaccgaaaatggataccttatttgatggcgcaggatttatctttggtttcagggtgttaccggcaattatcttcgtcaccgcgctggtgagtattctctactacatcggtgtgatggggatcttaattcgaattctcggcggtatcttccagaaagcattaaatatcagcaagatcgagtcattcgtcgcggtcactaccattttcctcgggcaaaacgaaattccggcaatcgtcaaaccctttatcgatcggctgaatcgcaatgaattatttacagcgatttgcagcggtatggcctcgattgctggttcgacaatgattggttacgccgcactgggcgtgcctgtggaatatctgctggcggcatcgttaatggcgatccccggcgggatcttgtttgcccgcctgttaagcccggctacggaatcttcgcaggtttcctttaataacctctctttcaccgaaacaccgccaaagagcattattgaagccgctgcaacaggggcaatgaccgggctgaaaatcgccgcaggtgtggcgacagtggtgatggcatttgttgcaataattgcgttgattaacggtattatcggcggtgttggcggctggtttggttttgaacatgcttcgctggagtcgattttaggttacctgttggccccattggcgtgggtgatgggggttgactggagtgatgcaaatcttgccgggagtttgattgggcagaagctggcgatcaatgaatttgtcgcttatctcaatttctcgccatatctgcaaacgggtggcactctggatgctaaaaccgtggcgattatttctttcgcgttgtgcggtttcgctaactttggttctatcggggtggtggtgggggcgttttctgcggttgcgccacaccgtgcgccggaaatcgcccaacttggtttacgcgcgctggcggcggcgacactttctaacctgatgagtgctactattgcaggattctttattggtttagcgtag

SEQ ID NO: 495 - DNA, 942 bp, Escherichia coli
atggaaaagagaaaaattattctggattgtgatccgggtcatgatgatgctattgctataatgatggcggcgaaacatccggcgattgatttattaggtatcaccattgtagcgggtaatcaaaccctcgataaaacattaattaatggcctgaatgtttgccagaaactggagattaatgttccggtttatgcggggatgccgcagcccattatgcgtcaacaaattgttgccgataatattcacggtgaaaccggacttgatggcccggtattcgagccgctgacccgccaggcagaaaacactcatgcggtgaaatatatcatcgatacccttatggcaagcgatggcgatatcactctggtgccggttggtccgttgtcaaacatcgcggtggcaatgcgtatgcaacccgcgatcctgccgaaaatccgtgaaattgttctgatgggcggtgcttatggtactggcaacttcaccccatctgctgagttcaacatctttgctgacccggaggccgcacgcgtggtgttcacctccggcgttccattagtgatgatgggcctcgatcttaccaaccagaccgtttgcaccccggacgtgattgctcggatggaaagggctggcggccctgccggagagctgttcagcgacatcatgaacttcactctcaaaacgcagttcgaaaactacggcctggctggcggcccggtgcacgacgccacctgcatcggttatttgattaaccctgatggcattaaaacccaggagatgtacgtcgaagtggacgttaacagtggcccttgctatgggcgtaccgtctgcgacgagctgggcgttcttggcaagcccgccaataccaaagtcggcatcactattgataccgactggttctggggattagtcgaagagtgcgtacgcggctacatcaaaacccattaa

SEQ ID NO: 496 - DNA, 699 bp, Escherichia coli
gtgaaagaaatccacaataatgatcttaagcagcaattgatgagtgaatctgcgtttaaggattgcttttcaacggatgtttcagccgatacgcggctgtttcattttttagcgcgtgactacattgtgcaggaagggcaacagccgtcctggctgttttacctgacgcgaggccgcgccaggctttacgtcacgcttgctaatggtcgcgtgtcgctgatcgatttctttgccgcgccctgttttattggcgagattgagttaatcgacaaagaccatgaaccgcgtgcagtgcaggctattgaagagtgttggtgccttgcgctccctatgaagcattaccgcccgttgttattaaacgacacgctattattacgaaaactctgcgtcaccttaagtcataaaaattatcgtaatattgtttctttaactcagaatcaatcatttccgttagtgaatcgcctggcagcttttatattactctcgcaggaaggtgatctttatcacgaaaagcatacgcaagcggcagagtatttaggcgtttcttatcgacatcttttatatgttctcgcgcaattcattaatgacggtttattaattaaaagcaagaaagggtatctcattaaaaacagaaagcagttgtcaggactggcgctggagatggacccggagcataaattctccgggatgatgcagtaa

SEQ ID NO: 497 - DNA, 1251 bp, Escherichia coli
atggatataatgagaagtgttgtggggatggtggtattgctggcaattgcctttgtgttgtcggtaaataaaaagagcatcagcttgcgcacggttggggctgcgctgctgctgcaaattgccattggtggcatcatgctctattttcccccgggaaaatgggcagtagagcaggcggcattaggcgtccataaagtgatgtcctacagtgacgcaggaagtgcctttatttttggttcgctggtcggtcccaaaatggatgttctgtttgacggtgcgggctttatcttcgcctttcgcgtactcccggcgattattttcgttaccgcgcttatcagcttgctgtactacattggcgtaatggggctgctgattcgtattcttggcagtatttttcagaaagccctcaacatcagcaaaatcgaatcttttgtcgcagtcaccactatcttcctcgggcaaaatgagatcccggcgatcgttaaaccttttattgatcgcatgaatcgcaacgagctatttacggctatttgtagcggcatggcgtctattgcgggttcgatgatgattggctatgccggaatgggcgtgccgattgactatttgttagccgcttcgctgatggctattcctggcggtatcctgtttgcacgtattcttagtccggcgacggaaccttcgcaagttacgtttgaaaatctgtcgtttagcgaaacaccgccaaaaagcattattgaagctgcggcgaacggtgcaatgaccgggctgaaaattgcagccggtgtggctacggtggtgatggcgtttgtcgcaattattgcgctgatcaacggcattatcggcggaattggcggctggtttggttttgccaatacctctctggaaagtatttttggctatgtgttggcaccactggcgtggatcatgggtgtggactggagtgatgccaaccttgcgggtagcctgattgggcagaaactggcgattaacgaatttgtcgcttacctgagtttttcgccatatctgcaaacgggcggcacgctggaagtgaaaaccgtggcgatcatctcctttgcgctgtgtgggtttgcaaactttggttctatcggtgttgtcgttggggcgttttcggccatttcgccaaaacgcgcgccggaaatcgcccagcttggtttacgggcgctggcggcggcgacgctttccaacctgatgagcgcgaccattgccgggttctttattggtttagcttga

SEQ ID NO: 498 - DNA, 939 bp, Escherichia coli
atgtctgaattaactctgtcccctgaattattacaaatatccgctgaagtacaggatgctttaaaaaataaaaaaccggttattgcgctggaatcgaccataatttctcacggaatgccattcccacaaaatgcccaaaccgcaattgaagtagaagaaacaattcgtaaacagggcgcagtaccagccactatcgccattattggcggcgtgatgaaagtgggcttaagtaaagaagaaattgaattgctgggccgtgaaggacataacgtgacgaaagttagtcgtcgtgatttaccttttgtcgttgcagcagggaaaaatggcgcaaccaccgttgcatcaaccatgattattgcagcactggctgggattaaagtttttgcaaccggaggtattggtggtgtgcatcgcggagcggaacataccttcgatatttctgccgatttacaggaactggcaaataccaatgtcactgttgtttgtgcgggggcaaaatctattctcgatttaggattaacaacagaatatttagaaaccttcggtgtaccgttaattggttatcagacaaaagcgctgcctgcgtttttctgccgaaccagcccatttgaagtcagcattcgtctcgacagtgcccgcgaaattgctcgcgcgatggcagtgaagtggcaaaccggtttgaacggcggcctggtggtagcgaacccgatcccggaacagtttgcgatgccagaagaaaccatcaatgcagcaattgatcaagccgttgctgaagccgaagaacagggtgttattgggaaagagagtacaccgttcctgctggcgcgtgttgcggagctaaccggcggtgatagcctgaaatccaatattcaactggtctttaataacgccattctggcgagcgaaattgccaaagaatatcagcgtctcgtgggttaa

SEQ ID NO: 499 - DNA, 942 bp, Escherichia coli
atgcgcgaaaaggactacatagtaattattggctcggcgaatattgatgtggctgggtattcacatcatccattgaattatgcggattcgaatcccggaaaaattaaatttaccccaggtggcgtgggaaggaatatcgctcataatctggcgttactggggaaaaatgcctggcttttaagtgcagtaggtggtgatttttatgggcaatcattactggcgcaaactaatcaatccggtgtttatgtcgataaatgcttaattgttccgggtgagaatacatccagctatttatcactgctcgataatacaggagaaatgcttgtcgcgataaatgatatgagtattagtgactgtatttctgcagaatttcttgcccagcatcaggagtttattcgcggtgcaaaggttattgtcgcggattgcaaccttagtgaagaggcgctggtctgggttctggaaaatagcggggaaacgcctgtatttattgatccggtatcggcatggaaatgcgtcaaaatccgcgatcatctgagcaaaatccatacgttaaaacctaaccgtcttgaagctgaaacgttgagcggaattgcactttccggacgtgaagatgtcgcaaaggtcgccgcctggtttcatcaacacggcctgaaccgcctggtgctgagcatgggaggggatggcgtttactacagtgatatcaacggtgaaagtgggtggtcggcccctattaaaacgaatgtcatcaatgttactggggcaggcgacgccatgatggcggggctggcctcctgttgggtagacggtatgccgtttatcgattctgttcgatttgcgcagggatgttcgtcaatggcacttgcctgtgaatataccaacaaccctgaattatcaattgccaatgttacatcgttagtggagaacacagaatgtctgaattaa

SEQ ID NO: 500 - DNA, 1692 bp, Escherichia coli
atgaaaacgctgctgattattgacgctaatctcggtcaggcacgcgcctatatggcgaagaccctgctgggcgcggcggcgcgaaaagcaaaactggaaatcatcgacaatccgaacgacgcagaaatggcgattgttctcggtgattccatcccgaatgacagcgcgctgaacggtaaaaatgtctggctgggcgatatttcccgggcagttgcgcaccctgagctgttcctgagtgaagccaaaggccatgcgaaaccttacactgcgccggtcgctgcgacagcaccggttgccgccagcggtccgaaacgcgtagttgcggtgactgcttgcccgactggcgtagcacacacctttatggcggctgaagccattgaaaccgaagcgaaaaaacgtggctggtgggtgaaagttgaaacccgtggttctgttggcgcgggcaatgcaatcacccctgaagaagtcgcagcagcggatctggtgattgtggcggcagatatcgaagtggatctggcgaaatttgctggtaaaccgatgtatcgcacctctaccggtctggcgctgaagaaaactgcgcaggaactggataaagcggttgctgaagcaactccgtatgaaccggcgggcaaaactcaaacagcgaccactgaaggtaagaaagagagtgcaggcgcttaccgtcacttgctgacgggcgtctcttacatgctgccgatggttgttgcaggtggtctgtgtatcgcgctttcttttgcttttggtatcgaagcgtttaaagagccgggtacgttggcagcggcgctgatgcagattggtggtggttcagcctttgcgctgatggtgccggtactggcaggttatattgccttctccattgccgatcgtccgggtctcacgccgggtctgattggcggtatgctggcggttagcaccggttctggcttcattggtggtattattgcgggcttcctggcgggttacattgcgaagttaatcagtacgcaactgaaactgccacagagtatggaggcactgaaaccgatcctgatcattccgctaatttccagtctggtggtcggtctggcgatgatttacctgatcggtaaaccggttgctggcattctcgatgggttgactcactggctgcagaccatggggactgcgaatgctgttctgctgggggcgatcctcggtggcatgatgtgtactgacatgggcggtccggtaaacaaagcagcgtacgcattcggtgtgggtctgctgagtactcaaacctatggcccgatggcggcgattatggcggcaggtatggtgccaccgctggcaatgggtctggcaacaatggtggcgcgtcgcaaattcgacaaagcgcagcaggaaggtggcaaagccgctctggtacttggtctgtgctttatttcggaaggtgcaattccgtttgctgctcgtgatccgatgcgtgtgctaccgtgctgtatcgttggtggggcgctgactggcgcaatctcaatggcgattggtgcgaaactgatggcaccacacggtggtctgtttgttctgctgatccctggcgctattacgccggtattgggttacctggtagcaattattgccggtacgctggtggcgggtttggcctatgccttcctcaaacgcccggaaacacaaatagtagaaaaaaacgcataa

SEQ ID NO: 501 - DNA, 939 bp, Escherichia coli
atgagtagacgtgttgctacgatcacccttaatccggcttatgaccttgttggtttctgcccggaaattgaacgcggcgaagtgaacctggtgaaaaccaccggtctgcatgcggcgggtaaaggcatcaacgtggccaaagtattaaaagacctgggaattgatgtcaccgttggcggcttcctgggtaaagacaatcaggatggttttcagcaactgttcagcgagctgggcattgccaaccgtttccaggttgtacaggggcgcacccgaattaacgttaagctgacggaaaaagacggcgaagtgaccgacttcaacttctcgggttttgaagtcacccccgccgactgggaacgctttgtgactgattctctgagctggctcggtcagttcgatatggtctgtgtcagcggaagcttaccgtcaggcgtcagcccggaagcgttcaccgactggatgactcgcctgcgtagtcagtgtccttgcattatctttgatagtagccgtgaagcgttagtagcaggtttgaaagcggcaccgtggctggtgaaacctaaccgccgcgagctggaaatctgggcaggccgtaaactgcctgaaatgaaagatgtgattgaagctgcgcatgcgctgcgtgaacaaggcatcgcgcatgttgttatttcactgggtgccgaaggcgcgctttgggttaatgcctccggcgaatggatcgccaaaccaccgtcagtcgatgtcgtaagcaccgttggcgcaggggattctatggttggtggcctgatttatggcttgctgatgcgtgaatccagtgaacacacactgcgtctggcgacagctgttgcagccctggcggtaagtcaaagcaatgtgggtattaccgatcgtccgcagttggccgcaatgatggcgcgcgtcgacttacaaccttttaactga

SEQ ID NO: 502 - DNA, 1131 bp, Escherichia coli
atgttccagttatccgtacaggacatccatccgggcgaaaaggccggagacaaagaagaggcgattcgccaggtcgctgcggcgctggtgcaggccggtaatgtagctgaaggctacgtcaatggcatgctggcgcgcgaacagcaaacctcaacgttcctcggcaatggtattgctattccacacggcactaccgacacccgcgatcaggtgctgaaaaccggcgttcaggtatttcagttcccggaaggcgtcacctggggtgacggccaggtagcgtacgtggcgatcggtattgctgccagctcggatgaacatctgggcctgctacgccagctgacccacgtactgagcgatgattccgttgctgaacaactgaagtcagcaacaacagcagaagaacttcgcgcattgctgatgggcgaaaagcagagtgagcagctgaagctcgacaacgaaatgctgacgctggatatcgtcgccagcgatctgctgactcttcaggcgctgaacgctgcgcgtctgaaagaagcgggggcagttgacgccactttcgtcaccaaagccatcaatgaacaaccgctgaacctcgggcagggtatctggctgagcgatagcgccgaaggcaatctgcgtagcgcgattgcggtaagccgtgcggcaaatgcttttgatgtggacggcgaaacggcagccatgctggtgagtgtggcgatgaatgacgatcagcccatcgcggttcttaagcgtctcgctgatttgttgctcgataataaagctgaccgcttgctgaaagcggatgcggcaacgttgctggcgctgctgaccagcgatgatgcgccgaccgacgacgtgttaagcgcggagtttgtggtgcgcaatgaacacggcctgcatgctcgtccaggtaccatgctggtcaataccattaaacaatttaacagtgatattaccgtgacaaaccttgatggcaccggcaaaccggcaaacggacgtagtctgatgaaagttgtggcacttggcgttaagaaaggtcatcgcctacgctttaccgcccagggtgcagatgctgaacaggcgctgaaagccattggcgacgctatcgctgctggtcttggggagggcgcataa

SEQ ID NO: 503 - DNA, 1182 bp, Escherichia coli
atgcataactcccccgcagtcaccagcgcgaaatcgtttgacctgacctcgacggcgtttttaatcgttgcctttctcaccggtattgcgggcgctctgcaaaccccgacactcagtatttttcttactgatgaagtacatgcccgtccggcgatggtgggattcttctttaccggcagcgcagtcattgggattctggtgagtcagtttctcgccgggcgctctgataagcgcggcgatcgcaaatcgctgattgtcttttgctgcctgttaggcgtgctggcctgcaccctttttgcctggaatcgcaactactttgttttgctattcgttggcgtctttcttagcagctttggctcaaccgctaacccgcaaatgtttgcccttgcccgtgaacatgctgacaaaaccggacgtgaggcggtgatgttcagctcttttttacgcgctcaggtttcactggcatgggtcattggcccaccgctggcttatgccttagcgatgggtttcagctttacggtaatgtatctgagcgcagcggtagcgtttattgtttgcggcgtgatggtgtggctgtttttgccgtcgatgcaaaaagagcttccgctggcgaccggcacggttgaagcgccgcgccgtaaccgtcgcgatacgttgctgctgtttgtcatttgtacattgatgtggggctcgaacagcctgtacatcatcaacatgccgctatttattatcaacgaactgcatcttcccgagaaactggccggtgtgatgatggggaccgccgccgggctggaaatcccgaccatgttgatcgccggatattttgccaaacgtctgggtaagcgcttcttaatgcgcgttgctgccgtgggtggcgtctgtttttacgcaggaatgctgatggcgcattcacctgtcattctgttgggcttgcagctgctaaatgctatttttattggcattctgggcggcatcgggatgctctattttcaggatttgatgcccggtcaggcaggttcagccaccacgctctataccaacacgtcgcgcgtgggctggatcatcgcaggatcagtggcgggcatcgtcgccgagatctggaattatcacgctgtgttctggtttgcgatggtgatgattatcgctactctgttttgcttactgcgaattaaagatgtttaa

SEQ ID NO: 504 - DNA, 255 bp, Escherichia coli
atggaatgccgtccgggttgcggggcgtgttgcactgccccttcaatttccagccctattcccggtatgccagatggcaagcccgccaatacgccctgcattcagcttgatgaacagcaacgctgtaaaattttcacctcgccactgcgaccgaaagtctgtgcaggcttacaagccagcgctgaaatgtgcggcaactcgcgtcagcaggcaatgacctggcttatcgatctggaaatgctgaccgcgccttaa

SEQ ID NO: 505 - DNA, 573 bp, Escherichia coli
atgccaagagcgaacgaaattaaaaaaggtatggtactgaattacaacggcaaactgctgctggttaaggacattgatattcagtcgcccactgcccgcggtgccgctacgctgtacaaaatgcgtttttctgatgtccgtaccgggctgaaagtagaagagcgtttcaaaggtgatgatatcgttgacaccgtgacgctgacccgccgttacgttgacttctcctatgtcgatggcaacgaatatgtctttatggataaagaagactataccccgtataccttcaccaaagatcagattgaagaagagttgctgtttatgcctgagggcggcatgccggacatgcaggtgctgacctgggacggtcaattgctggcgcttgagctgccgcagaccgttgatctggaaatcgttgaaactgcaccaggcatcaaaggggcatctgccagcgcccgtaacaaaccggcgacattgagcactggtctggtgattcaggtaccagaatacttaagcccgggcgaaaaaattcgtatccatatcgaagaacgccgttatatgggtcgtgctgactaa

SEQ ID NO: 506 - DNA, 1467 bp, Escherichia coli
atgaatacaatcgcctccgttacgctcccgcatcatgtacacgctccacgctacgatcgacagcagttgcaatcacgtatcgttcattttggctttggagcctttcaccgcgcacatcaggcattactgaccgatcgtgtgctgaatgcccagggcggcgactgggggatctgtgaaatcagcttgttcagcggcgatcaactgatgagccaactccgcgcacagaaccatttatataccgtgctggagaaaggtgcggacggcaatcaggcgataattgtcggtgccgttcacgaatgtctgaatgcaaaactggattccttagcggcaattattgagaaattttgcgagccacaggtggcaattgtttccctgacgattaccgaaaaaggctattgtattgacccggccaccggtgcactcgacaccagcaatccgcgtattattcacgatctacaaaaccctgaagaacctcactccgcgccaggtattctcgtcgaagcactgaaacgccgccgtgagcgcggccttacaccgtttaccgtgctctcctgcgacaatattcccgacaatggccatgtggtgaaaaacgcggtgctgggaatggcagaaaaacgttcgccagaactcgccgggtggataaaagaacacgtcagttttccgggaactatggtcgaccgcattgttccggctgcaaccaacgaatcactggcggaaatcagccagcatctgggggtgaatgatccctgcgcgattagctgcgaaccgtttatccagtgggtggttgaagataacttcgtcgctgggcgtcctgcctgggaagtcgcaggtgtacaaatggtgaatgatgtcctgccatgggaagagatgaaactgcgtatgcttaatggcagccactcttttctcgcttatctgggttacctctcaggattcgcccatatcagtgattgcatgcaggatcgcgcatttcgccatgccgccagaacattaatgctggatgagcaagcgccgacactgcggattaaagatgtcgatttaacacaatatgcggataagttaattgcacgttttgctaatccggcactgaaacataagacctggcaaatcgcgatggatggcagccagaaattaccgcaacgcatgctggcaagtattcgcatacatctggggcgcgaaacggactggtcgttgctggcattaggcgttgcaggctggatgcgttacgtcagcggcgttgatgatgccggaaatgccattgatgttcgcgatccacttagcgataaaattcgtgaacttgttgcgggcagcagcagtgaacaacgcgtaaccgccctgctttccctgcgtgaaattttcggtgatgatctgccagataacccgcattttgtgcaggccatcgaacaagcctggcaacaaatcgcacaattcggcgcgcatcaggcgctattaaacaccctcaaaatttaa

SEQ ID NO: 507 - DNA, 987 bp, Escherichia coli
gtgaccagaaccaacctcatcaccggttttctcggcagcgggaaaactacgtcgattcttcatctgttagcccataaagatcccaacgaaaaatgggcggtactggttaatgaatttggggaagtcggaattgatggtgctttgctcgccgatagcggcgcactgctgaaagagatccccggcggctgcatgtgctgcgttaatggtttacccatgcaggtagggttgaataccttactgcgtcagggaaaaccagaccgcttgttgatagagccgaccgggctgggccatccgaaacagatcctcgatctcttaaccgcacccgtctatgaaccgtggatagatctgcgcgccacgttgtgcattctcgatccacgcctgttgctggacgaaaaaagcgccagcaatgaaaacttccgtgaccaactggctgccgcagacattattgtcgccaataaatccgaccgtgcgacgcccgaaagtgagcaagcgctagagcgctggtggcagcaaaatggtggcgatcggcaattaattcacagcgagcatggaaaaattgacggtcatcttctggatttgccgcgtcgcaatttagccgagttgcccgccagcgccgcgcattctcatcagcatagcgtgaaaaaagggttagcagcgttaagcctgccagagcatcaacgctggcgtcgcagtctgaacagcggacaagggcatcaggcctgtggctggatattcgacgctgatacggtattcgacaccattggtattctggaatgggcgcgacttgcaccggtggaacgcgtcaaaggcgtgctgcgtattcccgaagggctggtgcgaatcaaccgtcagggcgatgacctgcacattgaaacgcaaaacgttgcgccaccggacagtcgtattgagctgatttccagcagcgaagctgactggaatgccttgcagagcgcgctgttgaagcttcgtttagcgactaccgcgtaa

SEQ ID NO: 508 - DNA, 714 bp, Escherichia coli
atgattaaaaatttgccgcaaatagtgttgttgaatattgtcggcctcgcgctgtttctttcctggtatattcccattaatcatggattctggttgccgattgatgcggatattttttatttctttaatcagaaactggtcgaaagtaaggcctttttgtggctggttgcattgaccaacaatcgcgctttcgacggttgttcactgctggcgatgggaatgttgatgctgagtttctggctgaaagaaaacgccccaggcagacgacgtatcgtgattattggtctggtcatgctattaactgcagtggtattaaaccagctgggtcaggcactaattcctgtaaaacgggccagcccaacgttgacttttaccaatattaaccgcgtcagcgaactgctctctgttcccacgaaagatgcctcacgagatagctttcccggcgatcacggtatgatgctgcttattttttcggcattcatgtggcgttatttcggcaaagttgcaggccttatcgcccttattatttttgtgatttttgcgtttcccagagtaatgattggcgcacactggtttactgacatcatcgtcggttccatgaccgtgatattgatcggcttgccctgggtgttgctgacgccattaagtgatcgattaatcaccttttttgacaaatcactacctggaaaaaacaaacatttccaaaacaaataa

SEQ ID NO: 509 - DNA, 567 bp, Escherichia coli
atggtcaaatctcaaccgattttgagatatatcttgcgcgggatccccgcgattgcagtagcggttctgctttctgcatgtagtgcaaataacaccgcaaagaatatgcatcctgagacacgtgcagtgggtagtgaaacatcatcactgcaagcttctcaggatgaatttgaaaacctggttcgtaatgtcgacgtaaaatcgcgaattatggatcagtatgctgactggaaaggcgtacgctatcgtctgggcggcagcactaaaaaaggtatcgattgttctggtttcgtacagcgtacattccgtgagcaatttggcttagaacttccgcgttcgacttatgaacagcaggaaatgggtaaatctgtttcccgcagtaatttgcgtacgggtgatttagttctgttccgtgccggttcaacgggacgccatgtcggtatttatatcggcaacaaccagtttgtccatgcttccaccagcagtggtgttattatttccagcatgaatgaaccatactggaagaagcgttacaacgaagcacgccgggttctcagccgcagctaa

SEQ ID NO: 510 - DNA, 1557 bp, Escherichia coli
atgtttatacgcgctcccaattctggacgtaagctcctgcttacctgcattgttgcaggcgtgatgattgcgatactggtgagctgccttcagtttttagtggcctggcataagcacgaagtcaaatacgacacactgattaccgacgtacaaaagtatctcgatacctattttgccgaccttaaatccactactgaccggctccagccgctgaccttagatacctgccagcaggctaaccccgaactgaccgcccgcgcggcgtttagcatgaatgttcgtacgtttgtgctggtaaaagataaaaaaacattctgttcatctgcaactggtgagatggacattccactcaatgaattgattccggcgctcgacattaataaaaacgtcgatatggcgatcttacccggcacgccgatggtgccgaacaaacccgcaatcgtcatctggtatcgcaaccctttgctgaaaaatagcggcgtgtttgccgctctgaatctcaacctgacgccttcactcttttatagttcacggcaggaagattacgatggcctagccctcattattggtaatactgcgctatctaccttttcttcacgtttgatgaacgttaatgaattaaccgacatgccggtccgtgaaactaaaattgcgggcattcctctgactgttcggctttatgcagatgactggacatggaacgatgtgtggtacgcatttttactgggtggcatgagtggaactttcgttggacttctctgctattacctgatgagtgtgcgtatgcgcccaggcagagaaatcatgaccgccatcaagcgcgaacaattttacgtggtgtatcaaccggtggttgatacacaagctttgcgggtaacgggcctggaagtactgctacgctggcggcatccagtagcaggtgaaatccccccggatgccttcattaactttgccgaagcgcaaaagatgattgtgccactgactcagcacctgtttgagttgattgcccgcgatgccgcagaattagaaaaagtactgccggtaggcgtcaaatttggcattaacattgcgccggcccacttgcacagcgaaagctttaaagcggatatccagaaactgctcacttccctgcccgcacaccatttccagattgtgctggaaattaccgagcgcgatatgctgaaagagcgagaagccacacaactcttcgcctggctgcattcggtcggcgtagaaattgctattgatgacttcggcaccgggcacagcgcgcttatctatcttgagcgttttacgctcgattatctgaaaattgatcgtggatttatcaacgccatcggtacggaaacgatcacttcacccgtacttgacgcggtgctgacgctggcgaaacgtctcaatatgctgacagttgctgaaggggtcgaaacgccagaacaggcacgatggctaagcgaacgcggcgttaatttcatgcaaggctactggattagtcgcccgttaccgctggacgattttgttcgctggctgaagaaactgtatacgccgcagtggtaa

SEQ ID NO: 511 - DNA, 1815 bp, Escherichia coli
atgattgtgcgcatactgctgctgtttatcgctctgttcacctttggtgcgcaggcgcaggctatcaaggaaagctatgcctttgccgtactgggcgaaccccggtacgcatttaatttcaaccattttgattatgtgaaccccgccgcgccaaaaggtgggcaaataacgttgtctgccctcggcaccttcgataatttcaaccgctatgcactgcgcggcaacccgggcgcacgcaccgagcagctgtacgacacgctatttacgacttccgatgacgaaccaggcagttattacccgctgattgctgaaagcgcacgctatgctgacgattattcctgggtggaggtcgctattaatccacgtgcccgttttcatgatggttcgcccattactgcccgcgatgtagagtttacttttcaaaaatttatgaccgaaggcgtgccgcaatttcgtctggtctacaaaggcaccaccgtcaaagccattgcgccgttaaccgtgcgcattgagttagctaaacccggcaaagaagatatgctgagtctgttttcgctgccggtatttccagaaaagtactggaaagatcacaaacttagcgacccgctcgccacgcctccgcttgccagtggtccgtaccgcattacgtcctggaaaatggggcaaaatattgtctattcccgcgtgaaagattactgggcagcaaacttaccggtaaaccgtggacgctggaatttcgacaccattcgctacgattattacctcgatgataatgtcgcctttgaagcgtttaaagcaggtgcctttgatttgcgtatggaaaacgacgccaaaaactgggccacgcgctataccggtaaaaatttcgataaaaaatacatcatcaaagatgagcaaaagaacgaatcagcccaggatacgcgctggctggcgtttaatatccaacgtccggtattcagcgatcgccgggtgcgggaagcgatcactctcgcctttgactttgaatggatgaacaaagcgttgttttacaatgcctggagtcgcacgaacagttattttcagaataccgaatatgcggccagaaattaccccgacgccgcggaactggtgcttctggcaccaatgaaaaaagatctaccgccagaagtcttcacgcaaatctaccagccgccggtatccaaaggcgatggctacgatcgtgacaacctgttaaaagccgacaaacttctcaacgaagcaggctgggtgctgaagggtcagcaacgcgttaatgtcacaacgggtcagccactcagctttgaattattgcttcccgcaagcagcaatagtcagtgggtattgccgttccagcacagcctgcaacggctgggtatcaacatggacattcgcaaggtggataactcgcaaatcaccaaccgcatgcgcagtcgcgactatgacatgatgccgcgcgtatggcgggcgatgccgtggcccagttccgatttacagatttcctggtcatcggaatatatcaattccacttataatgcccccggcgtgcaaagcccggttatcgactcgctgatcaaccaaattattgccgcgcagggaaataaagaaaaattactgccgttgggacgagcactggatcgcgtattaacgtggaattattacatgctgccaatgtggtacatggcggaagaccgtctcgcctggtgggataaattctcccaacccgctgtacgccctgtttacagcctgggtattgatacctggtggtatgacgttaataaagcgacgaaactgccgtcagccagacaacagggagagtag

SEQ ID NO: 512 - DNA, 1095 bp, Escherichia coli
atgggcgcttatctgattcgccgtctgttgctggtgatcccaacgctatgggcgattatcactatcaactttttcatcgtgcaaattgcgcctggcggtccggtcgaccaggccatcgccgccattgagtttggtaatgccggagtattacccggcgcaggcggtgaaggtgttcgcgccagccatgcgcaaacgggcgttggcaatatcagcgacagtaattaccgtggcggacgcggattagatccagaagtgatcgccgagatcactcatcgctacggtttcgataagccgatccacgaacgttacttcaaaatgctctgggactacatccgttttgattttggcgacagcctttttcgcagcgcctcggtgctgacgctgattaaagacagtctgccggtctccatcaccctcggattgtggagcacgctgattatctatctggtgtcgattccgttaggcattcgcaaagctgtttataatgggagccgttttgacgtctggagtagtgcatttatcatcatcggctacgccattccggcctttttgtttgccatcctgctgattgtcttcttcgcaggcggcagctatttcgacctgttccctctgcgcggcctggtttccgctaactttgattcgctgccgtggtatcagaaaatcaccgattatctgtggcatatcacgctgccggtgctggcgacagtgattggcggctttgcggctctgaccatgctgacaaaaaactcattccttgatgaagtgcgtaagcaatacgtggtgacggcacgtgcgaaaggggtaagtgaaaaaaatattctctggaaacatgtgttccgcaacgccatgctgctggtgattgccggttttccggcgacgtttatcagcatgttttttaccggctcgctgctgattgaggtggtgttttcactcaatggtcttggcttactgggctacgaagcgaccgtctcgcgcgattatcctgtaatgtttggtaccttgtatattttcaccctgattggcctgctgctgaatattgtcagtgatatcagctatacgctggtcgatccgcgtatagactttgagggacgttaa

SEQ ID NO: 513 - DNA, 1026 bp, Escherichia coli
atgtcgcgactcagccccgtcaatcaggcccgttgggcgcgttttcgccataaccgtcgcggctactggtcgttatggattttcctcgtcttgtttggtttgagtttgtgttctgaacttatcgccaacgataaaccgttgctggtgcgttatgacggcagttggtatttcccgttgttgaaaaactacagcgaaagcgattttggaggcccgctggcaagtcaggctgattatcaggacccgtggctgaaacaacggctggaaaataacggctgggtactgtgggcaccgattcgctttggtgctaccagtatcaactttgctaccgataagcccttcccttctccaccctcccggcaaaactggctgggaacggatgccaatggcggcgatgtgctggcgcgcattctctatggcacgcggatctcagttctgtttggcctgatactgaccctctgctccagcgtgatgggcgtgctggcgggggcgctacaaggctattacggtggtaaagtcgatctctgggggcaacgttttattgaagtatggtcggggatgccgacgctgtttttgattattttactttccagcgtcgtacagcctaacttctggtggctgttggcaattaccgtcttgtttggctggatgagtctggtcggtgtggtgcgggcggagtttttacgtacccgtaatttcgactacatccgcgcggcgcaggcgcttggcgtcagcgatcgcagtatcatcctgcgtcatatgttgccaaatgccatggtcgctaccctcacttttttaccgtttattttatgtagttcgataaccaccctgacctcactcgatttcctcggcttcggtctgccgctcggttcaccgtcactcggtgaactgctgttacaagggaaaaataaccttcaggccccgtggcttgggatcaccgccttcttatcggtggcgatattgttgtctttgctgatctttattggtgaagccgtccgcgacgcatttgatcctaataaggcggtgtag

SEQ ID NO: 514 - DNA, 1590 bp, Escherichia coli
atgacgcaaactctgttagcgattgaaaatttgtcggtgggttttcgccatcagcaaaccgtacgtacagtagtcaatgatgtttcactacagattgcggctggcgaaacgctggcgctggtaggtgagtctggttcaggtaagagcgttaccgcgctgtcaattttacgcctgctcccttgcccgccggttgaatatctctccggcgatattcgttttcatggcgaatcgctgcttcatgccagcgatcaaacgttgcgcggtgtacgcggtaataagatcgccatgatttttcaggagccgatggtgtcgttaaatccattacataccctggaaaaacagctttatgaagtactttcactccaccgcgggatgcgtcgggaagcggctcgtggcgaaattcttaactgccttgatcgcgtcggtatccgccaggcggcaaaacggctgacagattatccgcatcagctctccggcggcgaacgccagcgggtgatgattgcgatggcgctgttaacgcgaccggaattattaattgccgatgaaccaaccaccgcgctggacgtctctgtccaggcgcagattttacagctgttgcgcgaactgcaaggcgagctgaatatgggtatgctgtttattactcataacctcagcattgtcagaaaactggcccaccgcgtggcggtaatgcaaaacggtcgctgtgtcgagaaaaataacgccgctacgctgtttgcctcacccactcatccttacacacaaaagctactcaacagtgaaccatctggcgacccggtgccattgccagaacctgcctctacgttgctagatgttgaacaacttcaagttgccttccccattcgtaaagggatcttgaagcgcattgtggatcataatgtggtggtgaaaaacatcagttttacgctacgggcgggtgaaacactgggtttagtgggcgagtccggttccgggaaaagcacgacgggactggcgctgctgcgactgattgactctcagggcagcatcgtctttgacggtcagccactgcaaaatttaaatcgccgccagctgttacctattcgtcatcgcattcaggtggtatttcaggatccaaactcctcactcaacccacgactcaacgttttgcaaattattgaggaaggcttacgggttcaccagccgacgctttctgccgcacaacgcgaacaacaagtgatagccgtgatgcatgaagtgggattagatcctgaaacacgccaccgttatccggcggagttctctggtggtcagcggcaacgtattgcgattgccagggcgttaattcttaagccctcgctgatcattcttgatgaaccaacatcatcactcgacaaaacggtgcaggcgcaaatattgacgctattgaaatcattgcaacaaaagcatcaactggcctatttgtttatcagccacgatttgcacgttgtccgcgcgttatgtcatcaggttatcgtactgcgacaaggggaagtagtggaacaaggaccgtgcgcgcgcgtgtttgccgcaccgcagcaggagtatacgcgtcagctactggcgttgagctga

SEQ ID NO: 515 - DNA, 345 bp, Escherichia coli
gtgactccattacaactctcaatcgtccatcgactgccgcagaactatcgctggtctgctggtttcgcaggttcgaaggttgaaccgattccgcaaaatggaccgtgcggtgacaacagcctggtggcgcttaaattgcttagcccggatggtgataatgcatggtcggtgatgtacaaactaagccaggcgttaagcgacatcgaagttccatgttcggtgctggagtgtgaaggtgagccgtgcctgtttgtaaatcgccaggacgaatttgctgcaacatgccgattgaaaaattttggtgtggcaattgccgaacccttttcaaactacaatcctttttaa

SEQ ID NO: 516 - DNA, 1191 bp, Escherichia coli
gtgaccacccgacagcattcgtcgtttgctattgtttttatccttggcctgctggccatgttgatgccgctgtcgattgatatgtatctgcctgcgctaccggtaatttcagcgcagtttggtgtaccggcgggcagtacgcagatgaccctgagtacttatattctgggctttgcgttggggcagttaatctacgggccgatggcagacagcttcgggcgtaagccggtggttcttggcggtacgctggtgtttgccgccgccgcggtggcgtgtgcgttggcgcaaaccatcgatcagctgattgtgatgcgtttcttccacgggctggctgcggctgcggccagcgtggttatcaacgctttgatgcgtgatatctacccgaaagaagagttctcacggatgatgtcgtttgtcatgctggtgacgaccattgcaccgctgatggcaccgatagttggcggctgggtgctggtgtggctgagctggcattacatcttctggatcctcgccgtggcggcgattctggcttcggcaatgatcttctttctgatcaaagaaaccttaccaccggagcgtcgccagccttttcacattcgtaccactattggtaactttgcggcgctgttccgtcataagcgtgtcctgagttatatgctggccagcggtttcagctttgccgggatgttctcattcttaagcgccggaccgtttgtctacattgaaatcaaccacgtcgcgccggaaaactttggttattactttgcgctaaacattctttttctgttcgtgatgaccatctttaacagccgcttcgtccgccgtattggcgcgttaaatatgttccgctcggggttgtggatacagtttattatggcagcgtggatggtcatcagtgcactgctggggctgggattctggtcgctggtggttggcgttgcggcgtttgtgggctgcgtgtcgatggtgtcatccaatgcgatggcggtcattcttgatgagtttccccatatggcgggaacggcatcttcgctggcaggaaccttccgtttcggcataggggcaattgttggcgcattactttctcttgcgacctttaactctgcatggccgatgatttggtcaattgcattctgcgcaaccagctccattctcttctgtttgtacgccagtcggccgaaaaaacggtga

SEQ ID NO: 517 - DNA, 696 bp, Escherichia coli
atgcgacttgataaatttatcgcacagcaactcggcgttagccgtgctattgccgggcgtgaaatccgcggcaatcgtgtcaccgtcgatggcgaaatcgtccgtaatgcagcgttcaaactgctccctgaacatgatgtcgcttacgatggcaacccgctggcgcagcaacacggtccacgttacttcatgctcaataagcctcagggctatgtttgctccacggacgacccggatcacccaacggtgctctattttcttgatgaaccggtagcgtggaaactgcacgctgcagggcgtctggatatcgataccaccggtctggtactaatgacagatgatggtcagtggtcgcaccgcattacttctccgcgccatcattgcgagaagacctatctggtgacgctggaatcacccgtagctgacgatacggcagagcaatttgctaaaggcgtgcagctgcataacgaaaaagatctcactaagccggcggtgctggaagtgattaccccaacgcaggttcgtctgaccatcagcgaagggcgttatcatcaggtgaaacgtatgttcgccgccgtgggtaaccatgtggttgagctgcatcgtgaacgtattggcggtattacgctggatgctgatttagcccccggtgaatatcgtccgttaactgaagaagaaattgccagcgtcgtctaa

SEQ ID NO: 518 - DNA, 1761 bp, Escherichia coli
atgatttttacactccgcccatatcagcaagaagccgtggatgccacgctcaaccattttcgtcgtcataaaacccctgccgttatcgtgctgcccaccggtgcaggtaaaagcctggtgatagcggaactggcgcggctggcgcgtggtcgcgtgctggtgctggcacacgttaaagaactggtggcacaaaaccatgcaaaatatcaggcgctggggctggaagccgatatttttgccgccgggctaaagcgcaaagagagccacggtaaagtggtatttggcagcgtgcagtcggtcgcccgtaatcttgatgcctttcagggtgaattttcgctgttgattgtcgatgaatgccaccgtattggtgacgatgaagagagccagtatcagcaaatcctcactcacctgacaaaagtgaatccccacttacgcctgctggggctgactgccacgccttttcgactgggcaaaggctggatttatcagttccattatcacggcatggtacgcggcgatgagaaagcccttttccgtgactgcatttatgagctgccgctgcgttatatgattaaacacggctatctgacgccgccagaacggctggatatgccagtagtgcaatacgatttcagccgcttgcaggcacagagtaacggactgttcagcgaagccgatctcaaccgcgagctgaaaaaacagcaacgcattacgccacacatcatcagccagattatggagtttgctgcaacgcgcaaaggggtgatgattttcgccgcgacggtcgaacacgcaaaagagattgtgggattactgcctgccgaagatgcagcactgattactggcgacacacccggcgctgagcgcgatgtgttaattgaagattttaaagcccagcgttttcgctatctggtcaacgtcgcggtactgaccaccggatttgacgccccgcacgtcgatcttatcgccattctgcgccctaccgaatcagtgagtctttaccaacaaattgtcgggcgcggtctgcgtctcgctcctggcaagactgattgcttaattcttgattatgcgggtaatcctcacgatctctacgcgccggaagttggtacaccgaaaggcaaaagtgacaacgtcccggtacaagttttctgccctgcctgcggttttgccaacaccttttgggggaaaacgaccgccgacgggacattgattgaacactttggtcgtcgttgtcagggatggtttgaagatgacgacggtcatcgcgaacagtgtgacttccgtttccgttttaaaaattgcccgcaatgtaacgcagaaaatgatattgccgctcgccgctgccgcgaatgtgacacggtactggttgatccggatgatatgttaaaagcggcgctacgactgaaagatgcgctggtattacgctgtagcggcatgtctttgcagcatggacacgacgagaaaggcgaatggttgaaaatcacctattacgatgaagacggcgcggatgtgagtgagcgtttccgtctgcaaacgcccgcccagcgtaccgccttcgagcagctttttatccgcccgcatacgcgcacaccgggcatccctctgcgctggatcaccgccgccgatatcctcgcccagcaagcattactgcgacacccggattttgtcgtcgcccgcatgaaaggtcagtactggcaagtgcgtgaaaaagtgttcgattacgaaggtcgttttcgtcgggcgcacgaattacgcggttaa

SEQ ID NO: 519 - DNA, 285 bp, Escherichia coli
atgtttactatcaacgcagaagtacgtaaagagcagggtaagggtgcgagccgccgcctgcgtgccgctaacaagttccctgcaatcatctacggtggcaaagaagcgccgctggctgtcgaactggatcacgacaaagtcatgaacatgcaagttaaagctgaattctacagcgaagttctgaccatcgttgttgacggtaaagaaatcaaagttaaagctcaggacgtacagcgtcacccgtacaaaccgaagctgctgcacatcgacttcgttcgcgcttaa

SEQ ID NO: 520 - DNA, 1008 bp, Escherichia coli
atgagtctggatatcaaccagattgctctgcaccagcttatcaagcgtgatgagcagaaccttgagctggtgttgcgcgattcattgctggaaccgacggaaaccgtcgttgagatggtggcagaactgcatcgggtctatagcgccaaaaataaagcttacggcttgtttagcgaagagagtgaactggcgcagacgctgcgcttacagcgtcagggcgaagaggactttctggcatttagccgcgcggcaaccggtcgcctgcgtgacgaattagcgaaatatccttttgctgacggtggattcgtgctgttttgccactatcgctatctggcggtggagtatctgctggtggcagttctgagcaacctgagcagtatgcgtgttaacgaaaatctcgacatcaacccaacccattatcttgatatcaatcatgcggatattgttgcgcgtatcgatttaaccgagtgggaaaccaatccagagtcgacccgctatctcactttcctgaaagggcgagtagggcgcaaagtggcggatttctttatggatttcctcggtgccagcgaagggttaaacgcgaaagcgcaaaaccgtgggctgttgcaagcggtcgatgatttcactgccgaagcacaactggataaagcagagcgacagaacgtgcgccagcaggtttatagctactgtaatgagcagctgcaggcaggtgaagagattgaactggaatcgctgtcgaaagagctggcaggcgtcagcgaagtgagcttcacggagtttgcggctgaaaaaggctacgaactggaagagagcttcccggcagaccgtagcacactgcgtcagttgacgaagtttgccggtagcggcggtggcttgactattaactttgatgcgatgctgttaggtgaacgcatcttctgggatccagcaaccgataccctgaccattaaaggcacgccgccgaacttgcgcgatcaattgcagcgccggacgtctggcggcaattaa

SEQ ID NO: 521 - DNA, 228 bp, Escherichia coli
atgccacaaatttcccgctacagtgatgaacaggttgaacaattgctcgcagagctgctcaacatactggaaaaacataaggctccgaccgacctttccctgatggtgttaggcaacatggtcactaaccttatcaacaccagcattgccccggcccaacgccaggcaattgccaactcttttgcccgcgccttacagtcctctatcaacgaagacaaagcgcactaa

SEQ ID NO: 522 - DNA, 1761 bp, Escherichia coli
atggtaactcatcgtcagcgctaccgtgaaaaagtctcccagatggtcagttgggggcactggtttgcactgttcaatattctgctttcgctcgtcattggcagccgttacctgtttatcgccgactggccgacaacgcttgctggtcgcatttattcctacgtaagcattatcggtcatttcagcttcctggtgttcgccacctacttgctgatcctcttcccgctaacctttatcgtcggctcccagaggctgatgaggtttttgtccgtcattctggcaacggcgggaatgacgctattactgatcgatagcgaagtctttactcgtttccatctccatcttaatcccatcgtctggcagctggttatcaacccagacgaaaatgagatggcgcgcgactggcagctgatgttcatcagcgtgccggttattttattgcttgaactggtgtttgcgacgtggagctggcaaaagctgcgcagcctgacgcgtcgtcggcgcttcgcgcgcccgctggccgcattcttatttatcgcctttatcgcctcgcatgtggtttatatctgggccgatgccaacttctatcgcccgatcaccatgcagcgcgctaacctgccgctttcgtacccgatgacggcacgacgttttcttgagaagcatggcctgcttgatgcgcaggagtatcaacgccgtcttattgagcaaggcaatccagacgccgtttccgttcagtatccgttaagcgaactgcgctatcgcgatatgggcaccgggcagaatgtgctgttgattactgtcgatggcctgaactactcacgcttcgagaagcagatgcctgcgctggcaggttttgctgagcaaaatatttcgttcacgcgccatatgagctccggcaacactacagacaacggcatctttggcctgttttatggcatctcgccaagctatatggacggcattttgtcgacccgtacgcctgcggcgttaattactgcgcttaatcagcaaggctatcagctggggttattctcgtcagatggctttaccagcccgctgtatcggcaggcattgttgtcagatttctcgatgccgagtgtacgcacccaatccgacgaacagaccgccacgcagtggatcaactggctgggccgctacgcacaagaagataaccgctggttctcgtgggtctctttcaatggcacaaacattgacgacagcaatcagcaggcatttgcacggaaatatagccgggcggcaggcaatgtcgatgaccagatcaaccgcgtgctcaatgcactgcgtgattctggcaaactggacaatacggtggtgattatcactgccgggcggggtattccgctgagcgaagaggaagaaacctttgactggtcccacggtcatctgcaggtgccattagtgattcactggccaggcacgccggcgcagcgtattaatgcgctgactgatcataccgatctgatgacgacgctgatgcaacgcctgctacatgtcagcacacctgccagcgaatattcgcaaggtcaggatttgttcaaccctcaacgccgccattactgggttaccgccgcggataacgatacgctggcaattaccaccccgaaaaagacactggtgctgaacaataacggtaaataccgcacttacaacttacgtggtgaaagagtgaaagatgaaaaaccacagttaagtttgttattgcaagtactgacagacgagaagcgttttatcgctaactga

SEQ ID NO: 523 - DNA, 156 bp, Escherichia coli
atgtggagttcggcaattaacagccgcaacagcgtgaacactgatgcgggagctggctttgagcaaacattgacgggcctgacgctcggtatcgatagtcgtttctcctgtgaagaaagcagcacaactcaggcgggtgtagtctggacgttctga

SEQ ID NO: 524 - DNA, 390 bp, Escherichia coli
atgggtggcgcggtaaatcagactacgatcaataatggagtgctacaggtttatggcgcggcgactgatcccacgattaaaggagggcgcttaattgttgaaaaagatgggattgccgtctttgccgttatcgaaaagggaggactactggaggttaaagcaacaggtgatttcaaaatattcgtgacggacaccggtgccagcccggcagcaggagataaccttacactggtaacaacgggcgcggtgatgcggcatttacgttgggcaatgccggaagcgttgttgatatcagtacgtatgaatataccttgctggataatggcaaccatagctggagtctcacagagaatcgcgtacaaatgcccccttcaaccacggatgtgctga

SEQ ID NO: 525 - DNA, 204 bp, Escherichia coli
atgcaccaatctggttctgtttctctttgtcgttccgcaatatctgttctggtggctacagcgttatattcacccatagcattagcatcaactgttgagtatggtgagacagttgatggtgttgtcctggaaaaagatatccagctggtttatggggccgccaataatacgaaaatcaatcttggcggagaacagcatatataa

SEQ ID NO: 526 - DNA, 648 bp, Escherichia coli
atgcctgaagcaacgccttttcaggtgatgattgtggatgatcatccacttatgcgacgcggtgttcgtcagttactggagcttgattctggctttgaagtggtcgccgaagcgggcgacggcgcaagcgcgatcgatctggcgaatagactggatatcgacgtgatcttgctggatctcaatatgaaaggcatgagtggcctggataccctcaatgccttgcgcagggatggcgttaccgcgcaaattattatcctgaccgtatcagatgcctccagcgatgtctttgcactgatagacgcaggcgcagacggttatctgttgaaagacagcgacccggaagtgttactggaagcaattcgtgccggagcgaaaggcagcaaagtctttagcgaacgcgtcaatcagtacttacgtgaacgtgaaatgtttggcgcggaagaagaccccttcagcgtgctgacagaacgcgagctggatgttctgcacgagctggcacaggggctgtcaaataaacagattgcctcggtgttgaatatttccgagcagacagtaaaagtccatattcgcaatctgctgcgtaaactcaacgtccgctcacgcgtggcggccaccattctgttcctgcaacaacgcggggcacaataa

SEQ ID NO: 527 - DNA, 1053 bp, Escherichia coli
atgaggtttttattgggcgtgctgatgctgatgatctccggctcagcgctggcgaccatcgacgtgttgcagtttaaggatgaagcgcaggagcagcagttccggcaactcactgaagaactacgctgcccgaaatgccagaacaacagcattgccgattccaactcgatgattgccaccgacctgcgccagaaagtgtatgaactgatgcaggaaggtaaaagtaagaaagagattgtcgattatatggtggcgcgttacggcaacttcgtcacttacgatccgccgttaacgccgctgaccgtgctgctgtgggtgctgccagtagtggctattggcattggcggttgggtcatatacgcccgttcgcggcgtcgggtacgcgtggtgccggaagcgtttccagaacaaagcgtgccggaaggtaagcgtgccggatatgttgtttatctgccgggtattgtggtggcgttaattgtggctggcgtcagctactaccagactggcaattatcagcaggtgaaaatctggcagcaggccacggcacaggctccggcgttactggacagggcgctggatccgaaagccgatccgctcaacgaagaagagatgtcgcgccttgcgctggggatgcgtactcaactgcaaaaaaatccgggagatatagaaggctggattatgttgggccgcgttggcatggcgctgggtaacgccagtatcgccaccgatgcatacgtcactgcgtatcgcctcgatccgaaaaacagcgatgctgcactgggatacgctgaagcgttgacacgttcatctgatcccaacgacaaccgcctcggcggcgaactgctgcgccagttggtgagaacggaccatagcaatatccgtgtgttaagcatgtatgcatttaatgcctttgagcagcaacgatttggcgaagccgttgccgcgtgggaaatgatgttgaaactcttacctgccaacgatactcgccgtgcggtgatcgaacgtagtatcgcgcaggcgatgcaacatttgtcgccgcaggagagtaaataa

SEQ ID NO: 528 - DNA, 558 bp, Escherichia coli
atgaagcgcaaagtattgttaattccgttgattatcttcctggcgattgccgcggcgctactgtggcagctggcgcgtaatgccgaaggggatgatccgaccaatctggaatcggcgctcattggcaagccagtgccgaagtttcgcctcgaatcactggacaatccggggcagttttatcaggcggatgttctgactcagggcaaaccggtgctgcttaacgtctgggcgacctggtgtccgacctgccgtgcggaacatcaatatctgaatcagctttctgcgcagggcatccgcgtggtcggcatgaactataaagacgatcgccagaaggcaatcagctggctgaaagagctgggcaatccttacgcactaagcctgtttgatggcgacggcatgttaggactggatctcggtgtctatggcgcgccagaaacgttcctcatcgacggcaacggcatcattcgctatcgccatgcgggcgatctcaatcctcgcgtctgggaagaagagatcaagccgctgtgggagaaatacagtaaggaggccgcacaatga

SEQ ID NO: 529 - DNA, 1944 bp, Escherichia coli
atgatgccagaaattggtaacgggctgctgtgtctggcgctaggaattgcgctgctgctgtctgtgtatccgctatggggcgtggcgcgcggggacgcgcgcatgatggcgtcttcccgcttgtttgcctggctgctgtttatgtctgtggctggcgcatttctggtgctggtcaatgctttcgtggtcaacgactttaccgtcacctatgttgccagcaactccaatacccagcttccggtgtggtatcgcgtggcggctacctggggcgcgcatgaaggctcgctcctgctgtgggtgctactgatgagcggctggacctttgcggtagcgatttttagtcagcgtattccgctggatattgttgcccgcgtactggcgataatggggatggtcagtgtcggctttttgctgttcattctctttacctctaccccgttctcacgcacgctgccgaatttcccgattgaagggcgcgatcttaacccactgttgcaggatccggggctgattttccacccgcctctgctctatatggggtacgtcggtttctcggtggcgtttgcttttgccattgcatctttgttgagtgggcgtctggacagcacttatgcgcgttttactcgtccgtggacgctggctgcgtggatcttcctgacgctcggcattgtgctcggttccgcatgggcctattacgaactcggctggggcggctggtggttctgggatccggtagaaaacgcctcgtttatgccgtggctggtggggactgcgctgatgcactcactggcggtcactgaacaacgcgccagcttcaaagcgtggacattactgctggcaatcagtgccttctcgttgtgtctgctggggactttcctggtgcgttccggcgtgctggtatcggtacacgcgtttgcgtctgatccggcgcgcggtatgtttatcctcgcctttatggtgctggtgattggcggttcgctgctgctgtttgccgcgcgtggacacaaagttcgctcacgcgtaaacaatgcgctgtggtcgcgggaatctttgctgttagcgaacaacgttttgctggtcgccgcgatgctggtggtgttgctggggacgttgctgccgctggtgcacaagcaactgggactgggcagtatttcgattggcgaaccgttcttcaacaccatgtttacctggctgatggtgccgtttgcgctactgcttggtgtcggccctctggtgcgctggggacgcgatcgcccacgaaaaatccgcagtttgttgattatcgccttcatctctacgctggtgctgtcgctgctgttgccgtggctgttcgaaagcaaagttgtggcgatgacggtgctcggcctggcaatggcctgctggattgcggtgctggcaattgcggaagctgcgctgcgtatttcacgcggcacgaaaaccaccttcagttattgggggatggtggcagctcacctggggctggcagtgacaattgttggcattgcttttagtcagaactatagcgttgagcgtgatgtgcgcatgaagtccggcgatagcgtcgatattcatgaatatcgcttcaccttccgtgatgtcaaagaagtgactggtccaaactggcgtggcggtgtggcgactatcggcgtaacgcgagatggcaagccggaaacagtgctgtatgcagaaaaacgttattacaacactgccgggtcgatgatgaccgaagcggcgattgacggtggcatcacgcgtgacctgtacgcggcactcggtgaagagctggaaaacggcgcgtgggccgtgcgtctttactacaaaccatttgttcgctggatttgggcgggcgggctgatgatggcgttgggcggactgctgtgtctgtttgatcctcgctatcgtaagcgcgtgaacccgcagaaaactgcgccggaggctgtatga

SEQ ID NO: 530 - DNA, 480 bp, Escherichia coli
atgaatattcgccgtaaaaaccgcttgtggattgcctgtgccgtgctggcggggctggcgctgactatcggtctggtgctatatgcgctgcgctcgaatatcgatctcttttatacgccgggggagattctctacggcaagcgtgaaactcagcagatgccggaagtcggtcagcgtctgcgcgttggcgggatggtgatgccggggagtgtgcagcgcgatcccaattcgctaaaagtaactttcaccatttacgacgctgaaggttcagtagatgtctcttacgaaggcattttgccggatctgttccgtgaagggcagggcgttgtggtgcagggcgaactggaaaaaggcaatcatatcctcgcgaaagaagtgctggcgaaacacgatgaaaactacacgccgccagaagttgagaaagcgatggaagctaaccaccgtcgcccggcgagtgtttataaggacccagcatcatga

SEQ ID NO: 531 - DNA, 210 bp, Escherichia coli
atgacccctgcatttgcttcctggaatgaatttttcgcaatgggcggttacgccttttttgtctggctggcggtggtgatgaccgttattccgctggtggttttagtcgtgcactcggtgatgcagcatcgtgcaattctgcgtggcgtggcgcaacagcgggcgcgtgaggcgcgtttacgtgctgcgcaacagcaggaggctgcatga

SEQ ID NO: 532 - DNA, 738 bp, Escherichia coli
atgtggaaaacactgcatcaactggcgatcccaccacggctgtatcaaatctgtggctggtttataccgtggctggcaattgccagtgtggtcgtgcttaccgtcggctggatctgggggttcggctttgctccggctgattatcagcagggaaatagctaccgcattatctacctgcatgtgcctgcggcgatctggtcgatgggcatttatgcatcaatggcggtggcagcgtttattggcctggtctggcagatgaaaatggccaacctggcggtggcggcgatggcccccattggtgccgtgtttacctttattgccctggttaccggctctgcatggggaaaaccgatgtggggcacctggtgggtatgggatgcacgtctgacttctgaactggtgctgctgtttctgtatgttggtgtcattgccctgtggcacgccttcgacgaccgtcgtctggctggccgtgcggcaggtatcctggtgctgattggcgtggtgaatctgccgattattcattactccgtggagtggtggaacaccctgcatcagggatcaacgcgaatgcagcaaagtatcgatccggcgatgcgttcgccgctgcgctggtcgatttttggcttcctgttgctgtctgccacgctgacgctgatgcggatgcgtaatttgattttgctgatggaaaaacgccgtccgtgggtgagtgaactgatactgaaaagaggccgtaaatga

SEQ ID NO: 533 - DNA, 663 bp, Escherichia coli
atgatgttctggcgcattttccgtcttgagctgcgcgtagcgtttcgccatagcgccgaaatcgccaacccgctgtggttcttcctgattgtaattaccctttttccgctcagtatcggtccggagccgcaactgctggcgcgtattgcgccgggcattatctgggttgccgcgctgctttcatccttgctggcactcgagcgactgttccgtgacgatttgcaggacggcagtcttgaacaattgatgttgttgccgttacccttgcccgccgctgtgttggcgaaggtgatggcgcactggatggtaaccggtctgccgttactcatcctttcgcccctggtagcaatgctactgggaatggatgtttatggctggcaagtgatggcgttaacgctactgctgggaacccctacgcttggctttcttggtgcgccgggcgtggcgctgacagtgggacttaagcgcggtggtgtgctgctcagcatactggtgttaccgctgactatcccattactcatctttgccaccgccgcgatggacgcggcttctatgcatttgcccgttgatgggtatctggcaattttaggcgcgttgctggcaggcaccgcgacattaagtccttttgcgacggcggcagcgttacgaatcagcattcaataa

SEQ ID NO: 534 - DNA, 618 bp, Escherichia coli
atgcttgaagccagagagttactttgcgagcgggatgaacgaaccttatttagtggtttatcatttacgctgaacgcaggagagtgggtacaaatcaccggtagcaacggcgcggggaagacaacgcttctccgtttgctgacggggttgtctcgccctgacgcaggcgaggttctctggcaagggcagcccttgcatcaggtacgcgacagctaccatcaaaacctgttatggataggccatcagccggggatcaaaacccggctgacggcgttagaaaatctgcacttttatcatcgcgatggcgataccgcacaatgtctggaagccctggcgcaggccgggcttgccggattcgaagatattcctgtaaatcaactttctgccgggcaacaacgccgcgtcgctttagcgcgtctgtggctgacccgtgccacgttatggatactcgacgagccttttaccgcgattgacgttaacggcgtcgatcgtctgacccagcgtatggcgcagcatacggagcagggggggattgtgattctgactacccaccagccgctcaacgttgctgaaagtaaaattcgccgcatttcactgacgcaaacgggggccgcatga

SEQ ID NO: 535 - DNA, 603 bp, Escherichia coli
atgggaaattctgaccgtaagcctggtctgattaagcgcctgtggaaatggtggcgtacccccagccgtctggcgctagggacgctgctgttgatcggttttgtcggcggcatcgtcttctggggcggctttaacaccgggatggaaaaagccaataccgaggagttctgcattagctgccacgaaatgcgtaacacggtgtatcaggaatacatggattccgtgcactacaacaaccgtagcggcgttcgtgcgacctgtccggattgtcacgttccgcacgagtttgtgccgaagatgatacgcaagctcaaagcaagtaaagagctgtatggtaaaatttttggcgttattgacacgccgcagaaatttgaagctcatcgcctgacgatggcacagaatgagtggcggcgcatgaaggacaacaactcgcaggagtgccgtaactgtcacaacttcgagtatatggatacaaccgcccagaaatcggttgccgcgaagatgcatgaccaggcggtgaaagatgggcaaacctgtattgattgccataaagggatagcgcacaagctgcccgacatgcgtgaagtcgagccaggtttttaa

SEQ ID NO: 536 - DNA, 450 bp, Escherichia coli
atgaaaagccatgacctgaagaaagcgctgtgtcaatggacggcgatgctggccctggtggtaagcggcgcggtttgggcggctaatggcgtcgattttagccagtcgccggaagtatccgggacgcaggaaggggccattcggatgccaaaagagcaggatcggatgccgctgaactatgtgaatcagccgccaatgatcccgcatagcgttgaaggttatcaggtaacgaccaataccaaccgctgcttgcagtgccacggtgtcgaaagttatcgcaccactggcgcgccgcgcattagtcctactcactttatggacagcgacggcaaagtgggcgcggaagtggctccgcgtcgttatttctgtctgcaatgtcacgtaccgcaggccgataccgcgccaatcgtggggaatacctttaccccatcaaaaggttacgggaaataa

SEQ ID NO: 537 - DNA, 864 bp, Escherichia coli
atggcaaatcgtaaacgtgacgccgggcgcgaggcgctggagaaaaaaggctggtggcgcagtcaccgttggttagtgttacgtcgcctttgtcagttcttcgtgctggggatgtttttgagcggtccgtggtttggtgtgtggatcttgcacggcaactacagcagtagcctgttattcgacaccgttccactgaccgatccgctgatgacactgcaaagtcttgccagcggtcatctgcctgccacggtggcgttgaccggtgcggtgattatcaccgtgctctacgccctggcaggaaagcgattattttgcagctgggtctgtccgctgaacccgattaccgacttagcaaattggttacgcagacgatttgacctcaatcagtctgcgacgatccctcgccatattcgctacgtgctgttggtggtcattctggtgggatcggccttaactggcacgctcatctgggaatggatcaaccctgtttctctgatggggcgtagcctggtaatgggcttcggcagcggcgcgctgcttattctcgcgctgtttttatttgatctactggtcgttgaacacggctggtgcgggcacatttgtccggttggtgcactgtatggcgtgctgggtagcaaaggtgtgattaccgttgcggccaccgatcggcagaaatgtaaccgctgtatggattgttttcatgtttgcccggaaccgcatgtgctacgtgccccggtgctggatgaacaaagcccggtgcaggtcaccagccgcgattgcatgacgtgcggtcgctgcgtggatgtctgttctgaggatgtatttacaataactacacgatggagttcgggagcgaaatcatga

SEQ ID NO: 538 - DNA, 696 bp, Escherichia coli
atgtcccggtcagcgaaacctcaaaatggtcgccgccgctttctgcgcgatgtcgttcgcacagcaggcgggctggctgccgtgggtgtggcgctggggttacaacagcaaaccgcacgcgcatctggcgtgcggttgcgcccgcccggagccataaacgagaacgcctttgccagtgcctgtgtgcgttgcggtcagtgtgttcaggcttgcccttacgacaccttaaaactggcgaccctggcctctggtctgtcggcgggcacgccatattttgtcgcacgggatattccttgcgaaatgtgtgaggacattccgtgcgccaaagtgtgcccgagcggtgcgctggatcgtgagatcgaatcgatcgacgacgcgcggatggggctggcggtactggtggaccaggaaaactgtctcaactttcaggggctgcgctgcgatgtttgttatcgcgaatgcccgaaaattgatgaggccatcaccctggagctggagcgcaacacgcgtaccggtaagcacgcccgctttctgccgacggttcacagcgacgcctgtaccggctgcggtaagtgcgaaaaagtgtgcgtgctggaacaaccggcaattaaggtgttaccgctgtcactggcaaaaggggagttaggtcaccattaccgcttcggctggctggaggggaacaatggcaaatcgtaa

SEQ ID NO: 539 - DNA, 2487 bp, Escherichia coli
atgaaactcagtcgtcgtagctttatgaaagctaacgccgttgcggccgctgcggcggctgccggtctcagcgtgccgggcgttgcccgcgccgttgttggtcagcaggaagccattaaatgggataaagcgccgtgccgtttctgcggtacgggttgcggcgttctggtcggaacgcagcaggggcgtgtggtggcctgtcagggcgacccggacgcaccggttaaccgtggcctgaactgcattaagggctatttcctgcccaaaatcatgtacggtaaagaccgtttgacgcagccgctgctgcgtatgaaaaacggtaaatatgacaaagaaggcgaatttaccccaatcacctgggatcaggccttcgatgtgatggaagagaaatttaagactgccctgaaagaaaaagggccggaatcgatcggtatgttcggttctggtcagtggactatctgggaaggttatgccgcgtccaagctgtttaaagcgggcttccgttcgaacaacatcgacccgaacgcgcgtcactgtatggcgtcggcagtagttggctttatgcgtacctttggtatggatgagccgatgggctgctatgacgacatcgagcaggctgacgcgtttgtgctgtggggctccaacatggcggagatgcacccgatcctctggtcgcgcatcactaaccgtcgtctttctaaccagaacgtcaccgtggcggtgctttctacctaccagcatcgtagcttcgagctggcggataacggcatcatctttacgccgcaatctgacctggtgatcctgaactatatcgccaactatatcattcaaaacaatgcgataaatcaggacttcttcagcaaacacgttaacctgcgcaaaggagcgacggacatcggctacggtttacgtccgacccatccgctggaaaaagcagcgaagaatccgggttctgacgcctccgaaccaatgagctttgaagattacaaagccttcgttgctgaatatacgctggaaaaaaccgccgaaatgaccggcgtgccgaaagaccagttagaacaactggcgcagctgtatgccgatccgaacaagaaagtcatctcctactggacgatgggcttcaaccagcatacccgtggtgtgtgggccaacaacctggtctacaacctgcacctgctgaccggcaaaatttcccagccgggttgcggtccgttctccctgaccgggcagccttccgcgtgtggtactgcgcgtgaagtgggcacctttgctcaccgtctgcctgcggacatggtggtgactaacgagaaacatcgtgatatttgcgagaagaagtggaatatcccgagtggcaccattccggcgaaaatcggtctgcacgcggtggcacaagaccgtgcgctgaaagacggcaaactgaatgtttactggaccatgtgtaccaataacatgcaggccggaccgaacattaatgaagagcgtatgccgggctggcgcgatccgcgcaactttatcatcgtttccgatccgtatccgacggtcagtgcgctggcagcggacttgatcctgccgaccgcaatgtgggtagagaaagagggcgcttacggtaatgccgaacgccgtactcagttctggcgtcagcaggtacaggcaccgggtgaagcaaaatcggatctctggcagttagttcagttctcccgtcgcttcaaaactgaagaagtgtggccggaagagctgctggcgaagaaaccagaactgcgtggcaaaacactgtacgacgttctgtatgccactccggaagtgagcaaattcccggtatccgaactggcggaagatcagctgaacgatgaatcccgcgagctgggcttctatctgcaaaaagggctgttcgaagagtacgcatggtttggtcgcggtcacggtcacgatctcgcgccgttcgatgactaccacaaagcacgcggtctgcgctggccggtggtgaacggtaaagaaacgcagtggcgttacagcgaaggtaacgacccgtacgtgaaagcgggcgaaggctacaagttctacggtaaaccggatggcaaagcggtgatcttcgcgctgccgttcgaacctgcggcggaagcaccggatgaagagtacgacctgtggctatctaccggacgcgtcctggagcactggcataccggcagtatgactcgccgtgtaccggaactgcaccgcgccttcccggaagcggttctgtttattcacccgctggatgcgaaagcgcgcgatctgcgccgtggcgacaaagtgaaagtggtttctcgccgtggcgaagtgatctcgattgtcgaaacgcgcggccgtaaccgtccgccgcagggcctggtgtacatgccgttcttcgacgccgcacagctggttaacaaactgacgctggatgcgaccgatccgctctcgaaagagacggacttcaagaagtgcgcggtcaaactggagaaggtgtaa

SEQ ID NO: 540 - DNA, 264 bp, Escherichia coli
atgcacactaactggcaagtttgcagcctggtcgtgcaggccaaaagcgaacgaatttcagacatcagcacccaactgaacgcctttaccggctgtgaagttgctgtcagcgacgcgccgagcggtcagttgattgtggtggtggaagcagaagacagcgaaacgctgatccaaaccattgagtcagtacgcaacgtagagggcgtgctggcggtgtcgctggtttatcaccagcaggaagagcaaggtgaggaaacaccatga

SEQ ID NO: 541 - DNA, 495 bp, Escherichia coli
gtgaagattgatgcatcccgtcggggcatactcactggtcgctggcgcaaagccagtaacggtatccgtccgccctggtccggtgatgaatctcattttctgacccattgcacccgctgcgacgcctgtattaatgcttgtgaaaacaacattctgcaacgcggcgcgggtggctatccgagcgttaatttcaaaaataacgagtgcagcttctgttacgcctgcgcgcaggcttgccccgaatcgctattttctccgcgccacaccagggcctgggatttgcagttcaccattggggacgcgtgcctggcgtatcagtcagttgaatgccgccgctgtcaggatagctgtgagccaatggcaattatctttcgcccgacgctctccgggatctaccagccgcaacttaatagccaactttgcaacggatgtggagcatgtgcagccagctgtccggtatcagccataactgcggagtatctccatgcacactaa

SEQ ID NO: 542 - DNA, 165 bp, Escherichia coli
atgcataccccgatcggggtaaaacctgtagcaggatcaaaagagtggcgggaagcgtggcaaaaacgggcttttgctcacatttcaaatggttataaacatatttatatagcgattaattcgccagagatatttctgctggtttgttttctcatcagaatttaa

SEQ ID NO: 543 - DNA, 489 bp, Escherichia coli
atgaagaccattctacctgcagtattgtttgccgctttcgccaccacttccgcctgggcggcagaaagcgtccagccactggaaaaaatcgcaccttatccacaagctgaaaaaggcatgaagcgtcaggtgattcagttaactccgcaagaagatgaatctaccctgaaagtagaactgttaatcggtcagacgctggaagtcgactgcaatttgcatcgtctcggcgggaagctggaaagcaaaacgctggaaggctggggctatgattattatgtctttgataaagttagctcgccggtttccacgatgatggcctgcccggatggcaagaaagagaagaaatttgtcaccgcgtatctgggcgatgctggaatgctgcgttacaacagcaagctgccgatcgtggtgtatacgccagacaatgtggatgtgaagtaccgtgtctggaaggcggaagagaaaattgacaacgcggttgttcgctaa

SEQ ID NO: 544 - DNA, 1647 bp, Escherichia coli
atgaaaaaagtgactgccatgctcttctcgatggccgtggggcttaatgccgtttcgatggcggcaaaagcgaaagcgtccgaggagcaggaaactgatgtactgttgattggcggcggcattatgagcgccacgttggggacctatttacgcgagctggagcctgaatggtcgatgaccatggtggagcgcctggaaggtgtcgcgcaggagagttcgaacggctggaacaacgccggaaccgggcattctgcactgatggaactcaattacaccccgcaaaatgccgacggcagcatcagtattgaaaaagcagtcgccattaacgaagcatttcagatttcccgccagttctgggcgcaccaggtcgagcgcggcgtgctgcgtacaccgcgttcatttatcaataccgttccgcatatgagctttgtctggggcgaggataatgttaatttcctgcgagcccgttacgccgcgttgcaacaaagctcgctgtttcgcggtatgcgttactctgaagatcacgcgcagatcaaagagtgggcaccgttagtgatggaagggcgcgatccgcaacagaaagtggcagccacgcgtacggaaattggcactgatgtgaactatggcgagatcacccgccagttgatcgcctccttacagaagaaatctaacttctcgctgcaactcagcagcgaagtccgcgccctaaagcgtaatgacgataacagctggaccgtcaccgttgccgatctgaaaaacggcactgcacagaacatccgcgccaaatttgtctttatcggcgcgggcggtgcggcgctgaaactgttacaggaatcggggattccggaggcgaaagactacgccggtttcccggtgggcggacagttccttgtttcggaaaacccggacgtggttaatcaccatctggcgaaggtttacggtaaagcatccgttggcgcaccaccgatgtcggttccgcatatcgatacccgtgttcttgacggtaaacgcgtagtgctgtttgggccatttgccaccttctcaaccaaattcctcaaaaacggttcattatgggatctgatgagttccaccaccacctctaacgtgatgccgatgatgcacgttgggctggataatttcgatctggtgaaatatctggtgagtcaggtgatgttgagtgaagaggatcgttttgaagcgttgaaagagtactatccgcaggcgaaaaaagaggactggcgtttgtggcaagcggggcagcgcgtgcagattatcaagcgtgatgccgataaaggtggcgtactgcgtctgggtactgaagtcgtcagtgaccagcaagggaccattgccgcgctcctgggggcatcgccaggggcgtcaaccgccgcgccgattatgttgaatctgctggaaaaagtatttggcgatcgcgtttccagcccgcaatggcaggctacgttgaaagcgatcgttccgtcttatggacgcaagctgaacggtgatgtagcggcaacagaacgcgagttgcagtacaccagcgaagtgctggggctgaaatacgacaagccgcaggcagcagatagtacgccgaaaccgcagttgaaaccgcaacccgttcaaaaagaagtggcggatattgcgttgtaa

SEQ ID NO: 545 - DNA, 1644 bp, Escherichia coli
atggaacttcttgtacttgtctggcggcagtatcgctggccatttattagtgtgatggcgctaagcctcgccagtgcggcattaggcattggcttaattgcttttatcaatcagcgccttatcgaaacggcggataccagtctgctggtgttgccggagtttctgggattattgctgctgttgatggccgtcactctcggatcgcaactggcgctcaccactttggggcatcacttcgtttaccgactgcgtagtgaatttatcaagcggattctggatacccatgtcgagcgcattgaacaacttggtggcgcctcgttgctggcggggttaaccagcgatgtgcgcaatatcaccattgcttttgtgcgtctgccggaactggtgcaggggatcattctcactatcggttcagcggcgtatttgtggatgctgtcgggcaaaatgttgctggtaacggctatctggatggcagtcaccatctggggtggttttatactggtggcgcgggtgtacaaacatatggcgaccctgcgtgaaaccgaagataagctgtacacggattttcaaaccgtactcgaagggcgcaaagagctgactctgaaccgtgaacgcgccgagtatgtgtttaacaacctctacattcctgatgcgcaagagtatcgccatcatattattcgcgcagacaccttccatcttagtgccgtgaactggtcaaacatcatgatgctgggcgctatcggcctggtgttctggatggcgaacagtctcggttgggctgataccaacgttgctgcgacctattcgttgacgctgttattcctgcgtacgccgctgctttcggcggttggcgcattgccgacgctgctgacggcgcaggtggcgtttaacaagctgaacaaattcgcgctcgcgcctttcaaagcagagtttccgcgcccgcaggcttttcccaactggcaaacgctggagctgcgtaacgtgacgtttgcttatcaggataacgcgttttccgttgggccgattaacctcaccatcaaacgtggtgaactgctgtttctgattggtggcaacggtagtggaaaatcgacgctggcgatgttgctgacgggcttgtaccaaccacaaagcggcgaaatcttgctggatggcaaacctgtcagcggcgaacaaccggaagattatcgaaaactgttttcggcagtgtttaccgatgtctggctgtttgatcaactgctggggccggaggggcaacccgctaacccgcaactggttgagaagtggttggcgcagctgaaaatggctcataagcttgagttaagcaacgggcgtattgttaacctgaagttatcaaaagggcagaaaaaacgcgtggcgctgttgctggcgctggcagaagaacgcgatattatcctgctggatgaatgggcggcggatcaggacccacacttccgtcgtgagttttatcaggtgctgctgccgctgatgcaggagatgggtaaaactattttcgccatcagtcatgatgatcattactttatccacgccgaccgcctgctggaaatgcgcaacgggcaacttagcgagctgacaggcgaagagcgcgatgctgcttcgcgtgatgccgttgcccggacggcataa

SEQ ID NO: 546 - DNA, 651 bp, Escherichia coli
atgttggatctgtttgctgatgctgaaccgtggcaagagccactggcggctggagcggtgattttacggcgttttgcttttaacgctgcggagcaactgatccgcgatattaatgacgttgccagccagtcgccgtttcgccagatggtcactccaggcggatataccatgtcggtggcgatgaccaactgtgggcatctgggctggacgacccatcggcaaggttatctctattcgcccattgatccgcaaacaaataaaccgtggcccgccatgccgcagagttttcatcatttatgtcaacgtgcggctacggcggcgggctatccagatttccagccagatgcctgtttgatcaaccgctacgttcctggcgcgaaactgtcgctgcatcaggataaagacgaaccggatctgcgcgcgccaattgtttctgtttctctgggcttacccgcgatttttcaatttggcggcctgaaacgaaatgatccgctcaaacgtttgttgttggaacatggcgatgtggtggtatgggggggtgagtcgcggctgttttatcatggcattcaaccgttgaaagtgggggttcatccactcaccaccgactgccgctacaacctgacattccgtcaggcaggtaaaaaagaataa

SEQ ID NO: 547 - DNA, 1065 bp, Escherichia coli
atgaaatacgccacatgcttaactgacgatcaacgctggcaatctgtcttagcccgcgactcgaatgccgacggcgaattcgttttcgccgtgcgcaccacgggtatcttttgccgtccgtcttgccgagccagacatgccttgcgggaaaatgtctccttctacgcaaatgccagcgaggcgcttgccgctggctttcgtccctgcaaacgttgtcagccagacaaagccaatccccggcaacatcgccttgataaaattacccacgcctgccgacttctggaacaggaaacgcctgtaacgctggaagccttagccgaccaggtggcgatgagtccatttcatttgcatcggttgtttaaagcgactaccggaatgacgcctaaagcctggcaacaggcctggcgcgctcgccgtttgcgcgaattgctggcgaaaggggagagcgtgactacatctattcttaacgccggattccccgacagcagcagttactaccgcaaagccgacgaaacgctgggcatgacggctaaacaattccgtcacggtggcgaaaatctggcggtgcgttacgcgctggctgattgtgagctgggccgttgcctggtggcagaaagtgagcgggggatttgcgcgatattactgggcgatgatgacgcgacactaatcagcgagttacagcagatgtttcccgctgccgacagcgcgcctgccgatcttacgtttcagcaacatgtgcgtgaagtgatcgccagcctcaatcaacgcgatacgccgctgacgttaccactggacattcgcggcactgcttttcagcaacaagtctggcaggcactgcgcacgataccttgcggtgaaaccgtcagttatcagcaactggctaacgccattggcaaaccgaaagcggtacgggccgttgccagcgcctgtgccgccaacaagctagctatcgttataccttgtcatcgggtggtccgtggtgatggcacactttccggttaccgctggggcgtgtcgcgcaaagcgcaactgctgcgccgcgaagctgaaaatgaggaaaggtaa

SEQ ID NO: 548 - DNA, 1056 bp, Escherichia coli
atggaaataagctttacccgcgtggcactgctggctgccgcgctcttctttgttggttgcgatcaaaaaccacaacccgccaaaacccacgctactgaagttaccgttcttgaaggcaaaaccatgggtaccttctggcgtgccagcatcccgggcattgacgccaaacgcagtgccgaacttaaagaaaagattcacacccagctggacgctgacgatcagctgctttcgacctataaaaaagattccgcgctgatgcgctttaacgactcgcaaagtttgtctccgtggccggtaagtgaagcgatggccgatatcgtcaccacctcgctgcgcattggcgcgaagaccgatggcgcgatggatataaccgtcgggccgctggtgaatctgtggggttttggcccggaacaacagccggttcaaattccgagccaggaacagatcgatgcgatgaaagccaaaaccggcttacagcacctgacggtgattaatcagtcgcgtcagcaatacctgcaaaaagacctgccggatttatatgtcgatctctctaccgtcggcgaaggttatgcggcggatcacctggcacgcttgatggagcaggaagggatttcccgctatctggtgtcggtgggcggcgcgctgaacagccgtggtatgaacggtgcaggccagccgtggcgggtggcgattcaaaaaccaaccgataaagaaaacgcggttcaggccgtggtggatatcaacggtcatgggattagtacctctggcagctaccgtaactattacgaactggacggcaaacgtctttctcatgttatcgatccgcaaaccgggcgtcctatcgaacacaatctggtatccgtgacggtgattgccccgacggcgctggaagccgatgcctgggatactggcttaatggtactcggaccggagaaagccaaagaggttgttcgccgggaagggctggcggtttatatgatcaccaaagagggcgatagctttaaaacctggatgtcgccgcagtttaaaagcttccttatcagcgaaaaaaattaa

SEQ ID NO: 549 - DNA, 1131 bp, Escherichia coli
atgaaagttaaagtactgtccctcctggtcccagctctgctggtagcaggcgcagcaaacgctgctgaagtttacaacaaagacggcaacaaattagatctgtacggtaaagtagacggcctgcactatttctctgacgacaagtctgtagatggcgaccagacctacatgcgtcttggcttcaaaggtgaaactcaggttactgaccaactgaccggttacggccagtgggaatatcagatccagggcaacagcgctgaaaacgaaaacaactcctggacccgtgtggcattcgcaggtctgaaattccaggatgtgggttctttcgactacggtcgtaactacggcgttgtttatgacgtaacttcctggaccgacgtcctgccagaattcggtggcgacacttacggttctgacaacttcatgcagcagcgtggtaacggcttcgcgacctaccgtaacaccgacttcttcggtctggttgacggcctgaactttgctgttcagtaccagggtaaaaacggtagcgtagatggcgaaggcatgaccaacaacggtcgtggtgctctgcgtcagaacggcgacggcgttggcggttctatcacttatgattacgaaggcttcggtatcggtgctgcagtgtccagctccaaacgtactgacgctcagaatggtacctatgtaagcgacaataatgtggtccgtaactacatcggtactggtgaccgtgctgaaacctacactggcggtctgaaatacgacgctaacaacatctacctggctgctcagtacacccagacctacaacgcaactcgcgtaggttccctgggttgggcgaacaaagcacagaacttcgaagctgttgctcagtaccagttcgacttcggtctgcgtccgtcactggcttacctgcagtctaaaggtaaaaacctgggtgtcatcaatggccgtaactacgacgacgaagatatcctgaaatatgttgatgttggtgcgacctactacttcaacaaaaacatgtccacctacgttgactacaaaatcaacctgctggacgacaaccagttcactcgtgacgctggcatcaacactgataacatcgtagctctgggtctggtttaccagttctaa

SEQ ID NO: 550 - DNA, 2673 bp, Escherichia coli
atgcgtcagaaagagacaacggccacgacccgcttttcactcctaccggggagcattacccgcttctttttactgttgatcattgtgttactggtgacgatgggtgtaatggtacaaagcgccgttaacgcctggctgaaagataaaagttaccagattgtcgacattacccacgcaatccaaaagcgcgtcgatacctggcgttacgtgacctggcagatctacgacaacattgccgcgacgacctccccctcctccggcgaaggtttacaagagacgcgcctgaaacaggatgtctactatctggaaaaaccacgccgcaaaacggaagccttaatctttggctctcacgacaactcaacgcttgagatgactcaacggatgtccacctatctggacacattgtggggcgcagaaaatgtaccgtggtcgatgtattacctgaatggtcaggataacagtctggtgctgatctcaaccctgcccctcaaagatctcacctccggatttaaagaatcgaccgtcagcgacattgttgattcacgtcgtgcagagatgttgcaacaggccaacgccctcgatgaacgcgaaagtttttctaacatgcgccgcctggcctggcagaacggtcattattttaccttgcgtaccacgttcaaccagccgggacatctggcaacggtcgtggcttttgatctgccgattaatgatttgatcccaccgggtatgccgctggacagtttccgccttgagccagacgcgacggcaacgggaaacaatgaaaatgagaaagaagggacggatagcgtcagtatccactttaacagtacgaagattgaaatctcctcggcactcaactctaccgatatgcgcctggtctggcaggttccttacggcaccttactgctggatacgttgcaaaacattctgctgccactgctgctgaacatcggtttgctggcgctggcgttatttggctataccacattccgccatttctccagccgcagtacagaaagcgtccccagcacggcggtcaataacgaattgcgcattttacgggcaattaatgaagagatagtctcactgctgccgctcggcctgctggttcacgatcaggaatcaaaccgcacggtcataagtaacaaaattgccgatcatttgctgccgcatttgaatctgcaaaacatcactaccatggcggagcagcatcaggggattattcaggcgacgatcaataacgagctgtatgagatccgcatgtttcgcagccaggttgcgccgcgcatacaaattttcattattcgcgatcaggatcgcgaagtgctggtaaacaagaaactcaagcaggcgcagcgtctgtatgagaaaaaccagcaggggcggatgacctttatgaaaaacattggcgatgcgctgaaagaacccgcacagtccctggcggagagcgcggctaaactcaacgccccggaaggcaaacaactggcgaatcaggcagatgtgctggtgcggctggtcgatgaaatacagttagcgaacatgcttgcggacgatagctggaaaagtgagacggagctgttctccgtgcaggatttaattgatgaagttgtgccttcagtgttgcctgccatcaagcgtaaaggtctgcaactgctgattaacaatcatctgaaagcacacgatatgcgccgcggcgatcgcgatgccttacgacgtattttgctactactgatgcaatatgccgtgacctcaacgcaattgggaaaaatcacccttgaggttgatcaggatgagtcctccgaagaccgcctgacgttccgcattctggacactggagaaggcgtaagcattcatgaaatggataatttgcacttcccgtttatcaaccagacccaaaacgatcgctatggcaaggcggacccgctggcattctggctgagcgatcaactggcgcgtaaactgggcggtcatttaaacatcaaaacgcgggatgggcttggtacacgctactctgtgcatatcaaaatgctcgcagctgacccggaagttgaagaggaagaagagcgattactggatgatgtctgcgtaatggtggatgttacttcggcagaaattcggaatattgtcactcgccagttagaaaattggggtgcaacctgtatcacacctgatgaaagattaattagtcaagattatgatatctttttaacggataatccgtctaatcttactgcctctggcttgcttttaagcgatgatgagtctggcgtacgggaaattgggcctggtcaattgtgcgtcaatttcaatatgagcaacgctatgcaggaagcggtcttacaattaattgaagtgcaactggcgcaggaagaggtgacagaatcgcctctgggcggagatgaaaatgcgcaactccatgccagcggctattatgcgctctttgtagacacagtaccggatgatgttaagaggctatatactgaagcagcaaccagtgactttgctgcgttagcccaaacggctcatcgtcttaaaggcgtatttgccatgctaaatctggtacccggcaagcagttatgtgaaacgctggaacatctgattcgtgagaaggatgttccaggaatagaaaaatacatcagcgacattgacagttatgtcaagagcttgctgtag

SEQ ID NO: 551 - DNA, 651 bp, Escherichia coli
atgaacaatatgaacgtaattattgccgatgaccatccgatagtcttgttcggtattcgcaaatcacttgagcaaattgagtgggtgaatgttgtcggcgaatttgaagactctacagcactgatcaacaacttgccgaaactggatgcacatgtgttgattaccgatctctccatgcctggcgataagtacggcgatggcattaccttaatcaagtacatcaagcgccatttcccaagcctgtcgatcattgttctgaccatgaacaacaacccggcgattcttagtgcggtattggatctggatatcgaagggatcgtgctgaaacaaggtgcaccgaccgatctgccgaaagctctcgccgcgctgcagaaagggaagaaatttaccccggaaagcgtttctcgcctgttggaaaaaatcagtgctggtggttatggtgacaagcgtctctcgccaaaagagagtgaagttctgcgcctgtttgcggaaggcttcctggtgaccgagatcgctaaaaagctgaaccgcagtattaaaaccatcagtagccagaagaaatctgcgatgatgaagctgggtgtcgagaacgatattgctctgctgaattatctctcttctgtgacgttaagtccggcagataaagactaa

SEQ ID NO: 552 - DNA, 2850 bp, Escherichia coli
ttgaaataccttgcttcttttcgtacaaccctgaaagcctcgcgctacatgttcagagcattggcgttagtgctctggctgttgattgctttttcatccgttttttacatcgttaatgcgttacatcagcgagaatcggaaattcgtcaggaatttaatctgagttccgatcaggctcagcgctttattcaacgcacctctgatgtgatgaaagagctgaagtacatcgccgaaaatcgcttatcggcagaaaacggtgtgctttccccgcgtggacgagaaacgcagacggatgtgcctgcgtttgaaccgctgtttgctgactctgattgttccgcaatgagtaacacctggcgaggttctctggagtcattggcgtggtttatgcgctactggcgcgataatttttctgcggcttacgatctcaaccgggtatttttaatcggcagcgataacctctgcatggccaatttcggtctgcgtgatatgccagtggaacgcgataccgcgctaaaagctttgcatgaacgcattaataaatatcgaaatgcaccacaagatgatagtggcagtaacctctactggatcagcgaaggtccgcgccctggcgtcgggtatttttacgcgttgacgcctgtttatctggcgaaccggttgcaggcgcttttgggtgtcgagcagaccatccggatggagaactttttcttacctggtacgttgccgatgggggttaccattcttgatgaaaatggtcataccctgatttcgcttaccggaccagaaagcaaaattaagggcgatcctcgctggatgcaggaacgctcctggtttggctatacggaagggttccgggagctggtgctgaagaaaaatctgccaccctcatcgctaagcatcgtgtattcggtgccggttgataaggtgctggaacgcattcgcatgttgatccttaacgcaattttgctgaatgtgcttgccggagctgcattgtttactctcgcgcggatgtacgagcggcgtattttcattccggcggaaagcgacgccctgcgactggaagaacatgagcagtttaatcgcaagattgtcgcctccgcgccagtgggtatctgcattttgcgtaccgctgatggcgtcaatattttaagtaacgaactggcgcatacctatctcaatatgcttacgcatgaggaccgccaacggctgacacaaattatctgtgggcagcaggtcaattttgttgatgtcctgaccagcaacaataccaatctgcaaatcagcttcgtccattcgcgctatcgtaatgaaaacgtggccatttgtgtgctggtggatgtttcttcgcgcgtgaagatggaagagtcgttgcaggagatggcacaagcagcggaacaggcgagccagtcaaaatcgatgttcctggccaccgtcagtcatgagctgcgaacgccgctgtatggcattatcggtaacctggatctgttgcaaaccaaagagttaccgaaaggcgtcgatcgtctggtgacggcaatgaacaactcttccagcctgttgttgaaaattatcagcgatattctcgatttctcgaaaattgaatcagaacagttgaagatcgaaccgcgtgagttttcaccgcgtgaagtgatgaaccacatcaccgccaactatttaccgctggtggtacgcaagcagttaggcttgtactgctttattgaaccggatgtgccagtggccttaaatggcgacccgatgcgtttacagcaggtcatctccaacctgttgagtaacgccataaaattcaccgataccggctgtatagttttgcatgttcgcgctgatggcgattatctctctatccgtgttcgcgataccggcgtggggataccggcgaaagaagtggtgcgtttgtttgatcccttcttccaggtcggaacgggcgtacagcgtaacttccaggggactggtctgggtctggcgatttgtgaaaaactgatcagcatgatggacggcgacatctcggtagattcagaaccgggaatgggcagccagtttaccgtgcgtattccgttgtacggcgctcagtatccgcagaaaaaaggcgtggaagggttgagtggtaaacgctgctggctggcggtccgcaatgcgtcgctctgtcagttcctggaaaccagtttgcagcgcagcggcatcgtcgttacaacatacgaagggcaggaaccgactcccgaagatgtgttaatcactgacgaggtagtgagtaaaaaatggcagggcagagcggtagtgaccttctgtcgtcgccatattggtattccgctggagaaagcgccaggggagtgggtacacagtgtggctgctccgcatgagctaccggcattgttggcgcgtatttatttgatcgagatggagagcgacgatcctgctaacgctctgccgtcgacggacaaagcggtcagcgataatgacgatatgatgattctggtcgtagatgatcatccgattaaccggagtctgctggcagatcagttgggatcgttgggctatcaatgtaaaaccgcgaatgatggcgtcgatgcgcttaatgtacttaacaagaatcatattgatatcgtgcttagcgacgtcaatatgccaaatatggatggttaccgcttgacgcaacgcattcgtcagttgggactgacgttgccggtaatcggagtaactgctaatgcgttggctgaagagaagcagcggtgtctggagtccggtatggacagttgcctgtcgaagccggtaacgctggatgtgataaaacagacgctgacggtatatgccgagagggtcaggaaatcgcgggaatcgtag

SEQ ID NO: 553 - DNA, 1827 bp, Escherichia coli
atgcattatatgaagtggatttatccacgccgcttacgcaatcaaatgatcctgatggcaatcctgatggtcattgtcccaacgcttactattggttatatcgtagaaacggaaggacgttcagcagtcttatctgaaaaagagaaaaaactttctgccgtggtcaacctgcttaatcaggcgctaggcaatcgctacgatctctacatcgacttaccgcgtgaggagcgtatccgcgcattaaatgcagaacttgcccccattaccgaaaatatcactcacgccttccctggcatcggcgctggttattacaacaaaacgctggatgcgataatcacctacgcgccttcagcgctatatcagaataatgtgggcgttaccattgccgcagatcaccctggtcgcgaagtcatgcgtacaaatacccctttggtttattcaggcaggcaggtgcgcggcgatattttgaattcaatgattcccattgagcgtaatggtgaaatcctcggctatatctgggccaatgaattaaccgaagatattcgccgccaggcctggaaaatggatgtgaggattatcattgtgctcaccgccggtttgctgataagcctgctgttgattgtccttttctcccgtcgcctgagcgccaatatagatatcatcaccgatggcctctcgactctggctcaaaatattcccactcgattaccacaattgcccggtgaaatggggcaaatcagtcagagtgttaacaacctcgcccaggcactgcgtgaaacgcgaacacttaacgatctgattattgaaaacgctgccgatggcgtcattgccattgaccgccagggtgatgtaaccaccatgaacccagcagcagaagtcatcactggctatcaacgtcatgaactggtagggcagccttactccatgttgttcgacaatactcagttctacagtcccgtactggatacgctggaacatggcaccgaacatgtagcactggagatcagttttccaggccgtgaccgcaccattgaactcagtgtcacgaccagtcgtattcataacacgcacggtgaaatgataggtgctttggtgattttctctgatttaactgcccgcaaagaaacccagcgccgcatggcgcaagcagaacgcctcgccacactgggtgagctgatggctggcgtggcgcatgaagtacgtaatccgttaacggctattcgtggttatgtacagatcttgcgccaacaaacccgtgacccaatacatcaggaatatctgtccgtagtactcaaagaaatcgattcaattaacaaagttattcagcaattgctcgaattttcacgtccacgccacagtcaatggcaacaagtcagcctcaatgcattggttgaagaaactctggtactggtacaaaccgccggcgtacaagcgcgggtcgacttcataagcgaactggataatgaattaagcccgattaacgccgatcgtgaactgctcaaacaggtactactgaatatcctgatcaatgccgtccaggctatcagtgcacgagggaaaattcgcattcgaacctggcagtatagcgactcacaacaggccatttcgatagaggacaacggcagtggcattgatctctcgctgcaaaaaaagatcttcgatccctttttcactaccaaagcctcaggaaccgggcttggtctggcgttaagtcaacgcatcattaatgcccatcagggtgatattcgcgtcgccagtttgccgggctacggcgcaaccttcacgcttattttaccgatcaacccgcagggaaatcagactgtatga

SEQ ID NO: 554 - DNA, 1386 bp, Escherichia coli
atgactgctattaatcgcatccttattgtggatgatgaagataatgttcgccgtatgctgagcaccgcttttgcactacaaggattcgaaacacattgtgcgaacaacgggcgcacagcattacacctgtttgccgatattcaccctgacgtggtgttgatggatatccgcatgccagagatggacggcatcaaggcactaaaggagatgcgcagccatgagacccggacacccgttattctgatgacggcctatgctgaagtggaaaccgccgtcgaagcactacgctgcggagccttcgactatgttatcaaaccgtttgatctcgatgagttgaatttaatcgttcagcgcgctttacaactccagtcaatgaaaaaagagatccgtcatctgcaccaggcactgagcaccagctggcaatgggggcacattctcaccaacagcccggcgatgatggacatctgcaaagacaccgccaaaattgccctttctcaggccagcgtcttgattagcggtgaaagcggcactgggaaagagttgattgccagagcgattcactacaattcgcggcgggcaaaggggccgttcattaaagtcaactgcgcggcgctgccggaatcgttgctcgaaagtgaactgtttggtcatgaaaaaggtgcatttactggtgcacaaaccttgcgtcagggattatttgaacgtgccaacgaaggtactctgctcctcgacgaaattggcgaaatgccgctggtactgcaagccaaattactacgcattctgcaggaacgggaatttgaacggattggcggccatcagaccataaaagttgatatccgcatcattgctgccaccaaccgcgacttgcaggcaatggtgaaagaaggcaccttccgtgaagatctcttttatcgccttaacgttattcatttaatactgccgcctctgcgcgatcgccgggaagatatttccctgttagctaatcactttttgcaaaaattcagtagtgagaatcagcgcgatattatcgacatcgatccgatggcaatgtcactgcttaccgcctggtcatggccgggaaatattcgagagctttccaacgttattgaacgcgccgtcgtgatgaattcaggcccgatcattttttctgaggatcttccgccgcagattcgtcagccagtctgtaatgctggtgaagcaaaaacagcccctgtcggtgagcgtaatttaaaagaggaaattaaacgcgtcgaaaaacgcatcattatggaagtgctggaacaacaagaaggaaaccgaacccgcactgctttaatgctgggcatcagtcgccgtgcattgatgtataaactccaggaatacggtatcgatccggcggatgtataa

SEQ ID NO: 555 - DNA, 663 bp, Escherichia coli
atgaaaacaaaattgatgacattacaagacgccaccggcttctttcgtgacggcatgaccatcatggtgggcggatttatggggattggcactccatcccgcctggttgaagcattactggaatctggtgttcgcgacctgacattgatagccaatgataccgcgtttgttgataccggcatcggtccgctcatcgtcaatggtcgagtccgcaaagtgattgcttcacatatcggcaccaacccggaaacaggtcggcgcatgatatctggtgagatggacgtcgttctggtgccgcaaggtacgctaatcgagcaaattcgctgtggcggagctggacttggtggttttctcaccccaactggtgtcggcaccgtcgtagaggaaggcaaacagacactgacactcgacggtaaaacctggctgctcgaacgcccgctgcgcgccgacctggcgctaattcgcgctcatcgttgcgacacacttggcaacctgacctatcaccttagcgcccgcaactttaaccccctgatagcccttgcggctgatatcacgctggtagagccggatgaactggtcgaaaccggcgagctgcaacctgaccatattgtcacacctggtgccgttatcgaccacatcatcgtttcacaggagagcaaataa

SEQ ID NO: 556 - DNA, 651 bp, Escherichia coli
atggatgcgaaacaacgtattgcgcgccgtgtggcgcaagagcttcgtgatggtgacatcgttaacttaggaatcggtttacccacaatggtcgccaattatttaccggagggtattcatatcactctgcaatcggaaaacggcttcctcggtttaggcccggtcacaacagcgcatcccgatctggtgaacgctggcggacaaccgtgcggcattttacccggtgcagccatgtttgatagcgccatgtcatttgcgctaatccgtggcggtcatattgatgcctgcgtgctcggcggtttgcaagtagacgaagaagcaaacctcgcgaactgggtagtgcctgggaaaatggtgcccggtatgggtggcgcgatggatctgatgaccgggtcgcgcaaagtgatcatcgccatggaacattgcgccaaagatggttcagcaaaaattttgcgccactgcaccatgccactcactgcgcaacatgcggtgcatatgctggttactgaactggctgtctttcgttttattgacggcaaaatgtggctcaccgaaattgccgacgggtgtgatttagccaccgtgcgtgccaaaacagaagctcggtttgaagtagctgccgatctgaatacgcaacggggtgatttatga

SEQ ID NO: 557 - DNA, 1323 bp, Escherichia coli
atgattggtcgcatatcgcgttttatgacgcgttttgtcagccggtggcttcccgatccactgatctttgccatgttgctgacattgctaacattcgtgatcgcgctttggttaacaccacaaacgccgatcagcatggtgaaaatgtggggtgacggtttctggaacttgctggcgtttggtatgcagatggcgcttatcatcgttaccggtcatgcccttgccagctccgctccggtgaaaagtttgctgcgtactgccgcctccgccgcaaagacgcccgtacagggcgtcatgctggttactttcttcggttcagtcgcttgtgtcatcaactggggatttggtttggttgtcggtgcaatgttcgcccgtgaagtcgcccggcgagtacccggttctgattatccgttgctcattgcctgcgcctacattggttttctcacctggggtggcggtttctctggctcaatgcctctgttggctgcaacaccgggcaacccggttgagcatatcgccgggctgatcccggtgggcgatactctgttcagtggttttaatattttcatcactgtggcgttgattgtggtgatgccatttatcacccgcatgatgatgccaaaaccgtctgacgtggtgagtatcgatccgaaactactcatggaagaggctgattttcaaaagcaactaccgaaagatgctccaccgtccgagcgactggaagaaagccgtattctgacgttgatcatcggcgcactcggtatcgcttacctggcgatgtacttcagcgaacatggcttcaacatcaccatcaataccgtcaacctgatgtttatgattgcgggtctgctgctacataaaacgccaatggcttatatgcgtgctatcagcgcggcagcacgcagtaccgccggtattctggtgcaattccccttctacgcggggatccaactgatgatggagcactccggtctgggcggactcattaccgaattcttcatcaatgttgcgaacaaagacaccttcccggtcatgaccttttttagttctgcactgattaacttcgccgttccgtctggcggcgggcactgggttattcaggggccgttcgtgatgcccgcagcccaggcgctgggcgctgatctcggtaaatcggtaatggcgatcgcctacggcgagcaatggatgaacatggcacaaccgttctgggcgctgccagcactggcaatcgccggactcggtgtccgcgacatcatgggctattgcatcactgccctgctcttctccggcgtcattttcgtcattggtttaacgctgttctga

SEQ ID NO: 558 - DNA, 1185 bp, Escherichia coli
atgaaaaattgtgtcatcgtcagtgcggtacgtactgctatcggtagttttaacggttcactcgcttccaccagcgccatcgacctgggggcgacagtaattaaagccgccattgaacgtgcaaaaatcgattcactacacgttgatgaagtgattatgggtaacgtgttgcaagccggactggggcaaaatccggcacgtcaggcgctgctaaaaagcggactggctgaaacggtgtgcggattcacggtcaacaaagtgtgcggttcaggtctgaaaagcgtggcgcttgctgcacaggcgattcaggcaggtcaggcacagagcattgtggcggggggtatggaaaatatgagtttagcgccctacttactcgatgcaaaagcacgctctggttatcgtcttggagacggacaggtttatgacgtaatcctgcgcgatggcctgatgtgcgccacccatggttatcatatggggattaccgccgaaaacgtggctaaagagtacggaattacccgtgaaatgcaggatgaactggcgctacattcacagcgtaaagcggcagccgcaattgagtccggtgcttttacagccgaaatcgtcccggtaaatattgtcacccggaagaaaaccttcgtcttcagtcaagacgaattcccgaaagcggattctacggctgaagcgttaggcgcattgcgcccggccttcgataaagcaggaacagtcaccgccgggaacgcgtctggcattaacgacggtgctgccgctctggtgattatggaagaatcttcggcgctggcagcaggccttacccccctggctcgcattaaaagttatgccagcggtggcgtgccccccgcattgatgggtatggggccagtacctgccacgcaaaaagcgttacaactggcggggctgcaactggcggatattgatctcattgaggctaatgaagcatttgctgcacagttccttgccgttgggaaaaccctgggctttgagcctgagaaagtgaatgtcaacggcggggccatcgcgctggggcatcctatcggtgccagtggtgctcgtattctggtcacactattacatgcaatgcaggcacgcgataaaacgctggggctggcaacactgtgcattggtggcggccagggaattgcgatggtgattgaacgattgaattaa

SEQ ID NO: 559 - DNA, 777 bp, Escherichia coli
atgcgaaagatttttcttccgttgttactggtggcgctttcgcctgtcgctcacagtgaaggtgtgcaggaagtcgagattgatgcaccgctctctggctggcatccggcagagggtgaagatgccagtttttcacaaacgatcaattacccggcgtcgtccgtcaacatggcagatgatcaaaatatctcagcgcagatccgcggcaaaataaagaattatgctgcggcgggtaaagttcagcagggccggctggtggtcaacggtgccagtatgccgcagagaattgaatcagatggttcttttgcacgcccttatattttcactgaaggcagcaacagcgtgcaagtcatcagcccagatgggcaaagccgacaaaaaatgcagttttactcaacgccgggtgctggggcgattcgcgcacgtttacggctggttctctcgtgggatacggacaataccgacctcgatcttcatgtcgttacgcctgacggtgaacatgcctggtacggtaacaccgtgctgaaaaacagtggtgcactggatatggatgtcacgacagggtacggccccgagattttcgccatgccagcgccagttcacggccgttatcaggtgtatatcaactactatggcggacgcagcgaaacggaattaactacggcccaactgacgctgatcaccgatgaagggtcggtcaatgagaaacaggaaacttttattgtaccgatgcgtaatgctggcgaactgacgctggtgaaaagttttgactggtga

SEQ ID NO: 560 - DNA, 1650 bp, Escherichia coli
gtgaactggcgcagaatcgtctggctattggcgttggttactctgccaacgcttgcggaggagacgccgttacaactggtgctgcgcggtgcgcagcacgatcaactgtatcagatgtcgtcatcaggcgtgaccaaagtctcagcattacctgacacgctcaccacgccgttagggagtttatggaaactgtatgtttacgcctggctggaggatacccatcaaccggagcagccctaccagtgtcgcggaaactccccggaagaggtttattgttgtcaggctggggagagcataacgcgcgataccgcgctggtacgctcctgtggactctattttgcgccgcaacggttgcatattggtgcagatatgtgggggcaatactggcaacagcgtcaggcacctgcgtggttagcgtctcttccgacgctgaaaccagaaacctcggtaacggttaaatcgctgcttgattcattagcgacgttacccgcgcaaaacaaagctcaggaagtcttactggatgtggtgctggacgaggcgaaaatcggtgtcgcatccatgctcggtagtcgggtacgggtgaaaacctggagctggtttgccgatgataaacagcaaatccgtcagggtggttttgccggctggttaaccgatggtacaccgctgtgggttactggcagtggcaccagcaaaacggtactgacccgttatgcgacggtgcttaatcgggtattgccagtgccgacgcaagttgccagtgggcaatgtgtagaggtggagctgtttgctcgttatccgctgaagaaagttactgaggaaaagagtacgacggcagtcaaaccaggcgtgctcaatgggcgctatcgtgtgacgtttgccaatggtaaccacatgacatttgtcagccacggtgagacaacgttactgacggtaaagggcaaactgaaattacagtcgcatctcgatcgtgaagagtacgttgccagagttctggatcgcgaggcgaaaagtacgcctcctgaggcagcgaaagccatgaccgtggcgattcgcacgtatttacagcaaaacgccgatcgcgatggtgattgcctgagcatcccggacagtagcgctacccagcgcgtttcagcttcgccagccactgtaggcgcgcggacgatgaccgcctggacgcaggatctcatctatgcgggcgatccggttcattatcatggcagccgggttaccgaagggacgctttcctggcggcacgctactgcccaggcggggcagggagagcgttacgatcagatacttgcgtttgcttatcctgacaacaaccttagccgctggggagcgccacgctcaacctgccagttattacccaaagcgaaagcctggctggcgaaaaaaatgccgcagtggcggcgtatattacaaggtgagacgggatacaacgaaccagacgtgtttgcggtctgtcgtttagtctcaggtttcccctataccgatcggcagcagaaacggctgtttattcgtaacttctttacgcttcaggatcggctggatttaacccatgagtatctgcacctggcctttgatggttatcccaccgggcttgatgagaactatatcgaaacgctgacccgacaattattaatggactaa

SEQ ID NO: 561 - DNA, 4395 bp, Escherichia coli
gtgcgactggaagcgccggggcgtgattatcggcgctatcagatggaagagtacggcggcgtggacgttcgcctgtatcgtattcctgacccgatggcatttttgcgccagcagaaaaacctgcatcgcattgtggtgcaaccgcaatatctgggcgacgggctgaacaatacgctgacctggctgtgggataactggtacggcaaatctcgccgcgtgatgcagcgtactttctcttctcagtcacggcagaatgtgattcaggcgttacccgaattacagctcggtaatgccattgttaaaccttcccgttatgtacagaacagccagttttcaccgctgaaaaaatatccacttgtggaacagttccgctatccactatggcaggcaaaaccggtcgagccgcagcaaggggtaaaactggaaggcgcatccagcaatttcatctcgccgcagccgggcaacatctatattcctctcggcaaacaagagccgggactgtatctcgtcgaggcgatggtgggtgggtatcgggcgacgacggtggtgtttgtttccgataccgtggcgcttagcaaagtgtcaggtaacgagcttctggtgtggaccgcggggaaaaaacagggtgaagcgaagcccggctcagagatcttgtggactgacggtcttggcgtgatgacccgcggtgtgaccgatggcagcggtaccttgcagttacaacatatatcgccagaacgttcatatattctgggtaaggatgctgaaggcggcgtttttgtctccgagaactttttctacgaaagcgaaatctacaacacccgcttgtatatctttaccgatcgcccgctatatcgcgcaggcgatcgtgtcgatgttaaagtgatgggccgcgagttccacgatccgttgcattcatcccccatcgtcagcgcaccggcgaagctttcggtgctggacgccaacggcagtctgttgcaaaccgtcaatgtcacgctggatgcgcgtaatggcgggcaggggagtttccgcctgccagaaaatgccgtcgccggaggttatgagttacgtcttgcttaccgcaaacaggtctatagcagcagttttcgcgtggcaaactacatcaaaccccattttgagattggtttagctctcgataaaaaagagttcaaaactggcgaagcggtcagcggcaaactgcaactactctatccggatggcgaaccggtaaaagatgccagcgtgcagttgagtttgcgcgctcagcaactttcgatggttggtaacgatttgcgttatgccggacgtttcccggtgtcgctggaaggtagcgacgctgtttctgacgataaaggcaatgtagcgttaaaccttcccgccgccgataaaccgagccgctatttactgaccgtctccgccagcgatggcgcggcatatcgtgttactactaccaaagagatcctcattgaacgcggtctggcgcattactctctaagcacctccgcacaatacagtaatagcggcgagtcggttgttttccgttatgccgcgctggaatcttcaaagcaggtgcctgttaagtatgagtggctacgcctggaagaccgaacaagctacagcggagatctaccgtctggcggtaaatccttcaccgttaatttcgataaaccaggtaactacaatctgacgttacgcgataaagacggcttaattctcgccgggttaagtcatgcggtcagtggtaagggcagcatggcgcatgccggtacggtagatattgtggcagataaaacgctgtaccagccaggcgaaaccgcgaagatgctgattaccttcccggagccaattgatgaagcattattgacgctggaacgcgatcgcgttgaacagcagtcgctgctttcgcatccggcaaactggctgacgttacaacgtttaaacgatacccagtatgaagcccgcgtaccagtgagcaattcctttgcgcctaacatcactttttcggtgctgtatacccgtaacggtcagtacagttttcagaacgccgggatcaaagttgccgttccccagctggatatccgggtgaaaacggacaaaacccattaccagcctggtgaactggtcaatgtcgaattaacctcgtcgctgaaaggtaaacctgtttctgcgcagctaacggttggtgtggtcgatgaaatgatctacgcgctgcaaccggaaatcgcgccgaatatcggcaaatttttctatccgctggggcgtaacaatgtgcgtaccagctccagtctgtcgtttatcagctacgaccaggcgctctccagcgagccggttgcgcctggcgcgactaaccgcagcgagcggcgagtaaaaatgctggaacgtccacggcgtgaagaggtggataccgcggcctggatgccgtcactcacaaccgataaacaaggcaaagcgtatttcacgttcctgatgcctgattcgttaacccgctggcgcatcaccgcgcgtgggatgaacggcgacgggctggtcgggcaggggcgtgcttatctgcgttcggaaaaaagtctctacatgaaatggagtatgccaacggtgtatcgcatgggcgacaaaccggcggcaggactgtttatcttcagtcagcaggataacgaaccggtggcgctggtgactaaatttgcaggtgctgagatgcgccagacgctgacgctgcacaaaggggcgaattatatttcgctgacgcagaatattcagcaatctggcttgttaagtgcagaactgcaacaaaatgggcaagtgcaggacagcattagcacaaaactgtcttttgtggacaacagctggcccgttgaacagcagaaaaatgtcatgctcggcggtggcgagaacgcgctgatgttgcccgagcaggcgagcaatatccggcttcaaagtagtgaaacgccgcaggagattttccgcaacaatcttgatgcgttagtcgatgaaccgtggggtggggtgatcaacaccggtagccgtctgatcccgctcagtctcgcctggcgttcgcttgccgatcatcaaagtgccgccgctaacgacattcgtcagatgattcaggataaccgtctgcggctgatgcaactggcagggcccggtgcgcgctttacctggtggggtgaagatggcaatggtgacgccttcctcacggcatgggcatggtacgccgactggcaggccagccaggcgctcggcgtaacgcagcaaccggaatactggcagcatatgctcgacagctacgcggagcaggcggataacatgccgttattgcatcgggcgctggtgctggcgtgggcgcaggagatgaatctgccgtgcaaaacgttgttgaaagggttggatgaagctatcgcccggcgcggaactaaaactaaagatttctctgaggcagacaccagcgatatcaatgacagtctgatcctcgatacacctgaatctccactggcagatgcggtggcaaacgtcttaaccatgacgttgctgaaaaaagcgcagttgaagtccactgtgatgccacaggttcagcaatatgcgtgggataaagcggcaaacagcaatcagccgctggcgcacacggttgtgctgctcaatagcgggggcgacgctacccaggcggctgctattttaagtggtttgaccgctgagcaatctactattgagcgcgcgctggccatgaactggctggcgaaatatatggcgacaatgcctccagttgttttgcctgcgcctgcgggcgcatgggccaaacataagttaactggagggggcgaatactggcgttgggttggtcagggcgtgccggacattctctcttttggtgacgaattatcgccgcaaaatgtgcaggtccgctggcgtgaaccggcaaaaacggctcaacaaagtaacattccggtgaccgttgaacgccagttgtatcggcttatccccggtgaagaagagatgagctttactctgcagccggtgaccagcaatgagattgacagcgatgcgctgtatctcgatgaaattacgcttaccagcgagcaggatgccgttctgcgctatggtcaggtggaagtaccgctcccgccgggagccgacgttgagcgcacaacatggggcatttcggtcaataaacctaacgctggaaaacagcaggggcaattgctggaaaaagcgcgtaatgaaatgggcgaactggcctatatggtgccggtgaaagaactgacgggaacggtcactttccgccatttgctgcgcttctcgcaaaaagggcaattcgttctgcctcctgctcgttatgtgcgttcctatgcacctgcacagcaaagtgttgcggcagggagtgaatggaccgggatgcaggtgaaataa

SEQ ID NO: 562 - DNA, 624 bp, Escherichia coli
atgagacacgggctgctggtgctgatttgctggctgtattgtgttgttgcccatagtgaaatgctaaatgtcgaacaatccgggctgtttcgcgcgtggtttgtgcgcattgcacaggaacagctccgccaggggccaagcccacgctggtatcaacaggattgcgcgggcctggtgcgatttgcggcgaacgaggcgctgaaagttcacgacagtaaatggctaaaaagtaacggtttatctaaccagtatttgccgccagagatgacgctaacacctgaacagcgtcaactggcgcaaaactggaatcaggggaatgggaaaaccggcccctatgtgaccgcgattaatttgattcagtacaacagccagtttattggccaggacataaaccaggcactgcctggcgatatgatttttttcgatcagggcgatgcccagcacttaatggtctggatggggcgttacatcatctaccacaccggaagcgccacgaaaactgacaacggaatgcgcgcagtcagtctgcaacaacttatgacatggaaggacacccgatggatacccaacgattccaatcccaatttcattggcatttatcgtttaaattttctggcgcgatag

SEQ ID NO: 563 - DNA, 1689 bp, Escherichia coli
atgagtggtgaaaaaaaggcgaaaggctggcggttttatggccttgttggttttggggcaatagcgctgctatccgctggcgtatgggcattacaatactctggcagtgggccagaaaaaacgttgtcgccactggtggtgcacaacaatctgcaaatcgatctcaatgagccggacctctttctcgacagcgactctctgagccagcttcccaacgatctccttaccattccgtttctccacgatgttctgagcgaagatttcgttttctattatcagaatcatgccgatcgtctgggcattgaaggcagcattcgccgcattgtctatgaacacgatctcacgctgaaagataagctcttttcgtcactcttagatcagcctgcgcaggcggcgctatggcacgataaacaaggccatctttcacattacatggtgctgatccagcgcagtggtttaagcaaactgctggagccattgttgtttgccgctaccagcgacagccagttaagcaagacggaaattagtagcatcaagataaatagtgaaactattcctgtttatcagttgcgctataacggcaataacgtcctgatgtttgcgacttatcaggacaaaatattggcgttttccagttcggatatgctgtttaaagatgaccaacaggataccgaagctacggcgatcgcaagtgatttgttgagtggtaaaaaacgctgggaaacccgctttggcctggaagcgcgtactgccgaaaaaacgccagtactccagcgtattgttgtcagcgccaggttgctggggtttggctaccagcgattaatgccttcttttgctggcgtacgcttcgaaatgggtaacgacggctggcacagttttgtggcgttaaacgatgaatccgccagcgtagatgccagtttcgattttacgccggtatggaacagtatgcctgccggagccagcttctgtgtggcggtgccgtattcgcacggtattgccgaagagatgctttcgcacatcagccaggaaaacgacaagctgaatggggtgttagacggtggcgcggggctgtgctggtatgaagactcaaaattgcaaaccccactgtttgttggtcagtttgatggcactgccgaacaggcgcaattgccagggaaactgtttacgcaaaatattggtgcgcacgaaagcaaagcaccagaaggtgttttgccggtaagccagactcagcagggcgaagcgcaaatctggcgtcgcgaagtgagttcccgatacggtcagtatccgaaagcgcaggcggcgcaacccgatcaattaatgtcggattattttttccgcgtgtcgctggcgatgcaaaacaaaacgctgcttttctccctcgatgacacgctggttaataacgccctgcaaacactgaataaaacccgcccggcaatggtggatgtaatacccactgatggcatcgttccgctctatatcaatccacaaggaatggcgaaactgctgcgtaacgaaacgctgaccagtctgccgaagaatctcgaaccggttttttataacgccgcacaaactttattaatgccgaagctggacgctttatctcaacaaccgcgttatgtcatgaagctggcccagatggaacccggtgtcgcctggcagtggctacccataacctggcaaccgctatga

SEQ ID NO: 564 - DNA, 2628 bp, Escherichia coli
atgagcgaccttgcgagagaaattacaccggtcaacattgaggaagagctgaagagctcctatctggattatgcgatgtcggtcattgttggccgtgcgctgccagatgtccgagatggcctgaagccggtacaccgtcgcgtactttacgccatgaacgtactaggcaatgactggaacaaagcctataaaaaatctgcccgtgtcgttggtgacgtaatcggtaaataccatccccatggtgactcggcggtttattacacgatcgtccgtatggcgcagccattctcgctgcgttacatgctggtagacggtcagggtaacttcggttccatcgacggcgactctgcggcggcaatgcgttatacggaaatccgtctggcgaaaattgcccatgaactgatggccgatctcgaaaaagagacggtcgatttcgttgataactatgacggtacggaaaaaattccggacgtcatgccaaccaaaattcctaacctgctggtgaacggttcttccggtatcgccgtaggtatggcaaccaacatcccgccgcacaacctgacggaagtcatcaacggttgtctggcgtatatcgatgatgaagacatcagcattgaagggctgatggaacacatcccggggccggacttcccgacggcggcaatcattaacggtcgtcgcggtattgaagaagcttaccgtaccggtcgcggcaaggtatatatccgcgcccgtgccgaagtagaagttgacgccaaaaccggacgtgaaaccattatcgtccacgaaattccttatcaggtgaacaaagcgcgcctgatcgagaagattgcggaactggtaaaagaaaaacgcgtggaaggcatcagcgcgctgcgtgacgagtctgacaaagacggtatgcgcatcgtgattgaagtgaaacgcgatgcggtcggtgaagttgtgcttaacaacctctactcccagacccagttgcaggtttctttcggtatcaacatggtggcattgcaccatggtcagccgaagatcatgaacctgaaagacatcatcgcggcgtttgttcgtcaccgccgtgaagtagtgacccgtcgtactattttcgaactgcgtaaagctcgcgatcgtgctcatatccttgaagcattagccgtggcgctggcgaacatcgacccgatcatcgaactgatccgtcatgcgccgacgcctgcagaagcgaaaaccgcgctggttgcaaatccgtggcagctgggcaacgttgctgcgatgctggaacgtgcgggcgacgatgctgcgcgtccggaatggctggagccagagttcggcgtgcgtgatggtctgtactacctgaccgaacagcaagctcaggcgattctggatctgcgtctgcagaaactgaccggccttgagcacgaaaaactgctcgacgaatacaaagagctgctggatcagattgcggaactgttgcgtattcttggtagcgccgatcgtctgatggaagtgatccgtgaagagctggagttggttcgtgaacagttcggtgacaaacgtcgtaccgaaatcaccgctaacagcgccgacatcaacctggaagatctgatcacccaggaagatgtggtggtcacgctttctcaccagggttacgtgaagtatcagccgctttctgaatacgaagcgcagcgtcgtggcgggaaaggtaaatctgccgcacgtattaaagaagaagactttatcgaccgactgctggtggcgaacactcacgatcatattctgtgcttctccagccgtggccgcgtctattcgatgaaggtctaccagttaccagaagctactcgtggcgcacgtggtcgtccgatcgtcaatctgctgccgctggaacaggacgaacgtatcaccgcgatcctgccggtgaccgagtttgaagaaggcgtgaaagtcttcatggcgaccgctaacggtactgtgaagaaaaccgtcctcaccgagttcaaccgtctgcgtaccgccggtaaagtggcgatcaaactggttgaaggcgatgagctgatcggcgttgacctgaccagcggcgaagacgaagtaatgctgttctccgctgaaggtaaagtggtgcgctttaaagagtcttctgtccgtgcgatgggctgcaacaccaccggtgttcgtggtattcgtttaggcgaaggcgataaagtcgtctctctgatcgtgcctcgtggcgatggcgcaatcctcaccgcaacgcagaacggttatggtaaacgtaccgcagtggcggaatacccaaccaagtcgcgtgcgacgaaaggggttatctccatcaaggttaccgaacgtaacggtttagtggttggcgcggtgcaggtagatgactgcgaccagatcatgatgatcaccgatgccggtacgctggtacgtactcgcgtttcggaaatcagcatcgtaggccgtaacacccagggcgtaatccttatccgtacttcggaagatgaaaacgtggtgggtctgcaacgtgttgctgaaccggttgacgaggaagatctggataccatcgacggcagtgccgcggaaggggacgatgaaatcgctccggaagtggacgttgacgacgagccagaagaagaataa

SEQ ID NO: 565 - DNA, 723 bp, Escherichia coli
atgaatgccgaaaaatcgccggtaaaccacaacgtagaccacgaagagatcgctaaatttgaagccgtcgcctcccgctggtgggatcttgaaggtgagttcaaaccgctgcaccgcattaacccgctgcgtctgggctatattgccgagcgtgctggcggtttatttggcaaaaaggtgctcgatgtcggttgtggcggcggcattctggccgagagtatggcgcgggagggcgcgacggtgaccggtctggatatgggctttgagccattgcaggtggcaaaactgcacgcactggaaagcggcattcaggtggattacgtgcaggaaaccgtggaagagcacgcggcaaaacatgccggacagtatgacgtggtgacctgtatggagatgctggagcacgtccccgatcctcagtcagtggtcagagcctgtgcgcaactggtgaaaccgggcggcgatgtctttttctcgacgcttaaccgcaacggcaagtcatggctgatggcggtggttggtgcggaatatattttgcgcatggtgcctaaaggtacacatgatgtgaagaagtttattaaaccggcagaattgctgggctgggtggatcagaccagtcttaaagaacggcatatgaccgggctgcattacaaccctatcactaacacctttaagctcggccccggcgtggatgtgaactatatgctgcacacgcagaataagtga

SEQ ID NO: 566 - DNA, 3765 bp, Escherichia coli
atgaatatgcggattatctctctacgcaaggagtatttatctttactcccgtcaatgattgcatctcttttctctgctaacggtgccgcagcggtcattgattcatgccagggatatgatatcaaagcgagctgtcaggccagcaggcaaagcctttcaggcaatatgcaggactggagcatcgcggatgggcaatggttgattttttcgggtatggccaataatgccagcggtggcgcagtatttttgcagcacagtgctgaatttacgatatcaccacaaaatgaaacagggatgaccctgtttgctgataactcggttagtggcgaatataataatggtggggctatctttgctaaagaaaactcaacgataaatcttgcgaatgttattttcgacagtaatgttgcaggaggctatggcggagcaatctattctgccggtaccaatgataccggtgccgccgatttacgtgtcactaacgccgtatttcacaataacatcgctaatgacggcaaaggcggtgcaatttataccatcaataatgacgtctatttaagtgatgatgcttttaataataaccaggcatatacatcaacaagttatagtgatggggatggcggcgctattgatgttacggataatagtacggataacacacatctttcaggaaaaacgataattaataatacctcctttaccaataactatgcagaaggttatggcggagcaatttataccagcagcaccacatccccgtatcttattgatatttctgttgatgataattatgaccaaaacaatggtgtgatgattgatgaaaataacagcgcctcgggatatgaccattcggcgacggcagcggcggggggctttatgtatatcggtcatagtgtggctgaatttaacattgccgccgataaaacgctggtaataggcaacaccagcaacgatggtgcgattgattctcttgccggaacgggagtcatcgtgaaagagggagcgggagagttagtcctcaatgccgacaataatgcgtttaccggcgagatgagtatccagaatggcgaggtgacgctggggcgcagcgatgagttaatgaatgtcggcgacacgcactgtcagagcgatccgcaggattgctttggtctgatggtcggcagcactgttcattctgagtatcaggcagaactgaatgttggcaatacacaacaaacgtttgtgcactcattaaccggttttgctaatggcattttgaatatcgacgcaggcggcaatgttacagtaaaccagggcggtttttccggctcgattcagggtgaaggacagttgacggtagcgcaagatggcagctatctcctgacaggggcgcagtcgatggcattaaccggcgatattgtggtggaagataacgccgtattgtcgctggcggggaatcaggccgatttacgggcaatgcagagcgatccgcaatcgatcgtgctaaatggcggagtattggatctctctgatttcaccacctgggatggcgatagctcatacaatgacggtctgcaaatcagcggcagcggggggacagtgattggcagtaatgatgtcgttgatatcagcagtggcgatgatttacatattggcggcagcgatgccagccagaatggcgtttatgtcgtcattaatgcgggggatcagcgcgtaacgctggcgaataacaacggttatctcggtaatacgcaaatcgcctccggtacgcttgaagtcagcgataattcgcaattgggggacacaagttacaaccgttcagtgatcttcacagatccccaacaacacagtgaaatggatgtgacgactgatgttgacactcgctcggctacaacaggtcagggcaggaatattgaaatgcgcgctgatggcgaaatacacgttgaggatggcgtagatacgcaatggggcgggttgatggcggatagtaccgggcaacaactggatagcgtaagcacgttgactaaaagtggcggcggtacgctggagttgaccgccagcggcactgcgacgtctgcggtacgtgtggaggacggaacgctaaaaggtgaagcggagaatattattccttatgtttcttcactgtgggtgggggaagacggtgtttttgaaaccgggcaaaatcaggatattcgttcaatcgatgccacctctggcggcgatatcgacataaccgatggtactgtgttgcgattgacgcagcaggatacgaaccaggcgctggatgcctcgctgtttagcggcgacggtacgctggtgaatgccaccgatggcgtgacgctggcaggtgagcttaataccaaccttgaaactgacagcctgacttatctttccgacgtgacggttaatggcaatctgaccaatacgtccggtgcgattagcctgcaaaatagcgtcgctggcgacacgctgacggtaaacggtgattacaccggtggcggtacgttgtttctcgacagcgaattaaacggcgatgactcggcaagcgaccaactggtgttgaacggcaatacctcgggtaacacgaccgtggtggttaaccccattactggcattggtgaaccgacatctacaggtattaaagtagttgatttcgcagctgatcccgcgcagtttcaaaacaatgcgcagttcagtctggcaggaagcggctacgtcaatatgggggcgtatgactacacgctggtggaagataacaacgactggtatctgcgatcacaagaagtcaatccgacgccgccgcctgatccagacccgactccagatcctgatcccacgccggatcccgacccaacccccgacccggaacctacgcctgcctaccagccggtgttgaatgccaaagttggtggatattttaataacctgcgggcggcaaatcaggcatttgtgatggagcgacgcgatcacgctggtggcgatggtcagacgctgaatttacgcgttatcggcgggcgttatcattacacggcggtagggcagttggctcagcatgaagacacttctacggtgcagcttagcggcaacctgtttagcgggcactggggtgatgatggcgagtggatgcttgggattgttggtggctacagcgataaccagggcgacagccgctcgaatatgaccggaactcgcgccgataaccagaaccacggttatgccgttgggctgacctcaagctggtatcagcacggtaatcagaagcagggggcctggttggatagctggctgcaatatgtgtggtttaacaatgatgtttccgaacaagacgatggcgtggatcattaccactcgtcggggattatcgcctcgctggaagccggttatcagtggttaccggggcatggtgtggtgattgaaccgcagacgcaggtgatttatcagggcgtgcagcaggatgattttaccgccgctaaccatgcgcgcgtgtcacaatcgcagggtgatgatattcagacgcggctgggtttacacagcgaatggcgtactgctgttggtgtcacgccaacgttagatctgaattattatcacgatccccatgcgacggaaattgaagaagatggcagcactatcagtgacgatgcggtgaagcaacggggtgaaataaaagtgggaataacgggcaatatcagtcagcgagtttcgctgcgcggcagcgtggcgtggcagaaagggagtgatgattttgcccagacggcagggtttttgtcgatgacagtgaaatggtaa

SEQ ID NO: 567 - DNA, 2286 bp, Escherichia coli
atgaatcagaatctgctggtgacaaagcgcgacggtagcacagagcgcatcaatctcgacaaaatccatcgcgttctggattgggcggcagaaggactgcataacgtttcgatttcccaggtcgagctgcgctcccacattcagttttatgacggtatcaagacctctgacatccacgaaaccattatcaaggctgccgcagacctgatctcccgtgatgcgccggattatcagtatctcgccgcgcgcctggcgatcttccacctgcgtaaaaaagcctacggccagtttgagccgcctgcgctgtacgaccacgtggtgaaaatggtcgagatgggcaaatacgataatcatctgctggaagactacacggaagaagagttcaagcagatggacacgtttatcgatcacgaccgtgatatgaccttctcttatgctgccgttaagcagctggaaggcaaatatctggtgcagaaccgtgtgaccggcgaaatctacgaaagcgcccagttcctttatattctggttgccgcgtgcctgttctcgaactacccgcgtgaaacgcgcctgcaatacgtgaagcgtttttacgacgcggtttccacatttaaaatttcgctgccgacgccaatcatgtccggcgtgcgtaccccgactcgtcagttcagctcctgcgtactgatcgagtgcggcgacagcctggattccatcaacgccacctccagcgcgattgttaaatacgtttcccagcgtgccgggatcggcatcaacgccgggcgtattcgtgcgctgggtagcccgattcgcggtggcgaagcgttccataccggttgtattccgttctataagcatttccagacagcggtgaaatcctgctctcagggcggtgtgcgcggcggtgcggcaacactgttctacccgatgtggcatctggaagtggaaagcctgctggtgttgaaaaacaaccgtggggttgaaggcaaccgcgtgcgtcatatggactacggggtacaaatcaacaaactgatgtatacccgtctgctgaaaggtgaagatatcaccctgttcagcccgtccgacgtaccggggctgtacgacgcgttcttcgccgatcaggaagagtttgaacgcctgtacaccaaatatgagaaagatgacagcatccgcaagcagcgtgtgaaagccgttgagctgttctcgctgatgatgcaggaacgtgcgtctaccggtcgtatctatattcagaacgtagaccactgcaacacccacagcccgtttgatccggctattgcaccagtgcgccagtctaacctgtgcctggaaatcgccctaccgaccaaaccactgaacgacgtcaacgacgagaacggtgaaatcgcgctgtgtacgctttctgctttcaacctgggcgcaattaacagcctggatgaactggaagagctggcaattctggcggttcgcgcactcgacgcactgctggattatcaggattacccgatcccggccgctaaacgtggagcgatggggcgtcgtacgctgggtattggtgtgatcaacttcgcttactacctggcgaagcacggtaaacgctactccgacggcagcgccaacaacctgacgcataaaaccttcgaagccattcagtattacctgctgaaagcgtctaatgagctggcgaaagagcaaggcgcgtgcccgtggtttaacgaaaccacttacgcgaaagggatcctgccgatcgatacctataagaaagatctggatgccatcgctaatgagccgctgcattacgactgggaagcactgcgtgagtcaatcaaaacgcacggcctgcgtaactccacgctttctgctctgatgccgtcagagacctcttcgcagatctctaacgccactaacggtattgaaccgccgcgtggttacgtcagcatcaaagcgtcgaaagacggtattctgcgtcaggtggtgccggactacgagcatctgcacgacgcctatgaactgctgtgggaaatgccgggtaacgatggctatctgcaactggtgggtatcatgcagaaatttatcgatcagtcgatctctgctaacaccaactacgatccgtcacgcttcccgtcaggaaaagtgccgatgcagcaactgctgaaagacctgctcaccgcctacaaattcggggttaaaacgctgtattatcagaacacccgtgacggtgcagaagacgcacaagacgatctggtgccgtcaattcaggacgatggctgcgaaagcggcgcatgtaagatctga

SEQ ID NO: 568 - DNA, 1131 bp, Escherichia coli
atggcatataccaccttttcacagacgaaaaatgatcagctcaaagaaccaatgttctttggtcagccggtcaacgtggctcgctacgatcagcaaaaatatgacatcttcgaaaagctgatcgaaaagcagctctctttcttctggcgtccggaagaagttgacgtctcccgcgaccgtatcgattaccaggcactgcctgaacatgaaaaacacatctttatcagcaacctgaaatatcagacgctgctggattccattcagggtcgcagtccgaacgtggcactgctgccgctgatctcgatcccggaactggaaacctgggtagaaacctgggcgttctcagaaacgattcattcccgctcctatacccatatcatccgtaatatcgttaacgatccgtcagttgtctttgacgatatcgtcaccaacgagcagatccagaaacgtgcggaagggatctccagctattacgatgaactgatcgaaatgaccagctactggcatctgctgggcgaaggcacccacaccgttaacggtaaaaccgtaaccgttagcctgcgcgagctgaagaaaaaactgtatctctgcctgatgagcgttaacgcgctggaagcgatccgtttctacgtcagctttgcctgctctttcgcattcgctgaacgtgagctgatggaaggtaacgccaaaattattcgcctgattgcccgcgacgaagccctgcacctgaccggcacccagcatatgctgaatctgctgcgcagcggcgcggatgatccggagatggcggaaattgccgaagaatgtaagcaggagtgctatgacctgtttgtccaggcggcacagcaagagaaagactgggcggattatctgttccgtgatggttcgatgattggtctgaataaagacatcctctgccagtacgttgaatacatcaccaatatccgtatgcaggcagtcggtttggatctgccgttccagacgcgctccaacccgatcccgtggatcaacacctggctggtgtctgataacgtgcaggttgctccgcaggaagtggaagtcagttcttatctggtcgggcagattgacgcggaagtggacaccgacgatttgagtaacttccagctctga

SEQ ID NO: 569 - DNA, 255 bp, Escherichia coli
atggcccgcgttaccctgcgcattactggcacacaactgctgtgccaggatgaacacccttcccttctggcggcgctggaatcccacaatgtggcggttgagtaccagtgccgcgaaggttactgcggctcctgtcgcacccgactggtcgcaggccaggtggactggattgccgaaccgttagcttttattcagccgggggaaattttgccctgttgttgccgggcaaaaggcgatattgaaatcgagatgtga

SEQ ID NO: 570 - DNA, 651 bp, Escherichia coli
atggcagtttcagcaaagcacgacgaatttaatcactggtgggcaacagagggcgactgggttgaagagcctaactatcgccgtaatggtatgagcggggtgcaatgcgtcgagcgcaacggcaaaaagctgtatgtaaagcgcatgacgcatcatctgtttcattccgtacgttatccgttcggccgaccaacgattgtccgtgaggttgcggtaattaaagaactggaacgggccggtgtcatcgtgccgaagatcgtttttggtgaagcggtgaaaattgagggtgaatggcgcgcgttgctggtgactgaagatatggcggggttcatcagcattgctgactggtatgcccggcatgcagtatcgccttattctgacgaagtacggcaagccatgttgaaagcagtggcgctggcgtttaagaaaatgcatagcgttaatcgtcagcatggctgttgttatgttcgccatatctatgtgaaaacagaaggtaaggcagaagctggatttcttgacctggagaaaagtcgtcgccgcttgcgtcgtgataaagcgattaatcatgacttccgccagctggaaaaatatctggagccgatccccaaagcggactgggagcaggtgaaagcatattactacgctatgtaa

SEQ ID NO: 571 - DNA, 1077 bp, Escherichia coli
atgaaattgacgctgaaaaaccttagcatggcgatcatgatgagcactatagtcatgggaagcagtgcaatggcggcggacagcaacgaaaaaatagtcatcgcccatcgcggtgccagtggatatttgccggagcatacgctgccagcaaaagcgatggcgtatgcgcagggagcggattatctggaacaggatttggtgatgaccaaagacgaccatctggttgttctgcatgaccattatctcgatcgtgttactgatgttgccgatcgtttcccggatcgggcgcgcaaagacggtcgttactacgcgatagatttcacgctggatgaaattaagtcgctgaaatttaccgaaggtttcgatattgaaaacggtaaaaaagtgcagacttatccggggcgtttcccaatgggtaaatctgacttccgggtgcacacctttgaagaagagattgaatttgttcaggggttaaaccactctaccgggaaaaatatcggtatctatccagaaattaaagcgccgtggttccatcatcaggaagggaaggatattgcggcaaaaacgctggaagtgctgaagaaatatggttacaccggtaaggacgacaaagtttatttgcaatgttttgatgctgatgagctgaagcgtattaagaatgtgctggaacccaaaatgggtatggatctcaatctggtacagctgattgcctataccgactggaatgaaacgcagcagaaacagccggacggaagctgggttaattacaattacgactggatgtttaagccgggggctatgaaacaggtggcggaatatgctgatggtattggtccggattaccatatgttgattgaggagacatcgcagccgggtaatatcaaactcactggcatggtgcaagatgctcagcagaataaactggtagtgcatccttataccgtgcggtcagataaactgcctgaatacactactgatgtgaatcagttatatgatgctctgtataacaaagcgggtgtaaatgggctatttactgatttccctgataaggcagtaaaattccttaataaagagtaa

SEQ ID NO: 572 - DNA, 1359 bp, Escherichia coli
atgttgagtatttttaaaccagcgccacacaaagcgcgcttacctgccgcggagatcgatccgacttatcgtcgattgcgctggcaaattttcctggggatattctttggctatgctgcttactatttggttcgtaagaactttgcgctcgctatgccttatctggttgagcagggattctcacgcggtgatttaggttttgccctttcggggatctcgattgcttatggattttcgaaattcatcatgggttcggtatcggatcgctcgaatccgcgcgttttcctgcccgcaggtttgattctggcggcggcagtgatgttgtttatgggctttgtgccatgggcgacgtcgagcattgcggtgatgtttgtactgttgttcctctgcggttggttccaggggatggggtggccgccgtgtggtcgtactatggtgcactggtggtcgcagaaagaacgtggcggcattgtgtcagtgtggaactgtgcgcacaacgtcggtggtggtattccgccgctgctgttcctgctggggatggcctggttcaatgactggcacgcggcgctctatatgcccgctttctgcgccattctggtggcactgttcgcctttgcgatgatgcgcgataccccgcaatcctgtggcctgccgccgatcgaagagtacaaaaatgattatccggacgactataacgaaaaagcggaacaggagctgaccgcgaagcagatcttcatgcagtacgtgctgccgaacaaactgctgtggtacatcgccattgccaacgtgttcgtttatctgctgcgttacggcatcctcgactggtcaccgacttatctgaaagaggttaagcatttcgcgctggataaatcctcctgggcctacttcctttatgaatatgcaggtattccgggcaccctgctgtgcggctggatgtcggataaagtctttcgtggtaaccgtggggcaaccggcgtcttctttatgacactggtgaccatcgcgactatcgtttactggatgaacccggcaggtaacccaaccgtcgatatgatttgtatgattgttatcggcttcctgatctatggccctgtgatgctgatcggtctgcatgcgctggaactggcaccgaaaaaagcggcaggtacggcagcgggttttaccgggctgtttggttacctcggcggttcggtggcggcgagcgcgattgttggctacaccgtggacttcttcggctgggatggcggctttatggtaatgattggcggcagcattctggcggttatcttgttgattgttgtgatgattggcgaaaaacgtcgccatgaacaattactgcaaaaacgcaacggaggctaa

SEQ ID NO: 573 - DNA, 1629 bp, Escherichia coli
atgaaaactcgcgactcgcaatcaagtgacgtgattatcattggcggcggcgcaacgggagccggaattgcccgcgactgtgccctgcgcgggctgcgcgtgattttggttgagcgccacgacatcgcaaccggtgccaccgggcgtaaccacggcctgctgcacagcggtgcgcgctatgcggtaaccgatgcggaatcggcccgcgaatgtattagtgaaaaccagatcctgaaacgcattgcacgtcactgcgtagaaccaaccaacggcctgtttatcaccctgccggaagatgacctctccttccaggccacttttatccgcgcctgcgaagaagcagggatcagcgcagaagccattgatccgcagcaagcgcgcattatcgaacctgccgttaacccggcactgattggcgcggtgaaagttccggatggcaccgttgatccatttcgtctgacagcagcaaacatgctggatgccaaagaacacggtgccgttatccttaccgctcatgaagtcacggggctgattcgtgaaggcgcgacggtgtgcggtgttcgtgtacgtaaccatctcaccggcgaaattcagacacttcatgcgcctgtcgtagttaatgccgccgggatctgggggcaacacattgccgaatatgccgatctgcgcattcgcatgttcccggcgaaaggatcgctgctgatcatggatcaccgcattaatcagcatgtgatcaaccgctgccgcaaaccttccgacgccgatattctggtgcctggcgataccatttcgctgattggcaccacctctttacgtattgattacaacgagattgacgataatcgagtgacggcagaagaagttgatattctgctgcgcgaaggggaaaaactggcccccgtgatggcgaaaacgcgcattttgcgggcctactctggcgtacgcccgctggttgccagcgatgacgatccgagcggacgtaacgtcagccgtggcatcgtgctgctcgaccatgctgaacgcgatggtctggacgggtttatcaccatcaccggtggcaaactgatgacctatcggctgatggcggaatgggctaccgacgccgtatgccgcaaactgggaaacacgcgcccctgtacgaccgccgatctggcacttcctggttcacaggaacccgctgaagttaccttgcgtaaagtcatctccctgcctgccccgctgcgcggttctgcggtttatcgtcatggcgatcgcacgcctgcctggctgagcgaaggccgtctgcaccgtagcctggtatgtgagtgcgaagcggtaactgcgggtgaagtgcagtacgcggtagaaaatttaaacgttaatagcctgctggatttacgccgtcgtacccgtgtggggatgggcacctgccagggagaactctgcgcctgccgcgctgccggactgctgcaacgttttaacgtcacgacgtccgcacaatctatcgagcaactttccaccttcctaaacgaacgctggaaaggcgtgcaacccatcgcctggggagatgcactgcgcgaaagcgaatttacccgctgggtttatcagggattgtgtggtctggagaaggagcagaaagatgcgctttga

SEQ ID NO: 574 - DNA, 1260 bp, Escherichia coli
atgcgctttgatactgtcattatgggcggcggcctcgccggattactctgtggcctgcaactgcaaaaacacggcctgcgctgtgccattgtcactcgtggtcaaagcgcgctgcatttctcatctggatcgctggatttgctgagccatctgccggatggtcaaccggtgacagacattcacagtggactggaatctttgcgtcagcaggcacctgcccatccttacactcttctcgggccacaacgcgtgctcgatctcgcttgccaggcgcaggcattaatcgctgaaagcggtgcgcaattgcagggcagcgtagagctggctcaccagcggattacaccgctaggcactctgcgctcaacctggctaagttcgccagaagtccctgtctggccgctgcccgcgaagaaaatatgtgtagtgggaattagcggcctgatggattttcaggcgcatcttgcggcggcttcattgcgcgaattggatcttaaagttgaaaccgctgaaattgaactgccggaactggatgtgctgcgcaataacgccaccgagttccgggcggtgaatattgcccgcttccttgataatgaagaaaactggccgttgttacttgatgcacttattccggtcgccaatacctgcgaaatgatcctgatgcccgcctgcttcggcctggccgatgacaaactgtggcattggttgaatgaaaaactaccttgttcattgatgcttttgccaacgctgccgccttccgtgctgggcattcgtctgcaaaaccagttacagcgccagtttgtgcgccagggcggcgtgtggatgccgggcgatgaagtgaaaaaagtgacctgtaaaaatggcgtagtgaatgaaatctggacgcgcaatcacgccgatatcccgctgcgcccacgatttgcggtgcttgcgagcggcagtttctttagcggcggactggtggcagaacgtgacggcattcgcgagccgattctcggccttgatgtgctacaaaccgctacgcggggtgaatggtataagggcgatttttttgcgccgcagccgtggcagcagttcggtgtaaccactgatgaggcgctacgcccgtcgcaggcggggcaaaccattgagaacctgtttgccatcggttcggtgctgggcggatttgatcccatcgcccagggatgcggcggcggtgtttgtgccgtcagtgctttacatgccgctcaacagattgcccaacgcgcaggaggccaacaatga

SEQ ID NO: 575 - DNA, 1191 bp, Escherichia coli
atgaatgacaccagcttcgaaaactgcattaagtgcaccgtctgcaccaccgcctgcccggtgagccgggtgaatccgggttatccggggccaaaacaagccgggccggatggcgagcgtctgcgtttaaaagatggcgcactgtatgacgaggcgctgaaatattgcatcaactgcaaacgttgtgaagtcgcctgcccgtccgatgtgaagattggcgatattatccagcgcgcgcgggcgaaatatgacaccacacgcccgtcgctgcgtaattttgtgttgagtcataccgacctgatgggtagcgtttccacgccgttcgcacccatcgtcaacaccgctacctcgctgaaaccggtgcggcagttgcttgatgcggcgttaaaaatagaccaccgtcgcacgctaccgaaatactccttcggtacgttccgtcgctggtatcgcagcgtggcggctcagcaagcgcagtataaagaccaggtcgctttctttcacggctgcttcgttaactacaaccatccgcagctaggcaaagatttaattaaagtgctcaacgcgatgggtaccggcgtacaactgctcagcaaagaaaaatgctgcggcgtaccgctgatcgccaacggttttaccgataaagcacgcaaacaggcaattacgaatgtagagtcgatccgcgaagctgtgggagtaaaaggcattccggtgattgccacctcctcaacgtgtacatttgccctgcgcgacgaatacccggaagtgctgaatgtcgacaacaaaggcttgcgcgatcatatcgaactggcgacccgctggctgtggcgcaagctggacgaaggcaaaacgttaccgctgaaaccgctgccgctgaaagtggtttatcacactccgtgccatatggaaaaaatgggctggacgctctacaccctggagctgttgcgtaaaatcccggggcttgagttaacggtgctggattcccagtgctgcggtattgcgggaacttacggtttcaaaaaagagaactaccccacttcacaagccatcggcgcaccactgttccgccagatagaagagagcggcgcagatctggtggtcaccgactgcgaaacctgtaaatggcagattgagatgtccacaagtcttcgctgcgaacatccgattacgctgctggcacaggcgctggcttaa

SEQ ID NO: 576 - DNA, 912 bp, Escherichia coli
atgaccgaatcaacaacctcctccccgcatgatgcggtgtttaaaacctttatgttcacacccgaaaccgcacgggattttctggaaatacatctaccagagccgctgcgcaagctttgcaacctgcaaaccttacgcctggaacccaccagttttattgaaaaaagtttacgcgcttactactcggatgttttgtggtccgtggaaaccagcgagggtgacggctatatctactgcgtgattgaacatcaaagctctgcagaaaagaatatggcttttcggctaatgcgctatgccactgccgccatgcagcgtcacctggataaaggctatgacagagttccgctggtggtgccattgctgttttatcatggcgaagcctcgccctacccgtactcactcaactggctggatgagtttgacgatccgcaacttgcccggcagttgtacaccgaagcttttccgttggtggatatcaccatcgtacctgacgatgagatcatgcaacatcggcgtatagctctgctggaactgattcaaaagcatattcgcgaccgcgatttaatcggtatggtcgacaggatcaccacgcttttggttagaggcttcactaatgacagtcagctacaaacactgtttaattatctgctgcaatgcggcgatacctcccgtttcacccgctttattcaggagattgccgaacgttcaccactacaaaaggagagattaatgactattgctgaacggctacggcaggaaggacatcaaattggctggcaagaaggtaaaattgaaggtttgcatgaacaagcgattaaaattgccttgcgcatgctggagcagggctttgaacgtgagattgtgctggcggcaacccaactcactgatgctgatattccgaactgtcattaa

SEQ ID NO: 577 - DNA, 222 bp, Escherichia coli
atgactattgctgaacggctacggcaggaaggacatcaaattggctggcaggaaggtaagattgaaggctggcaagaaggtaaattagaaggtttgcaggaaggcatgcatgaacaagccattaaaattgctttgcgcatgctggagcagggcattgatcgtgaccaggtgctcgcggccactcagctaagcgaagccgatctggcagcgaataaccactaa

SEQ ID NO: 578 - DNA, 804 bp, Escherichia coli
atgaacgcattattaaccaatccctttaaagaacgtttacgcaagggcgaagtgcaaattggtctgtggttaagctcaacgactgcctatatggcagaaattgccgccacttccggttatgactggttgctgattgacggggagcatgcgccaaacaccattcaggatctttatcaccagctacaggcggtagcgccctatgccagccaccccgtgatccgtccggtggaaggcagtaagccgctgattaaacaagtcctggatattggcgcgcaaactctactgatcccgatggtcgatactgccgatcaggcacgtcaggtggtgtctgccacgcgctatcctccctacggtgagcgtggtgttggggccagtgtggcacgggctgcacgctggggacgcattgagaattacatggcgcaagtcaacgattcgctttgtctgttggtgcaggtggaaagtaaaacagcactggataatctggacgaaatcctcgatgtcgaagggattgatggcgtgtttattggacctgcggatctttctgcgtcgttgggctacccggataacgccgggcacccggaagtgcagcgaattattgaaaccagcattcggcggatccgtgctgcgggtaaagcggctggttttctggctgtggctcctgatatggcgcagcaatgcctggcgtggggagcgaactttgtcgctgttggcgttgacacgatgctctacagcgatgccttggatcaacgactggcgatgtttaaatcaggcaaaaatgggccacgcgtaaaaggtagttattga

SEQ ID NO: 579 - DNA, 1290 bp, Escherichia coli
atgagcaccgctttgcttgacgccgtggtgaagaaaaaccgcgcgcgtttaattccgtttatgttggcgctgtatgtgctggcgtttctcgaccgttcgaatattggttttgccaaacagacctaccagattgataccgggctgagtaatgaagcttatgcgctgggagcaggcattttctttgtggtatacgcgtttctgggggttccggcgaatcttttgatgcgcaaactgggggcaagaacctggattggtacgacaacactgctgtggggatttctttcggcagccatggcatgggccgatactgaagcgaaatttctgattgttcgcactctgcttggtgctgcggaggccgggtttttccctggtatgatttatctcacctcgcaatggtttccgcagcgtaatcgcgccagcattatggggctgttctatatgggcgcaccgctggcgttaacactgggatcaccgctttctggcgcgctgctggagatgcatggatttatggggcatcccggctggttctggatgtttgttattgaaggattgttggcagtcggcgctggggtattcacattcttttggcttgatgacacaccggagcaggcacgttttctgagtaaacaagaaaaaacgttgcttatcaatcaactggcaagtgaagaacaacagaaagtgacttctcgattgagcgatgcgctgcgtaatggccgagtctggcaactggcgattatctacctgaccattcaggtagcggtttacggattaattttcttcctgccgacccaggttgctgcattgctggggacaaaagtgggctttacggcgtcggtggtcaccgccattccgtgggttgcggccttgtttggaacctggcttattccgcgctactccgataaaaccggcgaacggcgtaatgtcgcagcgctgacattactggcggcgggcattggtattggtctgtccgggctgctttctccagtactggcgatcgtagcgctgtgtgttgcagccatcgggtttattgccgtgcaaccggtgttctggacgatgccgacacagcttctttccggtacggcgctggctgcggggattggttttataaacctgtttggtgcagtgggcgggtttattgccccgatcctgcgcgtgaaagcagaaacgttattttccagcgatgcggcgggattactgacgctggcagcggtggcggtcatcggttcgctgattattttcactctgcgtgtaaatcgcactgttgcgcagaccgacgtggcacatcattaa

SEQ ID NO: 580 - DNA, 1206 bp, Escherichia coli
atgaccctaccaaaaatcaaacaggttcgcgcctggtttactggcggtgcgacagcagaaaaaggcgctggcggcggtgattatcacgaccagggggcgaatcactggattgatgatcatattgccaccccgatgagtaaataccgcgattacgagcagtcacgccagtcatttggcattaacgttcttggcacgttgattgttgaagttgaagcagaaaacggccagaccggattcgctgtttcgacagccggtgaaatgggctgttttattgtcgaaaaacatcttaaccgtttcattgagggtaaatgcgtcagtgatatcaaactgatccacgatcaaatgctcaatgccaccctgtattactccggctctggtggcctggtgatgaatacgatttcctgtgtcgatctggctctgtgggatctgttcggcaaagtggtcgggcttccggtttataaacttttaggtggtgcagttcgtgatgaaattcagttctacgccacaggtgcgcgtccggatctggcaaaagagatgggctttatcggtggcaaaatgccgacgcactgggggccacatgatggtgatgcggggatccgcaaagatgccgctatggtcgcggatatgcgtgaaaaatgcggtgaggatttctggttaatgctcgactgctggatgagtcaggacgtgaactatgccatcaaactggcccacgcttgcgcgccctataacctgaaatggatcgaagagtgcctgccgccacagcagtatgaaggttatcgcgaactgaaacacaacgcaccagcggggatgatggtcaccagcggtgagcaccacggcacactgcaatctttccgtacgctttcagaaaacggtatcgacattatgcagccggatgttggctggtgcggtggcttaaccacgctggtggaaattgccgcaatcgccaaatccagggggcaactggtggtgccacacggttcgtctgtttactcccaccatgcggtgatcaccttcaccaatacgccattcagcgaattcctgatgaccagcccggattgttcaacgatgcgtccgcaatttgatccgattctgcttaatgagccagtaccggtgaatggtcgtattcataaatcagtgcttgataaacccggtttcggcgtcgaactcaatcgtgactgcaatttgaaacgcccctacagccactaa

SEQ ID NO: 581 - DNA, 783 bp, Escherichia coli
atgttggaatcaagcaaagttcccgccctgacacgggctattgatattctcaatttgattgcccggattggcccctgtagtgctgcgacgatcattgacacattggggatccctaaaagcacagcctatttgctgcttaatgaactcaggcgtcagcgttttcttagccttgatcaccaggaaaatttttgtttgtggaccaggctggtggagctttccggtcatgcgttaagcaagatggatctccgggaactggctcgaccgcgtttgacgcaactgatggataccaccgggctgttatgtcacctggggattattgataacggcagcgcttattacattttgaaagtggagtcatcagccactatcagcgtgcgttcccatgaaggaaaaagcctttcgctttatcgctccggaataggtaaatgcctgcttgcctggcaacctgaagctgtacagaaaagtattatcgaagagctggtctgggagcagatgacacccaccaccattacccatccacaacggctctacgaggaactggcgcgtattcgccgtcagggctggagctatgacaacggcgaagattatgccgatgtccgttgtgtcgctgcgccggtgtttaacgccaataacgagcttaccgctgcgatttcggtggtcggtacccgcttacaaatcaatgaagaataccgtgattatctggcgggcaaggccattgcctgcgccagggatatttcacgtttgttgggatggaaaagtccctttgacttacaggcctcataa

SEQ ID NO: 582 - DNA, 1203 bp, Escherichia coli
atgttaaaagtggaaatgttatccaccggggatgaagtgttacacgggcaaatcgttgacactaacgctgcctggctggccgattttttctttcatcaggggttgccattatctcgccgcaatacggtgggggataaccttgatgacttagtcaccattcttcgcgaacgtagtcagcacgccgatgtgctgatcgttaacggcgggctgggaccgaccagtgatgatttaagcgcactcgccgctgcgacagcaaaaggtgaaggcctggtgctgcatgaagcctggctcaaagagatggaacgctatttccacgaacggggacgagtaatggcaccgagcaaccgtaaacaagcggagttgcctgccagtgctgaatttatcaataacccggtaggcactgcctgtggttttgccatacagcttaatcgttgcctgatgttctttacccccggcgtaccgtcagaatttaaggtgatggtcgagcacgaaatcctgccgcgcctgcgcgagcgtttttctttaccacagccgccggtttgcctgcgtttgactacctttggtcgttcggaaagcgatctggcacaaagcctggacactctacaactgccgccgggcgtaacaatgggctatcgctcctcaatgccgattatcgaactgaaactcaccggaccggcaagcgagcaacaggcgatggaaaaactgtggctggacgttaaacgtgttgccggacagagcgtgattttcgaaggcaccgaaggactgcccgcgcagatcagtcgcgaattgcagagccgccagttcagcctgacgctgagcgagcaattcaccggtggtttattggctttgcaactttctcgcgcaggtgctccattgctggcgtgtgaagtggttccttcacaggaggaaaccctggcgcaaacggcgcactggattacagaacggcgggcgaaccattttgctgggttggcactggctgtttctggtctggaagatgagcatctcaactttgcactagccacgccagacggcactttcgctttgcgtgtacatttcagtgccacacgctacagtctggctattcgccaggaagtctgcgcaatgatggcgcttaatatgctacgccgttggttaaacggccaggacatcgccagcgagcatggctggattgaggttgttgagtccatgaccttatctgtctga

SEQ ID NO: 583 - DNA, 543 bp, Escherichia coli
atgaaaaaaattgcgctagcaggtctggccggaatgctgttggtttctgcatcggtcaatgcaatgagcatcagcggccaggcgggtaaagaatacaccaatattggtgtcggttttgggactgaatcgacgggcctggcgttaagcggtaactggacacataacgacgacgacggtgatgccgcgggcgtggggctggggttgaatctgcctctcgggccattaatggcgaccgttggcggaaaaggcgtttacaccaacccgaacgatggtgatgaaggttatgccgcagcagttggcggtggtttgcagtggcaaattggtgacagcttccgcttgtttggtgagtattactactctccggattcgctctccagcggaattaaaagttatgaagaagcgaatgctggcgcgcgttacaccattatgcgtccagtcagcattgaggctggctaccgttacctgaacctggcaggtaaaaatggcaatcgtgataacgccattgctgatggtccgtatgttggggtaaatgccagcttctga

SEQ ID NO: 584 - DNA, 426 bp, Escherichia coli
gtgcgacaacggactattgtatgccctttgattcaaaatgatggtgcttatttgctgtgtaaaatggccgacgatcgcggcgttttccccggtcaatgggcgctttcgggtggcggcgtggagcctggcgaacgaattgaagaggcactacgccgcgaaattcgcgaagaactgggagaacagctgcttttgacagaaatcacgccgtggaccttcagcgatgatattcgcaccaagacgtatgcagatggtcgcaaggaagagatttatatgatttacctgatttttgactgcgtttctgccaaccgagatgtgaaaataaacgaagagtttcaggactacgcgtgggtaaaacctgaagatctggtgcattatgatttgaatgttgccacccgaaaaacgttacgtttgaaaggtcttctttaa

SEQ ID NO: 585 - DNA, 603 bp, Escherichia coli
gtgttagctttttgccgatcttcgttgaagtcaaaaaaatatttcatcattttactggcgctcgctgcgattgccggactgggtactcatgccgcctggagtagcaatggtttgccacgcatcgacaataaaacactggccagactggcacagcagcacccggttgtcgttttgtttcgccatgctgaacgttgcgatcgttcaaccaatcaatgcttgtcagataaaacaggtattacggtcaaaggtacccaggatgcccgtgaactgggcaacgcttttagtgctgatatccctgattttgatctctattccagtaataccgtccggactattcagtcggcgacctggttttcggcgggtaaaaagctgacggtagataaacgatttcttcaatgcggtaatgagatttatagtgcaattaaagacttacaacgcaaagcacctgataaaaatatcgttatttttacccataatcattgcctgacatatattgctaaagataagcgtgatgcgacatttaaacctgattatctggatggtttagtcatgcatgtggaaaaaggcaaagtttatctggatggggaattcgttaaccactaa

SEQ ID NO: 586 - DNA, 1158 bp, Escherichia coli
atgacggatggaaaaacaatgtcaggatttttgcctttttcgcgaccagcaatgggcgtagaggaactcgctgcagttaaagaggttctcgaatccggttggatcacaaccggtccgaagaatcaggcgcttgaacaagctttttgccagttgacgggaaatcagcatgccatcgcggtcagttcagccaccgccggaatgcatatcacgctaatggcgttggaaattggcaagggcgatgaagtgattacgccttccctgacctgggtttcaaccctcaatatgatttccttgctgggtgcaacgccggtaatggtggatgtcgaccgcgatacgctgatggtcacgcctgaagcgatcgaagcagccattacgccacgcactaaagccatcattccggtgcattatgccggtgcgccagcagatattgacgccattcgcgccattggcgaacgttacggcatcgcagttatcgaagatgctgcccatgccgtcggtacgtattacaaagggcgacatattggcgcaaaaggtactgctattttttcgtttcacgccatcaaaaatattacctgtgcggaaggtggcctgattgttactgataatgaaaatcttgcccgccagctgcggatgctgaaatttcacggtctgggtgtcgatgcctatgacagacatacctggggccgtgcaccgcaggctgaagtcttaacgccgggctataagtacaatctgaccgatattaacgccgcgattgccctgacacagttagtcaaattagagcacctcaacacccgtcggcgcgaaattgcccagcaatatcagcaagcactggcagctctcccctttcagccattaagccttcccgcctggccgcacgttcatgcctggcatctgtttattattcgtgtcgatgaacaacgttgtggtatcagtcgcgatgcgttgatggaagcgttaaaagaaagaggcattggtaccgggttacatttccgcgccgctcacacacaaaaatattatcgcgagcgttttcccacgctgtcgttaccgaataccgaatggaatagcgaacgcatctgttcgttgccgctgttcccggatatgaccaccgccgatgccgaccgcgtcatcacagcccttcagcaactcgcaggacaatga

SEQ ID NO: 587 - DNA, 969 bp, Escherichia coli
atgtttgaaatccaccctgttaagaaagtctcggtggttattcccgtttataacgagcaggaaagcttaccggaattaatcaggcgcaccaccgcagcctgtgaatcactggggaaagagtatgaaatcctgctgattgatgacggcagtagcgataattccgcgcatatgctggtcgaagcctcacaagcggagggcagccatattgtgtctatcttgcttaaccgcaattacgggcaacattcagcgattatggcgggattcagtcacgtcaccggcgacttaattattaccctcgatgccgatctccagaatccgccagaggaaatcccccgtctggtggcaaaagccgatgaaggttacgacgtggtagggactgtacgccagaaccgccaggacagctggtttcgtaaaaccgcttcgaagatgattaaccggcttattcagcgcaccactggcaaagcgatgggtgactatggttgtatgctgcgcgcctatcgccgtcatattgtcgatgcgatgttgcactgccatgaacgcagcacctttatcccgattctggcgaatatcttcgcccgccgtgccattgaaattccagtgcaccatgccgagcgtgagtttggtgaatccaaatacagctttatgcgcctgattaatttgatgtacgacctggtgacctgccttaccacaacgccgctacgtatgttgagtttgctcggcagcattattgcgattggcggttttagcattgcggtgctgctggtgattttacgcctgaccttcggaccacaatgggcggcagaaggcgtctttatgctatttgccgtactgtttacttttattggcgctcagtttatcggcatgggattgctcggtgaatatatcggcaggatctacaccgatgtccgcgcccgcccccgctattttgttcagcaagttatccgtccatccagcaaggaaaatgaataa

SEQ ID NO: 588 - DNA, 1983 bp, Escherichia coli
atgaaaaccgtcgtttttgcctaccacgatatgggatgcctcggtattgaagccctgctgtctgccggttacgaaattagcgccatttttacccatactgataaccccggtgaaaaagccttttatggttcggttgcccgactggcagcggaaagaggcattccagtttatgcgccggataacgttaatcatccgctgtgggtggaacgcattgcccaactatcaccagaggtgattttctctttttattatcgccatcttatttgcgatgagattttgcagctcgctccgagaggtgcatttaatctgcatggttcgctgttaccaaaatatcgtggtcgcgcgccgctgaactgggtgctggtgaacggtgaaacggaaactggcgttacattgcaccgaatggtgaaacgtgccgatgccggggccattgtggcgcaactgcgcattgccattgcgccagacgatatcgccattacgctgcatcataaattgtgccatgccgcgcgccagctactggaacagacattacccgccattaaacacggtaatattctggaaatcgcccagcgcgaaaacgaagccacctgttttggtcgcagaacgccggatgacagtttcctcgaatggcataagccggcatccgtactgcacaacatggtgcgtgccgttgccgatccgtggccgggtgccttcagctatgttggcaatcagaaattcaccgtctggtcgtcgcgtgttcatcctcatgccagcaaagcactgccggggagcgtgatttctgttacaccactgctgattgcctgtggcgatggcgcgctggaaatcgtcactggacaggcgggcgacggcattactatgcagggctcgcaattagcgcagacgctgggcctggtgcaaggttcacgcttgaatagccagcctgcctgtgccgcccgacgccgtacccgggtactcatcctcggggtgaatggctttattggcaaccatctgacagaacgcctgctgcgcgaagatcattatgaagtttacggtctggatattggcagcgatgcgataagccgttttctgaatcatccgcattttcactttgtcgaaggcgatatcagtattcattccgaatggattgagtatcacgtcaaaaaatgtgatgtcgtcttgcctttggtggcgatagccacgccgattgaatatacccgcaacccgctgcgcgtatttgaactcgatttcgaagagaatctgcgcattatccgctactgcgtgaagtaccgtaagcgaatcatcttcccgtcgacttcagaagtttatgggatgtgtagcgataaatacttcgatgaggaccattctaatttaatcgtcggcccggtgaataaaccacgctggatttattcggtgtctaagcaattacttgatcgagtgatctgggcctatggcgaaaaagaaggtttacagttcaccctcttccgcccgtttaactggatggggccacgactggataaccttaatgcagcgcgaattggcagctcccgcgctattacgcaactcattctcaatctggtagaaggttcaccgattaagctgattgatggcggaaaacaaaaacgctgctttactgatattcgggatggtatcgaggcgttataccgcattatcgaaaatgcgggaaatcgctgcgatggcgaaattatcaacattggcaatcctgagaacgaagcgagcattgaagaactgggggagatgctgctggcgagcttcgaaaaacatccgctgcgccattacttcccaccgtttgcgggctttcgtgttgtcgaaagtagcagctactatggcaaaggatatcaggacgtagagcatcgtaaaccgagcatccgcaatgcccgccgctgcctgaactgggaaccgaaaattgatatgcaggaaaccatcgacgaaacgctggatttcttcctgcgcaccgttgatcttacggataaaccatcatga

SEQ ID NO: 589 - DNA, 891 bp, Escherichia coli
atgaccaaagtcggcttacgcattgatgtcgatacctttcgtggcacccgtgaaggcgtgccgcgtctgctggaaatcttgagtaagcataatattcaggccagcatttttttcagcgtcggcccggacaatatgggccgccatctctggcgactggtgaagccacagtttttgtggaagatgctgcgctcaaacgcggcatcgctttatggctgggatattttactggcaggtacggcctggccaggtaaagagattggtcatgccaatgctgatatcattcgtgaagcggctaaacatcacgaagtcggcctgcacgcctgggatcaccatgcctggcaagcccatagcggtaattgggatcggcaaacaatgatcgacgatattgcacgcggccttcgcaccctggaagagattatcggtcaaccggtaacctgttctgccgctgctggctggcgtgctgaccaacaggtgatcgaagcaaaagaagcgttccatttgcgctacaacagcgattgtcgtggggcgatgccgtttcgtccattgctcgaatcaggaacccctggcactgcgcaaattccggtgaccttacccacctgggatgaagtgattggtcgggatgtgaaagcagaagattttaacggttggttactcaaccgcatccagcgagataaaggcacgccggtttataccattcatgccgaagttgaaggctgcgcttatcagcataattttgtggatctcctgaaacgcgcagctcaggaaggcgtgacattttgccctttaagcgaactgttatcagggacgttgccgctcggacaagttgttcgcggaaatattgccggacgtgaaggctggctgggttgccaacaaattgcgggtagtcactga

SEQ ID NO: 590 - DNA, 1653 bp, Escherichia coli
atgaaatcggtacgttaccttatcggcctcttcgcatttattgcctgctattacctgttaccgatcagcacgcgtctgctctggcaaccagatgaaacgcgttatgcggaaatcagtcgggaaatgctggcatccggcgactggattgttccccatctgttaggactacgttatttcgaaaaacccattgccggatactggattaacagcattgggcaatggctatttggcgcgaataactttggtgtgcgggcaggcgttatctttgcgaccctgttaactgccgcgctggtgacctggtttactctgcgcttatggcgcgataaacgtctggctttactcgccacagtaatttatctctcattgtttattgtctatgccatcggcacttatgccgtgctcgatccgtttattgccttctggctggtggcgggaatgtgcagcttctggctggcaatgcaggcacagacgtggaaaggcaaaagcgcaggatttttactgctgggaatcacctgcggcatgggggtgatgaccaaaggttttctcgcccttgccgtgccggtattaagcgtgctgccatgggtagcaacgcaaaaacgctggaaagatctctttatttacggctggctggcggttatcagttgcgtactgacggttctcccctggggactggcgatagcgcagcgggagcctgacttctggcattattttttctgggttgagcatattcaacgctttgcactggatgatgcccaacatagagctccgttctggtactacttgccggtcgtcattgccggtagcctgccgtggctgggattactccccggtgcactgtacgctggctggaaaaaccgcaagcattccgcaaccgtctatttgttgagctggacgataatgccgctgctgtttttctccgtcgctaaaggcaaattgcccacctatattctttcctgctttgcacctctggcaatgctgatggcgcattacgcgttgctggctgcaaaaaataatcctctggcgttgcggattaatggctggattaatatcgcttttggcgtcactggcattattgccacatttgtggtctccccctggggaccaatgaacacaccggtgtggcaaaccttcgagagctataaagtcttttgtgcctggtctattttttcgctatgggcatttttcggctggtacaccttaacaaacgtcgaaaagacctggccttttgccgcgctttgcccgctggggctggcgttgctggtaggattttcaattcctgacagagtcatggaaggaaaacatccgcaattttttgtcgagatgacacaagaatcacttcagccaagccgctatattcttactgatagcgtcggtgttgccgcaggtctggcatggagcctgcaacgcgatgacatcatcatgtatcgccagacgggtgagttgaaatatggccttaattatccggatgcaaaagggagatttgtcagcggtgatgagttcgcaaactggcttaatcaacatcgtcaggaggggattattacactcgtgctttcggttgaccgcgatgaagatatcaatagtctcgccattccgcccgcagatgtcatcgatcgtcaggagcgtctggtgctaattcagtatcggcccaaatga

SEQ ID NO: 591 - DNA, 336 bp, Escherichia coli
atgatctggttaacattagtctttgccagcttgcttagcgttgccgggcagttgtgtcagaaacaggcaacctgctttgcggcggtaaacaaacggcgcaaacatatcgtgctgtggctgggactggcgctggcttgtcttggccttgccatggtgctctggctgctggtcttgcagaacgtaccggtaggcattgcctacccgatgttaagtctgaattttgtctgggtaacgctggctgcagtaaaactttggcacgagccggtatcgctgcgtcactggtgtggggtggcgttcattattggcggcattgtgatcctcgggagtacggtgtaa

SEQ ID NO: 592 - DNA, 387 bp, Escherichia coli
atgggcctgatgtggggattattcagcgtcattatcgcctccgctgcgcaattaagcctgggttttgcggcgagtcatctgccgccaatgacgcacttatgggattttatcgcggcgctgttagcttttggcctggatgcccggatactgttactcgggctgctgggttatctgctttccgttttttgttggtataaaacactacataaacttgcgctaagcaaagcctatgccttgctcagtatgagttatgtgctggtatggattgcttcaatggtacttcccggctgggaagggactttttcgctgaaagcactactgggagtagcctgtattatgagcgggttgatgctgattttcctgcccacaacaaaacaacgttactga

SEQ ID NO: 593 - DNA, 267 bp, Escherichia coli
atggaatggctggtcaaaaaatcgtgctgcaataaacaagataacagacatgtaattatgctctgcgatgctggcggcgcgataaaaatgatcgccgaagtgaagagtgacttcgccgtgaaagtgggggatttactctcgcctttgcagaatgcgctttactgtattaatcgtgaaaagctgcacacggtgaaagtcctttctgcaagctgttatagccccgatgagtgggaacggcagtgtaaagcggcagggaaaactcagtaa

SEQ ID NO: 594 - DNA, 1356 bp, Escherichia coli
atgatcttctctgactggccgtggcgtcactggcggcaagtgcggggagaagccatcgccttacgtctcaatgacgagcaactcaactggcgcgaactttgtgctcgcgtcgatgaattagcctccagctttgcggtgcagggtgtggttgagggcagcggcgtgatgttgcgggcgtggaatacgccgcaaacgctgctggcctggctggcgttactgcaatgcggggcgcgggtgttgcccgtgaaccctcagctgccgcaaccgctgcttgaggaattgctgcccaatcttacgctgcaatttgcgctggtgccggaagggggaaacacgtttccggcgttagcgtcgctgcacattcagctggttgaaggcgcacatgccgcggcgtggcagccgacgcgtctgtgctcaatgacgttaacctctggttccactggcttgccgaaagccgctgttcatacttatcaggctcatcttgccagcgccgaaggggtgttatcgctgattccgtttggcgatcatgatgactggttgctctctttaccgctgtttcacgtctctggtcagggaattatgtggcgctggttatacgctggtgcgcggatgacggtgcgtgataaacagccattggagcaaatgctggcaggttgtactcacgcttcactggtgccaacacaactctggcgtttgctggttaaccgtagttccgtttccctgaaagcggttttacttggcggcgcggctatcccggtcgagttgacggaacaggcgcgcgagcaggggattcggtgcttttgcggctatggtctgaccgagtttgcctccacggtgtgtgcgaaagaagccgacggtctggcagacgttggttcgccgctgccgggtcgggaagtgaaaatcgttaatgatgaagtgtggctgcgggctgccagtatggcagaaggttactggcgtaacgggcaacgggttccactggttaatgacgaaggctggtacgccacgcgtgatcgcggtgagatgtataatggcaagttgaccattgtcggacgtttagacaatctattcttcagtggcggtgagggtattcagccggaagaagtcgagcgcgttattgctgcacatcctgcggttttgcaggtgtttatcgttcccgttgccgacaaggagtttggtcatcggccggtagcggtggtggagtatgaccagcaaagcgttgatcttgacgaatgggtgaaagataagctggctcgttttcaacaaccggtgcgctggctgactctgccgccggagctgaaaaacggcggtattaaaatttcacgtcaggcgctaaaagagtgggtgaaacgccagcaataa

SEQ ID NO: 595 - DNA, 963 bp, Escherichia coli
atgcgtagcgcgcaggtataccgctggcagatccccatggacgcgggggtggttctgcgcgacaggcggttaaaaacccgcgacgggctgtatgtttgcctgcgtgagggcgagcgcgaagggtggggggagatctccccactgccgggcttcagtcaggaaacctgggaagatgcgcaaagtgtgctgcttgcctgggtaaataactggctggcaggcgattgcgagataccgcagatgccttccgttgcctttggcgtaagttgtgcattggcggagctggcagagacgctcccgcaggcggccaattaccgtgcggcgccgctgtgtaatggcgatcctgacgatctgatcctcaaacttgccgatatgcctggcgagaaagtggcgaaggtcaaagtgggattgtacgaagccgtgcgcgacggcatggtggtgaatctgttgctggaggcaattccggatctgcatttgcgtcttgacgcgaaccgcgcctggacaccgctgaaaggccagcagtttgccaaatacgttaacccggattatcgccaccgcatcgcgtttctcgaagagccgtgcaaaacccgcgatgattcgcgtgcgtttgcccgtgaaaccggcattgccattgcctgggatgaaagcttgcgcgagccggattttgcctttgtagctgaagagggcgtgcgcgcggtagttatcaaacccacgctcacgggcagcctggataaagtacgcgagcaagtgcaggcggcgcatgcgctggggctgacggcggtgatcagctcttccattgagtcgagcttaggtctaacgcaactggcgcggattgctgcctggttaacgccagacaccattccgggactggacacgctggatctgatgcaggcgcagcaggttcgtcgctggccggggagcccactgccgttagtggacgttgatgcactggagcggctgttatga

SEQ ID NO: 596 - DNA, 858 bp, Escherichia coli
atgatttatcctgatgaagcaatgctttacgcaccggttgaatggcacgactgctccgaaggttttgaggacattcgttatgaaaaatccaccgacggtatcgcaaaaatcaccattaatcgtccgcaggtgcgcaatgccttccgtcctctgacggtaaaagagatgatccaggcgctggcggatgcgcgttatgacgacaacatcggcgtgatcattctgactggtgcaggcgataaagcgttctgctccggtggtgaccagaaagtacgtggtgattacggcggctataaagatgattccggcgtacatcacctgaacgtgctggacttccagcgtcagatccgtacctgtccgaaaccggttgtcgcgatggtggctggatactccatcggcggtggtcacgtcctgcacatgatgtgcgacctgactatcgcggctgataatgccatcttcggccagactggcccgaaagtcggttccttcgacggcggctggggcgcttcctatatggcgcgcattgttgggcagaaaaaagcacgtgaaatctggttcctgtgccgtcagtacgacgcaaaacaggcgctggatatgggcctggtgaacaccgttgtaccgctggcggatctggaaaaagagaccgtgcgctggtgccgtgaaatgttgcaaaacagcccgatggcactgcgctgcctgaaagctgcgctgaatgccgactgtgacggtcaggcaggtctgcaggagctggcaggtaacgccaccatgctgttctatatgacggaagaaggtcaggaaggtcgcaacgctttcaaccagaaacgtcagcctgatttcagcaaatttaaacggaatccgtaa

SEQ ID NO: 597 - DNA, 759 bp, Escherichia coli
atgatcctgcacgcgcaggcaaaacacggcaaaccaggtttaccctggttggtgtttttgcacggtttttctggcgattgccatgaatggcaagaagtgggcgaggcgtttgccgactactcgcggttgtatgttgatctcccaggtcacggtggttcagcgacgatcagcgtcgatggatttgatgatgtcaccggcttattgtgtaaaacgctggttagttacaacatacttaacttctggctggtggggtactcgcttggcggacgggtggcgatgatggcggcttgccaggagccggcggggctttgtggagttgttgtcgaaggcgggcatcctggattgcaaaatgctgaacaacgcgcggaacgtcagcgttccgatcgccaatgggcgcagcgttttcgtacagaaccgttaacggcggtatttgccgattggtatcaacagcctgtttttgcctcgctcaatgacgatcaacgccgggagctggtggcgctgcgcagcaacaataatggcgcaacccttgccgccatgctggaggcgacttctctcgccgtccagcccgatttacgtgctaaccttagcgcccgcacatttgcgttttattatttatgtggtgaacgtgacagcaaattccgcgctctggcggcggaactggctgccgactgccatgtcattcctcgcgccggacataacgcgcaccgggaaaatcccgctggcgtaatcgcaagtctggcgcagatcttgcgtttctga

SEQ ID NO: 598 - DNA, 1671 bp, Escherichia coli
atgtcagtaagcgcatttaaccgacgctgggcggcggtcattctggaagcattaacgcgtcacggcgtcagacacatctgtatcgcccctggctcgcgttctacaccgttaacgttagcggcggcggagaattccgcattcattcatcatacccatttcgatgagcgtggactggggcatctggcactggggctggcgaaagtcagcaagcagccggtggcggtgattgtgacctccggcacggcggtagcaaatctctatccggcactgattgaagctgggttaaccggagaaaaactgatcctgttaaccgccgatcgcccgccggagctgattgactgcggcgcgaatcaggcgattcgtcagccgggaatgttcgcctctcaccccacgcacagtatttcactgccgcgcccgacccaggatatccccgcacgttggctggtttctaccatcgaccacgctctcggtacgcttcatgctggtggagtccatatcaactgcccgtttgctgaaccgctgtatggcgaaatggacgacaccgggattagctggcaacagcggctgggcgactggtggcaggacgacaaaccgtggctgcgtgaagcgcctcgtcgggaaagtgaaaaacagcgtgactggttcttctggcgacaaaagcgcggcgtggtggttgccgggcgcatgagtgcggaagagggcaaaaaagttgcactgtgggcgcaaactcttggctggccgctgattggcgacgtgctgtcgcaaaccggacagccgctgccgtgtgccgatctctggttaggcaatgccaaagcgaccagcgaactgcaacaggcacaaatagtggtgcaactgggaagcagcctgacggggaaacgactcctccaatggcaggcaagctgtgaaccagaagagtactggattgttgatgacattgaagggcgacttgatccggcacaccatcgcggacgtcgcttaattgccaatattgccgactggctggagctgcatccggcagaaaaacgccagccctggtgcgttgaaatcccgcgcctggcggaacaggcaatgcaggcggttattgcccgtcgcgatgcgtttggcgaagcgcaactggcgcatcgcatcagcgactacttgcctgaacaggggcaattgtttgtcggtaacagcctggtggtgcgtctgattgatgcgctttcgcaacttccggcaggttacccggtgtacagcaaccgtggtgccagcggtatcgacgggctgctctcgactgccgccggcgttcagcgggcaagcggcaaaccgacgctggcgattgtgggcgatctctccgcactttacgatctcaacgcgctggcgttattgcgccaggtttccgcaccgctggtattaattgtggtgaacaacaacggcgggcaaattttttcgctgttgccaacgccgaaaagcgagcgcgagcgtttctatctgatgccgcaaaacgtccattttgagcacgccgctgcgatgttcgagctgaaatatcatcgtccgcaaaactggcaggaacttgaaacgacactagtcgatgcctggcgtacgccgaccaccacggtgattgaaatggtggttaacgacaccgatggtgcgcaaacgctccagcaacttctggcgcaggtaagccatttatga

SEQ ID NO: 599 - DNA, 1296 bp, Escherichia coli
gtgcaatcacttactacggcgctggaaaatctactgcgccatttgtcgcaagagattccggcgacacccggcattcgggttatcgatattcctttccctctcaaagacgcttttgatgccttgagctggctggccagtcagcaggtgtatccgcaattctactggcaacaacgtaatggtgatgaagaagctgccgtcctgggtgcgattacccgttttacgtcgttggaccaggcacaacgttttcttcgccagcacccggaacacgccgacttacgcatctgggggttgaatgcgtttgacccgtcgcagggcaatttacttctaccacgcctggaatggcgacgttgtggcggtaaagccacgctgcggttgacgctattcagcgaaagctcccttcagcacgatgcaatcaaggcaaaagaatttatcgcaacactggtgagtatcaagcccttgcctggattacatttaaccaccacgcgagaacaacactggccggacaaaacgggctggacgcaattaatcgaactggcaacgaaaaccatcgccgaaggcgagctcgacaaagttgtgcttgctcgggcaaccgacctgcatttcacaagtccggtcaatgcggcagcgatgatggctgccagtcgtcggctcaatctgaattgctaccatttttacatggcctttgatggcgaaaatgcttttcttggttcttcaccggaacggttatggcggcggcgtgacaaagtgctgcgtaccgaagcgctggcgggaacggtagcaaatcatcctgatgataagcaggcgcagcagttaggtgagtggctgatggcggatgataaaaaccagcgtgagaacatgttggtggtggaagatatctgccaacgattgcaggccgatacccaaacgctggatgttttaccgccgcaggtactgcgtctacgtaaagtacagcatcttcgccgctgtatctggacttcactcaacaaagcggatgatgtgatctgtttacatcagttgcagccaacggcagcagttgctggcttaccgcgcgatctggcgcgacagtttatcgcccgtcacgaaccgttcactcgagaatggtacgccggttctgcgggctatctctcattacagcaaagtgaattctgcgtttccctgcgctcagcaaaaatcagcggcaatatcgtgcggctatatgctggcgcaggcattgtccgtggttccgaccccgagcaagagtggcaggaaatcgacaacaaagcggcagggctgcgtactttattacaaatggaatag

SEQ ID NO: 600 - DNA, 306 bp, Escherichia coli
atgtctaatcagtttggtgatacacgtattgatgatgacctgacgctgcttagtgaaacactggaagaggtgctccgctcctctggcgatcccgccgatcagaaatatgttgagctgaaagcgcgtgcagaaaaagcgctggatgatgtgaaaaaacgggttagccaggcttcagacagttattactatcgggcgaagcaggctgtttatcgtgctgatgactacgtccacgaaaaaccctggcaaggaattggtgtgggtgcggccgttgggctggttctgggactgttgctggcacgccgttaa

SEQ ID NO: 601 - DNA, 462 bp, Escherichia coli
atgatcgactggcaagatctgcatcattctgatttatccgtttctcagctttatgccttattacaactgcgttgtgcggtatttgtagtggaacaaaactgtccttaccaggatatcgatggtgacgatctggagggagaaaatcgccacattctcggttggcataacgggacactggtggcgtatgcgaggattctgaaaagtgacgacgaactgcaacccgttgtgattggtcgggtgattgtcagcgaagccttacgcggtgaaaaaatcggtcagcaattgatgagtaaggcgctggaatcgtgtactcgccgctggccggagaagccgatttatctgggggcgcaggcgcatttacaaaacttttatgggcaatttggtttcatccctgtgaccgatatttatgaagaagatggtatcccacacattgggatggcacgcgaggtaattcaggcgtaa

SEQ ID NO: 602 - DNA, 918 bp, Escherichia coli
atggaattaatttttttaggtacttcagccggtgtgccaacccgtacgcgtaatgtcacggcaatattgcttaacctgcaacatccgacccagagcggactttggttatttgactgcggtgaaggcacccagcatcagctactgcataccgcctttaaccctggaaaactggacaagatttttatcagtcaccttcatggcgatcatctctttggtttacccggcttactgtgcagtcgttctatgtcaggcattatccaacccttaacgatttatggtccgcacggtatccgtgaatttgtggagaccgcgctgcggattagcggctcatggaccgattatccgctggaaattgtcgaaattggcgctggcgaaattttcgatgatggcctgcgcaaagtgaccgcttatccgatggaacacccactggaatgttatggttatcgtattgaagaacatgataaaccaggtgcattaaatgcccaggcattaaatgctgctggcgtgccgccaggcccgctgtttcaggaattaaaagcgggcaaaacaatcatgctggatgatggaaggcagattaatggcgcagattacttagccgctccagtgccgggtaaagcgctcgctattttcggcgatacgggcccctgcgatgccgcgctggagctggctaaaggcgtcgacgtaatggttcacgaagcgactctggatatggcgatggaggccaaagccaacagtcgcggccatagttctacacgccaggcggcggcactagcccgtgaggctggagtcggtaagctaatcattacccacgtcagctcgcgctatgatgacaaaggttgtcagcacctgttacgtgaatgtcggtcaattttcccggcgactgaactggcgaatgatttcgcggtgtttaacgtttaa

SEQ ID NO: 603 - DNA, 972 bp, Escherichia coli
atgaaaaaaatgacatctctttgttttataccattactactatcgcttacttttattattttttaccaaccctgggtcagggcattaccgccaacgccccgacacgctagtcctgagcaattagaaaaaacagttcgttatcttacacaaactgtgcatccacgtagcgccgacaatattgataatctgaataggtccgcagagtatataaaagaggtctttatcagtagcggtgccagagttaccgcgcaggatgtccccattacgggtggcccctacaaaaacattgttgctaattatggtcctgccgatggaccgctgattattattggtgcgcactatgactctgtcagtagttatgaaaacgatcaattgacctatacgcctggcgcggatgataacgccagcggcgtggcaggattactcgaactggcacgtttgttacagcagcagactccagggattggcgtccaactggtcgcctatgcgtcggaagaaccgcccttctttcgtagcgatgaaatggggagcgcggtacatgcagcttcgcttgagcgtccagtgaaattaatgatagcgctggagatgattggttattacgactcaacgcctggtagccaggattacccatccccggcaatgtcctggctttatcccgatcggggagactttattgccgtggtcggcagaatgcaggatatcaacgccgttcgtcaggtaaaagcggcattgttgtcatcccgggatttatctgtttattctatgaatgccccaggttttattcccggtattgatttctctgatcaccttaattattggcaacacgatattcccgccgtaatgattactgacaccgctttttatcgtaataaacaataccacttgcccggtgatatcgcagacagattaaattatcagaaaatggctcaggtagtggatggagttacaaccttgttatacaacagtaaataa

SEQ ID NO: 604 - DNA, 504 bp, Escherichia coli
atgggaatgattggctattttgcagaaattgactcagaaaagattaaccaactgcttgagtctactaaaaaacctttgatggataatatacatgacacgctttcaggattacgccgactggatattgataaacgctgggattttttacactttggcctgacgggtacatctgcatttgaccccgcgaagaatgacccgctaagtcgcgcagtgcttggtgaacacagcctagaagatggcatagatggcttcctgggattgacctggaatcaggagttagccgcgacaatcgaccgactggaatcactggatcgaagtgagctgcgtaaacagttttccattaagcgactcaatgaaatggagatttatccgggagtaaccttttcagaagagttagaggggcaactctttgcttcgatcatgcttgatatggaaaagctgattagcgcgtatcgacgtatgctgcgacaagggaatcatgcgctgacggttattgttgggtga

SEQ ID NO: 605 - DNA, 1458 bp, Escherichia coli
atgacaataactccacaaaacctgatcgcactgctaccgttgctgatcgtcggcttgacggtggtggttgtgatgctctccattgcgtggcgacgcaatcatttcctcaacgctacgctctcggttattgggcttaacgcggcgctggtttcgctctggtttgtcggccaggcgggcgctatggacgttacgccgctgatgcgcgttgatggtttcgccatgctttacaccgggctggtattgttggcgagcctcgccacctgtactttcgcctacccgtggcttgaagactataacgacaacaaggacgagttctacctgttggtgttaattgccgcgctgggcgggatcctgctggcgaatgccaaccatctggcgtctctgttcctcggtatcgaactgatctctttgccgctgtttggcctggtcggttacgctttccgccagaaacgttcgctggaagccagtatcaaatacaccatcctttctgccgcagcgtcttctttcctgctgttcggtatggcgctggtgtatgcgcagtctggcgacctgtcgtttgtcgcactaggtaaaaacctcggcgacggtatgctcaacgagccgctgttgctggcaggttttggcctgatgattgttggcctcggtttcaaactctctctggtgccgttccacctgtggacgccagacgtataccagggcgcgcctgcgccggtttccactttcctggcgacggcgagcaaaatcgctatcttcggcgtggtgatgcgtttgttcctttacgcaccggtgggtgacagtgaagcgattcgcgtagtgctggcgattatcgcctttgcctccatcatcttcggtaacctgatggcgctgagccagaccaatatcaaacgtctgctcggttactcatctatctctcacctcggctatctgctggtggcgctgattgcgctgcaaaccggcgagatgtcgatggaagcggtaggggtttacctggtcggttatctgttcagcagcctcggcgcgttcggcgtggtcagcctgatgtccagcccgtatcgtggcccggatgctgattccctgttctcttaccgcggtctgttctggcatcgtccgatcctcgcggcagtgatgacggtgatgatgctttcactggctggtatcccaatgacgctgggctttatcggtaagttctacgtgctggcggtcggtgtccaggcacacttgtggtggctggtgggtgccgtggttgttggttcggcaatcggcctctactactacctgcgcgtggcggtgagcttataccttcacgctccggaacaaccgggtcgcgatgcaccatcaaactggcagtacagcgcaggcggtatcgtggtgctgatctctgcactgttggtactggtgctgggtgtatggccacaaccgctgattagcattgtgcggttagcaatgccgctgatgtaa

SEQ ID NO: 606 - DNA, 1530 bp, Escherichia coli
atgttactaccctggctaatattaattccctttatcggcggcttcctgtgctggcagaccgaacgctttggcgtcaaggtgccgcgctggatcgcgctggtaaccatgggattgacgctggcgctgtcgctgcaactgtggttgcagggcggttattcactgacgcaatccgccggaattccgcagtggcagtctgaattcgacatgccgtggatcccgcgttttggtatctctattcatctcgccattgacggtctgtcgttgctgatggtcgtgctgaccggtctgctcggtgtgctggcggtactctgttcgtggaaagagatcgaaaaatatcagggcttcttccacctcaacctgatgtggatcctgggcggcgttatcggcgtgttccttgccatcgacatgttcctgttcttcttcttctgggaaatgatgctggtgccgatgtacttcctgatcgcactgtgggggcataaagcctctgacggtaaaacgcgtatcacggcggcaaccaagttcttcatttacacccaggcgagtggtctggtgatgttgatcgccatcctggcgctggttttcgttcactacaatgcgaccggcgtctggaccttcaactatgaagagctgctgaatacgccgatgtctaacggcgtggaatatctgttgatgctgggcttcttcatcgccttcgcggtgaaaatgccggtggttccgctgcatggctggttaccggatgcgcactcccaggcaccgaccgccggttccgttgacctcgcggggatcttgctgaaaaccgccgcttacggtctgttgcgtttctccttgccgctgttcccgaacgcgtcggcagagtttgcgccaatcgctatgtggctgggtgttatcggcatcttctatggtgcgtggatggccttcgcccagaccgatatcaaacgtctgatcgcctacacctcggtttcccacatgggcttcgtgctgattgctatctacaccggcagccagttggcctaccagggcgcggtaatccagatgattgcgcacggcttgtcggcggcgggtctgtttattctttgtggtcagctttatgaacgtatccatacccgcgacatgcgcatgatgggcggtctgtggagcaagatgaaatggctgccagcactgtcgctgttctttgcggtggcaacgcttgggatgcctggcaccggtaacttcgtcggcgaatttatgattctgttcggcagcttccaggttgtcccggtgattaccgttatctctacctttgggctggtctttgcttctgtttattcgctggcgatgctgcatcgcgcttatttcggtaaagcgaaaagccagattgccagccaggaactgccagggatgtcgctgcgtgagctgtttatgatcctgttgctggtggtgctgctggtactgctgggcttctatccgcagccgattctggatacctcgcattccgcgattggcaatatccagcagtggtttgttaattccgttactactacaaggccgtaa

SEQ ID NO: 607 - DNA, 1842 bp, Escherichia coli
atgaacatgcttgccttaaccattattttgccattgattggcttcgtcctgctggcgttctcccgtgggcgctggtctgaaaacgtctcggcgatcgtcggcgttggctctgtgggcctggcggcgctggtaactgcctttatcggcgttgacttcttcgctaacggtgagcaggcatacagccagccgctgtggacgtggatgtcggtaggcgactttaacatcggttttaacctggtgctggacggcctgtcgctgaccatgctctcggtggtcactggtgtgggtttccttattcacatgtacgcctcctggtatatgcgcggtgaagagggctactctcgcttcttcgcttacaccaacctgttcatcgccagcatggtagttctggtgcttgccgacaacctgctgctgatgtacctcggctgggaaggcgtgggcctgtgctcctatctgctgatcggtttctattacaccgatccgaagaatggcgcagcggcaatgaaagcgttcgtcgtgacccgtgtgggtgacgtcttcctcgctttcgcgctgttcattctttacaacgaactgggcaccctgaacttccgcgaaatggtggaactggcaccagcgcactttgctgacggcaataacatgctgatgtgggcgacgctgatgctgctgggcggtgcggtcggtaaatctgctcagttgccgttgcagacatggcttgccgacgcaatggcgggcccgacgcctgtctccgcgctgatccacgctgcaacaatggtaaccgcgggtgtctacctgatcgcccgtacccacggcctgttcctgatgacgccggaagttctgcatctggtgggcattgttggggcggttacgctgctgctggccggttttgcggcgctggtacagaccgacatcaaacgtgttctcgcttactctaccatgagccagattggctacatgttcctcgcgcttggcgtgcaggcatgggatgcggcgattttccacttgatgacccacgcgttctttaaagcgctgctgttcctggcatccggttccgtcattctggcctgccatcacgaacagaacatctttaagatgggtggtctgcgtaaatctattccgctggtttatctctgcttcttggtgggcggcgcagcactgtcggcactgccgctggtcactgcgggcttcttcagtaaggatgagatcctcgcgggtgcgatggcgaatggacatatcaatctgatggtggcaggtctggtcggtgcatttatgacctcgctttacaccttccgtatgattttcatcgtcttccacggaaaagaacaaattcacgctcacgccgtgaaaggggtaactcacagcctgccgctgattgtgctgctgatcctttccaccttcgttggcgcactgattgtaccgccgctgcagggcgtgcttccgcaaacgacggagctggcgcacggcagcatgttgaccctggaaattacctctggcgtggtcgcggtggtcggcattctgctggctgcctggctatggctgggtaaacgtactctggtgacctccatcgccaacagtgcgccgggccgtctgctgggtacctggtggtacaacgcctggggctttgactggctgtacgacaaagtgttcgtcaagccgttcctgggtattgcctggttgctgaaacgcgatccgctgaactcaatgatgaacatcccggctgtcctttcccgctttgcaggtaaaggtctgctgttaagcgagaacggttatctgcgctggtatgtggcatccatgagcatcggtgcggtcgtggtgctggcactgttgatggtactgcgttga

SEQ ID NO: 608 - DNA, 303 bp, Escherichia coli
atgatccccttacaacatggactgatcctcgcggcaatcttattcgttcttggcttaaccggtctggttatccgtcgcaatctgctgtttatgctgattggtctggaaatcatgattaacgcctccgcgctggcctttgtggtcgccggaagctactggggccagaccgacggtcaggtgatgtacattctcgccatcagcctcgcggcggcggaagcgagtatcggccttgcgctgctgctgcaacttcaccgtcgtcgccagaacctgaacatcgattcagtaagtgagatgcgcggatga

SEQ ID NO: 609 - DNA, 555 bp, Escherichia coli
atggagttcgctttttatatctgtggcctgatagccatacttgcgaccttgcgagtgatcacccataccaatccggtacacgcgctgctgtacctgattatttcgctgctggcgatctctggggtgttcttctcactgggcgcttacttcgccggtgcgctggaaattatcgtctatgcgggtgccattatggtgctgttcgtgttcgtggtgatgatgctcaacctgggcggttcagaaatcgaacaggaacgccagtggctgaaaccgcaggtgtggattggtccggcaattttgtcagccatcatgctggtggtgattgtttacgccattctcggtgttaacgatcaaggtatcgacggtacgccaatcagtgctaaagcagtgggtattacgctgttcgggccttacgtactggcggtggaactggcttctatgctgctgctcgcgggtctggttgtggccttccacgtcggtcgtgaagagcgtgcgggtgaagtgctgagcaatcgtaaagacgacagcgcgaaaagaaaaacggaggagcacgcatga

SEQ ID NO: 610 - DNA, 543 bp, Escherichia coli
atgaccttaaaagaattgttagtaggtttcggtacccaggttcgtagtatctggatgatcggcctgcacgcgttcgccaaacgcgaaacgcgaatgtacccggaagagccggtctatctgccgccccgttatcgtggtcgtatcgttctgacccgcgatccggacggcgaagagcgttgcgtagcctgtaacctctgcgcggtagcctgcccggtcggctgtatctcgctgcaaaaagcagaaaccaaagacggtcgctggtatccggaatttttccgcatcaacttctcacgctgcattttctgtggtctgtgcgaagaagcctgtccgaccacggcgattcagttaaccccggatttcgaaatgggggaatacaagcgccaggatctggtttacgagaaagaggatctgctgatctccggtccgggcaaatacccggaatataacttctaccggatggcaggtatggcaatcgacggcaaagataagggcgaagcagagaacgaagccaagcctatcgacgtcaagagcctgttaccgtaa

SEQ ID NO: 611 - DNA, 978 bp, Escherichia coli
atgagttggatatcaccggaactgattgagatcctgctgaccgtccttaaagcggtggtgatcctgctggtggtagtcacctgtggggcattcatgagctttggcgaacgtcgcctgctgggtctgttccagaaccgttatggacctaaccgtgttggctggggcggttcgctccagctggttgcggacatgatcaaaatgttctttaaagaagactggatcccgaaattctcggatcgcgtcatctttaccctggcaccgatgattgcctttacctcgctgctgctggcctttgcaattgtgccagtcagtccgggttgggtggttgccgacctgaacatcgggattttgttcttcctgatgatggcaggtctggcggtttacgcggtgctgtttgcgggctggtcaagtaacaacaaatactcgctgctgggtgcgatgcgtgcttctgcgcagaccctgagctacgaagtgttcctcgggctttccctgatgggcgtggtggcgcaggccggttcattcaacatgaccgacatcgtcaacagccaggcgcatgtgtggaacgtcatcccgcaattctttggttttattacctttgccatcgcgggcgtggcggtgtgtcaccgtcacccgtttgaccagccggaagccgagcaggaactggcggatggttaccacattgaatattccggtatgaagttcggtctgttcttcgtgggcgaatacatcgggattgtgaccatctctgcactgatggtgacgctgttcttcggtggctggcaaggcccgttgttaccgccattcatctggttcgcgctgaaaaccgcgttctttatgatgatgttcattttgattcgtgcgtcgttaccgcgtccgcgttatgaccaggtaatgtccttcggctggaaaatctgcctgccgctgacgctgatcaacttgctggtaacggcggctgtcattctctggcaggcgcaataa

SEQ ID NO: 612 - DNA, 2727 bp, Escherichia coli
atggctacaattcatgtagacggcaaagaatacgaggtcaacggagcggacaacctgctggaagcttgtctgtctctgggccttgatattccttacttttgctggcatccggcgctgggaagcgtcggtgcttgccgccagtgtgcggtgaagcaataccaaaacgcggaagacacgcgtggtcgcctggtgatgtcctgtatgacaccggcttccgatggcacctttatttccattgacgacgaagaagcgaaacagttccgtgaaagtgtggtcgagtggttaatgaccaaccacccgcacgactgtccggtatgtgaagagggcggtaactgccatcttcaggatatgactgtgatgaccggacacagcttccgtcgctaccgtttcaccaaacgtacccaccgtaatcaggatttagggccgttcatctctcacgaaatgaaccgctgcatcgcctgctaccgctgtgtgcgttactacaaagattacgctgacggtacggacctgggcgtttacggtgcgcacgacaacgtctacttcggtcgcccggaagacggcacgctggaaagcgaattttccggtaacctggtcgaaatttgcccgaccggcgtatttaccgacaaaacgcactccgagcgttacaaccgtaaatgggatatgcagtttgcgccgagcatctgccagcaatgttccatcggctgtaacatcagccccggcgagcgttatggcgaactgcgtcgaatcgaaaaccgttacaacggtacggtaaaccactacttcctctgcgaccgtggtcgtttcggttacggttacgtcaacctgaaagatcgtccgcgtcagccagtacagcgtcgtggcgatgatttcattaccctcaacgccgaacaggcaatgcagggtgcagcagatattctgcgtcagtcgaagaaagtgatcggtattggttctccgcgtgccagcgtggaaagcaactttgcgctgcgtgagctggtgggcgaagaaaacttctataccggtatcgctcacggtgagcaggaacgtctgcaactggcgctgaaagtactgcgtgaaggcggcatttatactccggctctgcgtgaaatcgaatcttacgatgcggtactggtgctgggcgaagacgttacccagaccggcgcgcgcgttgcgctggcggtgcgccaggcggtaaaaggtaaagcacgcgaaatggcggcagcacagaaagtggctgactggcagattgcggcaatcctcaacatcggtcaacgtgcgaagcatccactgtttgttaccaacgttgatgacacccgtctggatgatatcgctgcgtggacttaccgcgcaccggttgaagatcaggcgcgtttaggttttgccatcgcccatgcgctggataactccgcgccagcggttgacggtatcgaacctgagctgcaaagcaaaatcgacgtcatcgtgcaggcactggctggtgcgaagaaaccgttgattatctccgggacgaacgctggtagcgctgaagtgattcaggctgcggctaacgtggcgaaagccctgaaaggtcgcggcgctgacgtcggtatcaccatgattgcccgttccgtcaacagcatggggctgggcattataggcggtggatcgcttgaagaagcgttaactgaactggaaaccggacgcgccgacgcggtggtggtgctggaaaacgatctgcatcgtcacgcttccgctacccgcgtgaatgctgcgctggctaaagcgccgctggtgatggtggttgaccatcaacgcacagcgattatggaaaacgctcatctggtactttccgccgccagctttgctgaaagcgacggtacggtgatcaacaacgaaggccgcgcccaacgtttcttccaggtttacgatccggcttattacgacagccaaactgtcatgctggaaagctggcgctggctgcactcgctgcacagcaccctgctgagccgtgaagtggactggacacagctcgaccatgtgattgacgctgttgtggcgaaaatcccggaactggcgggtatcaaagatgctgcgccggatgcgacattccgtattcgtgggcagaaactggcccgtgaaccgcatcgctatagtggtcgtaccgccatgcgcgccaatatcagcgttcatgagccgcgtcagccgcaggatattgacaccatgttcaccttctcgatggaaggtaacaaccagccgaccgcgcaccgttcgcaagtgccgtttgcctgggcaccaggctggaactccccgcaggcgtggaacaaattccaggacgaagtgggcggcaaactgcgttttggcgatccgggcgtgcgtctgtttgaaaccagcgaaaacggtctggattacttcaccagcgtaccggcacgcttccagccgcaggacgggaaatggcgtatcgcgccgtactaccacctgtttggcagcgatgaattgtcacagcgtgctccggtcttccagagccgtatgccgcagccgtacatcaaactcaacccagcggatgccgcgaagttgggtgtgaacgcaggtacacgcgtctcctttagttacgatggcaacacggtcacgctgccggttgaaatcgccgaagggctgacagcagggcaggtgggcttgccgatgggtatgtccggcattgctccggtgctggctggcgcgcatcttgaggatctcaaggaggcacaacaatga

SEQ ID NO: 613 - DNA, 1338 bp, Escherichia coli
atgaaaaacattatccgtactcccgaaacgcatccgctgacctggcgtctgcgcgatgacaaacagccagtgtggctggacgaatatcgcagcaaaaacggttacgaaggcgcgcgtaaggcgctgaccgggttgtctccggacgaaatcgttaatcaggtaaaagactctggtctgaaagggcgcggcggtgcgggcttttcgactggtctgaagtggagcctgatgccgaaagacgaatccatgaatatccgttacctactgtgtaacgccgatgaaatggagccgggcacctataaagaccgtctgctgatggagcaactgccgcacctgctggtggaaggcatgctcatctccgcgtttgcgctgaaagcttaccgtggctatatcttcctgcgcggcgaatatatcgaagcggcagtgaatctgcgccgtgccattgccgaagccaccgaagcgggtctgcttggcaaaaacattatgggaacaggtttcgatttcgaactgttcgtccataccggggcagggcgctatatctgcggtgaagaaacagcgttaatcaactccctggaagggcgtcgcgctaacccgcgctcgaagccgccattcccggcaacctccggtgcatggggtaaaccaacctgcgttaacaacgtcgaaaccctgtgtaacgttccggcgatcctcgctaacggcgtggagtggtatcagaacatctcgaaaagtaaagatgctggcaccaagctgatgggcttctctggtcgggtgaaaaatccgggtctgtgggaactgccgttcggcaccaccgcacgcgagatcctcgaagactacgccggtggtatgcgtgacggtctgaaattcaaagcctggcagccaggcggagcggggactgacttcctgaccgaagcgcaccttgacctgccgatggaattcgaaagtatcggtaaagcgggaagccgtctgggtacggcgctggcgatggcggttgaccatgagatcaacatggtgtcgctggtgcgtaacctggaagagtttttcgcccgtgagtcctgcggctggtgtacgccatgccgcgacggtctgccgtggagcgtgaaaattctgcgtgcgctggagcgtggcgaaggccagccgggcgatatcgaaacacttgagcaactgtgtcgattcttaggcccgggtaaaactttctgtgcccacgcacctggtgcagtggagccgttacagagcgccatcaaatatttccgcgaagaatttgaggcgggaatcaaacagccgttcagcaatacccatttgattaatgggattcagccgaacctgctgaaagagcgctggtaa

SEQ ID NO: 614 - DNA, 501 bp, Escherichia coli
atgcacgagaatcaacaaccacaaaccgaggcttttgagctgagtgcggcagagcgtgaagcgattgagcacgagatgcaccactacgaagacccgcgtgcggcgtccattgaagcgctgaaaatcgttcagaagcagcgtggctgggtgccggatggcgcgatcaacgcgatcgccgatgtgctggatattccggctagcgacgtcgaaggcgtggcaacgttttatagccagatcttccgtcagccagtaggccgccatgtgatccgttattgcgacagcgtggtctgtcatatcaacggttaccagggcattcaggcggcgctggagaaaaaactgaacatcaaaccagggcaaacgacatttgatggccgctttacgctgctgccaacttgctgcctcgggaactgtgataaagggccaaacatgatgatcgatgaggacactcacgcgcatctgaccccggaagcgatccctgaactgctggagcggtataaatga

SEQ ID NO: 615 - DNA, 1803 bp, Escherichia coli
atggtgaacaatatgaccgacttaaccgcgcaagaacccgcctggcagacccgcgatcatcttgatgatccggtgattggcgaactgcgcaaccgttttgggccggatgcctttactgttcaggcgactcgcaccggggttcccgttgtgtggatcaagcgtgaacaattactggaagtgggcgatttcttaaagaaactgccgaaaccttacgtcatgctgtttgacttacacggcatggacgaacgtctgcgcacacaccgcgaagggttacctgccgcggatttttccgttttctaccatctgatttctatcgatcgtaaccgcgacatcatgctgaaggtggcgctggcagaaaacgacctgcacgtaccgacctttaccaaattattcccaaacgctaactggtatgagcgtgaaacctgggatctatttggcattacattcgacggtcacccgaacctgcgccgcatcatgatgccgcaaacctggaaaggtcacccgctgcgtaaagattacccggcgcgcgctaccgaattctcgccgtttgagctgaccaaagccaaacaggatctggagatggaagccctgaccttcaaaccggaagagtgggggatgaagcgcggcaccgaaaacgaggacttcatgttcctcaacctcggtccgaaccacccgtctgcgcacggtgctttccgtatcgttttgcagcttgatggcgaagagattgtcgactgcgtaccagacatcggttaccaccaccgtggcgctgagaaaatgggcgaacgccagtcctggcacagctacattccgtataccgaccgtatcgaatacctcggcggctgcgttaacgaaatgccttatgtgctggcggtagagaaactggctgggatcaccgtgccggatcgcgttaacgtcattcgcgtaatgctctccgaactgttccgcatcaacagtcacctgctgtatatctcgacctttattcaggacgtcggcgcaatgacgccagtgttcttcgcctttaccgatcgtcagaaaatttacgatctggtggaagcgatcacgggtttccgtatgcacccggcgtggttccgtattggcggcgttgcgcacgacctgccgcgcggctgggatcgcctgctgcgagagttcctcgactggatgccgaaacgtctggcgtcttacgagaaagcggcgctgcaaaacaccattctgaaaggtcgttcccagggcgttgccgcctatggcgcgaaagaggcactggagtggggcaccactggcgcgggcctgcgtgctaccgggatcgacttcgacgtgcgtaaggcgcgtccgtattctggctatgaaaacttcgactttgaaatcccggtgggtggtggtgtttctgactgctacacccgcgtaatgctgaaagtggaagagctgcgccagagtctgcgcattcttgagcagtgcctcaacaacatgccggaaggcccgttcaaagcggatcacccgctgaccacgccgccgccgaaagagcgcacgttgcaacatatcgaaaccctgatcacccacttcctgcaagtgtcgtggggtccggtgatgccagccaatgaatctttccagatgattgaggcgaccaaggggatcaacagttactacctgaccagcgacggtagcaccatgagttatcgcacccgtatccgtacgccgagttatgcgcatttgcagcaaattccggcggcgatccgcggcagcctggtgtctgacctgattgtttatctgggcagtatcgattttgttatgtcagatgtggaccgctaa

SEQ ID NO: 616 - DNA, 663 bp, Escherichia coli
atggattatacgctcacccgcatagatcccaacggtgagaacgaccgttaccccctgcaaaagcaggagatcgtaaccgaccctctggagcaagaagttaacaaaaacgtgtttatgggcaagctcaatgacatggttaactggggtcgtaaaaactcaatttggccgtataacttcggtctttcctgctgttacgttgagatggtgacttcgtttaccgcggtgcatgacgtggcgcgttttggcgctgaagtattgcgtgcttcgccgcgtcaggctgacctgatggtggttgcaggaacctgctttaccaaaatggcaccggttattcagcgtctgtatgaccagatgctggaacccaaatgggttatctcaatgggtgcctgtgccaactccggcggtatgtacgatatttattccgttgtgcagggcgtcgataaattcatcccggttgatgtgtatatcccgggctgcccgccgcgtcctgaagcgtacatgcaggcactgatgctgttgcaggaatctatcggtaaagaacgtcgtccgctctcctgggtggttggcgatcagggcgtttatcgcgccaatatgcaatcagagcgcgaacgcaagcgcggtgaacgcattgccgtaaccaacctgcgtacacctgacgagatttaa

SEQ ID NO: 617 - DNA, 444 bp, Escherichia coli
atgagtatgtcaacatccactgaagtcatcgctcatcactgggcattcgctatctttcttatcgttgccattggcctgtgttgcctgatgctggtaggcggttggtttttaggcggtcgcgcacgcgcgaggtcaaaaaacgttccgtttgaatccggtatcgactcggtcggctccgcccgcttacgcctgtccgccaagttttatctggtggccatgttcttcgttatcttcgacgttgaagcgctgtatctgttcgcatggtcaacctctatccgcgaaagcggctgggtaggctttgtggaagctgcaatttttatttttgtgttactggcaggtctggtttatctggtgcgtattggcgcgctggactggacgcccgcgcgttcacgccgcgagcgtatgaacccggaaacgaacagtatcgctaatcgtcaacgctaa

SEQ ID NO: 618 - DNA, 165 bp, Escherichia coli
atgttgttgaatcgtgtccgttgtgaagcaatggaaaaaatacgggtctattttgacaggaatttgtgtcgattcctccccccaaaagagagtattttcttgatctgtgacacgcttttgtcattctataacaaaaatgcagcaacaaattcacgtattttttaa

SEQ ID NO: 619 - DNA, 939 bp, Escherichia coli
atgataagtgcaaatcgtccgataattaacctcgacctcgatctgctgagaacatttgttgctgttgccgatctgaacacttttgctgccgcagctgccgctgtgtgtcgtactcagtccgccgtaagtcagcaaatgcagcgtctggaacaactcgttgggaaagaactgttcgctcgtcacggtcgcaacaaactgttaactgaacatggcattcaacttcttggttacgccaggaaaatcctgcgttttaatgatgaggcctgctcatcattaatgttcagtaatcttcagggcgtgttaactatcggtgcttcagatgaatctgccgatacgatcttacctttcctgttaaatcgcgtgagttcggtttatccgaaactagcgctggatgtccgcgttaaacgtaatgcctacatggcagaaatgctggaatcccaggaagtggatttgatggtaaccacccatcgtccttctacctttaaggcattgaacctgcgaacctcgccaacacactggtactgcgcagcggaatacgtattgcaaaaaggtgagccgatccctcttgtgttgctggatgatccaagtccgtttcgcgatatggtgctggcgacgcttaataaagcagatattccctggcgacaggcttatgtcgcatcgacgcttccggccgttcgtgcggcagtgaaagccggtcttggcgtgacggcaaggccggtcgagatgatgagtccggacctgcgtgtgctgagtggagtagatggcttaccgccgctacctgataccgaatatttgctgtgctatgacccgtccagtaataatgagctggcccaggtgatctatcaggcgatggagagctaccataatccgtggcaatacagcccaatgtctgctccggaaggagatgactcattgttgattgaaagggatatcgagtaa

SEQ ID NO: 620 - DNA, 1218 bp, Escherichia coli
atgtcccccattgaaaaatccagcaaattagagaatgtctgttatgacatccgtggtccggtgctgaaagaagcaaaacgcctggaagaagaaggtaacaaggtactgaaactgaacatcggcaaccctgccccgttcggttttgacgcgccagatgaaattctcgttgacgtgatacgcaacctgcctaccgctcaagggtattgcgattccaaaggtctttactccgcgcgtaaagccatcatgcagcactaccaggctcgtggcatgcgtgatgttaccgtggaagatatttacatcggcaatggtgtatcggagcttatcgttcaggcaatgcaggcattgctgaacagaggggacgaaatgttggttcctgcacctgattacccactatggaccgcagcggtttcgctctccagcggtaaagcggtgcattatctttgcgatgaatcctctgactggttcccagacctcgatgatattcgcgctaaaattacgcctcgtacgcgtgggatcgttattatcaacccaaataacccaaccggcgcggtatattccaaagagcttttaatggagattgtggagattgcacgtcagcataatctcattatcttcgccgatgaaatttatgacaaaattctctacgacgacgctgagcatcactccattgcgccgctggcacctgacctgctgaccattacctttaacggactgtcgaaaacgtaccgcgttgcaggcttccgtcaggggtggatggtattgaacgggccgaaaaaacacgccaaaggttacatcgaaggtctggaaatgctggcttcaatgcgcctgtgtgctaacgttcctgcgcaacacgccattcagaccgcactgggtggttatcagagcatcagtgaatttattacccctggcggtcgtctttatgagcagcgtaaccgcgcgtgggaattgatcaacgatattccgggcgtttcctgcgtgaaacctcgtggtgcgctgtatatgttcccgaaaatcgacgccaaacgctttaacattcacgacgatcagaaaatggtgctggatttcctgttgcaggaaaaagtcctgttggtgcaagggacggcattcaactggccgtggccggatcacttccgcattgtcacgctaccgcgtgtcgatgatatcgagctgtctttgagcaagttcgcgcgtttcctttctggttatcatcagctgtaa

SEQ ID NO: 621 - DNA, 600 bp, Escherichia coli
atgaaacagagccatttttttgcccatctctcccgcctgaaactcattaaccgctggccgctaatgcgcaacgtgcggacggaaaatgtgtccgaacacagtttgcaggtagcgatggtcgcccatgcgctggcagctatcaaaaatcgtaaatttggcggtaatgtcaacgccgaacgtatcgctttactggcgatgtaccacgatgcttcagaagtgctcaccggagatctccctactccggtgaaatacttcaattcgcaaatcgctcaggaatacaaggctattgaaaaaatcgctcagcaaaaactggtcgatatggttccggaagagctgcaggatatctttgcgccgttaattgacgagcatgcatatagcgatgaagaaaaatcgctggtgaaacaggcagatgcactgtgtgcatatctgaaatgtctggaagagctcgcggccggaaataatgaattcttgctggcaaaaacgcgactggaagcgacgcttgaagcgcgccgcagccaggagatggactacttcatggaagtatttgttcccagcttccatctttcgctcgatgagattagccaggattcaccgctgtaa

SEQ ID NO: 622 - DNA, 1833 bp, Escherichia coli
gtgaacggtgaattgatttgggttctttcattactggccgttgccatcgtcttgtttgcgacgggcagagtgcgtatggatgcggtcgctttgtttgttattgtcgcgtttgcattaagcggaacgctgacggtccccgaagtattttccggcttttccgatcctaacgttgtcctgattgccgccttgtttattattggcgatggtttggtccgtaccggtgttgccactgtaatggggacatggctggtcaaagtggcgggcaacagtgaaatcaaaatgttggttttgttgatgctgaccgtcgcggggcttggcgcgtttatgagttcaaccggcgttgtcgctatctttattcccgtggtgttaagcgttgccatgcgtatgcaaacgtcgccgtcgcgcctgatgatgccgttaagttttgccgggctgataagcggcatgatgacgctggtggcgacgccgccgaacctggtagtcaacagtgaattgctgcgtgaaggctatcatggttttagtttctttagcgtaacacctattggcctggtcgtgctggtgctgggtattttgtatatgttagtgatgcgtttcatgctgaaaggggatacccagaccccgcagcgcgaaggctggacgcgccgaacctttcgcgatcttatccgtgaatatcgactgaccgggcgtgcgcgacgtctggctattcgccccggatcgccaatgattggtcaacggctggacgatctcaaattacgtgaacgttatggtgctaacgtcatcggtgttgaacgctggcggcgttttcgtcgcgttatcgtgaacgttaatggggtttctgaatttcgcgcgcgtgacgttttgcttattgatatgtctgcggctgatgtcgatctccggcaattttgtagtgagcaattgctggagccgatggtactgcgcggcgagtatttttctgaccaggcccttgatgtgggcatggcagagatttcattaattcctgagtcagaacttattggtaaatcggtgcgcgaaattggttttcgtacccgctacggattgaatgtagtggggctaaagcgcaatggcgtggcgctggaaggttcgctggcggatgagcctctgctgctgggcgatatcatcctggttgtgggtaactggaaactgatcggtatgctggccaaacagggccgcgacttcgtagcgctgaacttaccggaagaggtgagtgaagcatcgcccgcgcacagccaggcaccccatgcgattttctgtctggtgctaatggtggcgttaatgctgaccgatgaaattcctaatcctgttgccgctattatcgcctgcctgctgatggggaaattccgctgtatagatgctgaaagcgcctataaatccattcactggccgagcattattttgatcgttgggatgatgccatttgctgtggcattacagaaaacgggaggtgtcgcgctggcggtgaaagggctgatggacattggcggcggttatgggccacatatgatgctgggttgtttgtttgtcttgtcggcggttattgggctatttatttctaataccgcgacggcggtgttgatggttccgattgcgctggctgctgccaaaacgatgggggtgtcgccttatccatttgcgatggtcgtggcgatggcagcatccgccgcctttatgacgccgatatcttcacctgttaacacactggttttaggtccggggaattacagcttcagtgactttgttaagttgggggtaccgttcaccattatcgtgatggcggtttgtgtggtgatgatcccgatgctgtttccgttttga

SEQ ID NO: 623 - DNA, 651 bp, Escherichia coli
gtgcggtgcaaaggttttctgtttgatcttgatggaacgctggtggattccctgcctgcggtagaacgggcgtggagcaactgggccagacgtcatgggttatcgccggaagaggtgctggctttcattcacggtaaacaggcgatcacctctctgcgccattttatggcgggcaaatccgaggcagacattgccgccgagtttacgcgtctggagcacatcgaggccacggaaaccgaaggtattaccgcgcttccgggggcaatcgccttactcaatcatttgaataaagcaggtattccgtgggctattgtgacttctggctccatgccggtagcgcgagcgcgtcataaaatagcggggcttcccgcgccagaggtgtttgtaaccgctgagcgggtgaagcgcggaaaaccagaacctgatgcgtatctgttaggcgcgcagctgctgggccttgcgccgcaggagtgtgttgtggtggaagatgctcccgctggcgtgctttcaggtctggcggcgggttgccatgttattgcggttaatgccccggcagataccccgcgcctgaatgaagtcgatttagtcctccacagtctggagcaaattactgtgaccaaacagccaaatggcgatgttattattcagtga

SEQ ID NO: 624 - DNA, 495 bp, Escherichia coli
atggaaatgaccaacgcgcaacgtcttattttgtctaaccagtacaagatgatgactatgctcgatccggcaaatgctgaacgttaccgtcgcctgcaaacaatcattgagcgtggttatggattacagatgcgtgaactggatcgcgagtttggcgagctgaaagaagaaacctgccgcactatcatcgacattatggagatgtatcatgcgttgcatgtttcctggtctaatttgcaggaccagcaatccatcgatgaacgtcgtgtcaccttcctcggctttgacgccgccactgaagcacgttacctcggttatgtccgctttatggttaatgtggaagggcgctatacccattttgacgctggaactcacggttttaacgcccagacgccaatgtgggaaaaatatcagcgcatgcttaatgtctggcatgcctgcccgcgtcagtaccatttgagcgccaacgaaattaatcaaattattaacgcctga

SEQ ID NO: 625 - DNA, 456 bp, Escherichia coli
atgtcaacgccggataatcgttctgttaatttttttagcttgtttcgccggggacagcattactcaaagacgtggccgctggaaaaacgccttgccccagtctttgtcgaaaatcgcgttatcaagatgacgcgttatgcgatccgttttatgccgccgatcgccgtatttactctctgctggcagattgctctgggcggtcagcttgggccggcagttgccactgcgctgttcgccttaagtttacccatgcagggattgtggtggctgggcaagcgttctgtaacgccattacctcctgcaatcctcaactggttttatgaagttcgcggtaaattgcaggagtctggacaggtgttggcacccgttgaaggcaagcctgattaccaggcattagctgacacgcttaagcgtgccttcaaacaactggataaaactttccttgatgatttgtaa

SEQ ID NO: 626 - DNA, 1203 bp, Escherichia coli
atgtcgagtaagttagtactggttctgaactgcggtagttcttcactgaaatttgccatcatcgatgcagtaaatggtgaagagtacctttctggtttagccgaatgtttccacctgcccgaagcacgtatcaaatggaaaatggacggcaataaacaggaagcggctttaggtgcaggcgccgctcacagcgaagcgctcaactttatcgttaatactattctggcacaaaaaccagaactgtctgcgcagctgactgctatcggtcaccgtatcgtacacggcggcgaaaagtataccagctccgtagtgatcgatgagtctgttattcagggtatcaaagatgcagcttcttttgcaccgctgcacaacccggctcacctgatcggtatcgaagaagctctgaaatctttcccacagctgaaagacaaaaacgttgctgtatttgacaccgcgttccaccagactatgccggaagagtcttacctctacgccctgccgtacaacctgtacaaagagcacggcatccgtcgttacggcgcgcacggcaccagccacttctatgtaacccaggaagcggcaaaaatgctgaacaaaccggtagaagaactgaacatcatcacctgccacctgggcaacggtggttccgtttctgctatccgcaacggtaaatgcgttgacacctctatgggcctgaccccgctggaaggtctggtcatgggtacccgttctggtgatatcgatccggcgatcatcttccacctgcacgacaccctgggcatgagcgttgacgcaatcaacaaactgctgaccaaagagtctggcctgctgggtctgaccgaagtgaccagcgactgccgctatgttgaagacaactacgcgacgaaagaagacgcgaagcgcgcaatggacgtttactgccaccgcctggccaaatacatcggtgcctacactgcgctgatggatggtcgtctggacgctgttgtattcaccggtggtatcggtgaaaatgccgcgatggttcgtgaactgtctctgggcaaactgggcgtgctgggctttgaagttgatcatgaacgcaacctggctgcacgtttcggcaaatctggtttcatcaacaaagaaggtacccgtcctgcggtggttatcccaaccaacgaagaactggttatcgcgcaagacgcgagccgcctgactgcctga

SEQ ID NO: 627 - DNA, 2145 bp, Escherichia coli
gtgtcccgtattattatgctgatccctaccggaaccagcgtcggtctgaccagcgtcagccttggcgtgatccgtgcaatggaacgcaaaggcgttcgtctgagcgttttcaaacctatcgctcagccgcgtaccggtggcgatgcgcccgatcagactacgactatcgtgcgtgcgaactcttccaccacgacggccgctgaaccgctgaaaatgagctacgttgaaggtctgctttccagcaatcagaaagatgtgctgatggaagagatcatcgcgaactaccacgctaacaccaaagacgctgaagtcgttctggtggaaggtctggtcccgacacgtaaacaccagtttgcccagtctctgaactacgaaatcgctaaaacgctgaacgcagaaatcgtcttcgttatgtctcagggcactgacaccccggaacagctgaaagagcgtatcgaactgacccgcaacagcttcggcggtgcaaaaaacaccaatattaccggcgttatcgttaacaaactgaacgctccggttgatgaacagggtcgtactcgcccggatctgtccgagatttttgacgactccaccaaagcaaaagtgaacaacgttgatccggcgaagctgcaagaatccagcccgctgccggttctcggcgctgtgccgtggagctttgacctgatcgcgactcgtgcgatcgatatggctcgccacctgaatgcgaccatcatcaacgaaggcgacatcaatactcgccgcgttaaatccgtcactttctgcgcacgcagcattccgcacatgctggagcacttccgtgccggttctctgctggtgacttccgcagaccgccctgacgtgctggttgccgcttgcctggctgccatgaacggcgtagaaatcggtgccctgctgctgactggcggctacgaaatggacgcgcgcatttctaaactgtgcgaacgtgctttcgctaccggcctgccggtatttatggtgaacaccaacacctggcagacttctctgagcctgcagagcttcaacctggaagttccggttgacgatcacgagcgtatcgagaaagttcaggaatacgttgctaactacatcaacgctgactggatcgattctctgactgccacttctgagcgcagccgtcgtctgtctccgccagcgttccgttatcagctgactgaacttgcgcgcaaagcgggcaaacgtatcgttctgccggaaggtgacgaaccgcgtaccgttaaagcagccgctatctgtgctgaacgtggtatcgcaacttgcgtactgctgggtaatccagcagagatcaaccgtgttgcagcctctcagggtgtagaactgggtgcaggcattgaaatcgttgatccagaagtggttcgcgaaaactatgttggtcgtctggtcgaactgcgtaagaacaaaggcatgaccgaaaccgttgcccgcgaacagctggaagacaacgtggttctcggtacgctgatgctggaacaagatgaagttgatggtctggtttccggtgctgttcacaccaccgcaaacaccatccgtccgccgctgcagctgatcaaaactgcaccgggcagctccctggtatcttccgtgttcttcatgctgttgccggaacaggtttacgtttacggtgactgtgcgatcaacccggatccgaccgcagaacagctggcagaaatcgcgattcagtccgctgattccgctgcggccttcggtatcgaaccgcgcgttgctatgctctcctactccaccggtacttctggtgctggtagcgacgtagaaaaagttcgcgaagcaactcgtctggcgcaggaaaaacgtcctgatctgatgatcgacggtccgctgcagtacgacgctgcggtaatggctgacgttgcgaaatccaaagcaccgaactctccggttgcaggtcgcgctaccgtgttcatcttcccggatctgaacaccggtaacaccacctacaaagcggtacagcgttctgctgacctgatctctatcggaccgatgctgcagggtatgcgcaagccggttaacgacctgtcccgtggcgcactggttgatgatatcgtctacaccatcgcgctgactgcgattcagtctgcacagcagcagtaa

SEQ ID NO: 628 - DNA, 1479 bp, Escherichia coli
atgcccgatacgttggtgattatcttttttgttgccattttaaccagccttgccacctgggtagttccggtgggcatgtttgacagtcaggaagtgcagtatcaggttgatggtcaaacaaaaacacgcaaagtcgtagatccacactcatttcgcattctgactaacgaagcaggcgaacctgagtatcaccgcgtacagctgttcacgacgggcgatgaacgcccgggtctgatgaacttcccgtttgaagggttaacctcaggatcgaaatacgggacagccgttggcatcatcatgtttatgctggtgattggcggcgcgtttggcattgtgatgcgtacaggaaccattgataacggtatcctggcgcttattcgccatacccgcggaaatgaaattctctttattcctgcgctgtttattctgttttcacttggcggcgcaatatttggtatgggagaagaggccgtcgcctttgccattatcatcgcaccgctaatggtccggctgggctatgacagtattaccaccgtccttgtgacctatattgccacgcaaatcggttttgccagttcgtggatgaacccgttttgtgtggttgttgctcagggtattgccggcgttccggtgctttctggctccgggttgcgcatcgtggtgtgggttatcgccactctgattggcctgatctttaccatggtgtacgcctcacgagtgaaaaagaatcctcttctgtcacgcgtgcatgagtccgaccgcttctttcgtgaaaagcaggctgatgttgaacaacgtccgtttacctttggtgactggctggtattgattgtcctgaccgccgtaatggtctgggttatttggggcgtgatcgttaatgcctggtttattcctgaaattgccagccagttcttcaccatgggtctggtgattggcatcatcggcgttgttttccgccttaacggcatgacggttaataccatggcttcatcctttaccgaaggggcgcgaatgatgatcgcccctgccctgctggtgggtttcgccaaagggattttgctgctggtcggtaatggtgaagcgggtgatgccagcgtgttaaataccatcctcaacagcattgccaatgccattagcggtctggataacgcagtcgcggcctggtttatgttgctcttccaggcggtatttaatttcttcgtgacgtccggttctggtcaggcggcgttaaccatgccgttactggcaccgcttggcgatctggtcggtgttaaccgtcaggttaccgtgctggctttccagtttggcgatggcttcagccacatcatttacccaacctcagcttcgttaatggcaacgctcggtgtttgccgggtggacttccgtaactggctgaaggtgggtgcgaccctgcttggactgctgtttattatgtccagcgtcgtggtgatcggcgctcagttgatgggctaccactaa

SEQ ID NO: 629 - DNA, 543 bp, Escherichia coli
atggaacagcgtcgtttggcaagtactgaatgggtggatattgtcaatgaagagaacgaagtcattgcacaagccagccgggaacaaatgcgggcacagtgtctgcgtcatcgtgcaacttatatcgtcgtgcatgatggcatgggcaaaattctggtccagcgtcgtaccgagacaaaagactttttacccggcatgttagatgcgaccgcaggcggtgtagtccaggccgatgagcaactgctggaatccgcgcgtcgcgaagcggaagaagagttgggcattgccggggtcccctttgccgagcacgggcagttctatttcgaagataaaaattgccgtgtctggggcgcgttgttcagctgcgtctctcacggtcccttcgctctacaggaagatgaagtcagtgaagtttgctggctgacgccggaagaaatcaccgcacgctgcgatgagttcactccagactcgctgaaagcgctggcgttgtggatgaagcgcaatgccaaaaatgaagccgtagagactgaaacggcagaatga

SEQ ID NO: 630 - DNA, 552 bp, Escherichia coli
atgaaactgatgtttgcatcggacattcatgggtcgttaccggcgacggaacgtgttctggagttgtttgcccaaagcggtgcccagtggctggtgatccttggcgacgtgttgaatcatggcccgcgtaatgctttaccggagggttacgcgccagccaaagtcgctgaacggcttaatgaagtggcacataaggttatcgctgtgcgcggcaactgcgacagcgaagtggatcaaatgctgctgcatttcccgataaccgcgccgtggcaacaggtattactggaaaaacaacgtctgtttttgacgcatggtcatctttttggcccggaaaatctacctgctttaaaccagaacgatgtgctggtgtacggtcatacccatctgccagtggcagaacagcggggggaaattttccacttcaaccccggctcggtgagtattccgaaaggcggtaatccggcgagttatggcatgctggataatgacgtacttagtgtaatcgcactcaatgatcaaagtatcattgcgcaggtcgcgattaatccgtaa

SEQ ID NO: 631 - DNA, 645 bp, Escherichia coli
atgagtaaaaccgctatcacgctttggtcagatgcccattttttctccccttatgtgttatccgcctgggtggcgttgcaggagaaaggcctgtcgtttcatatcaagaccatcgacctcgacagcggtgaacatttgcagccggcgtggcaaggttacggtcagacacgccgtgtgccgttattacaaatcgatgattttgagttgagtgaatcttctgccattgcggagtatctggaagatcgatttgcgccaccgacctgggaacgtatttatccgcttgatttagaaaatcgtgcgcgtgcacgacagattcaggcttggttgcgcagcgatctgatgcccattcgcgaagaacgcccgacggatgttgtctttgcgggggcgaaaaaagcgccactaacggccgagggaaaagccagtgcagagaaattgttcgcgatggcagagcatttgttagcactgggtcagccgaatttatttggtgaatggtgcattgctgatactgatctggcgctaatgattaaccgcctggtactacatggcgatgaggtgccggaacgcctggtggattatgcgacattccagtggcagcgagcgtctgtccagcgttttattgcactttcggcgaagcaatctggctga

SEQ ID NO: 632 - DNA, 648 bp, Escherichia coli
atgatcgatctctatttcgccccgacacccaatggtcacaaaattacgctgtttctcgaagaagcagggctggattatcgcttaataaaggtagacctggggaaaggaggtcagtttcgcccggaatttttgcgcatttcgcctaacaacaaaattccggcaattgttgatcattctccagccgatggcggcgaaccgctaagcctctttgagtctggtgccattttgttgtatctggctgagaaaacgggactctttttgagtcatgaaacgcgtgaacgcgccgtcacattacagtggttattctggcaggtaggcggactggggccgatgcttgggcaaaatcatcattttaatcacgcagccccccaaaccattccttacgctattgaacgttatcaggttgaaactcagcgtctgtaccatgtactgaacaagcggctggaaaattcgccctggctgggaggcgagaactacagcattgcggatattgcctgctggccgtgggttaatgcctggactcgccagcgaattgacctcgcaatgtatccggcagtcaagaactggcatgagcggatccgttcgcgccctgccaccgggcaggcactgctaaaagcacaacacggtgatgagcgttcggatagttaa

SEQ ID NO: 633 - DNA, 363 bp, Escherichia coli
atggcacaacctgccgctattattcgtataaagaaccttcgtttacgtacgtttatcggaattaaggaagaagaaattaacaaccgtcaggatattgttatcaatgtgacgatccactaccccgccgataaagcgcgcactagcgaagatatcaacgatgcgctgaattatcgcaccgtaacgaaaaacattattcagcatgtagagaataaccgtttctctttgctggaaaaattaactcaggatgtgctcgatatcgcacgtgaacatcactgggtgacgtatgctgaagtggagatcgataaactgcacgcgctgcgctacgccgattcggtatccatgaccttaagctggcagcgttaa

SEQ ID NO: 634 - DNA, 894 bp, Escherichia coli
atgaacatagtgatcaccggagggacgggattaattggtcgccatttgattccacgtttgctggacctgggccatcaaatcacggtagtgacgcgtaacccgcagaaagccagttccgttctcggccctcgggtgacactatggcaagggcttgccgaacaaagcaacctcaacggcgttgatgcggtaatcaacctggccggagaaccgattgctgataaacgctggactcacgagcaaaaagagcgtctctgccaaagccgctggaatatcacgcaaaaactggtcgatttgattaatgccagcgacacgccaccgtcggtactcatttccggctcggcaacgggctattatggcgacttaggtgaagtggtggttaccgaagaggaaccgccgcataacgaatttacccataaactctgcgcccgctgggaagaaattgcctgccgggcacaaagtgacaaaacgcgagtgtgcctgctgcgtaccggcgcagtgctggcaccggatggcggtattctcggtaaaatgctgccgccgtttcgtcttggcctgggcgggccgattggttccggtcggcagtatctggcctggattcatattgatgatatggtcaacggcattctctggctgctggataacgagctgcgcgggccatttaatatggtttcgccctacccggtgcgcaatgaacaatttgcccatgcactgggtcatgcgctgcatcgcccggccattttgcgcgtccctgcgaccgccattcggttgttaatgggcgaatcttcagttctggtattaggcggtcaacgcgcgctgccaaaaaagctggaagaagcgggttttgcgtttcgctggtacgatttagaagaggcgctggcggatgtcgttcgctga

SEQ ID NO: 635 - DNA, 891 bp, Escherichia coli
atgacaatatcgacaacttccacgccgcatgatgcggtatttaaatcttttttacgccatccagacaccgcgcgggattttattgatattcatcttcccgcgccgctgcgcaaactgtgtgatttaacgacgcttaaactggaaccaaacagttttattgatgaagacctgcggcaatattattccgacctcttgtggtctgtgaaaacgcaggagggagcgggttatatttatgtggtgatagagcaccaaagtaagccagaggaattaatggcttttcgcatgatgcgctattccattgcggcgatgcaaaaccatcttgatgcgggttataaagagcttccattagtgatcccgatgctgttttatcatggttgcagaagcccttatccatattcactctgctggcttgatgaatttgccgagcctgcgattgcccgcaaaatttattcatcggcttttccgctggtggatattaccgtggtgccggatgacgagattatgcaacatcgcaaaatggcgctgttggagttaattcagaaacatattcgtcagcgcgatctgttgggattagtcgaccaaattgtttcgctgctagttacagggaacactaatgacagacagctaaaagccctgtttaattacgtattacaaacgggggatgcccggcgtttccgtgcatttattggtgagatagcggaacgcgcaccacaagaaaaggagaaactgatgaccattgctgacagattacgtgaagaaggcgcaatgcagggcaaacacgaagaagccctgcgcattgctcaggagatgatggaaaaaggatttgaccacgaagtcatcctgacgctgacccgactttcaccagacgatcttatcgcgcaaagccactaa

SEQ ID NO: 636 - DNA, 774 bp, Escherichia coli
atgtccgagaataaattaaacgttatcgatttgcacaaacgctacggcgaacacgaagtgctgaaaggggtctcattgcaagcgaatgccggagatgtcataagcatcatcggatcgtcgggatcggggaaaagtacctttctgcgctgcattaacttcctcgaaaaaccgagcgaaggatcgatcgtggtcaatggccagacgatcaatctggtgcgcgataaagatggtcaactcaaagtcgccgataaaaatcagctgcgcttattgcgcacacgcctgacgatggtatttcagcacttcaatctctggagccatatgacggtgctggaaaacgtcatggaagcgccgattcaggtgttgggcctgagcaagcaggaagcgcgcgagcgggcggtgaaatatctggcaaaagtcgggatagacgaacgtgcgcaggggaaatacccggtgcacctgtccggtggtcagcaacagcgtgtttctatcgcgcgggcgctagcgatggaaccggaagttttactgtttgatgaacctacttcagcgctcgatcctgaactggtaggcgaagtgttgcgtattatgcagcaactggcagaagaggggaaaaccatggtggtggtgactcacgaaatgggctttgctcgccatgtttctactcacgtcatttttctccatcaggggaaaatagaggaagaaggggcgccggagcagttattcggtaacccgcaaagccctcgtctgcaacagttccttaaaggttcgctgaaataa

SEQ ID NO: 637 - DNA, 717 bp, Escherichia coli
gtgatcgaaatcttacatgaatactggaaaccactgctgtggactgacggttatcgctttactggcgtagcaatcaccctgtggctgctgattttgtcggtagtgataggcggagttctggcgctgtttctggcgattggtcgcgtctcaagtaataaatacatccagtttccaatctggttatttacctatatttttcgcggtacgccgctgtatgttcagttgctggtgttctattccggcatgtacacgctggagattgttaagggaactgagttccttaacgccttttttcgcagtggcctgaactgtaccgtgctggcgctgacgcttaacacctgcgcttacactaccgagatttttgccggggcaatccgttcagtgccgcatggggaaattgaagccgccagagcctatggcttctcgacctttaaaatgtatcgctgcattattttgccttctgcgctgcgtattgcgttaccggcatacagcaacgaagtgatcctgatgctgcactctactgcgctggcatttactgccacggtgccggatctgctgaaaattgcccgcgatattaacgccgccacatatcaaccttttaccgcttttggcattgccgcggtgctctatttaatcatctcttatgtcctgatcagcctctttcgtagagctgaaaaacgctggttgcagcatgtgaaaccttcttcaacgcactga

SEQ ID NO: 638 - DNA, 687 bp, Escherichia coli
atgttgtatgggttttcaggtgttattttacagggtgcgctcgtcacgctggagctggctatcagctctgtagtgctcgctgtaatcatcggtttaattggcgctggcggtaagctctcacaaaatcggctttcgggccttattttcgaagggtacaccacgctgattcgaggcgtgccggatttagtattgatgctgctgattttctacggtttgcagattgcgctaaacacggtgacggaggcgatgggcgtcgggcagattgatattgatccgatggtcgcaggtattatcactctcggttttatctacggtgcttattttaccgaaacgtttcgtggcgcgtttatggcagtgccgaaaggacatatagaggcggcgacggcgttcggttttactcgtgggcaagtgtttcggcggatcatgtttccggcgatgatgcgttacgccctgccaggcattggcaacaactggcaggtgatcctcaaatctaccgcactggtttcgttactcggcctggaagatgtggtcaaagccacgcagctggcaggcaaaagtacctgggaaccgttctatttcgctatcgtctgcggcgtgatttatcttgttttcaccaccgtttccaatggtgtgctgctgttccttgagcgccgctactccgtgggtgtgaagagggctgacctgtga

SEQ ID NO: 639 - DNA, 783 bp, Escherichia coli
atgaaaaaactggtgctatcgctctctctggttctggccttctccagcgcaactgcggcatttgctgcgattccgcaaaacatccgcatcggtaccgatccgacctatgcgccatttgaatcaaaaaattcacaaggtgaactggttggcttcgatatcgatctggcgaaggagttgtgcaaacgcatcaatacgcaatgtacgtttgtcgaaaacccactcgatgcgttaatcccgtccttaaaagcgaagaagattgacgccatcatgtcatcgctttccattacggaaaaacgtcagcaagaaatagccttcaccgacaaactgtacgctgccgattctcgtctggtggtggcgaaaaattccgacattcagccgacagtcgaatcgctgaaaggcaaacgggtaggcgtattgcagggcaccacccaggagacgttcggtaacgaacactgggcaccaaaaggcattgaaatcgtttcttatcaagggcaggacaatatttattctgacctgactgccggacgtattgatgccgcgttccaggatgaggtcgcagccagcgaaggtttcctcaaacaacccgtcggtaaagattacaaattcggtggcccgtctgttaaagatgaaaaactgtttggcgtagggaccggcatgggcctgcgtaaagaagataacgaactgcgcgaggcactgaacaaagcctttgccgaaatgcgcgctgacggtacttacgagaaattagcgaaaaagtacttcgattttgatgtttatggtggttaa

SEQ ID NO: 640 - DNA, 783 bp, Escherichia coli
atgaagaagtcgattctcgctctgtctttgttagtcggtctctccacagcggcttccagctatgcggcgctaccggagacggtacgtatcggaaccgataccacctacgcaccgttctcatcgaaagatgctaaaggtgactttgttggctttgatatcgatctcggtaacgagatgtgcaaacggatgcaggtgaaatgtacctgggttgccagcgactttgacgcgctgatcccctcactgaaagcgaaaaaaatcgacgccattatttcgtcgctctccattaccgataaacgtcagcaggagatagccttctctgacaagctgtacgccgcagattctcgtttgattgccgccaaaggttcaccgattcagccaacgctggattcactgaaaggtaaacatgttggtgtgctgcagggatcaacccaggaagcatacgctaacgagacctggcgtagcaaaggcgtggatgtggtggcctatgccaaccaggatttagtctattccgatctggctgcaggacgtctggatgctgcgttacaagatgaagttgctgccagcgaaggtttccttaagcaacccgccggtaaagatttcgcctttgcaggcccatcagtgaaagacaaaaaatacttcggtgacggcaccggtgtagggctgcgtaaagatgatgctgaactgacggcggccttcaataaggcgcttaacgagctgcgtcaggacggcacctacgacaagatggcgaaaaagtatttcgactttaatgtctacggtgactga

SEQ ID NO: 641 - DNA, 570 bp, Escherichia coli
atgaaacgactcattgtaggcatcagcggtgccagcggcgcgatttatggcgtgcgtttattacaggttctgcgcgatgtcacagatatcgaaacgcatctggtaatgagccaggcggcgcgccagaccttatccctcgaaacggatttttccctgcgcgaagtgcaggcgttagctgatgtgacacacgatgcgcgcgatattgctgccagcatttcttccggttctttccagacgttggggatggtgattttaccctgttcaatcaaaaccctgtccggcattgtccatagctatactgatggcttactgacccgtgcggcagatgtggtgctgaaagaacgtcgcccgttggtgctctgcgtgcgtgaaacgccactgcacttaggccatctgcgtttaatgactcaggcggcagaaatcggtgcggtgattatgcctcccgttccggcgttttatcatcgcccacaatcccttgatgatgtgataaatcagacggttaatcgtgttcttgaccagtttgcggtaacccttcctgaagatctctttgcccgctggcagggcgcataa

SEQ ID NO: 642 - DNA, 1518 bp, Escherichia coli
atgtgcggtattgtcggtatcgccggtgttatgccggttaaccagtcgatttatgatgccttaacggtgcttcagcatcgcggtcaggatgccgccggcatcatcaccatagatgccaataactgcttccgtttgcgtaaagcgaacgggctggtgagcgatgtatttgaagctcgccatatgcagcgtttgcagggcaatatgggcattggtcatgtgcgttaccccacggctggcagctccagcgcctctgaagcgcagccgttttacgttaactccccgtatggcattacgcttgcccacaacggcaatctgaccaacgctcacgagttgcgtaaaaaactgtttgaagaaaaacgccgccacatcaacaccacttccgactcggaaattctgcttaatatcttcgccagcgagctggacaacttccgccactacccgctggaagccgacaacattttcgccgccatcgctgctacaaaccgcttaatccgcggtgcgtatgcctgtgtggcgatgatcatcggccacggtatggttgctttccgcgatcctaacgggattcgtccgctggtactgggaaaacgtgatattgacgagaaccgcacagaatatatggtcgcttccgaaagcgttgcgctcgatacgctgggctttgatttcctgcgtgacgtcgcgccgggcgaagcgatttacatcactgaagaagggcagttatttacccgtcagtgtgctgacaatccggtcagcaatccgtgcctgtttgagtatgtatactttgcccgcccggactcgttcatcgacaaaatttccgtttacagcgcgcgcgtgaatatgggcaccaaactgggcgaaaaaattgcccgcgaatgggaagatctggatatcgacgtggtgatccctattccggaaacctcgtgtgatatcgcgctggaaattgcgcgtattctgggcaaaccgtaccgccagggcttcgttaaaaaccgctatgttggccgcaccttcatcatgccgggtcagcagctgcgtcgtaagtccgtgcgccgtaaactgaacgccaaccgcgccgagttccgcgataaaaacgtcctgctggtcgacgactctatcgtccgtggcaccacgtctgagcagattatcgagatggcacgcgaagccggagcgaagaaagtgtacctcgcttctgcggcaccggaaattcgcttcccgaacgtttacggtatcgatatgccgagcgccacggaactgatcgctcacggtcgcgaagtagatgaaattcgccagatcatcggtgctgacgggttgattttccaggatctgaacgatctgatcgaagccgttcgcgctgaaaacccggatatccagcagtttgaatgctcggtattcaacggcgtctacgtcaccaaagatgttgatcagagctatctcgattttcttgatactttacgtaatgacgacgccaaagcagtgcaacgtcagaacgaagtggaaaatctcgaaatgcataacgaaggatga

SEQ ID NO: 643 - DNA, 489 bp, Escherichia coli
atggtctggattgattacgccataatcgcggtgattgctttttcctctctggttagcctgatccgcggctttgttcgtgaagcgttatcgctggtgacatggggttgtgctttctttgttgccagtcattactacacttacctgtcagtctggtttacgggctttgaagacgaactggttcgaaatgggattgccatcgcggtactgtttatcgctaccctgatcgttggtgctatcgtgaacttcgtgataggccagttggtggagaaaacggggttgtcaggcaccgatcgggtgttgggcgtctgtttcggtgcgttgcgcggtgtgttgattgttgctgccattctcttctttctcgactcctttaccggggtgtcgaaaagcgaagactggagcaaatcacagctgatcccgcagttcagttttatcatcagatggttttttgattatctgcaaagctcgtcaagtttcttgcccagagcgtaa

SEQ ID NO: 644 - DNA, 663 bp, Escherichia coli
gtggcaagtaagtttcagaatcggttagtgggcacgatcgtgctggtagcgctgggggtgattgtacttccagggctgctggacgggcagaaaaaacattatcaggatgagttcgcggctatcccgctggtgccaaaagcgggcgatcgcgatgagcctgatatgatgccagccgccacccaggcgttgccgacgcagccgccggaaggcgcagcggaagaggtacgggcaggtgatgccgcagcaccgtcgctcgatccggccactattgcagccaataacaccgagtttgaaccggaacctgcaccggtcgccccaccgaagccgaaaccggtggagccgcttaagccaaaggttgaagcaccacctgcgccgaagccagaaccgaagccggtcgtggaagaaaaagcagcgccaacgggtaaagcttatgttgtgcaactgggcgcgctgaaaaatgccgataaagtgaatgagattgtcggtaagctgcgcggtgccggttatcgggtttatacgtcgccatccacgccagtgcagggtaaaattacccgtattctggttgggccggatgcttccaaagagaagctgaaaggatcgctgggtgagctcaagcagctttctggcttaagtggcgtggtaatgggctatacaccgaattaa

SEQ ID NO: 645 - DNA, 1269 bp, Escherichia coli
atgattatcaaacgcactcctcaagccgcgtcgcctctggcttcgtggctttcttatctggaaaacctgcacagtaaaactatcgatctcggccttgagcgcgtgagccaggtcgcggcgcgtcttggcgttctgaaaccagcgccatttgtgtttaccgttgcgggtacgaatggcaaaggcaccacctgccgtacgctggagtcgattctgatggcggcagggtacaaagtgggcgtctacagttcgccgcatctggtgcgttataccgagcgcgtacgtgtgcagggtcaggaattgccggaatcggcccacaccgcttcttttgcggagattgaatcggcacgcggtgatatttccctgacctatttcgaatacggtacgctgtcggcgttgtggctgttcaagcaggcacaacttgacgtagtgattctggaagtagggctgggcggtcgtctggacgcaaccaatattgtcgatgccgatgtcgcggtagtaaccagtattgcgctggatcataccgactggctggggccagatcgtgaaagtattggtcgcgagaaagcaggtatctttcgcagcgaaaaaccggcaattgtcggtgagccggagatgccttctaccattgctgatgtggcgcaggaaaaaggtgcactgctacaacgtcggggcgttgagtggaactattccgtcaccgatcatgactggacgtttagcgatgctcacggcacgctggaaaatctgccgttgccgcttgtcccgcaaccgaatgccgcaacggcgctggcggcactgcgtgccagcgggctggaggtcagtgaaaatgccattcgcgacgggattgccagcgcaattttgccgggacgtttccagattgtgagcgagtcgccacgcgttatttttgatgtcgcgcataatccacatgcggcggaatatctcaccgggcgtatgaaagcgctaccgaaaaacgggcgcgtgctggcggttatcggtatgctacatgataaagatattgccggaactctggcctggttgaaaagcgtggttgatgactggtattgtgcgccactggaagggccgcgcggtgccacggcagaacaactgcttgagcatttgggtaacggcaaatcatttgatagcgttgcgcaggcatgggatgccgcaatggcggacgctaaagcggaagacaccgtgctggtgtgtggttcgttccacacggtcgcacatgtcatggaagtgattgacgcgaggagaagcggtggcaagtaa

SEQ ID NO: 646 - DNA, 915 bp, Escherichia coli
atgagctggattgaacgaattaaaagcaacattactcccacccgcaaggcgagcattcctgaaggggtgtggactaagtgtgatagctgcggtcaggttttataccgcgctgagctggaacgtaatcttgaggtctgtccgaagtgtgaccatcacatgcgtatgacagcgcgtaatcgcctgcatagcctgttagatgaaggaagccttgtggagctgggtagcgagcttgagccgaaagatgtgctgaagtttcgtgactccaagaagtataaagaccgtctggcatctgcgcagaaagaaaccggcgaaaaagatgcgctggtggtgatgaaaggcactctgtatggaatgccggttgtcgctgcggcattcgagttcgcctttatgggcggttccatgggatctgtggtaggtgcgcgtttcgtgcgtgccgttgagcaggcgctggaagataactgcccactgatctgcttctccgcctctggtggcgcacgtatgcaggaagcactgatgtcgctgatgcagatggcgaaaacctctgcggcactggcaaaaatgcaggagcgcggcttgccgtacatctccgtgctgaccgacccgaccatgggcggtgtttctgcaagtttcgccatgctgggcgatctcaacatcgctgaaccgaaagcgttaattggctttgccggtccgcgtgttatcgaacagaccgttcgcgaaaaactgccgccaggattccagcgcagtgaattcctgatcgagaaaggcgcgatcgacatgatcgtccgtcgtccggaaatgcgcctgaaactggcgagcattctggcgaagttgatgaatctgccagcgccgaatcctgaagcgccgcgtgaaggcgtagtggtgccaccggtaccggatcaggaacctgaggcctga

SEQ ID NO: 647 - DNA, 660 bp, Escherichia coli
atggacctgatttatttcctcatcgattttatcctgcacattgacgtgcatctggcagagctggtcgcggagtacggcgtctgggtttatgccattttgttcttaattttgttctgtgaaaccggtctggtggtaacgccgtttttaccgggtgattcattgctgtttgttgccggagcgttggcatcactggagaccaacgatctcaacgtccatatgatggtggtgctgatgctgatcgccgcgattgtgggtgacgcggtcaattacactatcgggcggttgttcggtgaaaagttattcagtaatcccaattcgaaaattttccgtcgcagttatctcgacaaaacccatcagttttatgagaaacatggcggcaaaacgattattctcgcccgttttgtgccgatcgtcagaacgttcgccccgtttgttgcgggaatgggccacatgtcgtaccgtcatttcgccgcttataacgtgattggcgcactgttgtgggtactgctttttacctacgcaggctatttcttcggcacgctccccttcattcagagcaaccttaaactgatgattgttggcattatttttgtttcaatattgccaggtgttttcgaatttattcgccacaaacgcgcagcggcacgcgccgcaaaataa

SEQ ID NO: 648 - DNA, 813 bp, Escherichia coli
atgtccgaccagcaacaaccgccagtttataaaattgcgctgggcattgagtacgacggcagtaggtattacggctggcaacggcagaatgaagtccgcagtgtgcaggagaagctggaaaaggcgctctcccaggtggcgaacgaacccatcaccgtcttctgcgccgggcgtactgacgcaggggtacacggtaccgggcaggtggtgcatttcgaaacgaccgcgcagcgcaaagacgctgcgtggacgttaggcgtaaatgcgaatttacctggtgacatcgccgtgcgttgggttaaagctgtacctgatgattttcatgcccgatttagcgccacggctcgccgttatcgctacatcatctacaatcatcggctgcgcccggcggtattgagtaaaggggtaacccatttttacgaaccgctggacgctgaacggatgcatcgggctgcgcaatgtttgctgggcgagaatgatttcacctcgttccgtgcggtgcagtgtcagtcccggaccccgtggcgcaacgttatgcatattaatgtcacgcgtcacggtccttatgtggtggtagatatcaaagcgaatgcctttgtacatcatatggtcaggaatattgtcggcagcctgatggaagtcggtgcccacaaccagccggagagctggatagcagagttgctggcggcaaaggacagaacgctggcggcagcaacggcaaaagcggaagggctatatctggtcgcggtggattaccctgaccgatatgatcttccaaaaccgccaatgggcccgctatttctggcggactaa

SEQ ID NO: 649 - DNA, 1014 bp, Escherichia coli
atgtctgaaggctggaacattgccgtcctgggcgcaactggcgctgtgggcgaagccctgcttgaaacgctggctgaacgtcagttcccggttggggaaatttatgcactggcacgtaacgaaagcgcaggcgaacaactgcgctttggtggtaagacaatcaccgtgcaggatgccgctgaattcgactggacgcaggcgcagctggcattttttgtcgcaggcaaagaagctaccgctgcctgggttgaagaagcgaccaactcaggttgtctggtgatcgacagcagcggattgtttgctctcgaacccgacgtaccgctggtggtgccggaagtaaacccgtttatactgaccgattaccgcaaccggaatgtcatcgccgtaccagacagtctgaccagccagctgctggcggcactgaaaccgctaattgatcagggcggtttatcacgtatcagcgttaccagcctgatttcagcctccgcccagggtaaaaaagcggtcgatgcattagcggggcagagtgctaaattactcaatggcattccgattgacgaagaagatttcttcgggcgtcagctggcgttcaacatgctgccgttactgccggatagcgaaggtagcgtgcgtgaagaacgtcgtatcgttgacgaagtacgcaaaatcctgcaggacgaagggctgatgatttcggcaagcgtcgtccaggcaccggtattctacggtcatgcccagatggtcaactttgaagcactgcgtccgctggcggcagaagaagcgcgtgatgcgtttgctcagggcgaagatattgtgctctctgaagagaacgaattcccgactcaggtaggagatgcttctggtagtccgcatctttctgttggctgcgtacgtaatgactacggtatgccggagcaagtccagttctggtcggtggccgataacgttcgctttggcggcgcgctgatggcagtaaaaatcgccgagaaactggtgcaggagtatctgtactaa

SEQ ID NO: 650 - DNA, 1137 bp, Escherichia coli
gtgaaaatccttgttgatgaaaatatgccttatgcccgcgacttatttagccgtttgggtgaggtgaccgcggttcccgggcgtccaattcccgtcgctcaactggcagacgcggatgcgcttatggtgcgttcggtcacgaaagtgaatgaatctttgctggcaggaaaacccattaaatttgttggcactgccaccgcggggaccgaccatgtcgatgaagcatggttaaagcaggcgggaattggtttttccgctgcacctggctgtaatgcgattgcggtagtggaatatgttttctcctccctgctgatgcttgccgaacgcgatggattttcactgcacgagcgtaccgtggggatcgttggcgttggtaacgttggtcgtcgtttacaggcgcgactggaagcgttagggattacaaccttgctttgcgatccgcctcgcgccgaccgtggggatgagggggatttccgctcgctgaatgagttagtccagcatgcggatattctgactttccatacgccactctttaaagatggtccgtacaaaacgctgcatctggcggatgaaaaactgatccgcagcctgaaaccgggagcgattctgattaacgcctgccgtggcgcagtcgtcgataataccgccctgctgacctgcctgaacgaaggccagaagttaagcgtagtgctggatgtctgggaaggcgaaccggaacttaacgtggaattgctgaaaaaagtggatatcggcacgccgcatatcgcaggctataccctggaaggtaaagcacgcggtactacgcaagtgtttgaagcttatagcaagtttattgggcatgaacagcacgttgcactggatacattactgcccgcgccagagtttggtcgcattacgctgcatggcccgctcgatcagccaacgctgaaaaggctggtgcatttggtgtatgatgtgcgccgcgatgacgcaccgctgcgtaaagtcgccgggataccgggtgagttcgataaactgcgcaaaaactatcttgagcgccgtgaatggtcatctctgtatgtaatttgtgatgacgccagtgcggcatcattgctgtgtaaactgggttttaacgccgttcatcatccggcacgttaa

SEQ ID NO: 651 - DNA, 996 bp, Escherichia coli
atgatacaacctatttccggccctcctcctgggcaaccaccaggtcagggagataacctgccgtctggcgcgggcaatcagcctttatccagtcagcaacgtacttcgctggaaagcttaatgacgaaagtgacctcactgacgcaacaacaaagagcagaactgtgggcgggtatcaggcacgatattggtctgtcgggagattcaccgctgctttcgcgtcacttccctgccgctgagcataatctggcgcaacgtctgttggccgcgcagaaaagccattctgcccgccagcttttagcgcaattaggggagtatttacgtctggggaataatcgtcaggcggtcacggattatatccgtcataactttggtcagacgccgctgaatcagctctcaccggagcaattaaaaaccattctcaccctgttgcaggaagggaagatggttattccgcaaccacagcagcgcgaggcgaccgaccgtcctttattaccggcggagcacaatgcgctcaaacagctggtgaccaaacttgcggcagcaacgggggaacccagcaaacagatctggcaatcgatgctggaactttccggggtgaaagatggcgagttaattccagcgaaactgtttaaccatctggtgacctggctacaggcgcgtcagacgctaagccagcaaaatacgccgacgcttgaatcactacagatggcgctgaaacaacctttagatgccagtgaactggcggcgttatcggcatatatccagcaaaaatatggcctttctgcgcaatcatcgctttcttctgcccaggccgaggatattcttaaccagctttatcaacggcgggttaaagggattgagccgcgtgatatgcaaccgctgcttaatccttttccaccgatgatggacacgttgcaaaatatggcaacgcgtcccgcgctgtggatactgttagtcgcgattatcctgatgctggtctggctggttcgttaa

SEQ ID NO: 652 - DNA, 1179 bp, Escherichia coli
atgactgctgtaagccaaaccgaaacacgatcttctgccaatttttcgctcttccgcatcgcttttgcggtttttctcacctacatgaccgtaggtttaccgttgccggttatcccgctgtttgttcatcatgaactgggctatggcaacactatggtcggcattgccgtcgggattcagtttctggctacggtgctgacgcgtggttacgccgggcgactggccgatcaatatggcgcaaaacgttcggcgcttcaggggatgttagcttgtggtctggcggggggcgcgttgctgctggcggcgattttgcccgtccccgcaccgttcaaatttgctctgttggtcgtcgggcgtttgattcttggctttggtgaaagccagttactgacgggcgctctgacctggggattaggcatcgttgggccaaaacattccggcaaagtgatgtcatggaacggaatggctatttacggtgccctcgctgttggtgcgccgcttggcctgttgattcatagccattacggttttgccgcactggcgctcaccacaatggcattacccttactggcgtgggcctgtaacggcacagtgcgcaaagtaccggccctggcgggggaacgtccatcgctgtggagcgttgtcgggcttatctggaaaccagggttaggtctggcactacaaggcgttggttttgcggttatcgggactttcgtttcgctctactttgccagcaaaggatgggcgatggcgggctttactcttaccgcgtttggcggcgcatttgtcgtgatgcgcgtcatgtttggctggatgccggaccgttttggcggcgtgaaagtggcgatcgtctctctgcttgtagaaacggtgggcttgttgctgctctggcaagccccaggggcgtgggtcgcattagcgggcgcggcgttaactggagccggatgttcgcttatctttcctgcgctgggcgtggaggtggttaaacgcgtcccctcacacgttcgcggcaccgcactgggcggttacgccgcgtttcaggatatcgccctcggcgtctccgggccgcttgcgggaatgctggcgaccatgtttggttactcttcggtatttcttgccggggcgatctctgcggtgctgggaattattgtcacgatactgtcgtttcgtcggggttaa

SEQ ID NO: 653 - DNA, 1221 bp, Escherichia coli
atgaaacgtgcagtgattactggcctgggcattgtttccagcatcggtaataaccagcaggaagtcctggcatctctgcgtgaaggacgttcagggatcactttctctcaggagctgaaggattccggcatgcgtagccacgtctggggcaacgtaaaactggataccactggcctcattgaccgcaaagttgtgcgctttatgagcgacgcatccatttatgcattcctttctatggagcaggcaattgcagatgctggcctctccccggaagcttaccagaataacccgcgcgttggcctgattgcaggttccggcggcggttccccgcgttttcaggtgttcggcgctgacgcaatgcgcggcccgcgcggcctgaaagcggttggcccgtatgtggtcaccaaagcgatggcatccggcgtttctgcctgcctcgccacgccgtttaaaattcacggcgttaactactccatcagctccgcgtgtgcgacttccgcacactgtatcggtaacgcagtagagcagatccaactgggcaaacaggacatcgtgtttgctggcggcggcgaagagctgtgctgggaaatggcttgcgaattcgacgcgatgggtgcgctgtctactaaatacaacgacaccccggaaaaagcctcccgtacttacgacgctcaccgtgacggtttcgttatcgctggcggtggcggtatggtagtggttgaagagctggaacacgcgctggcgcgtggtgctcacatctatgctgaaatcgttggctacggcgcaacctctgacggcgcagacatggttgctccgtctggcgaaggtgcagtgcgctgcatgaagatggcgatgcacggtgttgataccccaatcgactacctgaactctcatggtacttcgactccggttggcgacgtgaaagaactggcagctatccgtgaagtgttcggcgataagagcccggcgatttctgcaaccaaagcaatgaccggtcactcactgggcgctgctggcgtacaggaagctatctactctctgctgatgctggaacacggttttatcgccccgagcatcaacattgaagagctggacgagcaggctgcgggtctgaacatcgtgaccgaaacgaccgatcgcgaactgaccacagttatgtctaacagcttcggcttcggcggcaccaacgccacgctggtaatgcgcaagctgaaagattaa

SEQ ID NO: 654 - DNA, 2007 bp, Escherichia coli
gtgaaacactacgccatacaacctgccaacctcgaatttaatgctgagggtacacctgtttcccgagattttgacgatgtctatttttccaacgataacggactggaagagacgcgttatgtttttctcgggggtaaccatttagaggcacgttttcctgaacatccacatcctctgtttgtggtagcagagagcggcttcggcaccggattaaacttcctgacgctatggcaggcatttgatcagtttcgcgaagcacatccgcaagcgcaattacaacgcttacatttcattagttttgagaaatttcccctcacccgtgcggatttagcgctggcgcatcaacactggccggagctggccccgtgggcggaacagcttcaggcgcaatggcctttgcccttgcccggttgccatcgtttattgctcgatgaaggccgcgtgacgctggatttatggtttggcgatattaatgaactgaccagcaaactggacgattcgctaaatcaaaaagtagatgcctggtttctggacggctttgcgccagcgaaaaacccggatatgtggacacaaaatctgtttaacgccatggcgcgactggcacgtccgggcggcacgctggcgacatttacgtctgccggttttgtccgccgcggtttgcaggaagccggattcactatgcaaaaacgtaagggctttgggcgcaaacgggaaatgctttgtggggtgatggaacagacattacccctcccctgctccacgccgtggtttaaccgtacgggcagcaacaaacaagaagcggcaattattggaggcggtattgccagcgcgttgttgtcgctggcgctattgcgtcgcggctggcaggtaacgctttattgcgcggatgaggctcccgcactgggtgcttccggcaatcgccagggggcgctgtatccgcttttaagtaaacacgatgaagcgctaaaccgttttttctctaatgcgtttacttttgctcgtcggttttacgatttattgcccgttaaatttgatcatgactggtgcggcgtcacgcagttaggctgggatgagaaaagccagcataaaatcgcacagatgttgtcgatggatttacccgcagaactggctgtagccgttgaggcaaatgcggttgaacaaattacgggcgttgcgacaaattgcagcggtattacttatccgcaaggtggctggctgtgtccggcagaactgacccgtaatgtgctgaaactggcgcaacagcagggtttgcagattcattatcaacatcagttacaggatttatcccgtaaggatgactgttggttgttgaattttgcaggagatcagcaagcaacacacagtgtagtggtactggcgaacgggcatcaaatcagccgtttcagccaaacgtcatctctgccagtatattcggttgccgggcaggtcagccatattccgacaacgccggagctggcgaaactgaagcaagtgctgtgctatgacggttatctcacgccgcaaaatccggcgaatcagcatcattgtattggtgccagttatcaccgtggtagcgaagagacggcgtacagtgatgaagatcagcagcagaatcgccagcggttgattgattgtttcccgcaggtacagtgggcaaaagaggttgatgtcagtggtaaagaggcgcgctgcggtgtgcgttgtgctactcgcgatcatctgccaatggtaggcaacgtgcctgattatgacgctacactcgtggaatatgcgtcgctggcggagaagaaagatgaagcggtaagcgcgccggtttatgacgatctctttatgcttgctgctttgggctcgcgcggtttgtgttctgccccgctgtgtgccgagattctggcagcacagatgagtgaagaaccgattccgatggatgccagtacgctggcggcgttaaatccgaataggttatgggtgcggaagttgttgaaaggtaaagcggttaaggcggggtaa

SEQ ID NO: 655 - DNA, 279 bp, Escherichia coli
atgatcgcggagtttgaatcacgcattctggcattaatcgacggtatggttgaccatgccagtgatgatgagttgtttgccagtgggtatttgcgtggccacctgacattagccatcgcagaactggaaagtggtgacgaccactccgctcaggcggtacatacaaccgttagccagagtctggaaaaagccattggcgcgggtgaattgtcaccgcgtgaccaggcgctggtaaccgatatgtgggaacacctgtttcagcaggcctcacagcagtaa

SEQ ID NO: 656 - DNA, 549 bp, Escherichia coli
atgaacagtacacaccactatgagcagttgattgagatttttaatagctgctttgccgatgaatttaatacccgtctgattaaaggcgacgacgaaccgatctatcttcctgctgatgcggaagtaccgtataacagaatcgtcttcgctcatggcttttatgccagcgccatccacgagatttcgcactggtgtattgccgggaaagcgcgccgtgagctggttgatttcggctactggtattgcccggacggacgcgatgcccagacacaaagccagtttgaagatgttgaagtgaagccgcaggcgctggactggttgttctgcgtggcagcgggatatccgtttaatgttagctgcgacaatctggaaggggatttcgaaccggaccgcgtggtgtttcaacggcgggtacatgcgcaggtgatggattatctggcaaacggcattcccgaacgtccggcacgcttcattaaagcactacaaaattattatcacacgccggaacttacggcggaacagttcccgtggccggaagcgctcaactga

SEQ ID NO: 657 - DNA, 810 bp, Escherichia coli
atggaaacgtttaatagcctgtttatggtttccccgctgctgctgggagttctcttttttgtcgccatgctggcggggtttatcgactcgattgccggtggcggtgggttactcaccattccggcattgatggcggcggggatgtctcccgctaacgcgctggcaaccaataaactgcaagcctgcggtggctctatttccgccactatctactttattcgccgtaaagtggttagtttaagcgatcaaaaactcaatatcgccatgacctttgtcggctcaatgagcggcgcgctactggtgcagtatgttcaggccgatgtcttacggcagattttgcctgtcctggtcatttgtatcggtctctatttcttgctgatgccaaagctgggggaagaagatcgccagcgtcggatgtatggactgccatttgcgctggtggcggggggctgcgtcggtttttacgatggattttttggcccggctgccggatcgttttacgcgctggccttcgttacgctgtgcggattcaacctcgccaaagccactgctcacgccaaattacttaacgcaacgtcaaacattggcggtctgctgctgtttattctcggcggcaaagtgatttgggcgacgggctttgtgatgctggtggggcagttcctcggcgcgcgcatgggttcaagactggtgttgagcaaaggacaaaagctgatccgcccgatgatcgttatcgtctcggcggtgatgagtgccaaattactttacgatagccatggacaggagatcctccactggttggggatgaactaa

SEQ ID NO: 658 - DNA, 825 bp, Escherichia coli
atgaacaaaaccgcgattgcgctgctggccctgcttgccagtagcgccagcctggcagcgacgccgtggcaaaaaataacccaacctgtgccgggtagcgcacaatcgataggcagtttttctaatggctgtatcgtcggtgctgacacgttgccgatacagtccgaacattatcaggtcatgcgtaccgatcagcgtcgctatttcggacatccggatctggtgatgtttatccagcgtctgagtcgccaggtgagcaatctgggcatgggtacggtgctgattggcgatatggggatgcctgctggtggtcgtttcaacggcggtcacgccagccaccagaccggactggatgtcgatatcttcctgcaactgccaaaaacacgctggacctccgcgcagctcttgcgcccgcaagcactggacttagtatcccgcgacggtaaacacgttgtccccgcgctgtggaagccagaaattttcagcttgatcaaactcgccgcccagaacaaagacgtcacgcgcatttttgttaatccggcgattaaacaacaactttgccttgatgcgggcaccgatcgcgactggttgcgcaaagtgcgaccctggttccagcatcgcgcgcatatgcatgtacgattacgttgtcctgccgatagtctggagtgtgaggatcaacctttaccgccaccaggcgatggttgcggggcagaactgcaaagctggtttgaacctccaaaaccgggaacaacaaagcctgagaagaagacaccgcctccgttgccgccttcctgccaggcgctactggatgagcacgtgatctaa

SEQ ID NO: 659 - DNA, 1086 bp, Escherichia coli
atggctggaaacacaattggacaactctttcgcgtaaccaccttcggcgaatcgcacgggctggcgctcggctgcatcgtcgatggtgttccgccaggcattccgctgacggaagcggacctgcaacatgaccttgatcgtcgtcgccctgggacatcgcgctataccacccaacgccgcgagtcggatcaggtcaaaattctctccggtgtttttgaaggtgttactactggcaccagcattggcttgttgatcgaaaataccgaccagcgttctcaggattatagtgcgattaaggacgttttccgtccaggtcatgccgattacacctatgaacaaaaatacggcctgcgcgattatcgcggcggtggacgttcttccgcccgtgaaaccgctatgcgcgtggcggcaggggcgattgccaaaaaatatctcgccgagaaatttggcattgagattcgcggttgcctgacccagatgggcgacattccactggaaatcaaagactggtctcaggtcgagcaaaatccgtttttctgcccggacccggacaaaatcgacgccttagatgaactgatgcgcgcgctgaaaaaagagggcgactccatcggcgcgaaagtcaccgtcgttgccagtagcgtacccgccggacttggcgagccggtctttgatcgcctggatgccgacatcgcccatgcgctaatgagcattaacgcggtgaaaggtgtggaaattggtgatggttttgacgtggtagcgctgcgtggcagccagaaccgcgacgaaatcaccaaagacggtttccagagcaaccatgcgggcggcattcttggcggtatcagcagcgggcagcaaatcattgcccatatggcgctgaagccaacctccagcattaccgtgccggggcgcaccattaaccgctttggcgaagaagttgagatgatcaccaaaggtcgtcacgatccttgtgttgggatccgcgcggtgccgatcgcggaagcgatgctggcgatcgttttaatggatcacctgttacggcaacgggcgcaaaatgctgatgtgaagactgatattccacgctggtaa

SEQ ID NO: 660 - DNA, 933 bp, Escherichia coli
gtggataaaattttcgttgatgaagcagtaaatgagctgcaaaccattcaggacatgttgcgctggtcggtgagccgcttcagcgcggcgaatatctggtacggccacggcaccgataacccgtgggatgaagccgtgcaactggtgttgccttcgctctacctgccgctggatattccggaagacatgcgcaccgcgcgtctgacctccagcgaaaaacaccgtattgttgagcgcgtgatccgccgcgtcaacgagcgcattccggtggcttacctgaccaacaaagcctggttctgcggccatgaattttacgtcgatgaacgcgtgctggtgccgcgctcgccgattggtgaactgatcaacaataaatttgccggactcatcagcaagcaaccgcagcatattttagatatgtgtaccggtagcggctgcatcgccattgcctgtgcttatgccttcccggaagcggaagtcgacgcggtggacatctctccagacgcgctggcggttgctgaacagaacatcgaagaacacggtttgatccacaacgtcattccgattcgttccgacttgttccgtgacttgccgaaagtgcagtacgacctgatcgtcaccaacccgccgtacgtcgatgcagaagatatgtccgacctgccaaacgaataccgccacgagccggaactgggtctggcatctggcaccgacggcctgaaactgacgcgtcgcattctcggtaacgcggcagattacctcgctgatgatggcgtgctgatttgtgaagtcggcaacagcatggtacatcttatggaacaatatccggatgttccgttcacctggctggagtttgataacggcggcgatggtgtgtttatgctcaccaaagagcagctgctggcggcccgtgaacatttcgcgatttataaagattaa

SEQ ID NO: 661 - DNA, 552 bp, Escherichia coli
atgaaaaagaaaacaacacttagcgaggaggaccaggcgctgtttcgccagttgatggcggggactcgcaagattaagcaggacacgattgtccatcgaccacaacgcaagaaaatcagcgaagtaccggtcaagcggttgattcaggagcaggccgatgccagccattatttctctgacgagtttcaaccattattaaatactgaaggtccggtgaaatatgttcgcccggatgtcagccattttgaagcgaagaaactgcggcgcggtgattattccccggagttgtttcttgatttgcacggtctgacgcagctacaagccaaacaggaactgggggcgttgattgccgcctgccgccgtgaacatgtgttttgcgcctgtgtgatgcatggtcatggtaagcatattttaaagcagcaaacgccactgtggctggcgcaacatccccatgtaatggcatttcaccaggcaccaaaagagtatggtggtgatgcggcattgctggtgttgatagaagtagatgagtggctgccgccggaattgccctga

SEQ ID NO: 662 - DNA, 858 bp, Escherichia coli
atgaaaataactaacttgctgtttcgtcttttgatcctgatggtttttatgctcggtagtcgggccgggatggggcagacatttcgtaatgtgtatatctactatgctacgtttggctggaatagtcaggtcgaactgtatcttgatgttgctgaggtttcgagtgtttactacggtacctattatcaaagtaattatgttatgacgcttggcaacttacccaatcgcacatggacaggaacgggcagttctcctgcgccgacgattacggtaaaagatgggacaactgtaaataattcattttgtccgggcatggaggcactggaagccaaagacagccgctgggaatgtctcaagctgcctctggatattaccgtcgatggtgatgtgggaggctgcccgtggttagtgagtatcagagccaccagccaggttgtggtcggttctgttgataaagatatctattatggaccaaatgcaaccgtgtccgtgtgcccaaccgtgtcagttacgccgtatgatgtttcatgggatgaaaactatatcaataaaacgaaaacactgtctttgcaatcgacgggcggagtaattgaaaaaacgctttcaacctatctgatgaaagacggcaaactatgtgatggctcgcaaatgaatgaagagggcgcttactgtcgctgggtcgcgcaaatgatcacgttttcatcgtcaggctgcgataatgctaatgttacggtgacgccaaacagacatcccattactgacaaacaactgcacgacatggtggtgcatgttgataccagcagccgccagcccattgattccacctgccgcttccagtacacgctcaacgagctgtag

SEQ ID NO: 663 - DNA, 528 bp, Escherichia coli
atgaacctaaaacggatatctcactgcgcggctgcactggcgacggtgctgctgacgccccatgttcaggcggctgacaacctgcatttctacggcaatttactcagcaagtcctgcacgttagtcgttcagggcgagtcgctggcggacgtgcatttccccaccgttagccgcaaagacctgatggtgaccgggcagtcggcgcgggtgccggtagtgtttcagttgaaagattgtaaagggccagcccagtatgaggttcgggtgacgctgaccggtacagaagacagtgaacagcccggctttctggcgctggatgcgtcctcaggggcgcagggcgtggggattggcatggaaaaaaccgatggaacaccggtgccgattaacaataccagcggcgcgacctttgtgctgagtaacggcaataacaatctgaattttaatgcctggctccaggcgaaaagcggccgggaagtgacgatgggtgaatttaccgcttctttaaccgcaacgtttgagtacatttaa

SEQ ID NO: 664 - DNA, 480 bp, Escherichia coli
atgaaacgactcgcatggtgcttaatttacggttttgctggcctggtgcaggccgcgattaacgacgttacttttcacggcacgctggtttcgccgcccgcctgtactatcagcgatggtaagacgatcgaagttgagtttcgcaacgtcattatcgacaacattaacggcgataatttccgtcaggatgtgccttacaccatcacatgtgaccccgatgtgcgcgacgacgcctgggagatgagcctgacctggacgggcagccaaaccccttatgatgattccgccattgaaacggacgttagcggcctggggattgagctacagcaaaacggccagccgtttaagctgggaacaccgttgaaaattgacccgtcaacgccgccaacgctgcaagctgtgccggtgaaagccaatgatgcggcgctcagcgacggaaccttttctgcctacgcaacattacaggtggattaccaatga

SEQ ID NO: 665 - DNA, 504 bp, Escherichia coli
atgaaagcgttctttctgaccggatctgccgcgctattgctggcctgtggcgtgaccgttttcccggcaatggcgggcggcaaaatcgtcaatttgacgttgcgcgtgctggtggatggaccgccgccctgttcggtaaagggaagcgtggtggagttcggcaatgtgattattaaaagcattgatggtgccaactaccgtcagccagtgggctacaccctgaactgctcaaacagtgtcagcgacgacctgcaaatgcagcttcaggccaccaccacgaccatcaacggcgaaacggtgctgagtactggaatcagcggttttggcattcgtattcagaatgctgtcgatcattcgctggtggcagtaggtaacagtagctggctgccgttcaacatcaatactcagccagacttcgaagccgttccggtgaagcagagcggtgtggaactgatggcatcggagtttaacgcgaccatgaccatggtggtggactaccaatga

SEQ ID NO: 666 - DNA, 753 bp, Escherichia coli
atgtcttataaattatcctgtccaatgctcgtcagcacagcgctgatggcactgcttaccaccgccagcctgacggcgcatgcatcggtcaccccggatcgcacccgtctggtgtttaacgaaagcgataaatcgatcagcgtgacgttgcgtaacaacaacgaaaagctgccttacctggcgcaaagctggctggaagacgagaagggcaacaaaatcacctcgccgctggcggtactgccgccggtgcagcgtattgacgccatgatgaacggccaggtgaagattcaggcgctgccggacattcactcgctgccgtcggaccgcgaaagcctgttctactataacgtgcgtgagatcccgccaaagaccgggaaagccaacaccctgcaaattgcgctgcaaacgcgcatcaagctgttctggcgaccaaaggcgctggagaagattgacatgagaaaaccgtggcagtttaaggtcacactcacgcgcagcggccaggactataccgtcaataacccgacgccgtaccacgtcatcatcagcgatgccagcacacagaagaaagggctgaccgccgccgggtttaaaccgctggtgatgccaccgaaaacgtcacaaccgttaaaggcaaaaatggcgagcgccccggtgctgacctatatcaacgactacggcgcgcgcatgccgctgatcttccgttgtgaagggaacacctgcaaggtggatgaagatcaaagcagcaaaggttga

SEQ ID NO: 667 - DNA, 2649 bp, Escherichia coli
atgcctaatcactcaaattttcggctgcggggaatcgcctgctatattgcgctggcaatctctggtgggtcagtcaatgcatgggctgatgattcaattcaatttgacccccgtttccttgagttaaagggcgatacgaaaattgatctcggtaagttttcaaaaaaagggtatgtcgacgcgggtaaatataatttacgtgtatttataaataaacaacccctttctgatgaatacgacattaactggtacgtctctgaaaacgatccaacaaaaaactatgcctgcctgacacctgagttagtggcggcgctggggctgaaagaagggatagcaaaaagcctgcagtggacgcacaacgatgaatgccttaaaccaggccaattagacgggatggaagtcgagaatgatttaagccagtcggcgttgctgctgacagtgccacaggcttacctcgaatataccagcagcgactgggcccctccctcacgctgggacgacggtattcctggcctgattgccgactacagcctcaatgcgcaaactcgccaccaggagcaggggggcgaggactcacatgatatcagcggcaacggtaccgttggggcgaacctgggggcatggcgtttccgtgcagactggcaaagtgattatcagcacacccgcagcaacgatgacgacgatgacagcagtaacagcacaacgagtaaacactgggactggagtcgttattatgcctggcgagccttgccctctttaaaagcgaagctgtcgctgggggaagattatctcaattccgatattttcgacggctttaactatatcggcagcagcgtcagcaccgatgaccaaatgctgccgcccaacctgcgcggctatgcaccggatgtttccggcgtggcgcacagcagtgcaaaagtcaccattagccagatgggccgggtactttacgaaacccaggttccagccgggccattccgcattcaggatatcggcgactccgtctccggcacactgcacgtccgcgttgaagaacagaatggtcaggtgcaggaatatgacgttacgaccgcatctatgccattcctcacgcgccaggggcaggtgcgttacaaagtgatgatggggcgtccggaagactggaaccacaagaccgaaggcggctttttctccggcggagaagcgtcatggggggtggcagatggctggtcgctctacggtggtgcgctggcagataaacactatcagtcggcggcgatgggggtggggcgcgacctcgcacagtttggcgcgctggcgttcgatgtgactcactcgcacgtcaacctggatcatgacagcgcatacggcaaaggaaaactggacggcaactcctttcgcgtgagctatgccaaagactttgacgaactcaacagccgcgtcacctttgcaggctaccgtttttctgaaaagaacttcatgaccatgagcgagtatctggacgcgaaccagtcggacatggcgcggaccggtaacgacaaagagatgtatacgatcacctataaccagaactttgccgctgcgggtgtctcgatctatctcaactactcccatcgtacttactgggatcgcccggaacagacaaactataacttgatgttttcccactattttaatatggggagcattcgcaacatgagcatctcggtgaccggctatcgctacgaatatgacgataatgcggataaggggatgtacctcagtatgagcattccctggagcgacagcagcaccgtgacctacaacggttcctacggcagcgggtcggacagcagccaggtcggttactttaagcgcgtcgatgacgcaacgcactacctggttaacgttggcaccagcgagcagcacggcagcgtggatggttatctgagccacgacggttcgctggcgaaggttgatctcagcgccaactaccatgaaggggaataccgttcggcggggatcgccttacagggcggggcaacgctgaccgcgcatggtggggcgctgcaccgtacccagaacatgggcggcacgcgcctgctgattgacgccgacgggattgccaacgtgccggtcgaaagcaacggcgcgccggtgtacaccaatatgtttggcaaggcggtggtcgccgatattaacaactactatcgcaatcaggcgtatatcgatttaaacaacttgccggaagatgcggaagccacccagtcggtggtgcaggcgactctgacggaaggcgcaatcggctatcgtaaattcaaagtgatcagcgggcaaaaagcgatggcggtactgcggttgcgtgacggtagctacccgccgtttggcgcggaagtgaaaaacgacgagcagcagcaggttggcattgtggatgatgaaggcaatgtctatctggcgggggtcaatgcgggcgagcatatgatggtgttctgggaaggcagcgcacaatgcgagatcgtattgccgaagccgctacctgccgatttgttcagcggcctgttgttgccgtgtgaacaaaagggaacggcagcccctgattcttcagcgccagaaattaagcctgttattcaggaccagacgcggcaagtcacaccaacggaagcgccgacgtcaatttcagcaactcaataa

SEQ ID NO: 668 - DNA, 567 bp, Escherichia coli
atgagtaagtttgccaaaacagccattgctgcggcgatggtcatgggcgcagttgtttccagttctgcttttgcagcaggcaacaacggtaccgcgcgcttctacggcaccattgaagactccccgtgctctatcgttccagacgatcacaaactggaagtcgatatgggtgacatcggtgcggctaaactgaccggcggtggcactaccacaccgaaagatttccagatccgtttacaggattgcgtgtttaccactgaaacaaacatggagaccacgttcaccggcactaactacgcggggccagccaacgcagataactatgcgttattcaatgttgacagcggtgttgccatgaaccacgtgagcctggtaatcggcgatacccatggcaaaggttataaagtgggcgaaaagattgttcagccaatcgtgatggatacttcaaccagcaagggtaaagacaagcaaacgctgaactttaaagcctggctggtgggtgaaaccgatgcgccggatctcggccagttcgaaaccctgaccacattccagattacctatctctga

SEQ ID NO: 669 - DNA, 486 bp, Escherichia coli
atgcaagtttttatcatgcgtcacggcgacgcagccctcgatgccgccagtgattcggttcgtcctctgactactaacggttgtgacgaatctcgcctgatggcgaactggctgaaaggtcaaaaagtggaaatcgaacgcgttctggtgagcccgttcctgcgagccgagcaaacactggaagaagtaggggattgtctgaacctgccttccagtgcagaagttctgccggagttaacgccctgcggcgatgttggtctggtcggcgcctatttgcaggcgttgaccaatgaaggtgttgcttcggtactggtgatctcccacttaccgttagtcgggtatctggttgccgagttatgtccgggcgaaacgccgcctatgtttaccacttcagcgattgccagcgtaacgcttgatgaaagcggaaaaggccaattcaactggcaaatgagcccttgtaatttgaagatggcaaaagcaatttaa

SEQ ID NO: 670 - DNA, 2145 bp, Escherichia coli
atggaaatggcatcagcgtttactcttaatgttcgtctggacaacattgctatcatcaccatcgacgtaccgggtgagaaaatgaataccctgaaggcggaatttgcctcgcaggtacgcgccattattaagcaactccgtgaaaacaaagagttgcgtggcgtggtgtttgtctccgcgaaaccagacaacttcattgctggcgcagacatcaacatgatcggcaactgcaaaacggcgcaagaagcggaagtactggcgcggcaggggcaacagttaatggcggagattcatgctttgcccattccggttatcgcggctattcatggcgcttgcctgggcggcgggctggagttggcgctggcgtgccacggtcgtgtttgtactgacgatcctaaaacggtgctcggtttgcctgaagtacaacttggattgttacccggttcaggcggtacccagcgtttaccgcgcctgataggtgtcagcacagcattagagatgatcctcaccggaaaacaacttcgggcgaaacaggcagtaaagctggggttggtggatgacgtcgttccgcactccatattgctggaagccgctgttgagctggcaaagcaggatcgcccatcttcacgccctctacctgtacgcgagcgtattctggcggggccgttaggtcgtgcgctgctgttcaaaatggtcggtaagaaaacagaacacaaaacgcaaggtaactatccggcgacagaacgcatcctggaggttgtcgaaacgggattagcgcagggcaccagcagcggctatgacgctgaagcacgggcgtttggcgaactggcgatgacgccgcaatcgcaggcgctgcgcaatatcttttttgccagtacggaagtgaaaaaagatcccggcagtgatgcgccgcctgcgccattaaacagcgtggggattttaggtggtggcttgatgggcggcggtattgcttatgtcactgcttgtaaagcggggcttccggtcagaattaaagatatcaacccgcggggcataaatcatgcgctgaagtacagttgggatcagcttgagggcaaagttcgccgtcgtcatctcaaagccagcgaacgtgacaaacagctggcattaatctccggaacgacggactattgcggctttgcccatcgcgatctgattattgaagcggtgtttgaaaatctcgaattaaaacaacagatggtggcggaagtggagcaaaattgcgctactcataccatctttgcttcgaacacgtcatctttaccgattggcgatatcgccgctcacgccgcgcgacctgagcaagttattggcctgcatttcttcagtccggtggaaaaaatgccgctggtggagattattcctcatgcgagtacatcggcgcaaaccatcgccaccacggtaaaactggcgaaaaaacagggcaaaacgccaattgtcgtgcgtgacaaagccgggttttacgtcaatcgcatcttagcgccttacatcaatgaagctatccgcatgttgaccgaaggcgagcgtattgagcatatcgatgccgcgctggtgaaatttgggtttccggtaggcccaatccaacttttggatgaggtaggaatcgacatcgggactaaaattattcctgtactggaagccgcttatggagaacgttttagcgcgcctgcaaatgttgtttcttcaattttgaacgacgatcgcaaaggcagaaaaaatggccggggtttctatctttatggtcagaaagggcgtaaaagcaaaaaacaggtcgatcccgccatttacccgctcattggcgcacaagggcaggggcgactctccgcaccgcaggttgctgaacggtgtgtgatgttgatgctgaatgaagcagtacgttgtctggacgagcaggttatccgtagcgtgcgtgacggggatattggcgcggtatttggcattggttttccgccatttctcggtggaccgttccgctatatcgattctctcggcgcaggcgaagtggttgcaataatgcaacgactggccacgcagtatggttcccgttttaccccttgcaatcgtttagttgagatgagcgagcgtggggaaagtttttggaaaacaactgcaactgacctgcaataa

SEQ ID NO: 671 - DNA, 1311 bp, Escherichia coli
atgggtcaggttttaccgctggttacccgccagggcgatcgtatcgccattgttagcggtttacgtacgccttttgcccgacaggcgacggcttttcatggcattcccgcagttgatttagggaagatggtggtaggcgaactgctggcacgcaccgagatccccgctgaagtgattgaacaactggtcttcggtcaggtcgttcagatgcctgaagcccccaacattgcgcgtgaaattgttctcggtactggaatgaatgtgcataccgatgcttacagcgttagccgcgcttgcgctaccagtttccaggcggttgcaaacgtcgcagaaagcctgatggcgggaactattcgagcggggattgccggtggggcagattcctcttccgtattgccaattggcgtcagtaaaaaactggcgcgcgtactggttgatgtcaacaaagcccgcacaatgagccagcgcctgaaacttttttctcgcttacgtttgcgtgacttaatgccggtgcctccggcagtggcggaatactccactggattacggatgggggacaccgcagagcaaatggcgaaaacctacggcatcacccgagaacagcaagatgcactggcgcaccgttcgcatcagcgtgccgctcaggcgtggtcagaaggtaaactcaaagaagaggtgatgactgcctttatccccccttataaacaaccgcttgtcgaagacaacaatattcgcggtaattcctctcttgctgattacgcaaagctgcgcccggcgtttgatcgtaaacacgggacggtaacggcggcgaacagtacgccgctgaccgatggcgcggcagcggtgatcctgatgactgaatcccgggcgaaagaattagggctggtaccgctggggtatctgcgcagctacgcatttactgcgatagatgtctggcaggacatgttgctcggtccagcctggtcaacaccgctggcgctggaacgtgccggattgacgatgggcgatctgacattgatcgatatgcacgaagcctttgccgcccagacgctggccaatattcagttgctgggtagcgaacgttttgctcgcgacgtactggggcgtgcacatgccactggcgaagtggacgagagcaaatttaacgtgcttggcggttcgattgcttatggacatcccttcgcagcgaccggcgcgcggatgattacccagacattgcatgaacttcgccgtcgcggcggtggatttggtttagtgaccgcctgtgctgcgggtgggcttggcgcagcaatggttctggaggcggaataa

SEQ ID NO: 672 - DNA, 285 bp, Escherichia coli
atgagtaaatgtagtgctgatgaaaccccggtttgctgctgtatggatgttggcaccattatggacaactccgactgcaccgcgtcttacagccgtgtgtttgcaaaccgcgcagaagcagaacaaacgctggcggcgctgactgaaaaagcccgtagcgtggaatccgaaccgtgcaaaatcaccccgactttcactgaagagtctgacggtgtgcgcctggatatcgatttcacttttgcctgcgaagctgaaatgctgatcttccagctgggtctgcgttaa

SEQ ID NO: 673 - DNA, 1341 bp, Escherichia coli
atgagccagaaaaccctgtttacaaagtctgctctcgcagtcgcagtggcacttatctccacccaggcctggtcggcaggctttcagttaaacgaattttcttcctctggcctgggccgggcttattcaggggaaggtgcaattgccgatgatgcaggtaacgttagccgtaaccccgcattgattaccatgtttgaccgcccgacattttctgcgggtgcggtttatattgatccggatgtaaatatcagcggaacgtctccgtctggtcgtagcctgaaagccgataacatcgcgcctacggcatgggttccgaacatgcactttgttgcaccgattaacgaccaatttggttggggcgcttctattacctctaactatggtctggcaacagagtttaacgatacttatgcaggcggttctgtcggtggtacaaccgaccttgaaaccatgaacctgaacttaagcggtgcgtatcgcttaaataatgcatggagctttggtcttggtttcaacgccgtctacgctcgcgcgaaaattgaacgtttcgcaggcgatctggggcagctggttgccggtcagattatgcaatctcctgctggacaaactcagcaagggcaagcattggcagctaccgccaacggtatcgacagtaataccaaaatcgctcatctgaacggtaaccagtggggttttggctggaacgccggaatcctgtatgaactggataaaaataaccgctatgcactgacctaccgttctgaagtgaaaattgacttcaaaggtaactacagcagcgatcttaatcgtgcatttaataactacggtttgccaattcctaccgcgacaggtggcgcaacgcagtcaggttatctgacgctgaacctgcctgaaatgtgggaagtgtcgggttataaccgtgttgctccgcagtgggcaattcactatagcctggcttacaccagctggagtcagttccagcagctgaaagcgacctcaacgagtggcgacacgctgttccagaaacatgaaggctttaaagatgcttaccgcatcgcgttgggtaccacttattactacgatgataactggaccttccgtaccggtatcgcctttgatgacagcccagttccggcacagaatcgttctatctccattccggaccaggaccgtttctggctgagtgcaggtacgacttacgcatttaataaagatgcttcagtcgacgttggtgtttcttatatgcacggtcagagcgtgaaaattaacgaaggcccatatcagttcgagtctgaaggtaaagcctggctgttcggtactaactttaactacgcgttctga

SEQ ID NO: 674 - DNA, 756 bp, Escherichia coli
atgaagcttcgcctgtcggcgcttgctctgggaactacgcttctggtggggtgtgcgagttccggtacagagcagcaagggcgttctgacccgttagaagggtttaaccgcactatgtacaacttcaacttcaatgtattagacccgtatattgttcgaccggtcgctgtcgcctggcgtgattatgttccgcaacctgcgcgtaacggtttgagcaactttaccggcaaccttgaagaacctgcggtgatggttaactacttcttgcagggcgacccttatcaggggatggtccactttacccgctttttcctgaataccattttgggaatgggcggctttattgatgttgcagggatggcgaacccgaaactgcaacggactgaacctcaccgcttcggtagtacgcttggtcattatggtgtgggttatgggccgtacgttcagttaccgttctacggtagcttcacgctgcgtgatgacggtggtgatatggcggatagtctttacccggttctttcctggctgacttggccgatgtctgtgggtaaatggacgcttgaagggatagaaactcgtgcgcagttgttggattccgacggtctgctgcgtcagtcctccgatccttatattatggtgcgtgaagcgtacttccagcgtcatgatttcatcgctaatggcggtgaactcaaaccgcaggaaaatccgaacgcgcaagcgattcaggatgatttaaaagatatcgattctgaataa

SEQ ID NO: 675 - DNA, 933 bp, Escherichia coli
atggacaacgacaaaattgatcaacacagcgacgaaattgaagttgagagcgaagaaaaagagcgcggtaaaaaaatagaaatagatgaagaccgactcccctcccgggcgatggcaattcatgagcatatccgccaggatggtgaaaaagagctggaacgcgacgcaatggcgctactgtggtcagccattgcggcgggcctgtcgatgggcgcttcgctactggcaaaagggatatttcatgtcgaactggaaggcgtgccgggcagcttcttgctggagaatctcggttatacctttggttttattatcgtcataatggcccgccagcaattatttaccgaaaacaccgtaactgcggtactacccgtcatgcaaaaaccgacaatgagcaacgtcggcttacttatgcggttatggggcatcgtgctgctgggtaatattatcgggacaggtattgctgcgtgggcatttgaatatatgcctatcttcaatgaagaaactcgcgatgcatttgtcaaaatcggcatggatgtgatgaagaacacccccagcgagatgtttgccaacgcgatcatttccggctggctgatcgccactatggtatggatgtttcctgcagcgggtgcggcaaagattgtggtgattatattgatgacctggcttattgccctgggtgacaccacccacatcgttgtcggttctgttgaaatcctctatctggtgtttaacggcacgctgcactggagcgatttcatctggccctttgcactacctactttagcggggaacatctgcggcggcacctttatcttcgcgttaatgagtcatgcacagattcgtaacgacatgagcaacaagcgcaaagtagaagcacgtcaaaaagcagaacgtgcggaaaacattaagaaaaatgataaaaacccggcataa

SEQ ID NO: 676 - DNA, 936 bp, Escherichia coli
atggaaccccttcgtgaaataagaaatcgactgcttaacggctggcaactatcaaaactgcatacttttgaagtggctgccaggcatcagtccttcgcccttgcggcagaggaattgtcgctgagccccagtgcggtaagtcaccgtatcaatcagctggaagaagaattaggtattcagttgtttgttcgttcccatcgcaaagtggaattaacgcacgaggggaaacgtgtttattgggcgctaaaatcgtcgctggataccctgaatcaggaaattctggatatcaaaaatcaggagttatcgggaacgttaacgttgtattcccggccctctatcgcccaatgctggttggtgcccgcattaggtgactttacacgccgatatccgtctatttcgctcaccgtgctcactggtaatgacaatgtcaatttgcaacgtgccggaatcgatttggcgatctactttgatgatgcgccgtcagcgcaattggctcatcactttctgatggatgaagaaatcctgccagtttgcagcccggagtacgctcatagacatgatttaaccaacacggtaattaacctgcgtcactgtacgttgctccatgacagacaggcatggagcaacgactccggtacggatgaatggcatagttgggcgcaacattatgcggttaatttgccgacatcttctggaattggctttgatcgctctgatttagccgttatcgccgcgatgaatcatattggggtggcgatgggaaggaaacgcctggtacaaaaaaggcttgccagtggtgagctcgtcgcgccgtttggcgatatgacggtgaaatgccatcagcattattacatcaccacattaccgggcaggcagtggccaaaaattgaggcatttattacttggttaagagaacaggtaaaaaccacttcataa

SEQ ID NO: 677 - DNA, 1338 bp, Escherichia coli
atgcactctcaaatctgggttgtgagcacgctgcttatcagcatcgtgttaattgtactgaccatcgtgaagttcaaattccacccgtttctggcgctgttgctggccagcttcttcgtgggaacgatgatgggcatggggccactggatatggtaaatgctattgaaagtggaattggcggaacgctggggttcctcgctgcggttatcggccttggcacgatactgggaaaaatgatggaagtatccggggccgcagaaagaattggtctgacacttcaacgctgccggtggctttcagctgatgtcattatggtgctggttggcctgatttgcggcatcacgctgtttgttgaagtgggcgtcgtgctattgattcctctggctttttcaattgccaaaaaaaccaatacctcattgttaaagctggccattccgctgtgtaccgcattgatggcagtgcactgcgtggttcccccacatccggctgctttatatgttgccaataagctgggcgcagatatcggttcggtgatcgtctacggtttgctggttgggctgatggcatcactgatcggtggcccacttttccttaaatttctggggcaacgactgccctttaaacctgtacccacagagtttgccgatctcaaagttcgcgatgaaaaaacactaccgtcattaggcgcaacgttattcaccatactgctacccattgcgctgatgttggttaaaacgattgccgaattgaatatggcgcgtgagagtggtttgtataccttgcttgagtttattggcaaccctatcactgccatgtttatcgccgtatttgtcgcctattatgtgttgggtatacgtcagcatatgagcatggggacgatgctcacacatacggaaaatggtttcggttctattgctaatattttgctgattatcggggccggaggcgcattcaacgccattttaaaaagcagcagtctcgctgatacgctggcagttattctctccaatatgcatatgcacccgattcttctggcctggttggtggcacttattctgcatgctgcagtgggctccgctacggtggcaatgatgggggcaacggcaattgttgcacccatgctgccgctgtatcccgacatcagcccggaaattattgcgattgctatcggttccggtgcgattggctgcacgatcgttacggactcgcttttctggctggtgaagcaatattgcggcgctacgctcaatgaaacatttaaatactatacgacagcgacatttatcgcttcagtcatcgctctggcgggcacattcctgctgtcatttatcatctaa

SEQ ID NO: 678 - DNA, 1329 bp, Escherichia coli
atggaaaacgctaaaatgaattcgctcatcgcccagtatccgttggtagaggatctggttgctcttaaagaaaccacctggtttaatcctggcacgacctcattggcagaaggtttaccttatgttggcctgaccgaacaggatgttcaggacgcccatgcgcgcctgtctcgttttgcgccgtatctggcaaaagcatttcctgaaacggctgccgcgggggggattattgaatcagaactggttgctattcctgctatgcaaaaacgactggaaaaggaatatcaccagccgatcgccgggcaattgctactaaaaaaagacagccatttgccgatttccggctccataaaagcacgtggcgggatttatgaagtcctggcccatgctgaaaaactggctctggaagcgggtttgctgacacttgaggatgactacagcaaactgctttccccggagtttaaacagttctttagccaatacagtattgctgtgggatcaaccggaaatctggggttatcaattggtattatgagcgcccgcatcggctttaaagtaacggtgcatatgtctgctgatgcccgggcatggaaaaaagcgaaactgcgcagccatggcgttacggtcgtggaatatgagcaagattatggtgttgcagtcgaggaaggacgtaaagcagcgcagtctgacccgaactgtttctttattgatgacgagaattcccgcacgttgttccttgggtattccgtcgcaggccagcgtcttaaagcgcaatttgccgagcaaggtcgtattgtcgatgctgataaccctctgtttgtctatctgccgtgtggtgttggcggtggtcctggtggcgtcgcattcgggcttaaactggcatttggcgatcatgttcactgcttttttgccgaaccaacgcactccccttgtatgctgttaggcgtccataccggattacacgatcagatttctgttcaggatattggtatcgacaaccttaccgcagcggatggccttgcagttggtcgcgcatcaggctttgtcgggcgggcaatggagcgtctactggatggcttctatacccttagcgatcaaaccatgtatgacatgcttagctggctggcgcaggaagaaggtattcgtcttgaaccatcggcactggcgggtatggccgggcctcagcgcgtgtgcgcatcagtaagttaccaacagatgcacggtttcagcgcagaacaactgcgtaatgccactcatctggtgtgggcgacgggaggtggaatggtgccggaagaagagatgaatcaatatctggcaaaaggccgttaa

SEQ ID NO: 679 - DNA, 1539 bp, Escherichia coli
atggcaatcactaaatcaactcctgcaccattaaccggtgggacgttatggtgcgtcactattgcattgtcattagcgacgtttatgcaaatgttggattccactatttctaacgtcgcaataccgacaatatctggctttctgggagcatcaacagacgaaggcacctgggttatcacctcgtttggcgtagcaaatgccattgcgatccctgttaccggcaggctggcacaaagaataggcgaattaaggttatttttactttcagtaacctttttttcgctgtcttcattaatgtgtagtttatcgaccaatcttgatgtgctgatattttttagagtcgttcaggggttaatggcggggccgttaattccactgtcacagagtttattattaaggaattatccaccagaaaaaagaacatttgctctggcattatggtcaatgaccgtgattatcgctccgatatgtgggccgatattgggcggctatatttgcgataactttagctggggttggatatttttaatcaatgtccctatggggattatcgtcctgacattatgcttaaccttacttaaaggaagagaaactgagacttcaccggtcaaaatgaatctaccaggactgaccctgttagtgctcggtgttggttgcttgcaaattatgcttgataaagggcgcgatctggattggttcaactcgagtacaataataatactaacagtagtatcagttatttctctgatttctttagtcatttgggagtcgacctcagagaatccgattcttgacctcagtttgtttaagtcccgtaatttcaccattggtattgtgagtatcacatgcgcgtatttattttactctggagcgatagttcttatgccgcagttactccaggaaacgatggggtataatgcgatatgggccggacttgcctatgcgcccatcggtatcatgccgctattaatatcacctttgataggacgttatggcaacaaaattgatatgcggttgttggtgacatttagttttttgatgtatgcggtttgctattactggcgttctgtgacatttatgccaacgattgattttacaggcatcattttgccacagttttttcagggattcgccgttgcctgtttctttttacccttaacaacgatttcgttttcaggcttgccagataataaatttgccaatgcctcgagtatgagtaatttttttcgcaccttgtcaggatcagttggtacgtcgttgacaatgacactgtggggacgccgcgaatcgttacaccatagtcagttgacagcaaccatcgatcaatttaaccccgtgtttaattcatcgtcacaaattatggataaatactatggttcgctttcaggagttcttaatgaaattaataatgaaataactcagcagtcactttctatttctgcaaatgagattttccgtatggcggctgttgcttttatcttacttacggttttggtttggtttgcgaaaccgccgtttacagcgaaaggcgttgggtga

SEQ ID NO: 680 - DNA, 1164 bp, Escherichia coli
gtggaacagattaattcaaataaaaaacattctgacagaagaaaatattttgctttgttagcggtagttttatttattgcgttttcaggtgcctatgcctattggtcaatggaattaaaagacatgattagtacagatgacgcctatgtcacgggaaatgcagatccaatttctgcacaagtctcaggcagtgtcactgtcgttaatcataaagatacgaactacgttcgacaaggtgacattttagtttcactggataaaactgatgccactatcgcactcaataaagctaaaaataatctggcaaatattgttcggcaaacgaataaactatacttacaggataaacaatacagtgccgaagtcgcttcagcacgtattcagtatcaacaatctttagaagattataaccgtcgtgtgcctttagcgaagcaaggggttatttcaaaagaagcgctggagcataccaaagatacgttaataagtagcaaagcggcattgaatgctgctatccaggcttataaagcgaataaagctttagtaatgaacacaccattaaaccgtcagccacaagtcattgaagctgcagatgcaaccaaagaagcctggttggcgcttaaacgtacggatattaagagtccggttaccggttatattgcccagagaagtgttcaggtcggcgaaacagtgagtcccggacaatcgttaatggctgtcgtaccggcgcgtcaaatgtgggttaatgccaactttaaagaaacacaactcacggatgtacggattggtcaatcggtcaatattatcagcgatctttatggtgaaaatgttgtgtttcatggtcgggtgacagggatcaatatgggaaccggcaatgcgttctccttattacctgcacaaaatgcgacagggaactggatcaaaatcgttcagcgtgtaccggttgaagtttctctggatccaaaagaactcatggaacaccctttgcgcattggtttatcgatgactgctactattgatacgaagaatgaagacattgccgagatgcccgatctggcttcaaccgtgacgtccatgcctgcttataccagtaaggctttagttatcgataccagtccgatagaaaaagaaattagcaacattatttcgcataatggacaactttaa

SEQ ID NO: 681 - DNA, 615 bp, Escherichia coli
atgaacgcaataattattgatgaccatcctcttgctatcgcagcaattcgtaatttattgatcaaaaacgatattgaaatcttagcagagttgactgaaggcggaagcgccgttcagcgggtggaaacacttaagcctgatatcgtcatcattgatgtcgatatccccggagttaacggtatccaggtgttagaaacgctgagaaagcgccaatatagcggaattattattattgtctccgctaaaaatgaccatttttacgggaaacattgtgctgatgctggcgctaatggtttcgtgagtaaaaaagaaggcatgaacaatatcattgcagctattgaagctgcaaaaaatggctactgctatttccccttctctctcaaccggtttgttggaagtttaacgtccgaccagcaaaaactcgactccttatcgaaacaagaaattagtgtcatgcggtatattcttgatggcaaggataataatgacattgctgaaaaaatgttcatcagcaacaaaactgtcagcacttataaaagtcgcttgatggaaaaattagaatgcaaatcactgatggatctttacacattcgcacaacgtaacaaaatcggctaa

SEQ ID NO: 682 - DNA, 3594 bp, Escherichia coli
atgaagtttttaccctatatttttcttctctgttgtggtctttggtcgaccataagtttcgcagacggagattacatcgaatatcgtggcatcagtagtaacaaccgtgtcacacttgatccactacgtctgagcaacaaggaattacgttggctcgcgagcaaaaaaaatcttgtgattgcagtacacaagtcccaaacagctacgttgttgcataccgactcgcagcaacggattcgtggtattaatgctgattatttaaatcttttaaaaagagcgttaaatatcaaattaacactccgggaatacgcagatcatcaaaaagcaatggacgcgctggaagacggtgaagttgatatagtgttatcacatttagttgcttcgccgcctcttaatgatgacattgctgcaactaatcctctgataattacctttccggcgctggtcactacccttcacgattcaatgcgaccgcttacctcatcaaaaccagtaaatattgctcgagtagcaaattatcccccagacgaggtaattcatcaatcatttccaaaagcaacaattatctcttttacaaatttatatcaggcattagcatccgtctcagccggacagaatgattactttattggtagtaacatcattaccagcagtatgatttcccgttattttactcactccttaaatgtagtgaagtattataactcaccgcgtcaatataactttttattaaccagaaaagattcaatcgttcttaatgaagtactcaatcgatttgttgatgctttaacaaatgaagttcgctatgaagtatcacaaaattggcttgatacaggaaacctggcctttctgaacaaaccattagaactcactgaacatgaaaaacagtggattaagcagcatcccgatttaaaggtgctggaaaatccttactcgccaccctattctatgacagatgaaactggctcagttcgaggcgtgatgggtgatattcttaatattattaccttgcaaacaggtttaaatttttctccgatcaccgtttcacacaatattcatgctgggacacagcttaaccccggtggatgggatatattgcccgccgctatttatagtgaagatcgagaaaataatgtttcatttgctgaagtattcataacaacgccttacgtttttgtcatgcaaaaagcgcctgacagtgaacaaacattaaaaaaaggaatgaaagttgccattccatattattatgagcttcattcgcaattaaaagagatgtatccggaggtagagtggataaaagtcgataacgccagcgctgcatttcacaaggtcaaggaaggtgaacttgatgctctggtcgcgacacagttaaattcgcgttacatgatcgaccattactatcctaatgaactttatcattttcttattcccggcgttcagaatgcatcactttcgttcgcttttcctcgcggagaaccggaacttaaggatattattaataaagcactgaatgcaattcccccaagcgaagttctgcgcctgaccgaaaaatggattaaaatgcccaatgtgaccattgacacatgggacctctatagcgagcaattttatattgttacgacattatccgttttattagttggcagtagccttttatggggattctacctgttacgctcagttcgtcgtcgtaaagttattcagggtgatttagaaaaccaaatatcattccggaaagcgctctcggattccttaccgaatccaacttatgttgtaaactggcaaggtaatgtcattagtcacaatagtgcatttgaacattatttcactgctgattactataaaaatgcaatgttaccattagaaaatagtgaatccccctttaaagatgttttttctaatacacatgaagtcacagcagaaacgaaagaaaaccgaacaatatacacacaggtatttgaaattgataatggcatcgagaaaagatgcattaatcactggcataccttatgtaatctgccagcaagcgaacatgctgtttatatttgtggttggcaagatattaccgagacgcgtgatttaattcatgcactcgaagtagagagaaataaagcgatcaatgcaactgtcgcaaaaagccagtttctggcaacaatgagtcacgaaataagaacaccaataagctccattatgggcttcctggaactactgtcgggttctggtcttagcaaggaacaacgggtggaggcgatttcacttgcctacgccaccggacaatcactcctcggcttaattggtgaaatccttgatgtcgacaaaattgaatcgggtaactatcaacttcaaccacaatgggtcgatatccctactttagtccagaacacttgtcactctttcggtgcgattgctgcaagcaaatcgatcgcattaagttgcagcagtacgcttcctgaacgctacctggttaagatcgaccctcaggcatttaagcaggtcttatctaatttactgagtaatgctctcaaatttactaccgagggggcagtaaaaattacgacctccctgggtcacattgatgacaaccacgctgttatcaaaatgacgattatggattctggaagtggattatctcaggaagaacaacaacaactgtttaaacgctatagccaaacaagtgcaggtcgtcagcaaacaggttctggtttaggcttaatgatctgcaaagaattaattaaaaacatgcagggcgatttgtcattagaaagtcatccaggcataggaacgatatttacgatcacaatcccggtagaaattacccaacaagtggcggctgtcgaggcaaaagcagaacaacctataatactacctgaaaagttgagcatattaatcgcggatgatcatccgaccaataggctattactcaaacgccagctaaatctattaggatatgatgttgatgaagccactgatggtgtgcaagcgctacacaaagtcagtatgcaacattatgatctgcttattactgacgttaatatgccgaatatggatggttttgagttgactcgcaaactccgtgagcaaaattcttccttacccatctgggggcttacagccaacgcacaggctaacgaacgtgaaaaagggttaaattgcggcatgaacttatgtttgttcaaaccgttgactctggatgtactgaaaacacatttaagtcagttacaccaggttgcgcatattgcacctcagtatcgccaccttgatatcgaggccctgaagaataatacggcgaatgatctacaactgatgcaggagattctcatgactttccagcatgaaacgcataaagatctacccgctgcgtttcatgcactagaagctggcgataacagaactttccatcagtgtattcatcgcatccacggtgcggctaacatcctgaatttgcaaaagttgattaatattagccaccagttagaaataacacctgtttcagatgacagtaagcctgaaattcttcagttgctgaactctgtaaaagaacacattgcagagctggaccaggagattactgttttctgtcagcaaaatgactaa

SEQ ID NO: 683 - DNA, 1146 bp, Escherichia coli
atgacaaataatgaatgcaaagggccgtttgaaggcttattagttatcgatatgacgcatgtccttaatgggcctttcggaactcaacttctttgtaatatgggtgcaagggtaattaaagttgagccgccgggtcatggtgatgatacccgcacatttggtccctatgtggatggacagtcactctattacagttttattaatcatggcaaagagagtgtggttcttgatttaaagaatgatcacgataaaagtatatttataaatatgcttaaacaagctgatgtattagctgagaattttcgtccaggtacaatggaaaaactcgggttttcatgggaaaggttacaagaaatcaacccgcgccttatatatgcttcatcgtcaggtttcggacataccggtccgctaaaagatgctcctgcctacgataccatcattcaggcaatgagcgggataatgatggaaacaggataccctgatgctccgccagtgcgcgttggtacctctcttgcggatctctgtggcggtgtttatttattcagtggaatagtgagtgcactttatggccgcgaaaagagccagagaggggcgcatgtcgatatagcgatgtttgatgccactctgagttttctggagcatggactgatggcatatatcgcgactgggaagtcaccacaacgtttaggaaatcgccatccctacatggcaccttttgatgttttcgatactcaggataagccgattacgatttgttgtggtaatgacaagcttttttctgcgttatgccaggcactggagcttacggaactggttaatgatccccgatttagcagcaatattttacgcgtacataaccaggctattcttaaagaatatattgagcggacgttaaaaacgcaggtagctgaagtttggttagccagaatacatgaagttggtgtgcccgtcgcgccgttattaagtgtggctgaggccattaatttaccacaaactcaggcgagaaatatgttgattgaagccgggggaataatgatgccgggtaatccgataaaaatcagcggctgcgcggacccgcatgttatgccgggagcggcaacgctcgaccagcatggggaacaaattcgccaggagttctcatcataa

SEQ ID NO: 684 - DNA, 945 bp, Escherichia coli
atgctaacattttttattggcgatttattgcctattatcgtaatcatgctgttgggttattttagcggcagacgagaaactttttcagaggatcaagctcgggcatttaataaactggtattaaactacgctcttcctgcggctctatttgtttctattaccagggcaaacagggaaatgatttttgcggacactcgcctgacccttgtatcacttgtggttattgtcgggtgtttctttttctcctggttcggttgctacaaattttttaaacgtacccatgcagaagcagcagtatgtgcattaattgcaggttcacctaccattggattcctggggtttgcagttctcgatcctatttatggtgattccgtatcaacaggtttagtggtagcaattatttctattattgttaacgcaattactattcctattggtctgtatttgctgaatccttcctcaggagcggatggtaagaagaatagtaatctgagcgcattaatttctgcggcaaaggagccagtagtatgggctcctgttctggcaacgatcctggtattggttggggtaagaattccggcagcatgggacccaacctttaatctgattgcgaaggctaactcaggggtagcggtattcgctgcggggttgactctggctgcacataaattcgagttcagtgccgaaattgcttataacactttcctgaagctgattctgatgccactggcgctgcttctcgtcggtatggcatgtcatttgaatagcgaacatttgcagatgatggtactggcaggcgcattaccgccggcattctccggaatcattattgccagccggtttaatgtctatacccgcactggtacagcgtcattggctgtgagcgtactgggttttgtcgtcacggctcctttgtggatttatgtcagtcgactggtttcataa

SEQ ID NO: 685 - DNA, 1695 bp, Escherichia coli
atgtcagatcaacttcaaatgacagatggtatgcatatcatcgttgaagcattaaaacagaataatattgacactatttatggtgttgtaggtattcctgtgacggatatggcgcgccatgcccaggcggaaggcattcgttatattggttttcgtcatgagcagtcggcaggctatgccgctgcagcaagcggttttcttacccaaaaaccagggatctgcctgacagtgtctgcgccaggattcctcaacggtttgaccgcattggccaatgcaacggtaaatggttttccgatgatcatgattagcggctccagcgaccgcgcgatcgtcgatctccagcaaggtgattatgaagagctggaccaaatgaatgcggcaaaatcgtatgccaaagcagcatttcgcgttaatcagccgcaggatcttggcattgcattggcacgcgctatccgggtctcagtatcgggtcgtcctggcggtgtttatcttgatttaccagcaaatgtcctggccgcgacgatggaaaaagacgaagcgttaaccacgattgttaaagttgaaaatccgtcgccagcattattgccatgcccgaagtcagtcactagcgcaatttcgcttttagcaaaagctgaacgaccattaattattcttggcaaaggcgcggcgtattcacaatctgatgaacagcttcgtgaatttattgaaagtgcccagattccattcctgccaatgtctatggcgaaagggatcctcgaagatacgcatccactctctgcggcagctgcgcgttcgtttgccctggcaaatgctgacgttgtcatgcttgttggtgcacgactgaattggttactggcacacggtaaaaaaggatgggcggcagatacacagtttattcaactggatattgaaccgcaggaaattgacagcaaccgccccattgctgtgccagtcgttggcgatattgcatccagtatgcaaggtatgctggcagaattgaaacaaaacacatttacgactccactggtgtggcgcgatattttaaatatccacaagcagcaaaatgcacaaaaaatgcatgaaaagttaagtacagatacccaaccattaaattactttaatgcattgagtgccgtgcgcgatgttttgcgcgagaaccaggatatttatttagttaatgaaggggcaaataccctggataatgcacgaaatattattgatatgtataaaccacgtcgtcgtctggattgtggcacctggggtgtcatgggcatcggtatgggctatgccatcggtgctagcgtgacctctggttctccggttgtcgctattgaaggtgatagtgcttttggtttcagtgggatggagattgaaacgatttgtcgatataacctgccggtgacgatcgttatttttaataatggcggcatctacagaggagacggtgttgacctcagcggcgctggtgcaccatcgccaacggatctgttgcaccatgcaaggtatgacaaattaatggatgcgtttcgtggcgttggctataacgtcaccacgacagatgaacttcgtcatgctttaaccaccggaattcagtcgcgcaaaccgaccattattaatgtggtcatcgacccagcagcaggaactgaaagtggccatattaccaaacttaacccaaaacaagtcgctggtaattaa

SEQ ID NO: 686 - DNA, 1251 bp, Escherichia coli
atgtcaactccacttcaaggaattaaagttctcgatttcaccggtgtgcaatctggcccatcttgtactcaaatgctggcctggtttggcgctgacgtcattaaaattgaacgtcccggcgttggtgacgtaacgcgccaccagctgcgagatattcctgatatcgatgcgctttacttcaccatgcttaacagtaacaaacgttctattgaattaaataccaaaacagcggaaggcaaagaggtaatggaaaagctgatccgcgaagctgatatcttagtcgagaactttcatccaggggccattgatcatatgggcttcacctgggagcatattcaagaaatcaatccacgtctgatttttggttcgatcaaagggtttgatgagtgttcgccttatgtgaatgtaaaagcctatgaaaacgttgctcaggcagcgggtggcgcggcatctactacaggtttttgggacggtccgccgctggtaagcgctgcagcgttgggtgacagcaacaccggaatgcatttgctgatcggtttacttgctgctttgctgcatcgcgaaaaaacggggcgtgggcaacgagtcaccatgtcaatgcaggatgccgtgttgaacctttgccgcgtgaaattacgcgaccagcagcgtctcgatcagttggggtatctggaagaatacccgcagtatccgaatggcacatttggtgatgcagttccccgcggtggtaatgcgggtggtggcggtcagcctggctggatcctgaaatgtaaaggctgggaaaccgatcctaacgcctatatttatttcactattcaggagcaaaactgggaaaacacctgtaaagccatcggcaaaccagaatggattaccgatccggcatacagtacagcccatgcccgacagccacatattttcgatatttttgctgaaatcgaaaaatacactgtcactattgataaacatgaagcggtggcctatttgactcagtttgatattccttgtgcaccggttttaagtatgaaagaaatttcacttgatccctctttgcgccaaagtggcagtgttgtcgaagtggaacaaccgttgcgtggaaaatatctgacagttggttgtccaatgaaattctctgcctttacgccggatattaaagctgcgccgctattaggtgaacataccgctgctgtattgcaggagctgggttatagcgacgatgaaattgctgcaatgaagcaaaaccacgccatctga

SEQ ID NO: 687 - DNA, 633 bp, Escherichia coli
atgaaacgtttaattatggctacgatggtcacagcaattctggcatcttcaactgtatgggctgctgataatgcaccggtagcggcacaacagcaaactcagcaagttaagcaaacccagaaaacggcagcagcagagcgtatctctgaacaaggtttatatgcgatgcgtgacgtgcaggtagcgcgcctggctctgtttcatggcgatccggaaaaggcaaaagaactgaccaatgaagcttccgctttgctgtcagatgatagtaccgaatgggcaaagttcgctaaaccaggtaaaaagaccaacgtcaatgatgaccaatatattgtcattaatgcatctgtcggaatttctgagagttatgtagcgacacccgaaaaagaagccgcgataaaaattgccaacgaaaaaatggcgaaaggggataaaaagggggcaatggaagagcttcgcctggccggtgttggtgtaatggaaaaccaatatttgatgccgcttaaacagactcgtaatgcacttgctgatgcgcagaaactgcttgataaaaagcaatactacgaagcaaacctggcgcttaaaggtgcggaagatggaatcatcgttgatagcgaagcactgtttgtgaactaa

SEQ ID NO: 688 - DNA, 276 bp, Escherichia coli
atgaaagtaaacttaatgctttttagcttatttttatttgtctctattatggcatgcaatgtttttgcattttctatttctggtggtggtagtgaggcgagctataaagagacagaaaaaacgtcagtgatgacgacaacgcattctacaaaacttcagccatcacaggcgattttgtttaagatgagagaagatgcaccaccattaaacctcacagaagacatcacacctacttatccgacaaaggcgaattatctcattcatcctttgcgatag

SEQ ID NO: 689 - DNA, 243 bp, Escherichia coli
atgatttatttatggatgtttctcgccctgtgtattgtctgcgtaagcggatacatcggtcaggtactgaacatggtatcggcgatctcttctttcttcggcatggtgatcctcgctgcactcatttattacttcaccatgtggttaactggcggtaatgaactggtgacggggatatttatgtttcttgccccggcttgtggcttgatgattcgctttatggtggggtatggcaggcgatag

SEQ ID NO: 690 - DNA, 921 bp, Escherichia coli
atgtttccaaaatgcaaattttcccgcgagtttctgcatcctcgctactggctcacgtggtttgggcttggtgtactctggctttgggtacagcttccttatcctgttctctgctttctcggcacgcgtatcggcacaatggcgcgaccattcctgaaacgtcgtgaatctatcgcccgtaaaaacctggaactttgtttcccgcagcattctgcgaaagagcgcgagaagatgattgccgaaaactttcgttcactcggcatggcgctggtagaaaccggcatggcgtggttctggcccgacagtcgcgtacgtaaatggtttgatgtggaagggctggataaccttaaacgcgcacaaatgcaaaatcgcggcgtaatggttgtcggcgtccattttatgtcgctggaactgggcggtcgggtgatgggactttgccaaccaatgatggccacctatcgcccgcataataatcagctgatggaatgggtgcagacccgtggtcgcatgcgctctaacaaagcgatgatcggcagaaataatctgcgcggcattgtcagtgcactgaagaaaggtgaagcggtatggtttgctcccgatcaggattatggtcgtaaaggcagctccttcgcgccgttctttgcggtggaaaatgtcgccacaaccaatggcacctatgtcctctctcgtctctctggcgcagccatgttgaccgtaacgatggtaagaaaagcggattacagcggatatcgtttgtacatcaccccagagatggaaggctacccgacagatgaaaatcaagccgctgcctatatgaacaagattatcgagaaagagatcatgcgcgcaccggagcagtacctctggatccaccgtcgctttaaaacgcgcccggtgggtgaatcgtcgttatacatttaa

SEQ ID NO: 691 - DNA, 1239 bp, Escherichia coli
atggctgacactcgccctgaacgtcgctttacgcgtattgatcgtctcccgccctacgtttttaacattaccgctgaactgaaaatggctgcgcgtcggcgcggcgaagatattatcgatttcagtatgggtaacccggacggtgcgactccgccgcatatcgtcgaaaaattatgtacggtggcccagcgcccggacacgcatggttactccacttcacgcggcattccgcggttacgtcgcgccatttcccgctggtatcaggatcgctacgacgttgaaatcgacccggaatcagaagccatcgtcactattggttcgaaagagggcctggcgcatctgatgctggcgacactggatcacggtgacacagtgctggtgccgaatccaagttaccccattcatatttacggcgcggtgattgccggggcgcaggtacgctcagtgccgctggtggaaggtgtcgatttcttcaacgaactggaacgcgccattcgcgaaagttatccgaaaccgaagatgatgatcctcggcttcccgtcgaacccaaccgcgcaatgcgtggaactggaattctttgagaaggttgtggcgctggctaaacgctacgatgtgctggtggtccacgacctggcctatgccgatatcgtctacgatggctggaaagcgccgtcaatcatgcaggtgccaggtgcacgcgacgtggcggtcgagttctttacgctgtcgaaaagctacaacatggcgggctggcgtatcggctttatggtcggtaacaaaacgctggtcagcgcgttggcacgtattaaaagctatcacgattacggcacctttacgccgttgcaggtggcggctattgcggcgctggagggcgatcaacagtgcgtgcgcgatattgccgaacagtacaaacgccgccgtgatgtgctggtgaaagggctgcatgaagcgggctggatggtcgaaatgccgaaggcttcgatgtatgtctgggcgaaaatcccggaaccgtatgctgccatgggctcgctggaatttgccaagaaattgcttaacgaagcgaaggtctgtgtctctccagggattggctttggcgactacggcgatacgcatgtgcgctttgcactgattgaaaaccgcgaccgtattcgtcaggcgattcgtgggattaaagcgatgttccgtgccgacggtttactacctgccagcagcaaacatattcacgaaaacgcggaataa

SEQ ID NO: 692 - DNA, 1698 bp, Escherichia coli
gtgcacgaaatattcaacatgctgctggcggtcttcgatcgggccgcgttaatgcttatctgcctgttttttctcatccgtatccgcctgtttcgcgaactgttgcacaagtcggcacactcaccgaaagagctgctcgccgttaccgccattttctcgctgttcgccctgttcagcacctggtccggcgttcccgtagaaggctcgctggtgaacgtacgtattatcgcggtgatgtcaggcggaattctgtttggcccgtgggtgggcatcattaccggcgtgattgcgggtattcaccgttatttaattgacatcggcggcgtaacggcgatcccctgctttatcaccagcattctggcgggttgtatatcgggctggatcaacctgaaaatccccaaagcacagcgctggcgcgtcggtattctcggcggcatgttgtgtgaaacgttgaccatgattctggtgattgtctgggcaccaactaccgcattggggatcgatatcgtctctaaaatcgggattccaatgatcctcggcagcgtctgtatcggctttattgtgttgctggtacaaagtgttgagggagaaaaagaggccagcgccgcgcggcaggccaagctggcgctggatatcgccaacaaaacgctgccgctgtttcgccatgtcaatagcgagtcattacgcaaagtctgcgaaattatccgcgatgacattcacgccgatgcggtggcgatgactaataccgatcatgtgctggcctacgttggcgtgggtgaacataactatcagaatggcgatgacttcattagcccgactacccgccaggcgatgaattatggaaaaatcatcattaaaaacaatgatgaagcccaccgcacaccagagattcattccatgctggtgatcccattgtgggagaaaggcgttgtgaccggaacgctgaaaatttactactgccacgcgcatcagataacctcgtcattacaggaaatggcggtcggtctgtcacaaatcatctccacgcaactggaggtgtcacgcgccgagcagctgcgtgaaatggcaaataaggcagagcttcgcgccctgcaaagcaaaattaatccccatttcctgtttaacgctttgaacgctatttcatcgtcaatccgcctgaatccggatactgctcgccagctgatctttaatctgtcgcgttatctgcgctataacattgaattaaaagatgatgagcaaatcgatatcaaaaaagagctgtatcaaattaaagactatattgccattgagcaggcccgctttggcgacaagctgacggttatctatgatattgatgaagaggtgaattgctgcattcccagcctgctgatccagccgttggtggaaaacgccattgtccacggtatccagccttgcaaaggtaaaggcgttgtcaccatcagcgttgcagagtgcggtaatcgggtacgtattgcggtgcgagataccgggcacggcatcgatccaaaggtgattgagcgggtcgaagcgaacgaaatgccgggcaataaaattggcctgctgaatgtccatcatcgcgtgaagttattgtatggcgaggggctgcatatccgccgcctggaaccaggaacggaaattgcgttttacattcctaaccaacgcaccccagtcgcctcacaggctacgttattgctttga

SEQ ID NO: 693 - DNA, 735 bp, Escherichia coli
gtgaaagtcatcattgttgaagacgaattcctggcacaacaggaactgagctggctaattaaagagcacagccagatggagattgtcggcacctttgacgacggtctggacgtgttgaagtttttgcagcataaccgcgtcgacgccatttttctggatatcaatattccgtcgctggatggtgtgttgctggcacaaaacatcagccagttcgcccataaaccgtttattgtgttcatcaccgcgtggaaagaacatgcggtagaagcgtttgaactggaagcgtttgactacattctcaaaccgtatcaggagtcacgcattaccgggatgctgcaaaaactggaagcggcctggcaacaacagcagaccagcagtacgcctgccgcgacggtaacgcgtgagaatgacaccattaatctggtgaaagatgagcgaatcatcgtcacgcccattaacgatatctattacgccgaagcgcatgagaaaatgacctttgtctatacgcggcgtgaatcctacgtaatgccgatgaacattaccgagttttgcagcaagctgccgccgtcgcattttttccgctgccatcgctcattttgtgtcaatctgaacaaaatccgcgagatcgaaccgtggtttaataacacctatattctgcggctgaaagatctggattttgaagtgccggtcagccgcagcaaagttaaagaattccgccagttaatgcatctttaa

SEQ ID NO: 694 - DNA, 858 bp, Escherichia coli
atgaaagcaccaggcttgcccgccgatcaacaatttttcgccgatctgttcagcggcctggtgcttaacccgcaactactggggcgcgtctggtttgccagccagcctacctcattgccagtgggcagtttatgtattgattttccccgtctggatatcgtgctacgcggcgaatacggcaatctgctggaagcaaagcagcaacgtatggtggaaggagaaatgctgtttattccggcacgcgcggctaatttaccggtcaacaacaaaccggtgatgctgttaagcctggtgttcgcaccgacctggcttggcttatcattttacgatagccgcaccacgtcgttgttacatcctgctcgccagatccaacttcccagcctgcaacgcggcgaaggtgaagcgatgcttaccgccctcacccatcttagccgttcgccgctggagcagaatatcattcagccactggtgttaagtttgctgcatctttgccgtaacgtggtgaatatgccgccgggcaattcgcagccgcgcggcgattttctctatcacagcatttgtaactgggttcaggataattatgcccagccgctcacccgcgagagcgtggctcagttttttaatatcacgcccaatcatctgtcaaaactgtttgctcagcatggaacaatgcgttttatcgagtatgttcgctgggtacgaatggcaaaggcaaggatgattttgcagaaatatcatctgtcgattcatgatgtggcacagcgttgcggttttccggacagcgactatttttgtcgcgttttccggcgtcagtttggcctgacgccgggagagtacagcgcccgttttcagggctaa

SEQ ID NO: 695 - DNA, 2496 bp, Escherichia coli
atgttaacgattcaatttctctgtcctttgcctaacggtctacatgctcgtccggcgtgggaacttaaagagcagtgcagccagtggcaaagcgaaatcacttttattaaccatcgccagaacgcaaaggccgatgcgaaaagctcgctggcgctgattggcactggcactttatttaatgacagttgcagcctgaacattagcggtagcgatgaagagcaggcgcggcgagtgctggaagagtatatccaggtgcgctttatcgacagcgatagcgtccagccgacgcaggcagaactgacggcgcatccgctgccgcgttcattaagccgcctgaacccggatttactgtacggcaacgtgctggcaagcggcgttggcgtgggtacactgaccctgttacagagcgacagcctcgacagttatcgggcaataccggccagtgcgcaagattccaccctgctggagcacagtctggcaacgcttgccgagcaactgaaccagcaattgcgtgagcgtgacggcgaaagtaaaactatcctcagcgcccatttgtcgctgattcaggatgatgaatttgcaggcaatatccgtcacctgatggcagaacagcatcaggggctgggggcggcgatcatcagcaatatggagcagatttgtgccaaactttctgcttctgccagcgattatctgcgcgagcgggtcagcgacattcgcgatattagcgaacagttgctgcatatcacctggccggaactaaaaccgcgcaataatctggtgcttgaaaaaccgaccattctggtggctgaagatttaaccccaagccagtttttgagcctcgatttaaaaaatcttgcgggcatgattctggagaaaaccgggcgcacctcgcataccctgattctggcccgcgcttcggcgatcccggtactgagcggcctgccgctggatgcgattgcccgttatgccgggcaacctgcagtgcttgatgcccagtgcggcgtactggcaattaatcccaacgatgcggtgagcggttattaccaggtggcgcagacgctggcggataaacgccaaaaacaacaggcgcaagctgccgcgcagctggcctattcccgtgataaaaagcgtattgatattgcggcgaatattggcacagctctggaagccccaggcgcgtttgccaacggcgcggaaggcgttgggctgtttcgtaccgaaatgctctatatggatcgcgacagcgcgccggacgagcaggaacagtttgaagcgtaccagcaggtgctactggcggcgggcgacaagccgattatcttccgcacgatggacatcggtggcgataaaagcattccttacctcaacattccccaggaagagaacccgttcctcggctatcgcgcggtacgtatttacccggaatttgctggcctgttccgtactcaattgcgggcgattttgcgcgctgccagtttcggcaacgcccagttgatgatcccaatggtccacagtctcgatcagatcttatgggtgaagggtgagatccaaaaagcgatcgttgagcttaagcgcgatggcctgcgtcatgcagagacgattacgctgggtatcatggtggaagtgccgtcggtgtgctacatcatcgaccacttctgcgatgaggtcgatttcttcagtatcggctccaacgatatgacccagtatctgtatgcggtcgatcgtaataacccgcgcgtatcgccgctgtataacccgattacgccatcgttcctgcgcatgttgcagcagattgttaccgctgcgcatcagcgcggcaaatgggtaggtatttgcggtgaactgggcggtgaaagtcgttatctgccgctactgctagggctgggcctggatgagctaagcatgagtagcccgcgtattccggcagtgaaaagccagcttcgtcaactggatagcgaggcgtgtcgggaactggcgcgtcaggcgtgcgagtgccgcagcgcgcaggaaattgaagcgttacttaccgcgtttgcgccggaagaagacgttcgcccactgctggcactagagaatatctttgttgatcagtcctttagtaataaagagcaggcgatccagttcctgtgcggtaacctcggtgttaacgggcgtactgaacatccgttcgagctggaagaagatgtctggcagcgggaagagattgttactactggcgttggttttggcgtggcgatcccgcacaccaaatcacagtggatccgtcattccagtatcagcattgcccggttggtgaaaccggttgactggcagtcagaaatgggcgaagtcgaactggtgatcatgctgacgctgggcgctaacgaagggatgaatcatgtgaaagtcttctcgcagctggcgcgcaaactggtgaataaaaacttccgccagtcgttgtttgccgcgcaagatgcgcaaagcatcctgacgctgctggaaacggaattaaccttctga

SEQ ID NO: 696 - DNA, 1038 bp, Escherichia coli
atggatttatcactcttaaaagcgttgagcgaggcagatgcgatcgcctcctcagaacaggaagtacggcagatcctgcgggaagaagcggatcgcctgcaaaaagaagtgcgatttgatggcctgggatcggtgctgatccgactcaatgagtcgacaggtccgaaggtgatgatctgtgcgcatatggacgaagtgggatttatggtgcgcagcatctcccgcgaaggggcgatcgatgtgttgccggttggcaatgtacgcatggctgcccgccagcttcagtcggtgcgtatcactacccgtgaagagtgcaaaattccaggcctgcttgacggcgaccggcaggggaatgacgtcagcgccatgcgcgtggacattggcgcgcgctcctgtgacgaagtgatgcaggcaggaattcgtccaggcgatcgcgtcaccttcgataccacttttcaggttctccctcaccagcgggtgatggggaaagcctttgatgaccgcctcggttgctatctgctggtgacgttactgcgtgagctgcacgacgccgaactgcctgcggaagtgtggctggtggcaagttccagcgaagaggtgggattacgcggcgggcaaactgccacccgcgcggtgtcgccggatgtcgccattgtgcttgataccgcctgctgggcgaaaaactttgattatggcgcagctaaccatcgccagattggtaacgggccgatgctggtgttaagcgacaagtcactgattgcgccgccaaaacttaccgcctggatcgaaaccgtggcggcagaaattggcgtaccgttgcagtcagatatgttcagcaatggcggcacggacggtggggcggtgcacttaaccggcactggcgtacccacagtggtgatggggcctgcaacccgccacggacattgcgccgcatcgattgccgactgccgtgacattttgcagatggagcaacttttatctgcccttattcaacgtcttacgcgtgagacggttgttcaactgacggatttcagatga

SEQ ID NO: 697 - DNA, 1086 bp, Escherichia coli
atgacattactcgcttcgctgcgcgactggcttaaggcacaacaactggatgcggtgcttctctcctcacggcagaacaaacagccgcatctggggatctccaccggatcaggctatgtggtgattagccgtgaaagtgcgcacattctggtggattcgcgctattacgcggatgttgaagcccgcacgcaaggttaccagctgcatttgctcgacgcgatgcacacgcttgccaccatcgtcagacaaatcattgccgatgagcagttgcaaacgctcggttttgaaggccagcaggtgagttgggaaaccgcgcaccgctggcagtccgaactcaatgcgaaactggttagcgccacgccggatgtgctgcggcaaatcaaaacgccagaagaggtggagaaaatccgccttgcctgcgggattgccgatcgtggcgcagagcatattcgccgctttattcaggcggggatgagcgaatgcgagatagccgctgaactggagtggtttatgcgccggcagggcgcagaaaaagcctctttcgataccattgtcgccagtggctggcgtggggcgctgccgcacggtaaagccagcgacaagattgttgcagcgggcgagtttgtcactctcgatttcggtgcgctgtatcagggctactgctctgatatgacgcgcaccttgctggtgaatggcgaaggggtgagcgccgaatctcatccgctgtttaacgtctatcagattgtcctgcaggcacagctcgcggcaatctctgtaattcgccccggcgtgcgctgccagcaggttgacgatgccgcgcgctgcgtgattaccgaggccggttatggcaagtttttcggccataacaccggtcatgctatcggtattgaagtccatgaagaaccgcgtttttcaccgcgggacaccacgacgctacagccaggtatgttactgaccgtggagccagggatttatttgccagggcaagggggcgtgcgcatcgaagatgtcgtgctggtcaccccgcaaggcgcagaagtgctctacgccgtgccgaaaacagtgttgctcacgggagaggcataa

SEQ ID NO: 698 - DNA, 1248 bp, Escherichia coli
atggccattaaaaaacgcagtgcaaccgttgtgcatggcgcatccggtgcggcagcggcagttaagaatccgcaggcctctaaatccagcttctggggtgaactcccgcagcatgtgatgtcagggatttcacgcatggtgccgaccttaattatgggcggtgtgatcctcgctttcagtcagctgattgcttatagctggcttaaaattcctgctgatatcggcatcatggatgctcttaatagcgggaaattctccggtttcgacctctccttactgaaatttgcctggctgtcgcagtccttcggcggtgtgttgtttggttttgccattccgatgtttgctgcttttgtggcgaactctatcggtggcaaactggcgttcccggctggatttatcggcggcttgatgtctacccagccgacgcaactgctgaacttcgatcccagcacgatgcaatgggcgacctcttcgccggtgccgtccaccttcattggtgcgctgattatttctatcgttgccggttaccttgtgaaatggatgaaccagaaaatccagttaccggatttcctgttagcgttcaaaaccacatttttgctaccgattctttccgccatttttgtcatgctggcgatgtactacgtcatcaccccctttggtggctggatcaacggcggtatccgtaccgtgctgaccgctgcaggtgagaagggcgcgctgatgtacgcaatggggatcgccgcggcgacagcaatcgaccttggtggcccgatcaacaaagcggcaggtttcgttgccttcagctttaccactgaccacgtattaccggtcactgcacgttctatcgctatcgttattccgccgattggtctgggtctggcgaccattatcgatcgtcgcttaactggcaaacgcttgttcaacgcccagctttatccgcagggtaaaaccgcgatgttcctggcgtttatggggatcagtgagggtgcgattccgtttgcactggaaagccctatcaccgccattccgtcgtatatggtcggcgcgattgtcggctcaaccgccgctgtctggctgggcgcagtgcaatggttcccggagtccgctatctgggcgtggccgctggtcactaatctgggtgtctatatggcggggatcgcgctgggagcaatcattactgcgctgatggtggtgttcttgcgtctgatgatgttccgcaaaggtaaattgttaatcgagagcctgtaa

SEQ ID NO: 699 - DNA, 327 bp, Escherichia coli
atgagtaagaaactgattgccttatgtgcctgcccaatgggcctggctcacacttttatggccgctcaggcgctggaagaagcggcggtagaagccggttatgaagtgaaaattgaaacccagggcgcggacggtatccagaatcgcctgacggcgcaggatatcgccgaagcgaccatcatcatccactccgtggcagttaccccggaagataacgagcgtttcgaatcacgcgacgtttatgaaatcactttgcaggacgcaattaaaaacgctgcgggaatcatcaaagaaatcgaagagatgattgcctctgaacaacagtaa

SEQ ID NO: 700 - DNA, 966 bp, Escherichia coli
atgacaaagtatgcattagtcggtgatgtgggcggcaccaacgcacgtcttgctctgtgtgatattgccagtggtgaaatctcgcaggctaagacctattcagggcttgattaccccagcctcgaagcggtcattcgcgtttatcttgaagaacataaggtcgaggtgaaagacggctgtattgccatcgcttgcccaattaccggtgactgggtggcaatgaccaaccatacctgggcgttctcaattgccgaaatgaaaaagaatctcggttttagccatctggaaattattaacgattttactgctgtatcgatggcgatcccgatgctgaaaaaagagcatctgattcagtttggtggcgcagaaccggtagaaggtaagcctattgcggtttacggtgccggaacagggcttggggttgcgcatctggtccatgtcgataagcgttgggtaagcttgccaggagaaggcggtcacgttgattttgcgccgaatagtgaagaagagggcattatcctcgaaatattgcgtgcggaaattggtcatgtttcggcggaacgcgtgctttctggccctgggctggtgaatttgtatcgcgcaattgttaaagccgacaaccgcctgccagaaaatctcaagccaaaagatattaccgaacgcgcgctggctgacagctgcaccgattgccgccgcgcgttgtcgctgttttgcgtcattatgggccgttttggcggcaatctggcgctcaatctcgggacatttggcggcgtgtttattgcgggtggtatcgtgccgcgctttcttgagttcttcaaagcctctggtttccgcgccgcatttgaagataaagggcgctttaaggaatatgtccatgatattccggtatatctcatcgtccatgacaatccgggtcttctcggttccggtgcacatttacgccagaccttaggtcacattctctaa

SEQ ID NO: 701 - DNA, 1257 bp, Escherichia coli
atgctccatccgcgagccagaaccatgttgttattatcgctccccgccgtggcaattgggattgcgtccagtcttattctgattatggtgatgaaaatcgcctcggtattacagaatttgctctggcaacgactgccgggaactctggggatagcccaggattcacctctctggatcatcggtgtattaacgctaacgggtattgcggtggggttggttatccgtttcagccagggtcatgccggaccagatcccgcctgtgaaccgcttatcggcgcaccggttccgccctctgcgctaccaggacttatcgtagcattaattctcggtcttgctggcggcgtcagcctggggccggaacatccgatcataaccgtcaatatcgcccttgccgtcgccattggcgctcgtctgttaccgcgcgtcaaccgaatggagtggactattttagcctctgccggaaccatcggcgcgctgtttggcacacctgttgcggcggcattgatattttcgcaaaccttaaatggcagtaatgaagttccgctatgggatcgtctctttgcgccgttaatggcggcagcagctggtgcacttactaccggattatttttccatcctcatttttcactgcccattgcgcattacggacagatggaaatgaccgatattctcagcggtgcaattgtcgcggcgattgccatcgcagcagggatggtcgccgtatggtgcttaccacggttgcacgcgatgatgcatcaaatgaaaaatccggtgttcgtgctgggtattggcggatttattctcggtattctgggggttattggtggaccggtttcgctgtttaaagggctggatgagatgcagcagatggtggcaaatcaggctttcagcaccagcgattactttttgctggcggtgataaaacttgccgccctggtcgttgctgccgccagtggctttcgcggtgggcgaatcttcccggcagtgtttgtcggcgtggcattagggttgatgcttcatgagcacgttcccgccgttccagcggcaataaccgtttcctgcgctatactcggcatcgtgctggtggtaacacgcgatggctggttaagtctttttatggcggcagtcgttgtacccaataccacattgctaccgctgctctgtatcgtcatgctcccggcatggctgttattagcaggtaagccgatgatgatggtcaatcgtcagaagcaacagccaccccacgataacgtttag

SEQ ID NO: 702 - DNA, 327 bp, Escherichia coli
atgttcaggtcactgtttctggcggccgccctgatggcatttaccccgcttgcggcaaacgcaagtgaaatcaccctactgccatcaatcaaattacaaattggcgatcgcgatcattacggtaattactgggacggtggtcactggcgcgaccgtgactactggcaccgcaattatgaatggcgtaaaaaccgctggtggcgtcatgataatggctaccatcgtggctgggataagcgtaaagcgtatgagcgtggctatcgtgaaggctggcgcgatcgtgacgatcatcgtggaaaaggccgcggacatggacaccgccattaa

SEQ ID NO: 703 - DNA, 1239 bp, Escherichia coli
atgacgaactatcgcgttgagagtagcagcggacgggcggcgcgcaagatgaggctcgcattaatgggacctgcgttcattgcggcgattggttatatcgatcccggtaactttgcgaccaatattcaggcgggtgccagcttcggctatcagttattgtgggttgtcgtttgggctaacctgatggcgatgctgattcaaatcctctcggccaaactggggattgccaccggtaaaaatctggcggagcagattcgcgatcactacccgcgtcccgtcgtgtggttctattgggttcaggcagaaattattgcgatggcaaccgacctggcggaatttattggtgcggcgatcggttttaaactcattcttggtgtttcgttgttgcagggcgcggtgctgacggggatcgcgacattcctgattttaatgctgcaacgtcgcgggcaaaaaccgctggagaaagtgattggcgggttactgttgtttgttgccgcggcttacattgtcgagttgattttctcccagcctaacctggcgcagctgggtaaaggaatggtgatcccgagtttacctacttcggaggcggtcttcctggcagcgggcgtgttaggggcgacgattatgccgcatgtgatttatttgcactcttcgctcactcagcatttacatggcggttcgcgtcaacaacgttattccgccaccaaatgggatgtggctatcgccatgacgattgccggttttgtcaatctggcgatgatggctacagctgcggcggcgttccacttttctggtcatactggtgttgccgatcttgatgaggcttatctgacgctgcaaccgctgttaagccatgctgcggcaacggtctttggattaagcctggttgctgccggactgtcttcaacggtggtggggacgctggcggggcaggtagtgatgcagggcttcattcgctttcatatcccgctgtgggtgcgtcgtacagtcaccatgctgccgtcatttatcgtcattctgatgggattagatccgacacggattctggttatgagtcaggtgctgttaagttttggtatcgccctggcgctggttccactgttgattttcaccagtgacagcaagttgatgggcgatctggtgaacagtaaacgcgtaaaacagacaggctgggtgattgtggtgctggtagtggcgctgaatatctggttactggtaggaacggcactgggattgtag

SEQ ID NO: 704 - DNA, 1203 bp, Escherichia coli
atggaccgcgtccttcattttgtactggcacttgccgttgttgcgattctcgcactgcttgtaagcagcgaccgcaaaaaaattcgtatccgttatgttattcaactgcttgttatcgaagtgttactggcgtggttcttcctgaactccgacgttggtctgggcttcgtgaaaggcttctccgaaatgttcgaaaaactgctcggttttgccaacgaagggactaacttcgtctttggtagcatgaatgatcaaggcctggcattcttcttcctgaaagtgctgtgcccaatcgtctttatctctgcgctgatcggtattctccagcatattcgcgtattgccggtgattatccgcgcaattggtttcctgctctccaaagtcaacggcatgggcaaactggaatcctttaacgccgtcagctccctgattctgggtcagtctgaaaactttattgcctataaagatatcctcggcaaaatctcccgcaatcgtatgtacaccatggcagcaacggcgatgtccaccgtgtcgatgtccatcgttggtgcatacatgaccatgctggagccgaaatacgtcgttgcggcgctggtactgaacatgttcagcacctttatcgtgctgtcgctgatcaacccttaccgtgttgatgccagtgaagaaaatattcagatgtccaacctgcacgaaggtcagagcttcttcgaaatgctgggtgaatacattctggcaggtttcaaggttgccattatcgttgccgcgatgctgatcggctttatcgccctgatcgccgcgctgaacgcactgtttgccaccgtgactggctggtttggctacagcatctccttccagggcatcctgggttacatcttctatccgattgcatgggtgatgggtgttccttccagtgaagcactgcaagtgggcagtatcatggcgaccaaactggtttccaacgagttcgttgcgatgatggatctgcagaaaattgcttccacgctctctccgcgtgcggaaggcatcatctctgtgttcctggtttccttcgctaacttctcttcaatcgggattatcgcgggtgcggttaaaggcctgaatgaagagcaaggtaacgtggtttctcgcttcggtctgaaactggtttacggctctaccctggtgagtgtgctgtctgcgtcaatcgcagcactggtgctgtaa

SEQ ID NO: 705 - DNA, 2190 bp, Escherichia coli
atgtttgtggagcataacctgataaaaaatatcaagatattcacactagcgtttacgctcaccgtggtacttattcagctatcccgtttaatttcgccacttgctgttatccattccaattatatctttctggcgtggatgccactgtgcgtaatgctgtcaatcttgtttatctttggctggcgtggtgtcgttcccattttatgcgggatgttttgcaccaatctgtggaacctgcatctctcttttttacagaccgccgtcatgatcggcagccaggcgtttgcagtcctgtgtgcctgtgcaatattacgctggcaattggggacgcgttggcgttatggattgaccagccgatacgtctggcaacgtctgttctggcttggtttggtggcaccgattggcatcaaatgcagcatgtatcttgtgggaaatttctttgattttccgctaaagatatctacctttttcggcgatgcggatgccattttcacggtcgttgatttgctaagccttttcaccgcagtgctgatttacaacatgcttttttactatctcgcccgcatgattgtaagtccccactttgcacagatattgtggcgtagggatatcgctccgtcgttgagcaaagagaaacgcgcatttaccttaagctggctggcagctcttagcgtgctgctacttctgatgtgcacaccgtatgaaaatgactttattgccggttacctggtacctgttttctttatcatctttaccctcggtgtcggtaagcttcgctatccgtttttaaatctcacctgggctgtttcaacgctttgccttctgaattacaaccagaactttttgcaaggggtactaaccgaatattcgctggcatttattctcgcagtactgatttcctttagtgtttgcctgctctatatggtgcgtatttatcatcgtagtgaatggcttaaccgccgctggcatttgcaggcgctgaccgatccgttaacgcttctacccaactttcgtgcgttggagcaagcgccggagcaagaggcgggcaagagtttttgctgcctgcgcattgataatcttgagtttatgagtcgtcattacggcttaatgatgcgcgttcactgtatccgctcaatttaccgtacgctgctgccgttgatgcaggaaaacgaaaagttgtatcaattgccgggtagtgaactgctgttagtgctgagcgggccggaaacggaagggcgactccagcatatggttaacatcctgaatagtcggcaaattcactggaacaataccgggctggatatgggctatggtgctgcctggggacgttttgatggaaatcaggaaaccctgcaacccttgttggggcagttaagctggctggcggagcaatcctgcgcacatcatcatgtgctggcgctggatagcagagaggagatggtttccgggcaaaccactaaacaggtgctattgctgaataccattcgcacggcgttagatcagggggatttgctgctctacgcccagccaattcgcaacaaagagggtgaaggttatgatgagatcctcgcgcgactgaagtatgacggcggcattatgaccccggataagtttctgccccttattgctcagtttaaccttagcgcgcgttttgatttgcaagtgctggaatccttgttgaagtggctggcaacacacccttgcgacaaaaaaggtccacgcttttcagtcaatttaatgccgctcacgctactgcaaaagaatattgccgggcggattattcgtctgtttaagcgttattacatctccccgcaggcggtcattcttgagatcaccgaggagcaggcgttttctaacgcagaaagcagcatgtacaacatcgagcagctgcataagtttggtttccggattgcgattgatgactttggcaccggatatgccaactacgaacggttaaagcgtttgcaggctgatatcatcaaaattgatggcgtctttgtgaaagatatcgtcacgaacacgctggatgcgatgattgtgagatcaattaccgatctggcgaaagcgaagtcattgagtgtggtcgcggagtttgtcgagacgccacagcagcaggcgctattgcataaacttggggtgcaatatctgcaagggtatttgattggtcgcccgcagccattagctgattaa

SEQ ID NO: 706 - DNA, 360 bp, Escherichia coli
atgttcaaggagaggatgacgccagatgaacttgccagactgaccggctatagccgccagaccattaataaatgggtacgcaaggaaggctggacaacgtcaccaaaaccaggcgtccagggtggcaaagctcgactggttcacgtcaatgaacaggttcgtgaatatattcgcaatgctgaacgtccagaaggtcagggagaagcgccagccctttctggtgatgcgccgcttgaagtgttgctggtgacactggcgaaagagatgacgccagttgaacaaaaacagtttacatccttgcttctgcgggaagggattatcggattgttacaacgcttagggattcgcgatagcaaataa

SEQ ID NO: 707 - DNA, 372 bp, Escherichia coli
atgaccaccgaagaactggctgaatgcctcggtgtggctaaacaaactgttaaccgttggatcagagaaaaaggctggaaaacggaaaaatttcccggcgtgaaaggcggtcgtgccagacttattctggtcgaaacgcaagtttgcgagtttattcagaacacgccagccttccataacacaccgatgcttctggaagccgaagaaccccttgccgaatacgcaccgggtattcgcactcctgcttatcggcaaatcatcagcgcaatagacaacatgactcacagtgagcaagaaaaagttgcgcaatttttgtcacgcgaaggaattcgtaattttcttgctcgtctcgacatagatgaatcagcataa

SEQ ID NO: 708 - DNA, 1416 bp, Escherichia coli
atgaaaatcaaaactcgcttcgcgccaagcccaacaggctatctgcacgttggcggcgcgcgtactgctctttactcctggctttttgcacgtaaccacggcggtgagttcgtgctgcgtattgaagacaccgatcttgagcgttccacgccggaagctatcgaagccattatggatggcatgaactggctgagcctggagtgggatgaaggtccgtactaccagaccaaacgttttgatcgctacaacgcggtgatcgatcagatgctggaagagggcacagcttataaatgctattgctctaaagagcgcctggaagcgctgcgcgaagagcaaatggcgaaaggtgagaagccgcgttatgacggtcgctgccgccacagtcatgagcatcacgctgatgatgagccgtgtgtcgtacgttttgctaacccgcaggaaggttctgttgtttttgacgatcagatccgtggtccgatcgagttcagcaaccaggagctggatgatctgattatccgccgtaccgatggttccccaacctataacttctgtgtggttgtcgatgactgggatatggaaatcacccacgttatccgtggcgaagaccatatcaacaacacaccgcgccagattaacattcttaaggctctgaaagcgccggtaccggtttacgcgcacgtttctatgatcaacggcgatgacggtaaaaaactgtccaaacgtcacggggcggtcagcgtaatgcagtatcgtgatgatggttatctgccagaagcactgctgaactatctggtgcgtctgggctggtcccacggcgatcaggaaatcttcactcgtgaagagatgattaaatacttcactctgaatgccgtcagcaaatctgccagtgcgttcaacaccgacaagctgctgtggctgaaccatcactacattaacgcgttgccgccggagtatgttgctactcacttacagtggcacattgagcaggaaaatatcgatacccgtaacggcccgcagctggctgatctggtgaaactgctgggcgaacgctgcaagacgctgaaagagatggcacagagctgccgttatttctacgaagattttgctgagttcgatgccgacgccgcgaaaaaacatctgcgtccggtagcgcgtcagccgctggaagtagttcgtgacaaactgactgcgattactgactggaccgctgaaaacgttcatcacgctattcaggcgacggcggatgagctggaagtgggtatgggtaaagttggtatgccgctgcgtgtcgccgtaaccggtgcggggcagtctccggcgctggatgttaccgttcacgcaatcggtaagacccgcagtatcgagcgtatcaacaaagcgctggcttttattgctgaacgcgaaaatcagcagtaa

SEQ ID NO: 709 - DNA, 1044 bp, Escherichia coli
atgagcgtgatgtttgatccagacacggcgatttatcctttccccccgaagccgacgccgttaagcattgatgaaaaagcgtattaccgcgagaagataaaacgtctactaaaagaacgtaatgcggtgatggttgcccactactataccgatcccgaaattcaacaactggcagaagaaaccggtggctgtatttctgattctctggaaatggcgcgcttcggtgcaaagcatcccgcttctacgttgttagttgctggggtgagatttatgggagaaaccgccaaaattctcagtccggaaaaaacaattctgatgccgacacttcaggctgaatgttcactggatctcggctgccctgttgaagaatttaacgcattttgcgatgcccatcccgatcgtactgtagtcgtctacgccaacacttctgctgcggtaaaagcgcgcgcagattgggtggtaacttcaagcattgccgtcgaacttattgatcatctggatagtttgggtgaaaaaatcatctgggcacctgacaaacatctggggcgttacgtgcaaaaacagacgggcgcagacattttatgctggcagggtgcctgcattgtgcatgatgagtttaagactcaggcgttaacccgcttgcaagaagaatacccggatgctgccatactggtgcatccagaatcaccgcaagctattgtagagatggcggatgcggtcggttccaccagtcaactgatcgctgctgcgaaaacattgcaacatcagcggcttatcgtggcaaccgatcggggcattttctacaaaatgcagcaggcggtgccagataaagagttactggaagcaccaaccgcgggtgagggcgcaatctgtcgcagctgcgcgcattgcccgtggatggccatgaatggccttcaggccatcgcagaggcattagaactggaaggaagcaatcacgaggtttatgttgatgaaaggctgcgagagagggcgctggtgccgctcaatcgtatgctggattttgcggctacactacgtggataa

SEQ ID NO: 710 - DNA, 720 bp, Escherichia coli
atggatttttttagtgtgcagaatatcctggtacatataccaataggggcaggcggttatgatctctcatggatcgaagcggtaggcacgatcgccgggttgctgtgtattggccttgccagtctggagaagatcagtaactacttctttggcctgatcaacgtcaccttgtttggcattattttctttcagattcagctgtatgccagcctgctattacaggtgtttttctttgccgcgaatatttacggctggtatgcgtggtcgcgacaaaccagtcagaacgaggcggagttgaaaattcgctggttgccattgccgaaggcgctaagctggttggcggtttgcgttgtttcgattggtctgatgacggtatttatcaatccggtgtttgcatttttgacccgcgtggcagtcatgatcatgcaagcattaggattacaggttgcgatgcctgaactacagccggacgctttcccgttctgggattcatgcatgatggtgttatctatcgtggcaatgattctgatgacgcgtaagtatgtggaaaactggctgttgtgggtgattattaacgtgattagcgtcgttatttttgcacttcagggcgtttacgccatgtctctggagtacatcatcctgacctttattgccctcaacggcagccggatgtggatcaacagcgcacgcgaaagaggttcacgcgcgctgtcccattaa

SEQ ID NO: 711 - DNA, 942 bp, Escherichia coli
atggcgcactcacactcacacacttcctcacacctgccagaagataataatgctcgtcgcttgttgtatgctttcggcgtgactgccgggtttatgctcgtagaagtcattggtggttttctttccggttctctggcattgctggccgatgcgggtcatatgttgaccgatactgccgccctgcttttcgccctactcgcagtgcaattttcccgtcgtcctcccaccattcgccacactttcggttggctaagattgaccacgctcgcggcgtttgtgaatgccatcgccctggtggtgattactattttgattgtctgggaggcgatagaacgcttccgcactccgcgtccggtcgagggcggcatgatgatggcaattgccgtggctgggctgttggcaaatatactttctttctggttacttcatcacggtagcgaagagaaaaacctcaacgtgcgagcagcggcactgcatgtgctcggggacctgctgggttcggttggggctattattgccgcgttgattattatctggaccggctggacacctgctgaccccattctctcaatactggtgtcgcttctggttctgcgtagcgcgtggcgactgttgaaagatagtgtgaatgaattacttgaaggtgcaccggtatcgctggatatcgctgaactgaagcgtcgtatgtgccgggaaatcccggaagtccgcaatgtgcaccatgtgcatgtatggatggtaggcgagaagccggtgatgacgctgcatgtgcaggtgatcccgccacacgatcacgatgccttgttagatcagatccaacactacctgatggatcactatcagattgagcacgccactattcagatggaatatcaaccttgtcatgggccagactgccacctgaatgaaggagtgtctggccattcacatcatcaccattaa

SEQ ID NO: 712 - DNA, 381 bp, Escherichia coli
atgaaaatgacaaaactggccacactatttttgactgccactctaagccttgccagcggtgccgcactggctgccgatagcggagcgcaaagcaataacggccaggcaaacgccgcagctgatgcgggccaggtagcccctgatgcccgtgaaaatgtcgcgccaaataacgtcgacaataacggggtaaataccggttctggcggcacaatgctgcatccggatggttcttcaatgaacaatgacggcatgaccaaagatgaagagcacaagaacaccatgtgtaaagatggtcgctgtccggatatcaataaaaaggtacaaactggtgatggcatcaacaatgatgtcgataccaaaaccgacggtaccacgcagtaa

SEQ ID NO: 713 - DNA, 1053 bp, Escherichia coli
atgaattatcagaacgacgatttacgcatcaaagaaatcaaagagttacttcctcctgtcgcattgctggaaaaattccccgctactgaaaatgccgcgaatacggtcgcccatgcccgaaaagcgatccataaaatcctgaaaggtaatgatgatcgcctgttggtggtgattggcccatgctcaattcatgatcctgtcgcggctaaagagtatgccgctcgcttgctgacgctgcgtgaagagctgcaagatgagctggaaatcgtgatgcgcgtctattttgaaaagccgcgtactacggtgggctggaaagggctgattaacgatccgcatatggataacagcttccagatcaacgacggtctgcgtattgcccgcaaattgctgctcgatattaacgacagcggtctgccagcggcgggtgaattcctggatatgatcaccccacaatatctcgctgacctgatgagctggggcgcaattggcgcacgtactacggaatcgcaggtgcaccgcgaactggcatcagggctttcttgcccggtaggcttcaaaaatggcactgatggtacgattaaagtggctatcgatgccattaatgccgccggtgcgccgcactgcttcctgtccgtaacgaaatgggggcattcggcgattgtgaataccagcggtaacggcgattgccatatcattctgcgcggcggtaaagagcctaactacagcgcgaagcacgttgctgaagtgaaagaagggctgaacaaagcaggccagccagcgcaggtgatgatcgatttcagccatgctaactcgtcaaaacaattcaaaaagcagatggatgtttgtactgacgtttgccagcagattgccggtggcgaaaaggccattattggcgtgatggtggaaagccatctggtggaaggcaatcagagcctcgagagcggggaaccgctggcctacggtaagagcatcaccgatgcctgcattggctgggatgataccgatgctctgttacgtcaactggcgaatgcagtaaaagcgcgtcgcgggtaa

SEQ ID NO: 714 - DNA, 753 bp, Escherichia coli
atggctgtaactaagctggttctggttcgtcatggcgaaagtcagtggaacaaagaaaaccgtttcaccggttggtacgacgtggatctgtctgagaaaggcgtaagcgaagcaaaagcagcaggtaagctgctgaaagaggaaggctacagctttgactttgcttacacctctgtgctgaaacgcgctattcataccctgtggaatgtgttggacgaactggatcaggcatggctgcccgttgagaaatcctggaaactgaacgaacgtcactacggtgcgttgcagggtctgaacaaagcggaaaccgctgaaaagtatggcgacgagcaggtgaaacagtggcgtcgtggttttgcggtgactccgccggaactgactaaagatgatgagcgttatccggggcacgatccgcgttacgcgaaactgagcgagaaagagctgccgctgacggaaagcctggcgctgaccattgaccgcgtgatcccttactggaatgaaaccattctgccacgtatgaagagcggtgagcgcgtcatcatcgccgcacacggtaactcgttacgtgcgctggtgaaatatctcgataacatgagcgaagaagagattcttgagctgaatatcccgaccggcgtgccgctggtttatgagtttgacgagaacttcaaaccgctgaaacgctattatctgggtaatgctgacgagatcgcggcgaaagcagcggcggttgctaaccagggtaaagcgaagtaa

SEQ ID NO: 715 - DNA, 1041 bp, Escherichia coli
gtgctgaacgaaactcccgcactggcacccgatggtcagccgtaccgactgttaactttgcgtaacaacgcagggatggtagtcacgctgatggactggggtgcgactttactttccgcccgtattccgctttccgatggcagcgtccgcgaggcgctgcttggctgcgccagcccggaatgctatcaggatcaggccgcatttctgggggcctctattggtcgttatgccaaccgcatcgccaatagccgttatacctttgacggtgaaaccgtgacgctttcaccaagtcagggcgtcaaccaattgcatggcggcccggaagggttcgacaaacgtcgctggcagattgtgaaccagaacgatcgtcaggtgctgtttgccctgagttcagatgatggcgatcagggtttcccgggtaatctcggcgcgacggtgcaatatcgtctgaccgacgataaccgtatctccattacttatcgcgccacagttgataaaccttgcccggtgaatatgactaatcacgtctatttcaatcttgacggcgagcaatctgacgtgcgcaatcacaagttgcagattctggcggaagaatatctgccggttgatgaaggcggcattccgcacgacggcctgaaatctgtcgccggaacctcttttgatttccgcaacgccaaaatcatcgccagtgagtttcttgccgacgacgatcagcgcaaagtgaaaggttacgatcacgcgttcttgttacaggccaaaggcgatggcaagaaagtggcggcgcatgtctggtcagcagatgaaaaattgcagctgaaggtctacaccaccgctccggctctgcaattctactccggcaacttcctcggcggcacaccgtcgcggggaaccgaaccttacgccgactggcaagggctggcgttggaaagcgaatttctgccggacagcccgaaccaccctgaatggccgcaaccggactgcttcctgcgtcctggcgaagagtattccagcctgacggaatatcagtttattgctcagtaa

SEQ ID NO: 716 - DNA, 1149 bp, Escherichia coli
atgagtctgaaagaaaaaacacaatctctgtttgccaacgcatttggctaccctgccactcacaccattcaggcgcctggccgcgtgaatttgattggtgaacacaccgactacaacgacggtttcgttctgccctgcgcgattgattatcaaaccgtgatcagctgtgcgccacgcgatgaccgtaaagttcgcgtaatggcagccgattatgaaaatcagctcgacgagttttccctcgatgcgcccattgtcgcgcatgaaaactatcaatgggcgaactacgttcgtggcgtggtgaaacatctgcaactgcgtaacaacagcttcggcggtgtggacatggtgatcagcggcaatgtgccgcagggggccgggttaagttcttccgcttcactggaagtcgcggtcggaaccgtattgcagcagctttatcatctgccgctggacggcgcacaaatcgcgcttaacggtcaggaagcagaaaaccagtttgttggctgtaactgcgggatcatggatcagctaatttccgcactcggcaagaaagatcatgccttgctgattgactgccgctcactggggaccaaagcagtttccatgcccaaaggtgtggctgtcgtcattatcaacagtaacttcaaacgtaccctggttggcagcgaatacaacacccgtcgtgaacagtgcgaaaccggtgcgcgtttcttccagcagccagcgctgcgcgatgtcaccattgaagagttcaacgctgttgcgcatgaactggacccgatcgtggcgaaacgcgtgcgtcatatcctgactgaaaacgcccgcaccgttgaagctgccagcgcgctggagcaaggcgacctgaaacgtatgggcgagttgatggcggagtctcatgcctctatgcgcgatgatttcgaaatcaccgtgccgcaaattgacactctggtagaaatcgtcaaagctgtgattggcgacaaaggtggcgtacgcatgaccggcggcggatttggcggctgtatcgtcgcgctgatcccggaagagctggtgcctgcagtacagcaagctgtcgctgaacaatatgaagcaaaaacaggtattaaagagactttttacgtttgtaaaccatcacaaggagcaggacagtgctga

SEQ ID NO: 717 - DNA, 1047 bp, Escherichia coli
atgacgcaatttaatcccgttgatcatccacatcgccgctacaacccgctcaccgggcaatggattctggtttcaccgcaccgcgctaagcgcccctggcagggggcgcaggaaacgccagccaaacaggtgttacctgcgcacgatccagattgcttcctctgcgcaggcaatgtgcgggtgacaggcgataaaaaccccgattacaccggcacttacgttttcactaatgactttgcggccttgatgtctgacacgccagatgcgccagaaagcaacgatccgctaatgcgttgccagagcgcgcgcggtaccagccgggtgatctgcttttcaccggatcacagtaaaacgttgccagaactgagcgttgcggcattgacggaaatcgtcaaaacctggcaggagcaaaccgcagagctgggaaaaacgtacccgtgggtacaggtctttgaaaacaaaggcgcggcgatgggctgctctaacccgcatccgcacggacagatttgggcaaatagcttcctgcctaacgaagctgagcgcgaagaccgtctgcaaaaagaatatttcgccgaacagaaatcgccaatgctggtggattatgttcagcgcgagctggcagacggtagccgtaccgttgtcgaaaccgaacactggttagccgttgtaccttactgggctgcctggccgttcgaaacgctactgctgcccaaagcccacgttttgcggatcaccgatttgaccgacgcccagcgcagcgatttggctctggcgttgaaaaagctgaccagtcgttatgacaacctcttccagtgctccttcccctactctatgggctggcacggcgcgccatttaatggcgaagagaatcaacactggcagctgcacgcgcacttttatccgcctctgttgcgctctgccaccgtacgtaaatttatggttggttatgaaatgctggcagaaacccagcgagacctgaccgcagaacaggccgcagagcgtttgcgcgcagtcagcgatatccattttcgcgaatccggagtgtaa

SEQ ID NO: 718 - DNA, 1017 bp, Escherichia coli
atgagagttctggttaccggtggtagcggttacattggaagtcatacctgtgtgcaattactgcaaaacggtcatgatgtcatcattcttgataacctctgtaacagtaagcgcagcgtactgcctgttatcgagcgtttaggcggcaaacatccaacgtttgttgaaggcgatatccgtaacgaagcgttgatgaccgagatcctgcacgatcacgctatcgacaccgtgatccacttcgccgggctgaaagccgttggcgaatcggtacaaaaaccgctggaatattacgacaacaatgtcaacggcaccctgcgcctgattagcgccatgcgcgccgctaacgtcaaaaactttatctttagctcctccgccaccgtttatggcgatcagcccaaaattccatatgttgaaagcttcccgaccggcacaccgcaaagcccttacggcaaaagcaagctgatggtggaacagatcctcaccgatctgcaaaaagcccagccggactggagcattgccctgctgcgctacttcaacccagttggcgcgcatccgtcgggcgatatgggcgaagatccgcaaggcattccgaataacctgatgccatacatcgcccaggttgctgtaggccgtcgcgactcgctggcgatttttggtaacgattatccgaccgaagacggtactggcgtgcgcgattacatccacgtaatggatctggcggacggtcacgtcgtggcgatggaaaaactggcgaacaagccaggcgtacacatctacaacctcggcgctggcgtgggcagcagcgtgctggacgtggttaatgccttcagcaaagcctgcggcaaaccggttaattatcattttgcaccgcgtcgcgagggcgaccttccggcctactgggcggacgccagcaaagccgaccgtgaactgaactggcgcgtaacgcgcacactcgatgaaatggcgcaggacacctggcactggcagtcacgccatccacagggatatcccgattaa

SEQ ID NO: 719 - DNA, 1473 bp, Escherichia coli
atgtcatcgttgcaaattttgcaaggcacgtttcgtcttggcgacacaaaaacgctgcaattgcctcggctaacgttaaacgcgggtgatagttgggcgtttgtcggttcgaatggaagcgggaaatcggcgctggcccgcgcgctgtcgggggaacttccgcttttgaaaggtgaacggcaaagccagttttcccacatcactcgtctctccttcgagcaattgcaaaagctcgtcagcgacgaatggcagcggaataacaccgatatgcttagtcctggcgaagatgacaccgggcgtaccacggctgagatcattcaggatgaagtaaaggatactccgcgttgcatgcaactggcgcagcagttcggtattaccgccctcctcgaccgacgctttaaatacctttccactggcgagacgcgaaaaaccctgctgtgtcaggcgctgatgtcggagcctgacttgttgatccttgatgaaccgttcgatggcctggatgttgcctcacatcagcaactggctgagctactcgcctcgttacatcagtccggtattactctggtactggtgctcaatcgcttcgatgagatcccggaatttgtccagtttgctggcgtgctggcggattgcacgttagcggaaactggcgctaaagaagaactgctccaacaagcactcgttgcgcaactggcgcatagcgaacagcttgaaggtgtgcaactgccggagccggatgaaccttcagcacgtcacgccttacccgccaacgaaccgcgcattgtgctgaacaatggcgtggtttcttataacgaacgccccattcttaataaccttagctggcaggtgaatccaggcgaacactggcaaattgtcgggccaaatggcgcgggaaaatcgacgttattaagcctgattactggcgatcatccgcaaggttacagcaacgatttgacgcttttcggacgacgtcgcggcagcggcgaaaccatctgggatatcaaaaagcatatcggttacgtcagcagtagtttgcatctggattaccgggtcagcactactgtgcgtaatgtgatcctttctggctattttgattcgattggcatttatcaggccgtttcggatcgccagcaaaaactggtgcagcagtggctggatgttctcggcattgataaacgcacggctgacgctccgttccatagtctttcctggggacagcagcgtctggcgctgatcgtccgcgcgctggtgaaacatccgacgttgcttattctcgatgaaccactacaggggcttgatccgctcaatcgccagcttatccgccggtttgttgatgtgctgattagcgaaggtgaaatgcaattgttgtttgtttcgcaccacgctgaagatgcgcctgcctgtattacccatcgtcttgagttcgtgccggacggtgacttttatcgctatgcgctgacaaaaataaactga

SEQ ID NO: 720 - DNA, 789 bp, Escherichia coli
atgcaggccgaaatccttctcacccttaagctccaacaaaaattattcgccgacccgcgccgcatttcgctactaaaacacattgcgctttccggttccattagccagggagcgaaagatgccggtatcagctataaaagcgcctgggatgccattaacgagatgaatcagttaagtgagcatattctggttgagcgcgcaacaggcggtaaaggtggaggcggcgcagtactgacccgctatggtcagcgactgattcagctctatgacttactggcgcaaatccagcaaaaagcctttgatgtgttaagtgacgatgacgccctgccgctgaacagcctgctggccgcgatctcacgtttttcactgcaaaccagcgcccgtaaccagtggttcggtaccatcaccgcccgcgatcatgatgacgttcaacagcatgttgatgtcttactggctgatggaaaaacacgcctgaaagtcgcaattaccgcacaaagcggcgcacgtctggggctggatgaaggcaaagaagtgttgatattgctaaaagcgccgtgggtagggattactcaggacgaggcggtcgcgcaaaacgctgacaaccaattaccgggtattattagtcatattgagcgcggcgcagagcagtgcgaagtattaatggcgctacccgacgggcaaacactgtgcgccacagtgccgataaatgaagcgacttctcttcagcaaggacagaatgtcacggcctactttaatgccgacagcgtgattatcgccacgctgtgctaa

SEQ ID NO: 721 - DNA, 150 bp, Escherichia coli
atgttagagttattaaaaagtctggtattcgccgtaatcatggtacctgtcgtgatggccatcatcctgggtctgatttacggtcttggtgaagttttcaacatcttttctggtgttggtaaaaaagaccagcccggacaaaatcattga

SEQ ID NO: 722 - DNA, 774 bp, Escherichia coli
atggctcgtaaatggttgaacttgtttaccggggcggcactctctttcgctgttgctggcaatgcactggcagatgaagggaaaatcacggtgttcgccgccgcatcactgactaacgcaatgcaggacattgctacgcagtataaaaaagagaaaggcgtggatgtagtttcttctttcgcttcgtcatctactttggcccgtcagattgaagcgggtgcgcctgcggatctgtttatttctgccgatcagaaatggatggattatgcgtttgataaaaaagcgatcgatacggcttcgcgccagacactgctcggcaatagcctggtcgttgtagcaccgaaagccagcgagcagaaagatttcaccatcgacagcaaaaccaactggacttcgctgctgaatggcggtcgcctcgcggttggtgatccggaacatgtccctgctggcatttatgcgaaagaagcactgcaaaaactgggcgcatgggatacgctctccccgaaactggctccggcggaagatgttcgtggcgcgctggcgttggtcgaacgcaatgaagcgccgctgggtattgtttacggttctgacgcagttgccagcaaaggggtaaaagtggttgccaccttcccggaagattcacataaaaaagtggaatatccggttgctgttgtggaagggcataacaatgcgacagtgaaagcattttacgattatctgaaggggccgcaggctgcggaaatctttaaacgttacggatttacaaccaagtaa

SEQ ID NO: 723 - DNA, 690 bp, Escherichia coli
atgatactgaccgatccagaatggcaggcagttttattaagcctgaaagtttcttccctggctgtgctgtttagcctgccgtttgggatcttttttgcctggttactggtacgttgcacgtttccgggcaaagctctgctcgacagcgtactgcatctaccgctggtgttaccgcccgtggtcgtcggttacctattattagtttcgatgggacggcgcggatttatcggtgaacgtctgtatgactggtttggtctttctttcgcgtttagctggcgtggtgcggttctcgctgccgctgtcatgtcttttccgctgatggtgcgggcgattcgtctggcgctggaaggtgttgatatcaaactggagcaggccgcaagaacactgggggccgggcgctggcgcgttttctttactatcacgttaccgctgaccttaccgggaattattgttggtacggtgctggcattcgctcgttcgctcggtgaatttggcgcaaccatcacctttgtttctaacattcctggtgaaacgcgaaccattccttctgccatgtataccctgatccagacccctggcggggaaagtggcgcggcgagactgtgtattatttctattgcgctggcgatgatctccctgttgatttcagaatggctggccagaatcagccgtgagcgggcggggcgctaa

SEQ ID NO: 724 - DNA, 1059 bp, Escherichia coli
atgctggaactgaatttttcccagacgttgggcaatcattgcctgacgattaatgaaacgctgcccgccaatggcatcaccgctatttttggtgtctctggtgccggaaaaacctcgctgattaacgccatcagtgggctgacacgtccgcaaaaagggcggattgtcctcaatggtcgggtactaaatgacgccgataaaggtatctgcctgacgccagaaaagcgtcgcgtaggctatgtgtttcaggatgcgcggctgtttccgcattataaagtgcgtggcaatttgcgctacggcatggcgaaaagcatggtcaatcagttcgataagctggtggcgcttttaggcattgaaccgttgcttgatcgtttaccaggcagcctgtccggaggcgaaaaacagcgcgtggcgattggtcgggctttgctgacagcaccggaattgctgttgctggatgaaccgctggcgtcactggatattccgcgtaaacgcgaactgttgccttatctgcaacgtctgacgcgggaaatcaacattccgatgttgtatgtcagccattcgctggatgagatcctccatctggcagacagagtgatggtactggaaaacggtcaggtgaaagcctttggcgcgctggaagaagtctggggtagtagcgtgatgaatccgtggctaccgaaagagcaacaaagtagcattctgaaagtgacagtacttgagcatcatccgcattacgcgatgaccgcgctggcgctgggcgatcagcatttgtgggtcaataagctggaagaaccgctgcaagctgcgctacgcatccgcattcaggcttccgatgtctcgctggttttacaaccgccgcagcaaaccagcattcgtaacgtattgcgggcaaaagttgttaatagttatgacgacaacggccaggtggaagtggagctggaagtcggcggtaaaacgctgtgggcgcgtatcagcccgtgggccagggatgaactggcgatcaaacctggcctgtggctgtatgcgcaaattaaaagtgtgtcgataaccgcctga

SEQ ID NO: 725 - DNA, 819 bp, Escherichia coli
atgaccacacgcgtgattgctctcgacttagacggcaccttattgaccccgaaaaagaccttgcttccatcatcgatagaagccctggcccgcgctcgcgaagcaggctatcaattaatcatcgtcacaggtcgccatcacgtcgctattcatcctttttatcaggcgctggcgctggatacacctgctatttgctgtaatggcacctatttgtatgattatcatgcaaaaaccgtgctggaagcggacccaatgcccgttaataaagccctgcaactcattgagatgctgaatgaacaccacattcacggtctgatgtatgtcgatgatgcaatggtctatgagcacccgaccgggcatgtcattcgcacgtctaactgggcgcaaaccctgccgccggaacagcgtccgactttcacacaagtcgcttctctggctgaaacggcgcaacaagttaacgccgtatggaagttcgccctgacgcacgatgacctgccgcaattgcagcattttggtaagcatgtcgaacatgaactgggactggagtgtgaatggtcctggcacgatcaggttgatattgcacgcggcggcaacagcaaaggtaaacgtttgacgaaatgggttgaggcacaaggctggtcgatggaaaacgtcgtggcgttcggcgataacttcaatgatattagtatgctggaagccgctggtacaggcgtggcgatgggcaacgccgatgacgcagtaaaagcgcgcgccaacattgtgattggtgataacaccaccgacagcattgcccagttcatttatagctacctgatttaa

SEQ ID NO: 726 - DNA, 996 bp, Escherichia coli
atgaagcaaacagtttatatcgccagccctgagagccagcaaattcacgtctggaacctgaatcatgaaggcgcactgacgctgacacaggttgtcgatgtgccggggcaggtgcagccgatggtggtcagcccggacaaacgctatctctatgttggtgttcgccctgagtttcgcgtcctggcgtatcgtatcgccccggacgatggcgcgctgacctttgctgcagagtctgcgctgccgggtagcccgacgcatatttccaccgatcacctggggcagtttgtcttcgtcggttcttataatgcgggtaacgtgagcgtaacgcgtctggaagatggcctgccagtgggcgtcgtcgatgtggtcgaggggctggacggttgccattccgccaatatctcaccggacaaccgtacgttgtgggttccggcattaaagcaggatcgcatttgcctgtttacggtcagcgatgatggtcatctggtggcgcaggaccctgcggaagtgactaccgttgaaggggccggcccgcgtcatatggtattccatccaaatgaacaatatgcgtattgcgtcaatgagttaaacagctcagtggatgtatgggaactgaaagatccgcacggcaatatcgaatgtgtccagacgctggatatgatgccggaaaacttctccgacacccgttgggcggctgatattcatatcaccccggatggtcgtcatttatacgcctgcgaccgtaccgccagtctgattaccgttttcagcgtttcggaagatggcagcgtgttgagtaaagaaggcttccagccaacggaaactcagccgcgcggcttcaatgttgatcacagcggcaagtatctgattgccgccgggcaaaaatctcaccacatctcggtatacgaaattgttggcgagcaggggctactgcatgaaaaaggccgctatgcggttgggcaggggccaatgtgggtagtggtcaacgcgcactaa

SEQ ID NO: 727 - DNA, 954 bp, Escherichia coli
atgaagcatgaattatcaagtatgaaggcatttgtcatactggcagagtccagttcatttaacaatgctgctaaattactcaatattacgcaacctgcattaacgcgaagaataaaaaagatggaggaagatttacacattcaactatttgagcgtacaactcgcaaggttacgttaacaaaagcaggaaaaaggttgctcccggaggcgcgggaattaataaaaaaattcgatgaaacgctttttaatattcgtgatatgaatgcttatcatcgtggtatggtgacgttagcgtgtattccgaccgcagtattttattttttaccgctggcaatcggtaaatttaatgagctgtatcccaatattaaagtgcggattctggaacaaggcacgaataattgcatggaatcggtgctgtgtaacgaatcagactttggcataaacatgaacaacgtcacaaattcatccattgattttaccccactggtcaacgagccgttcgtgctggcctgtcggcgtgaccatccattggccaaaaagcagcttgtagaatggcaggagttagtgggttacaaaatgattggcgtacgctcctccagcggcaaccgactgttgatagaacaacagctagccgacaagccctggaagctggactggttttacgaagtgcgtcatctttcgacgtcattagggctggtggaggcgggactggggatttcggcgcttcctggtctggcaatgccccatgcgccctattcttcgattattggtatcccactggtggaacccgttatacgtcggacattggggattattcgccgcaaagatgccgtgctttctccggcagctgaacgcttttttgccttgctgattaatttgtggactgacgataaagacaatttgtggaccaatatcgtcgaacgccagagacatgcgttacaggagataggttaa

SEQ ID NO: 728 - DNA, 1053 bp, Escherichia coli
atgaaaaaaataccctgcgtgatgatgcgaggtggaacctcgaggggcgcgttcctgttagcggaacatctacccgaagatcaaacgcagcgcgataaaatattgatggcaattatgggttccggtaacgatctggaaattgacggtattggcggcggtaatccactgaccagtaaagtcgccattattagccgctccagcgatccgcgtgcagatgtcgattatctgtttgctcaagttatcgtccatgagcaacgtgtcgataccacgcctaactgcggcaatatgctgtctggcgttggggcattcgccattgaaaatggtttgattgcagcgacttcgccagttacccgcgtacgtatccgcaacgtcaatacgggtacgtttatcgaagctgatgtgcaaacgccaaatggtgttgtcgagtacgagggtagcgccagaattgacggcgtaccgggtactgccgcaccggttgcgctcactttcctgaatgccgccggaacgaaaaccggaaaagtcttcccgacggataatcagattgattattttgacgatgtcccggtgacctgtatcgatatggcgatgccagttgtcattattcctgctgaatatctgggaaaaacaggctatgaattaccggcagagctggatgccgacaaagcattattagcccgcattgaatctatccgtctacaagcgggtaaagcaatgggcttaggcgatgttagtaatatggttatccctaaacctgtacttatttctccagcgcagaaaggcggggcaattaatgtgcgttattttatgccgcattcttgccatcgcgctttggcgataaccggtgctattgctatttccagtagttgtgcattggaaggtaccgtcacccgacaaatcgtcccttctgtaggatacggcaatatcaatattgaacaccccagtggtgcgctcgacgttcatttaagtaatgaaggtcaggatgccacgacgttacgcgcatctgttattcggacgaccagaaaaatattttccggtgaagtttatcttccctga

SEQ ID NO: 729 - DNA, 1434 bp, Escherichia coli
atgaataaaaaatcgttatggaagctaattctgatattagcgatcccatgtattattggctttatgccagctccggcaggattaagcgaactggcgtgggtgctttttggtatttacctggcggccattgtggggctggttatcaagcctttcccggaacctgtcgtactgttaattgccgtcgccgcatcgatggtcgtggtgggtaacttatcaggtggggaatttaaaaccaccgccgtattaagcggttactcttccggtaccacctggctggtgttttctgcgtttactttaagcgccgcgtttgtaaccacaggcttaggtaaacgtattgcctatctgctgattggtaaaattggtagcactaccctgggtctgggttacgttacggtatttctcgatctggtactggctccggcaacaccgtctaacaccgcgcgtgcgggcggcatcgtgttaccgatcatcaacagcgtggcagtggctttgggatcagaaccggaaaaaagtccgcgtcgtgttggacattacctgatgatgtccatttacatggtcaccaaaaccaccagctatatgttctttaccgcaatggcggggaacattctggcgctgaaaatgatcaacgacattctgcacctgcaaattagctggggtggatgggcgctagccgccggattgccgggcatcattatgctgctggtcaccccgctggtgatttacaccatgtatccaccagaaattaagaaggtggataacaaaaccatcgctaaagcgggccttgccgaactgggaccgatgaaaatccgcgaaaaaatgctgctcggtgtctttgtgctggcgctgctgggctggattttcagtaagtctctgggggttgatgaatccaccgtggcaatcgttgttatggcaactatgctgctgctgggtatcgttacctgggaagacgtggttaaaaataaaggcggctggaataccttaatctggtacggcggtattatcggcttaagctccttattatcgaaagttaaattcttcgaatggttagctgaagtctttaaaaataacctggcatttgatggtcacggtaacgttgctttcttcgttattattttcctcagcatcatcgtgcgttatttcttcgcttctggtagtgcctatatcgttgccatgttaccggtatttgccatgctggcgaatgtctccggcgcaccgttaatgttaaccgcgctggcactgttgttctctaactcctatggcggcatggttactcactatggcggcgcggcaggtccggtcatctttggcgtgggttacaacgatattaaatcctggtggttggtcggtgcggtactgacgatattaaccttcctggtgcatatcaccctcggcgtgtggtggtggaatatgctgatcggctggaacatgctgtaa

SEQ ID NO: 730 - DNA, 2262 bp, Escherichia coli
atgatcaagttatctgaaaaaggcgtgtttctcgccagcaataacgaaataattgccgaagaacatttcaccggcgaaataaaaaaagaagaagcaaaaaaaggcactattgcctggtctattctctcttctcataatacgtccggaaatatggataaacttaaaattaagtttgattcattagcctctcacgatattacctttgttggtattgtacagaccgctaaagcgtccggtatggaacgtttcccgctgccgtatgtgctgaccaactgccataactcactctgtgctgtgggcggcaccattaacggtgatgaccatgtttttggtttatcggcggcccagcgttatggcggtatttttgtgccaccgcatattgcggtcatccatcaatatatgcgtgaaatgatggcgggcggcggtaaaatgatcctcgggtcagacagccatacccgttacggtgcgttagggacaatggcggttggcgagggcggcggcgagttggtaaaacagctgcttaatgacacctgggatatcgactatccgggcgtggttgcggtgcatctgaccggaaaacctgcgccgtatgtggggccgcaggatgtggcgctggctatcatcggtgctgtgttcaaaaacggttacgtcaaaaacaaagtgatggagttcgtaggtcccggtgttgcagcgctctctaccgatttccgtaacagcgttgacgtgatgaccactgaaacgacctgtttaagttctgtctggcaaaccgatgaagaagtccataactggctggcgctgcacggtcgcggccaggattactgccaacttaaccctcaaccaatggcgtactacgatggctgcatcagcgttgatttaagcgccatcaaaccaatgattgcgctgccattccacccgagcaacgtgtatgaaatcgacacgctgaaccagaacctgaccgacattctgcgtgagattgaaattgagtccgaacgcgtggcgcacggtaaagccaaactctcgctgctggataaagtggaaaatggtcgcctgaaagtgcagcaggggattatcgcgggctgttctggcggtaactacgaaaacgtcatcgcggcggcgaatgcgctgcgcggtcaatcctgcggcaatgacaccttctcgttagcggtttacccgtcatcacagccggtgtttatggatctcgccaaaaaaggtgtggtagcagatttgatcggcgcaggcgcaatcatcagaaccgcgttctgcggcccatgctttggcgcgggcgatacgccaatcaacaacggtttgagtattcgccacaccacgcgtaacttcccgaaccgcgaaggctctaagccagctaatgggcagatgtcagcggtggcgttgatggacgctcgttctatcgctgcgactgcggcaaacggtggctatttaacctctgccagcgaactcgattgctgggacaacgtgccggagtacgccttcgatgtaacgccgtataaaaaccgtgtttatcagggctttgtgaaaggggcgacccagcaaccgctgatttacggaccgaacattaaagactggccagaattgggtgcgctgactgacaatatcgtcctcaaagtgtgctcgaagatcctcgacgaagtgaccaccaccgacgaactgattccttccggtgaaacctcttcatatcgttcaaatccgattggtctggcggagtttactctgtcacgccgcgatccaggttatgttggcagaagtaaagcgactgccgagctggaaaatcagcgtctggcgggaaatgtcagcgagatggcagatgtgtttgcgcgcattaagcagattgctggtcaggaacatgttgatccgctgcaaactgaaattggcagcatggtttatgcggtgaaaccaggcgatggttctgcgcgtgaacaggcggcgagttgtcagcgtgtgattggcggtctggcgaatattgccgaggagtacgcgactaaacgctatcgttctaacgtcatcaactgggggatgttaccgctgcagatggcggaagtaccgaactttgacgtaggtgattacatttatatccctggcattaaagcggcgctggataatcctggaacgacgtttaaaggttatgtgatccatgaagatgcaccggtaacggagattacgctctatatggaaagtctgactgctgaagagcgcgagattatcaaggcaggtagtttgattaacttcaataaaaaccgtcagatgtaa

SEQ ID NO: 731 - DNA, 1284 bp, Escherichia coli
gtgaacacattttcagtttcccgtctggcgctgacattggcttttggcgtgacgctgaccgcctgtagctcaacaccgcccgatcaacgtccttctgatcaaaccgcgcctggtacctcttctcgcccgattctgtcggcaaaagaagcgcagaatttcgatgctcaacactattttgcatccctgacaccaggtgcggcagcgtggaatccttccccgattaccctgcctgcgcaacctgactttgttgtcggcccggcgggtactcaaggtgtaacgcataccacgattcaggcggcggtagatgcggcaattatcaagcgtaccaacaagcgccagtatattgccgtgatgcctggtgagtatcagggaacggtgtatgtccctgccgctccgggtggaattactctatacggtacaggtgaaaaaccgattgatgtgaagattgggctttcccttgatggtggcatgagccctgccgactggcgtcacgacgtcaacccgcgcggcaaatatatgccaggtaaaccggcgtggtatatgtacgatagctgccagagtaaacgcagcgacagtatcggtgttctctgctctgcggtcttctggtcacaaaacaatggcctgcaactgcaaaacctgaccatcgaaaacacgctgggcgatagcgtagatgcgggtaaccatccggcggtggcactgcgtactgatggcgacaaagtgcagatcaataacgtcaacattctcggtcgtcagaacaccttctttgtcaccaacagcggtgtgcagaaccgtctggaaacgaatcgtcagccgcgtacgctggtgaccaacagctatattgaaggggatgtggatatcgtttctggtcgcggcgcagtggtgttcgataacaccgaattccgcgtggtgaactcccgtacccagcaagaagcgtatgtgtttgcaccggctacgctgtccaacatttactacggtttcctcgccgtaaacagccgtttcaatgcttccggtgatggcgtggcgcaactgggccgctcgctggatgttgatgccaataccaacggtcaggtagtgatccgtgatagcgccatcaacgaaggttttaacacagccaaaccgtgggctgatgcggtgatctctaatcgtccatttgcgggtaacaccggcagcgttgatgataacgacgaagtacagcgcaatctgaatgacactaactacaaccgcatgtgggaatacaataaccgcggcgtgggtagcaaagtggttgcagaggcgaagaagtag

SEQ ID NO: 732 - DNA, 477 bp, Escherichia coli
atgaaactcatcagtaacgatctgcgcgatggcgataagctgccgcatcgtcatgtctttaacggcatgggttacgatggcgataatatttcaccgcatctggcgtgggatgatgttcctgcgggaacgaaaagttttgttgtcacctgctatgacccggatgcgccaaccggctccggctggtggcactgggtagttgttaatttacccgctgatacccgcgtattaccgcaagggtttggctctggtctggtagctatgccagacggcgttttgcagacgcgtaccgactttggtaaaaccgggtacgatggcgcagcgccgccgaaaggcgaaacccatcgctacatttttaccgttcacgcgctggatgtagaacgtattgatgtcgatgaaggtgccagcggcgcgatggtcgggtttaacgttcattttcactctctggcgagtgcctcgattactgcgatgtttagttaa

SEQ ID NO: 733 - DNA, 1131 bp, Escherichia coli
atgaaacgcgcatataaataccggttttacccgacaactgagcaggctgagcttttagctcagacgtttggctgtgtgcgcttcgtctacaattccatccttcgttggcgtaccgatgcgtactacgagcgaaaagaaaagatcggttatctacaggccaacgctcgccttacggcgctcaaaaaagagcctgaatacatatggctgaatgatgtttcctgcgttcccctccagcagtcgttgcgccaccaacaagccgcctttgctaacttctttgccggacgagctgcatatccggctttcaaaagcaaatggcacaaacaggtggctgagttcactgccagcgcgtttaaacaccgtgacggcgagttgtatatagcaaagagcaagtcgccgctggatgttcgctggagtcgagaattaccatctgcgccgtcaaccgttaccatttccagagatagcgctggcaggtactttgtttcctgcctgtgtgagtttgaacctgtatcaatgcctgttaccgctaaaacggtcggcattgatgtgggcttaaaagatttattcgtcaccgataccggattcaaaaccgacaatccccgccacaccgctaaatatgcgaagcgattaacgctgctacagcgacgtttaagcaggaagcaaaaaggctcaagaaaccgaattaaagcccgcttaaaggtcgcccgactccacgcgaaaatcgccgattgccggatggacaatctgcacaagttgtcccgcaaactgattaacgaaaaccaagttgtttgcgtcgaatccctcaaggtgaaaaacatgatccgcaacccgaagctgtctaaagcaatagctgacgcaggctggagcgaacttgttcgccagctccagtacaaaggcaaatgggccgggcggtcagtggtcgccattgaccagtatttaccgtcctcaaaatgctgtagttgctgcggtttcaccatgcaaaaaatgcctcttaatgttcgtaaatggcactgccctgaatgcggcgcagaccatgatcgcgacattaacgcggcacgtaatattaaagctgccgggctggcagtgttagcccacggagagcctgtaaaccctgaatcgcagcacgcggcttag

SEQ ID NO: 734 - DNA, 1290 bp, Escherichia coli
atgacaacggacgatcttgcctttgaccaacgccatatctggcacccatacacatccatgacctccccgctgccggtttatccggtggcaagcgccgaaggttgcgagctaattttgtctgacggcaggcgcctggttgacggtatgtcgtcctggtgggcggcgatccacggttacaatcacccgcagcttaatgcggcgatgaagtcgcaaattgatgctatgtcgcatgtgatgtttggcggtatcacccatgcgcccgccattgagctgtgccgcaaattggtggcaatgacaccgcaaccgctggagtgcgtttttctcgcggactccggctccgtagcggtagaagtggcgatgaaaatggcgttgcagtactggcaggccaaaggcgaagcgcgccagcgttttctaaccttccgcaatggttatcatggcgatacctttggcgcgatgtcggtgtgcgatccggacaactcaatgcacaacctgtggaaaggctatctgccagaaaacctgtttgctcccgccccgcaaagccgcatggatggcgaatgggatgagcgcgatatggtgggctttgcccgcctgatggcagcgcatcgtcatgaaatcgcggcggtgatcattgaaccgattgtccagggcgcaggcgggatgcgcatgtaccatccggaatggttaaaacgaatccgcaaaatgtgcgatcgcgaaggtatcttgctgattgccgacgagatcgccaccggatttggtcgtaccggcaaactgtttgcctgtgaacatgcagaaatcgcgccggatattttgtgtctcggtaaagccttaaccggcggcacaatgaccctttccgccacgctcaccacgcgcgaggttgcggaaaccatcagtaacggcgaagccggctgctttatgcatgggccaacttttatgggcaatccgctggcctgcgcagcagcaaacgccagcctggcgattcttgaatctggcgactggcagcatcaggtggcggctattgaagcgcagctacgcgagcaacttgcccccgcctgtgacgccgaaatggttgccgatgtgcgcgtactgggggcaatcggcgtggtcgaaaccactcgtccggtgaatatggcagcgctgcaaaaattctttgtcgaacagggtgtctggatccggccttttggcaaactgatttacctgatgccgccctatattattctcccgcaacagttgcagcgtctgaccgcagcggttaaccgtgcggtgcaggatgaaacatttttttgccaataa

SEQ ID NO: 735 - DNA, 1041 bp, Escherichia coli
atggctcaccgcccacgctggacattgtcgcaagtcacagaattatttgaaaaaccgttgctggatctgctgtttgaagcgcagcaggtgcatcgtcagcatttcgatcctcgtcaggtgcaggtcagcactttgctgtcgattaagaccggagcttgtccggaagattgcaaatattgcccgcaaagctcgcgctacaaaaccgggctggaagccgagcggttgatggaagttgaacaggtgctggagtcggcgcgcaaagcgaaagcggcgggatcgacgcgtttctgtatgggcgcggcgtggaagaatccccacgaacgcgatatgccgtacctggaacaaatggtgcagggggtaaaagcgatgggtctggaggcgtgtatgacgctgggcacgttgagtgaatctcaagcgcagcgcctggcgaatgccgggctggattactataaccacaacctcgacacctcgccggagttttacggcaatatcatcaccacccgcacctatcaggaacgtctcgatacgctggaaaaagtgcgagaagctgggattaaagtctgttcaggtggcattgtgggcttaggcgaaacggtgaaagatcgcgccggattattgctgcaactggcaaacttgccgacgccgccggaaagcgtgccaatcaacatgctggtgaaggtgaaaggcacgccgctggcggataacgacgatgtcgatgcctttgattttatccgtaccattgccgtagcgcggatcatgatgccgacctcttacgtacgcctttctgccggacgcgagcagatgaacgaacagactcaggcgatgtgctttatggctggcgcaaactcgattttctacggttgcaaactgctgactacgccgaatccggaagaagataaagacctgcaactgttccgcaaactggggctaaatccgcagcaaactgccgtgctggcgggcgataacgaacaacagcagcgtctggagcaggcgctgatgaccccggacactgacgaatattacaacgcggcagcactatga

SEQ ID NO: 736 - DNA, 1155 bp, Escherichia coli
atgatctggcaggagaaaatcgacgcggcgctcgatgcgcggcgtgttgctgatgccttgcgtcgccgttatccggtggcacaaggagccggacgctggctggtggcagatgattgccagtatctgaacttttccagtaacgattatttaggtttaagccatcatccgcaaattatccgcgcctggcagcagggggcggaacaatttggtgtcggtagcggcggttccggtcacgtcagcggttatagcgtggcgcaccaggtgctggaagaagaactggccgaatggctgggctattcgcgggcactgctgtttatttctggttttgccgctaatcaggctgtcattgccgcgatgatggcgaaagaggaccgtattgttgccgaccggcttagccatgcctcattgctggaggctgcaagtttaagcccgtcgccgcttcgccgttttgctcataacgatgtcactcatctggcgcgactgcttgcttccccctgtccggggcagcaactggtagtgacagaaggtgtgttcagcatggacggcgatagtgcgccactggaggaaatccagcaagtaacgcaacagcacgatggctggttgatggtcgatgacgcccacggcacgggcgttatcggggagcaggggcgtggcagctgctggctgcaaaaggtaaaaccagaattgctggtggtgacgtttggcaaaggatttggcgtcagcggggcagcggtgctttgctacgataccgtggcggattatctgctgcaattcgctcgccatcttatctacagcaccagtatgccgcccgctcaggcgcaggcattacgtgcgtcgctggcggtcattcgcagtgatgagggggatgcacggcgcgaaaaactggcggcactcattactcgttttcgtgccggagtgcaggatttgccgtttacgcttgctgactcatgcagcgccatccagccattgatcgtcggtgataacagccgtgcgttacaactggcagaaaaactgcgccagcaaggctgttgggtcacggcaattcgcccaccaaccgtacccgctggtactgcgcgactgcgcttaacgctaaccgcagcgcatgaaatgcaggatatcgaccgtctgctggaggtgctgcatggcaacggttaa

SEQ ID NO: 737 - DNA, 756 bp, Escherichia coli
atggcaacggttaataaacaagccattgctgcggcatttggacgggcagccgcacactatgagcaacacgccgatctacagcgccagagtgctgacgccttactggcaatgctcccacagcgtaaatacacccgcgtactggatgcgggttgtggaccaggctggatgagccgccgctggcgagagcgtcacgcgcaggtgactgcgttagatctctctccgccaatgcttgttcaggcacgccagaaggatgccgcagaccattatctggcgggagatatcgaatccctgccgttagcgactgcgacgttcgatcttgcatggagcaatctcgcggtgcagtggtgcggtaatttatccatggcactccgcgagctgtatcgggtggtgcgccccggaggcgtggtcgcgtttaccacgctggtgcagggatcgttacccgaactgcatcaggcgtggcaggcggtggacgagcgcccgcatgctaatcgctttttaccgccagataaaatcgaacagtcgctaaacgccgttcattatcaacattatattcagcccatcacgctgtggtttgatgatgcgctcagtgccatgcgttcgctgaaaggcatcggtgccacgcatattcatgaagggcgtgacccgcgaatattaacgcgttcgcagttgcagcgattgcaactggcctggccgcaacaacaggggcgatatcctctgacgtatcatctttttttgggagtgattgctcgtgagtaa

SEQ ID NO: 738 - DNA, 678 bp, Escherichia coli
gtgagtaaatgttattttgtcaccggaacggataccgaagtggggaaaactgtcgccagctgcgcgtttttacaagccgcaaaggcagcaggctaccggacggcaggttacaaaccggtggcctctggcagcgaaaagaccccgaaaggcttacgtaatagtgacgcgctggcgttacagcgcaacagtagcctgcagctggattacgcaacggtaaatccttacaccttcgcagaacccacctcgccgcatatcatcagcgcgcaagagggcaggccgatagaagcattggtaatgagcgccggattacgcgcgcttgaacaacaggctgactgggtgttagtggaaggtgctggcggctggtttacgccgctttctgacactttcacttttgcggattgggtaacacaggaacaactgccagtgatactggttgtgggcgtgaaactcggctgtattaatcacgcgatgttgactgcgcaggcaatactacacgccggactgactctggcggggtgggtggcgaacgatgtcacgcctccgggaaaacgtcacgctgaatatatgaccacgctcacccgcatgattcccgcgccgctgctgggcgaaattccctggcttgcagaaaatccagaaaatgcggcaaccggaaagtacatcaatcttgccttaatgtag

SEQ ID NO: 739 - DNA, 2022 bp, Escherichia coli
atgagtaaaccgttcaaactgaattccgcttttaaaccttctggcgatcagccggaggcgattcgacgtctcgaagaggggctggaagatggtctggcgcaccagacgttacttggcgtgactggctccgggaaaaccttcaccattgccaatgtcattgctgaccttcagcgcccaaccatggtacttgcgcccaacaaaacgctggcggcccagctgtatggcgaaatgaaagaattctttccggaaaacgcggtggaatatttcgtctcctactacgactactatcagccggaggcctatgtaccgagttccgacaccttcattgagaaagatgcctcggtaaacgaacatatcgaacagatgcgtttgtccgccaccaaagcgatgctggagcggcgtgatgtggttgtggtggcgtctgtttccgcgatttatggtctgggcgatcctgatttatatctcaagatgatgctccatctcacggtcggtatgattatcgatcagcgcgcgatcctgcgccgactggcggagctgcaatatgctcgtaatgatcaagcattccagcgtggtactttccgtgttcgtggcgaggtgattgatatcttcccggcagaatcggatgacattgcacttcgcgtggagctgtttgacgaggaagtggaacgattgtcgttatttgacccgctgaccgggcagattgtttccactattccacgttttaccatctacccgaaaacgcactacgtcacgccacgcgagcgcatcgtccaggcgatggaggagatcaaagaagagctggccgccagacgtaaagtgctattggaaaacaacaaactgctggaagagcagcggctgacccagcgtacccagtttgatctggagatgatgaacgagctaggctactgttcggggattgagaactactcgcgcttcctctccggtcgtggaccgggtgagccaccgccgacgctgtttgattacctgcctgctgatgggctgctggtggtcgatgaatctcacgtcaccattccacaaattggcggcatgtatcgcggtgaccgggcgcgtaaagagacactggtggagtacggcttccgcctgccatcagcgctggataaccgtccgctgaaatttgaagagttcgaagcattagcgccgcaaaccatctatgtttcggcgacgccgggtaattacgagctggaaaaatccggtggcgatgtggtggatcaggtggtgcgtccaacaggcttactcgacccgattatcgaagtgcggccggtagcgacacaggtggatgatcttctatcggagattcgtcagcgagcggcaattaacgaacgcgtactggttacaactctgaccaagcggatggcggaagatctcactgaatatctcgaagaacacggtgagcgcgtgcgttatcttcactcagatatcgacaccgtcgaacgtatggagattatccgcgacttgcgtctgggtgagttcgacgtattggtagggatcaacttactgcgcgaaggtctggatatgccggaagtttcgctggtggcgatcctcgacgctgacaaagaaggcttcctgcgttccgaacgttcgttgatccagaccattggtcgtgcggcacgtaacgttaacggtaaagcgattctctatggcgataaggtcaccccatcaatggcgaaagcgattggcgaaaccgaacgtcgccgcgagaaacagcagaagtacaacgaagaacacggcattacgccgcaaggcttgaacaagaaagtggtcgatatcctggcgctggggcagaacattgccaaaaccaaagcgaagggcagaggaaaatcgcgcccgattgttgaaccggataatgtgccgatggatatgtcgcctaaagcgttacagcagaagatccatgaactggaagggttgatgatgcaacacgcgcagaatctggagttcgaagaagcggcgcaaattcgtgaccagttgcatcagttgcgtgagctgtttattgccgcgtcgtga

SEQ ID NO: 740 - DNA, 909 bp, Escherichia coli
atgcgcaatcgtacgctggctgaccttgatcgtgtcgttgctctcggcggagggcatggactgggacgcgttctctcatcactttcgtctttgggttctcgtttaacgggtatcgtcaccaccaccgataacggtggctcgacggggcgtattcgccgctcagaaggcggcattgcctggggcgatatgcgcaactgcctcaatcagctgataactgaacccagcgtcgcttccgcaatgtttgaatatcgtttcggcggtaatggcgaactttccgggcacaaccttggaaacctgatgttaaaggcactggatcaccttagcgtacgacctcttgaagcgatcaatctgattcgaaatctgctgaaagtggacgcacatttgattccgatgtcggagcatccggtggatctgatggcgattgacgatcaggggcatgaagtttacggcgaggtcaatatcgaccagttaactacgccgattcaagagttattgttaacgccgaatgtacccgcaacgcgtgaggcggttcacgctatcagtgaagcggatctcatcattattgggcctggcagtttttacaccagcctgatgccaattctgctgctgaaggaaatcgcacaggcattacgccgcacgccagcgccgatggtctatatcggcaatctggggcgtgagttgagtttacctgcggctaatctgaagctggaaagcaagctggcaattatggagcagtatgttggtaaaaaggtaattgatgcggtcatcgtcgggccaaaagaggatgtctcggcggtgaaagagcggattgtgattcaggaagtgctggaggccagcgatattccgtatcgtcatgaccgccagttgttgcatagcgcgctggaaaaggcattacaggctttaggttaa

SEQ ID NO: 741 - DNA, 990 bp, Escherichia coli
atggcttcacaactgactgatgcatttgcgcgtaagttttactacttgcgcctgtcgattactgatgtgtgtaactttcgttgcacctactgcctgccggatggttacaagccgagcggcgtcaccaataaaggctttctgaccgtcgatgaaattcgccgggttacgcgcgccttcgccagtttgggcaccgaaaaagtccgtctgacaggtggtgagccatctttacgccgcgactttaccgatatcatcgccgctgtgcgagaaaacgacgctattcgccagatagcggtcaccaccaatggttaccgtctggagcgcgatgtggcgaactggcgcgatgctggacttactggcatcaacgtcagcgtcgacagtctggacgctcgccagtttcatgccattaccgggcaggataaattcaaccaggtcatggcagggatcgatgctgcatttgaggccggttttgagaaggtcaaagtcaataccgtgctgatgcgtgatgttaatcatcaccagctcgacacctttctgaactggatccagcatcgtcctatccagctgcgtttcatcgaactgatggaaacgggcgagggcagcgagctcttccgtaagcatcacatctctggtcaggttctgcgtgacgagctactgcgtcgcggctggatccaccaattacgtcaacgcagcgacggtcccgcgcaagtcttttgtcatccggattacgccggagagattggccttatcatgccgtatgaaaaagacttctgcgccacttgcaaccgcctgcgcgtttcctccattggtaaactccatctctgcctgtttggtgaaggcggcgttaacctgcgcgatctgctggaaaacgatacccagcaacaggcgctggaagcgcgtatttcagcggcgctgcgggagaaaaaacagacccatttcctgcatcaaaataacaccggtattacgcaaaacttatcgtacattggtggctaa

SEQ ID NO: 742 - DNA, 513 bp, Escherichia coli
atgagtcaggtaagcactgaatttatcccgacccgtattgctattcttacggtttctaatcgtcgcggtgaagaagacgatacctccggtcactatctgcgcgattcggcgcaagaagcgggccatcacgttgtcgataaagccattgtgaaagaaaaccgctacgctattcgcgctcaggtatctgcgtggatcgccagcgacgatgtacaagtggtgttgattacgggtggtactggcctgacggaaggcgatcaggctcccgaagcgctgctgccgttgttcgaccgtgaagttgaaggttttggtgaagtgttccggatgttgtcgttcgaagagattggcacttccacgttgcaatctcgtgcggtagcgggcgtcgctaacaaaacgctgattttcgccatgccgggttcgaccaaagcgtgccgtaccgcatgggaaaatatcattgcgccgcagctggatgcccgtacgcgtccgtgtaatttccatccacatttgaagaaataa

SEQ ID NO: 743 - DNA, 486 bp, Escherichia coli
atgtcgcaactgacccatatcaacgccgctggcgaagcgcacatggtggatgtctccgccaaagcggaaaccgtgcgtgaagcgcgcgccgaagcctttgtcaccatgcgcagcgagacgctggcgatgattattgatggtcgccaccacaaaggcgacgtatttgccactgcgcgtatcgccggtattcaggcggcaaaacgcacctgggatctgatcccgctgtgtcacccgctgatgctcagcaaagttgaagtcaatttacaggccgagccggagcacaatcgggtacgtatagaaaccttatgccgcctgaccgggaaaaccggtgtcgaaatggaagcgttaaccgcggcctccgtggcggcgctgaccatttatgacatgtgcaaagcggtgcaaaaagatatggtgattggtccggtacgtttgctggcgaagagcggcggcaagtcgggtgactttaaggtggaagcggatgattaa

SEQ ID NO: 744 - DNA, 246 bp, Escherichia coli
atgattaacgttctttttttcgcccaggtgcgcgagttggtgggaacagatgcaaccgaagtggctgcggatttcccaaccgttgaagcgttacgccaacatctggctgcgcagagcgatcgctgggcgctggcgctggaagatggcaaattgctggctgctgtcaaccagacgctggtgagttttgaccattcgctgactgacggcgacgaagtggctttcttcccgccggtaaccggaggttaa

SEQ ID NO: 745 - DNA, 453 bp, Escherichia coli
atggcagaaaccaaaattgttgtcggcccgcagccgttcagcgtaggagaagagtacccgtggctggctgagcgtgacgaagacggtgcggtagtcacctttaccggtaaggtgcgcaaccataacctgggcgacagcgtcaaagcattaaccctcgaacactatccgggaatgacagaaaaagcactggcagaaatcgttgatgaagcgcgtaaccgctggctgctggggcgcgtcacggtaattcaccgcattggtgaattatggccgggcgatgaaattgtttttgtcggtgttaccagtgcgcatcgcagcagtgcgtttgaagccgggcagtttattatggattatctcaaaacccgcgcaccgttctggaagcgcgaagccacgccggaaggcgaccgctgggtcgaagctcgggagagcgatcagcaggcggcaaaacgctggtag

SEQ ID NO: 746 - DNA, 705 bp, Escherichia coli
atggacagattcccacgttctgattcaatcgtacaaccccgggctggcttgcaaacttatatggcgcaagtctatggctggatgaccgttggcttgttgctgacagcatttgttgcctggtatgcggctaattccgcggccgtgatggagctgttgtttactaaccgtgtctttttaatcggtctgatcatcgcgcaattagcattggttattgtgttatcagcgatgattcaaaagctgagcgcaggtgtaacgacgatgctctttatgctttattcggcgctgacgggtcttacgctttccagtattttcattgtctatacggctgcttctatcgccagtactttcgtcgttactgccgggatgttcggcgcaatgagcctgtacggttacaccacgaagcgcgatctaagcggctttggcaatatgctgtttatggcgttaatcggcattgtgctggcatcgctggttaacttctggctgaaaagcgaagcattgatgtgggcagtcacctacatcggcgtgattgtctttgtcggattgacggcgtatgacacccagaaactgaaaaatatgggtgagcagattgatactcgcgacacgtcgaacctgcgcaaatattccattcttggcgcgttaaccttgtatctggacttcatcaacctgttcctgatgttgctgcggatcttcggcaaccgccgttaa

SEQ ID NO: 747 - DNA, 714 bp, Escherichia coli
atggaatcatactcgcaaaatagcaataaattagattttcagcacgaagccaggatattaaacagcatatggctcattaccgctttgggtttggtggcaaccgcagggctggcctggggcgctaagtatctcgaaattacggcaacaaaatatgattcaccgcaaatgtatgttgctataggattattattactttctatgtatggcttaagtaaagatatcaacaagataaataccgccatcgcgggcgtaatatatttgtttttaatctctttggtggcgattgtcgttgcgagtttagcgcctgtatctgccattatcgtcgtgttcagcactgcgggatcgatgtttttaatcagtatgctggcaggtctattgtttaaatttgatcctggttctcaccgttttatcattatgatgacgttgacagggttggccctggtaatcatcgtgaatgccacattaatgagtgaacgacccatttgggtaataagttgcttaatgattgtcttatggtcaggcattatctcgcatggacgaaataagctccttgaactgacaggaaaaagccatagtgaagaattatggagtccggttcgttgtgcttttgtaggtgcattaacactctattactattttatcggcttctttgggattcttgccgctatagctataacgcttgtctggcaaaggcatacgcggttttttcattag

SEQ ID NO: 748 - DNA, 957 bp, Escherichia coli
atgagtaaatcacacccgcgctggcgcttagcaaagaagatcctcacctggctgttttttatcgcggtgattgtgttgctggtggtctacgccaaaaaagtggactgggaagaggtttggaaggtcatccgcgactacaatcgcgttgcgctgcttagtgcggtcgggctggtggtcgtcagttatctgatttacggttgctacgacctgctcgcccgtttctactgcggtcacaaactggcgaagcgccaggtgatgctggtgtcgtttatctgctacgccttcaacctgacactcagtacctgggtcggcggcattggtatgcgctatcgtttgtactcccgactggggttaccgggcagcactattacgcggattttttcgctcagtattaccaccaactggctaggctatattttgctagcgggggttatctttaccgcaggcgtggtggagttgccggatcactggtatgtcgatcaaactacgctgcgtattctcggtattggcttactgatgattatcgcggtttatttgtggttttgcgctttcgcgaagcaccgccatatgaccatcaaagggcaaaagctggtgctgccttcgtggaaattcgccctcgcccagatgctgatttccagcgttaactggatggtaatgggagcgattatctggctgttacttggtcaaagcgtgaactatttctttgtactgggcgtgttgctggttagtagtattgctggcgtcatcgtgcatattccggcgggaattggtgtgctggaagcggtgtttatcgcgctactggctggggagcatacctccaaaggcacaattatcgccgccctgctcgcttaccgtgtgctgtattactttatcccactgctgctggcgctgatctgttacctgttgctggaaagccaggcgaagaagctacgggcgaaaaatgaagcggcgatgtga

SEQ ID NO: 749 - DNA, 1242 bp, Escherichia coli
atgaaatgtagctggcgcgaaggcaataagatccagttgctggaaaacggcgagcaatattatcccgcggtgtttaaggcgattggagaggcacaagaacgcatcattcttgaaacgtttatctggtttgaggatgacgtcggcaaacagctgcatgcggcgctattggcagcagcgcaacgcggggtaaaagcggaagtcttgctggatggctacggttcgccggatctcagcgatgagtttgtcaatgaactgacggcagctggcgtggtgttccgctactacgatccccgccctcgcctttttggtatgcgcaccaatgtgtttcgccggatgcatcgcaaaattgtggtgatcgacgcgcgtatcgcctttattggtgggctgaattactccgccgagcatatgtccagctacggcccggaggccaaacaggattacgcggtacgcctcgaagggccgattgtcgaagatattctccagtttgagctggaaaacctgccaggacaaagcgcggcgcgacgctggtggcgacgtcatcataaagcggaagagaaccgccagccgggagaagcgcaggtattgctggtctggcgcgataacgaagaacatcgcgatgatatcgaacgtcactatctgaaaatgctcactcaggcgcggcgggaagtgattatcgccaacgcctacttcttccccggctatcgttttttacacgccttgcgtaaagcggcacggcgcggggtgcggatcaaactgatcattcagggcgaaccggatatgccgattgtcagagtcggcgcgcgtttgctgtataactatctggttaaaggtggcgttcaggtgtttgagtaccgccgccgcccgctccacggcaaagtggcattgatggacgatcactgggcgacagtagggtccagtaatctcgatccgctcagtttgtcactgaatctcgaagcaaatgtcatcatccacgatcgtaattttaaccagacgctgcgcgataatctgaacggcattattgccgcagattgtcagcaggtcgatgagaccatgctgccgaaacgcacctggtggaacctgaccaaaagcgtgctggcgttccactttttacgccacttcccggcgctggtgggctggcttccggcgcacacgccacgtctggcgcaggttggtccccccgcacaaccgacaatggaaacgcaggatcgggtagaaactgaaaacacgggggtaaaaccctga

SEQ ID NO: 750 - DNA, 762 bp, Escherichia coli
atgcccgatcaaacacaacaattttcgttcaaggtgctcaccatcaatattcacaaaggctttaccgcgtttaaccgacgcttcattttgccggaacttcgcgacgccgtgcgtaccgtcagcgccgatattgtttgcctgcaggaagtgatgggcgcgcacgaagttcatccgctgcatgtggaaaactggcccgatacctcgcactacgagtttctcgccgacaccatgtggagcgatttcgcctacggtcgcaatgccgtatacccggaaggacatcacggtaacgccgttctttcacgttatcccattgaacattatgagaatcgtgatgtttcggtcgatggtgcggaaaagcgcggcgtgctctactgccgcattgtgccgccgatgaccgggaaagcgattcatgtgatgtgcgtacatctgggcctgcgtgaggcgcaccgtcaggcgcagcttgcgatgctcgccgaatgggtgaatgagctacctgacggcgaaccgatattggtagcgggtgatttcaacgactggcggcaaaaagctaatcatccgttaaaagtgcaggccgggctggatgagatttttacccgcgcccacggacgcccggcgcgcacgtttccggtgcaatttcctctactacgactggacaggatctacgtcaaaaatgccagcgccagcgcgccaaccgcgttgccgctgcggacatggcgacacctttctgatcatgcccctttaagtgcggagattcatttatga

SEQ ID NO: 751 - DNA, 411 bp, Escherichia coli
atgaagtggcaacaacgtgttcgtgtcgcaactggcctaagttgctggcagattatgttgcatttactggtagtggcgctgctggtggtgggctggatgagtaaaactctggttcacgtcggcgtaggattatgcgcactgtattgtgccacggtagtgatgatgctggtgtttcagcgccaccccgagcaacgctggcgtgaggtggcagacgtgctggaagagctgaccacgacctggtattttggtgcagcgctgattgtgctgtggctgttgtcccgcgtactggaaaacaactttttgctggcaattgcagggctggcaatccttgccggcccggcggtggtgtctttgctggcgaaagataagaagttacatcaccttacgtctaaacatcgcgtacgccgctga

SEQ ID NO: 752 - DNA, 1107 bp, Escherichia coli
atgtttcatcgcttatggacgttaatccgcaaagagttgcagtcgctgctgcgcgaaccgcaaacccgcgcaattctgattttacccgtgctgattcaggtgatcctgttcccgttcgccgccacgctggaagtgaccaacgccaccatcgccatctacgatgaagataacggcgagcattcggtggaacttactcaacgttttgcccgcgccagcgcctttacccatgtgctgctgctgaaaagcccgcaggagatccgcccgaccatcgacacacaaaaggcgttactactggtgcgtttcccggctgacttctcgcgcaaactggataccttccagaccgcgccgttgcagttgatcctcgacgggcgtaactccaacagtgcgcaaattgccgccaactacctgcaacagatcgtcaaaaattatcagcaggagctgctggaaggaaaaccgaaacccaacaacagcgagctggtggtacgcaactggtataacccgaatctcgactacaaatggtttgtggtgccgtcgctgatcgccatgattaccactatcggcgtaatgatagtcacttcactttccgtcgcccgtgaacgtgaacaaggtacgctcgatcagttgctggtttcgcccctcaccacctggcagatattcatcggcaaagccgtaccggcattaattgtcgccaccttccaggccaccattgtgctggcgattggtatctgggcgtatcaaattcccttcgccggatcgctggcgctgttctactttacgatggtgatttacggtttatcgctggtgggattcggtctgttgatttcatcactctgttcaacacaacagcaggcatttatcggcgtatttgtctttatgatgcccgccattctcctttccggttacgtttcgccggtggaaaacatgccagtgtggctgcaaaatctgacgtggattaaccctattcgccactttacggacattaccaagcagatttatttgaaggatgcgagtctggatattgtgtggaatagtttgtggccgctactggtgataacggccacgacagggtcagcggcgtacgcgatgtttagacgtaaggtgatgtaa

SEQ ID NO: 753 - DNA, 1134 bp, Escherichia coli
atgagtaatccgatcctgtcctggcgtcgcgtgcgggcgctgtgcgtcaaagagacgcggcagattgttcgcgatccgagtagctggctgattgcggtagtgatcccactgctactgctgtttatttttggatacggcattaacctcgactccagcaagctgcgcgtcgggattttactggaacagcgtagcgaagcggcgctggatttcacccacaccatgaccggttcgccctacatcgacgccaccatcagcgataaccgtcaggaactgatcgccaaaatgcaggcggggaaaattcgcggtctggtggttattccggtggatttcgccgaacagatggagcgcgccaacgccaccgcaccgattcaggtgatcaccgacggcagtgagccgaataccgctaactttgtgcaggggtatgtcgaagggatctggcagatctggcaaatgcagcgcgcggaggataacgggcagacttttgaaccgcttattgatgtacaaacccgctactggtttaacccggcggcgattagccagcactttattatccccggtgcggtgaccattatcatgacggtcatcggcgcgattctcacctcgctggtggtggcgcgagaatgggaacgcggcaccatggaggctctgctctctacggagattacccgcacggagctgctgctgtgtaagctgatcccttattactttctcgggatgctggcgatgttgctgtgtatgctggtgtcggtgtttattctcggcgtgccgtatcgcgggtcgctgctgattctgttttttatctccagcctgtttttactcagtaccctggggatggggctgctgatttccacgattacccgcaaccagttcaacgccgctcaggtggccctgaacgcggcttttctgccgtcgattatgctttccggctttatatttcagatagacagtatgcccgcggtgatccgcgcggtgacgtacattattcccgcacgttatttcgtcagcactctgcaaagcctgttcctcgccgggaatattccagtggtgctgatagtgaacgtgctgtttttgatcgcttcggcggtgatgtttatcggcctgacgtggctgaaaaccaaacgtcggctggattag

SEQ ID NO: 754 - DNA, 1737 bp, Escherichia coli
atgaatgatgccgttatcacgctgaacggcctggaaaaacgctttccgggcatggacaagcccgccgtcgcaccgctcgactgcaccattcacgccggttatgtgacggggctggttgggccggacggtgcgggcaaaaccacgctgatgcggatgctggcgggattactgaaacccgacagcggcagtgccacggtgattggctttgatccgatcaaaaatgacgctgcgctgcacgccgtgctcggctatatgccgcagaaatttggtctgtatgaagatctgacggtgatggagaacctcaatctgtacgcggatttgcgcagcgtcaccggcgaggcacggaagcaaacttttgctcgcctgctggagtttacgtctcttggcccgtttaccggacgcctggcgggcaagctctccggtgggatgaaacaaaaacttggcctggcctgtaccctagtgggcgaaccgaaagtgttgctgctcgatgaacccggcgtcggcgttgaccctatctcacggcgcgaactgtggcagatggtgcatgagctggcgggcgaagggatgttaatcctctggagtacctcgtatctcgacgaagccgagcagtgccgtgacgtgttactgatgaacgaaggcgagctgctgtatcagggagaaccgacggccctgactcaaaccatggccggacgcagctttctgatgaccagcccgcacgagggcaaccgcaaactgttgcaacgggcattgaaactgccgcaggtcagcgacggcatgattcaggggaaatcggtacgtctgatcctcaaaaaagagaccacgccagacgatattcgccatgccgacgggatgccggaaatcgacatcaacgaaactacgccgcgttttgaagatgcgtttattgatttgctgggcggtgccggaacctcggaatcgccgctgggcgcaatattacatacggtagaaggcacacccggcgagacggtgatcgaagcgaaggaactaaccaagaaatttggtgattttgccgccaccgatcacgtcaactttgccgttaaacgcggggagatttttggtttgctcggaccaaacggcgcgggtaaatcgaccacctttaagatgatgtgcggtttgctggtaccgacctctggtcaggcgctggtgctgggcatggatctgaaagagagttctggtaaagcgcgccagcatctcggctatatggcgcaaaaattttcgctctacggcaacctgacggtcgaacagaatttacgctttttctctggtgtgtatggcttacgcggtcgggcgcagaacgaaaaaatctcccgtatgagcgaggcgttcggcctgaacagtatcgcctcccacgcgaccgatgaactgccattaggttttaaacagcggctggcgctggcctgttcgctgatgcatgaaccggacattctgtttctcgacgaaccgacgtccggcgttgatcccctcacccgccgtgaattttggctacatatcaacagtatggtagagaaaggcgtcacggtgatggtcaccacccactttatggatgaagcggaatattgcgaccgcatcggcctggtgtaccgcgggaaattaatcgccagcggcacgccggatgatttgaaagcgcagtcggccaacgacgagcaacccgatcccacaatggagcaggcctttattcagttgatccacgactgggataaggagcatggcaatgagtaa

SEQ ID NO: 755 - DNA, 996 bp, Escherichia coli
atgaaaaaacctgtcgtgatcggactggcggtagtagtacttgccgccgtggttgccggaggctactggtggtatcaaagccgccaggataacggcctgacgctgtatggcaacgtggatattcgtacggtgaatcttagtttccgtgttggggggcgcgttgagtcgctggcggtggacgaaggtgatgcgatcaaagcgggccaggtgctgggcgaactggatcacaagccgtatgagattgccctgatgcaggcgaaagcgggcgtttcggtggctcaggcgcagtatgacctgatgcttgccgggtatcgagatgaagaaatcgctcaggccgccgcagcggtgaaacaggcgcaagctgcctatgactatgcgcagaacttctataaccgccagcaaggactgtggaaaagccgcaccatttcggcaaatgacctggaaaatgcccgctcctcgcgcgaccaggcgcaggccacgctgaaatcagcgcaggataaattgcgtcagtaccgttccggtaaccgcgaacaggacatcgcccaggcgaaagccagcctcgaacaagcgcaggcgcaactggcgcaggcggagctgaatttgcaggattcgacgctggtcgctccgtctgatggcacgctgttaacgcgcgcggtagagcccggcacggtgcttaatgaaggtggcacggtatttaccgtctcgctgacgcgtccggtgtgggtacgcgcctatgttgatgaacgtaatcttgaccaggcccagccggggcgcaaagtgttgctttataccgatggtcgcccggacaagccgtatcacgggcagattggtttcgtttcgccgactgctgaatttaccccgaaaaccgtcgaaacaccggatctgcgtaccgacctcgtctatcgcctgcgtattgtggtgaccgacgccgatgatgcgttacgccagggaatgccggtaacggtgcaattcggtgacgaggcaggacatgaatga

SEQ ID NO: 756 - DNA, 672 bp, Escherichia coli
atgaataatcctgccatgacaatcaagggtgaacaggcgaaaaaacagctgattgctgcggcactggcacagtttggtgaatatggaatgaacgccaccacccgcgagatagccgcccaggccgggcagaatatcgcagccatcacctactacttcggttcgaaagaagatttgtacctcgcctgcgcccagtggattgctgattttattggcgagcagttccgtccacacgccgaagaagccgaacgtttgttcgcacaaccacagccggatcgggcagccatccgtgaactgatccttcgcgcctgcagaaacatgattaagctgctcacccaggatgacaccgtcaacctcagcaaatttatctcccgtgagcagctttctcccacggcagcctaccacctggtgcacgaacaggtgattagtccgctacacagtcaccttacacgcctgattgccgcctggaccggctgcgacgctagcgatacccgcatgatccttcatacccatgcgttgattggtgagattctggcgtttcgtcttggcaaagaaactattctgttacgtaccggctggaccgcgttcgatgaagaaaagaccgaactgatcaaccagacggtgacctgtcatattgacctgattttgcaaggattatcgcaaaggagtttgtag

SEQ ID NO: 757 - DNA, 1362 bp, Escherichia coli
atgtctttcgattctttgggtttaagccctgatatcctgcgcgccgttgccgagcagggttaccgtgaacccacccctattcagcagcaggcgatccctgcggtgctggaaggccgcgacctgatggccagcgcccagaccggtaccggcaaaacagcgggctttacgctgccgctgttgcaacacctgatcactcgccagccgcacgccaaagggcgtcgtccggtacgcgcgctcattcttaccccgacccgtgaactggcggcgcagattggcgaaaacgtccgtgattacagcaaatatctgaacattcgttcgctggtggtgtttggcggtgtcagcattaacccacaaatgatgaagttgcgcggcggcgttgatgtgctggtggcaacgccgggacgtctgctggacctggaacatcaaaatgcagtgaagctggatcaggttgaaatcctcgtccttgatgaagctgaccgcatgctcgacatgggctttatccacgatatccgtcgcgtgttaacaaaactgccagcgaagcgccagaacctgttgttctccgcgaccttctctgacgatattaaagccctggcggaaaaactgttgcacaacccgctggaaatcgaagtggcacgccgcaatactgcgtctgatcaggtgacccagcacgttcactttgtcgataagaaacgcaaacgcgaattgctgtcgcatatgattgggaaagggaactggcagcaggtgctggtgtttacccgtaccaaacatggcgctaaccatctggctgaacagcttaataaagacggcatccgtagtgcggcgatccacggtaataaatcgcaaggtgcgcgtactcgtgcgctggccgattttaaatcgggcgatattcgtgtactggtggcaactgacatcgctgcgcgcggtctggatatcgaagagttgccgcacgtcgtcaactatgagttaccaaacgtaccggaagattatgttcaccgtatcgggcgtactggccgtgcggcggcaactggcgaagcattgtcgctggtgtgtgttgatgaacacaaactgctgcgtgatatcgaaaaactgctgaaaaaagagatcccgcgcattgcgattccggggtatgagccggacccgtcaatcaaagccgaaccgatccagaacggtcgccagcaacgtggcggcggtcgtggacagggcggtggtcgcggtcaacagcaaccacgccgtacggaaagtggtgcgaagtctggtaacgcgaagcccgcagaaaaaccgtctcgtcgtctcggcgatgccaaaccggcaggcgaacaacaacgtcgccgccgtccgcgtaaacctgccgctgcgcagtaa

SEQ ID NO: 758 - DNA, 2151 bp, Escherichia coli
atggcattaaccgccgcgcttaaagcgcaaattgccgcctggtataaggcgcttcaggaacagatccccgactttattccccgtgcgccgcagcggcagatgattgcggacgtcgccaaaacgctggccggagaagaagggcggcatctggcgattgaagcccctaccggcgttgggaaaacgctctcctatttgatccccggcatcgccattgcccgcgaagagcaaaaaacgctggtggtaagtaccgccaacgtggcattgcaggatcagatctacagcaaagatttaccgctgctgaaaaagatcattcccgatcttaaattcactgccgcttttgggcgtgggcgctacgtttgcccgcgtaatctgacagcgctcgccagcactgagcccacgcaacaggatctgctggcgtttcttgacgatgaactgacgccgaacaatcaggaagagcaaaaacgttgtgcgaagctgaagggcgatctcgacacttataaatgggatggtctgcgcgatcatactgatatcgctatagatgatgatctctggcgtcgtttgagtaccgacaaggccagctgcctcaaccgcaactgttattactatcgcgaatgcccgttttttgtcgctcgtcgggaaattcaggaagcggaagtggtggtggcaaaccatgcgctggtgatggcggcgatggaaagcgaagcggtattgcctgacccgaaaaatttactgctggtgctggacgaaggtcatcacctgccggatgtggcgcgggatgcgctggagatgagcgccgaaatcaccgcgccgtggtatcggctacagctggacttgttcacgaaactggtcgctacctgcatggagcagtttcgcccgaagaccatcccgccgctggcgatccctgaacgtttgaatgcgcattgtgaagagttgtatgagcttatcgcctcgttaaacaacattctcaatctctacatgcctgccgggcaggaggcagagcaccgttttgcgatgggcgaactgccagatgaagtgctggagatctgccagcggctggcaaaactcaccgagatgctgcgtggcctggcggagttatttcttaacgatttaagtgagaaaaccggcagccatgacattgtacgtctgcatcggttgattttgcagatgaaccgcgcattggggatgttcgaggcgcaaagcaaactctggcggctggcgtctctggcgcaatcttccggtgcgccggtgaccaaatgggcgacgcgggaagagcgcgaagggcagctacacctttggtttcactgcgtgggaatacgtgtcagcgatcagctggaaaggctgctgtggcgcagtattccgcacattattgttacctccgcaaccttgcgttcgctgaacagtttttcgcgtttgcaggagatgagtgggctgaaagagaaagcgggcgaccgttttgtggcactggattccccttttaaccactgtgaacagggcaaaattgttattccccggatgcgcgttgagccttccatcgacaacgaagagcagcacattgccgaaatggcggcctttttccgtgaacaggtggagagcaaaaaacatctcggtatgttggtgctgtttgccagcgggcgtgcgatgcagcgctttctcgactatgtgacggatttacgcctgatgttgctggtgcagggcgatcagccacgttatcgcttagttgaactgcaccgcaaacgcgttgccaacggtgagcgtagcgtgctggtgggcttacagtcctttgccgaaggtcttgatctgaaaggcgatctgctcagccaggtgcatatccacaagatcgcttttccgcccatcgacagcccggtggtgatcaccgaaggtgaatggctgaaaagcctcaaccgctatccgtttgaggtgcaaagcctgccgagcgcttcgtttaacctgattcagcaggttgggcgactgattcgaagccacggttgctggggggaagtggttatctacgacaaacgcttgctgaccaaaaattatggcaagcgactactggatgcattaccggtatttccgatagagcaaccggaagtccctgaaggtatagttaaaaagaaagaaaaaacgaaatccccacgccgtcggcggcgttaa

SEQ ID NO: 759 - DNA, 963 bp, Escherichia coli
atggactatcgcaaaatcattaaagagatcgggcgcgggaaaaaccacgcgcgcgatttagaccgggatactgcgcgcggtctgtatgcccatatgctcaatggtgaagtccctgaccttgagttgggcggcgtattgattgcgctacgtatcaaaggggaaggggaagcagagatgctcggcttttacgaagccatgcaaaatcacaccatcaagctgacgccgcctgcaggcaagccgatgccgattgtcatccccagttacaacggcgcgcgtaaacaggccaacctgacgccgttgctggcgattctgctgcacaaactcggttttcctgtggtggttcacggggttagcgaagatccaacccgcgtgctgaccgaaaccattttcgaactgatgggtattacgccaacgttgcacggcgggcaggcgcaggcgaagctcgacgaacatcaacctgtctttatgcctgtcggcgcgttttgcccgccgctggaaaaacaactggcgatgcgctggcggatgggcgtgcgtaacagtgcacataccctggcgaaactggcgacgccatttgccgaaggtgaggcactgcgtctttccagcgtttcgcatccggaatacattggacgcgtcgcgaagttctttagtgatatcggcgggcgggcgctacttatgcatggtactgaaggtgaagtgtatgctaatccgcagcgctgcccgcagatcaatctcattgaccgtgaagggatgcgggtactgtatgaaaaacaggacactgctggtagcgagttactgccacaagcaaaagatccggaaaccacggcgcagtggattgagcgttgccttgctggcagcgaaccgattcctgaatcgctgaaaatccagatggcttgctgcctgatggctacgggtgaagcggcaactatcaacgacggcctggcgcgcattaatcaggcattttaa

SEQ ID NO: 760 - DNA, 1086 bp, Escherichia coli
atggaaagtggtcatcgctttgatgctcagacgctgcacagttttattcaggctgtatttcgtcagatgggtagcgaggaacaggaagcgaaattagttgccgatcatttaatcgcggcaaacctggcagggcatgattcacatggtattggcatgatcccaagctatgtgcgttcctggagtcaggggcatctgcaaattaatcatcatgccaaaatcgttaaagaggcgggggcggcggtcacgctcgatggcgatcgcgcatttggtcaggtcgcggcacacgaagcgatggcgctggggattgagaaagcgcatcagcacggcattgccgccgtggcgctacataactcgcatcatatcggccgtatcggttactgggcggagcagtgtgcagcggcggggtttgtctctatccactttgttagcgtggtcggtattccaatggtcgcgccgttccacggtcgcgacagccgctttggcaccaatccgttctgtgtggttttccctcgtaaagataatttcccgctgttgctcgattacgccaccagcgccattgcatttggcaaaacccgcgtcgcctggcataaaggcgtccccgtgccgccaggttgcctgattgacgttaacggcgtgccgacgaccaatccggcggtaatgcaggagtcgccgttgggttcgctgttgacctttgccgaacataaaggctacgcccttgcagcgatgtgtgaaattcttggcggggcgctttctggcggtaaaacgacgcatcaggaaacgttacaaaccagtcccgatgccattcttaactgcatgactactatcattatcaacccggaactgttcggcgcgccggattgtagtgcacagaccgaagcctttgccgagtgggtgaaagcctcgccgcatgatgaagataaaccgattttgctaccgggcgagtgggaagtgaacacgcgtcgcgaacggcaggagcaggggattccactggatgcgggaagctggcaggccatttgtgatgcggcgcggcagattggtatgccggaagagacgttgcaggctttctgtcagcagttagccagctaa

SEQ ID NO: 761 - DNA, 261 bp, Escherichia coli
atgaaaactatcaatactgttgttgctgctatggctctttcaactctgtcatttggcgtgttcgcggcggaaccggtaacggcatcccaggcacagaacatgaataaaatcggcgtggtttctgccgatggcgcatccaccctcgatgccctggaagcgaaactggctgagaaagccgcggcggccggtgccagtggatacagcattacttccgccaccaacaacaataaattaagcggtactgcggtaatttataagtaa

SEQ ID NO: 762 - DNA, 267 bp, Escherichia coli
atggcatccggttgggctaatgatgacgccgtcaacgaacagatcaacagtacaattgaagatgcgattgcccgcgctcggggtgaaattccgcgtggcgaaagcctgtatgaatgtgaagagtgcggtgcccctatcccgcaggcccgtcgggaagccattcctggcgtgcgcttatgcattcattgccaacaggagaaagatttacaaaaaccagcttatacaggatataatcgcagaggttcgaaagacagccagttacgttaa

SEQ ID NO: 763 - DNA, 675 bp, Escherichia coli
atgtaccacattcccggcgtgttatcgccacaggacgtcgcccgttttcgcgaacacctggaacaagccgaatgggtggatgggcgcgtcaccaccggcgcacaaggtgcgcaagttaagaacaatcaacaagtagacacccgcagcgccctgtacgccgccctgcaaaatgaggtgctgaacgcggttaaccaacatgctttgttctttgccgcggccttgccgcgtaccctttccacgccgctgtttaatcgctatcagaacaatgaaacctatggttttcatgtggatggcgcagtacgcagccatccacaaaacggctggatgcgcactgacctttctgccacgctgtttttaagcgatccagaaagctacgacggcggcgaactggtcgttaatgacaccttcgggcaacatcgggtaaaactcccggcaggcgatctggtgttgtatccctccagcagcctgcattgcgtgacacccgtaacccgcggcgtgcgagtggcatcatttatgtggatccagtcgatgatccgtgatgataaaaagcgcgccatgctgtttgaactggacaacaatattcagtcgctgaaaagccgctacggcgaaagtgaagagatcctgtcactgctcaatctttatcataatctgctgcgggaatggtcggagatctga

SEQ ID NO: 764 - DNA, 2283 bp, Escherichia coli
atggaaaacaatcgcaatttccctgccagacaatttcattcgctcacgttctttgccggtctttgtattggtattacgcctgtggcgcaggcactcgctgccgaagggcaagctaacgcggatgacacgctggttgtcgaagcatcaacgccttcgctttatgcgccacaacaatctgccgatccgaaattctcgcgtccggtagcggatactacccgcacgatgacagtgatttctgaacaagtgattaaagatcagggtgcaaccaaccttaccgacgcgctcaaaaacgtccccggcgtgggtgcgttttttgcgggtgagaacggtaactccaccactggcgacgccatttatatgcgcggtgccgatacctctaacagtatttatatcgatggcattcgcgatatcggcagcgtctcgcgcgacaccttcaataccgagcaggtcgaagtaattaaagggccgtccggcaccgactacgggcgcagcgcaccgacaggctcgatcaatatgatcagcaaacagccgcgcaatgattccggcattgacgcctccgccagtattggcagcgcctggttccgccgcggcacgctggacgtcaatcaggtcattggtgataccactgcggtgcgcctgaatgtaatgggcgaaaaaacgcacgatgccggacgcgacaaagtcaaaaatgagcgttacggcgtcgccccttctgtcgcttttggccttggtacagcgaatcgtttgtatcttaattatctgcatgtcacccagcacaacacgccagacggcggcattccgactatcggtttaccgggttattctgccccatctgcgggaacagcagccctgaatcattccggaaaagttgatactcataacttttacggcacagattccgattacgacgattcgatcaccgacaccgctaccatgcgttttgagcacgacatcaacgataacgccaccattcgcaacactacgcgttggtcgcgcgtaaagcaggattacctgatgacggcgattatgggtggagcgtcgaatattacccagcccaccagcgatgtgaatagctggacgtggtcacgcacggcgaataccaaagatgtgagtaacaaaattctcaccaaccagaccaacctgacctcgacattctataccggcgctatcggtcatgatctcagtaccggcgtggaatttacccgcgaaacacagactaactatggcgttaatccggtgacgttaccggcggtaaatatttatcatcctgacagcagcattcatcccggcggcctgacgcgcaacggcgcaaacgccaatggtcagacggataccttcgcaatttatgccttcgatacgctgcaaatcacccgtgattttgagctgaacggcgggatccgtctggataattatcatactgaatatgacagtgctaccgcctgcggcggcagcgggcgcggtgccatcacctgccctgctggcgtggcaaaaggttctccggtcaccaccgtcgacaccgccaagtcgggcaatctggtgaactggaaagccggggcgctgtatcacctgacggaaaacggcaatgtctatattaactatgccgtttcccagcagccgccgggcggcaacaacttcgcccttgcgcagtctggcagcggtaacagtgccaaccgcaccgattttaaaccacaaaaagccaacaccagcgagattggcaccaaatggcaggttctggataaacgcctgctacttaccgccgcgctgttccgtactgatattgaaaatgaagttgagcaaaatgatgacgggacttattcgcaatatggtaagaaacgtgtcgaaggctacgagatatccgtggccgggaatatcacccccgcatggcagatgattggcggctatacccagcaaaaagcaactatcaaaaacggcaaagatgttgcccaggatggttcctcatcgctgccgtataccccggaacacgccttcaccttatggagccagtatcaggcaaccgatgatatttctgttggtgcgggcgcacggtatatcggcagtatgcataaaggttcagacggcgcggtgggaacgccagcgtttaccgaaggttattgggtcgccgacgccaaactggggtatcgggttaatcgcaatctcgacttccagctaaacgtctacaacctgtttgataccgattacgtcgcctcaatcaataagagcggctaccgttatcacccgggcgagccaagaaccttcttgctcacagctaatatgcatttctga

SEQ ID NO: 765 - DNA, 261 bp, Escherichia coli
atgaaaaagtgcctcacactactgattgccaccgtcctgagcggaatctctctcacggcttatgccgcgcaaccgatgagtaacctggacagtggtcaactacggcccgccggtaccgtttcggcaactggcgcatcaaacctaagcgatctggaggataaactggcagaaaaagcgcgcgaacaaggcgcgaaaggttatgtcattaattccgcaggcggaaatgaccagatgttcggtactgcaatcatctacaaataa

SEQ ID NO: 766 - DNA, 927 bp, Escherichia coli
atgtccgcccagaaaccggggttgcatccgcgcaaccgtcatcacagccgctacgatctcgccacgctttgtcaggtcaatcctgaactcaggcaattcctcacgcttacacccgccggggagcaaagcgtagactttgccaatccgctggcggtgaaggcgctcaataaggcgttgctggcccatttttacgccgtagcgaactgggatatcccggacggttttctctgcccgccagtaccgggccgggcggattatattcatcaccttgccgatttactggctgaagcaagcggaacaattccagctaatgccagcattctggatatcggcgttggtgcgaactgtatttatccgctgattggcgtacatgaatatggctggcgttttaccggtagtgaaaccagcagccaggcgttaagcagtgcgcaggcgatcatcagtgctaatccggggcttaaccgcgctattcgtctgcgtcggcaaaaagagagtggggcgatttttaacggcatcatccataaaaacgagcaatacgatgcgaccttgtgtaacccgccattccacgattccgccgctgcggcacgggcaggtagtgaacgtaaacgccgtaacctggggctgaacaaagacgatgcactgaactttggtggtcagcaacaggagttgtggtgtgaaggcggtgaagtcgcttttatcaaaaagatgattgaagagagcaaaggcttcgcgaagcaggtgatgtggtttacctcactggtatctcgtggtgaaaacttaccgccgttgtatcgtgccctgacggacgtgggcgcggtgaaggtggttaaaaaagagatggcccaggggcaaaagcagagtcgctttattgcctggacctttatgaacgacgagcagcgccgccgttttgtcaatcgccagcgttaa

SEQ ID NO: 767 - DNA, 2226 bp, Escherichia coli
atgcggtggatcctgttcatcctcttctgcctgttgggcgcacctgcccacgcggtatccatacccggcgttacaaccacaacgacaacggactcaacgactgaaccggccccggaaccggatatcgaacaaaaaaaagcggcctatggcgcactggcggatgtgctggataatgacacctcgcgtaaagagttgatcgaccagttgcgcaccgtcgccgctacgcctcctgcggaacccgtaccgaagatcgtgccgccgacgctggttgaagagcaaaccgtgctgcaaaaggtcaccgaagtcagccgccattatggtgaagccctttccgcccgcttcgggcaactttatcgcaatatcaccggctccccgcataagccgtttaatccacaaaccttcagcaatgcgctgacccacttttcaatgttagcggtattagtgtttggtttttactggctgattcgtctgtgcgcactgccgctgtatcgcaaaatgggccagtgggcgcggcaaaaaaatcgtgagcgcagtaactggttgcagcttccggcgatgattatcggggcgtttattatcgacctgctgttactggcgctgacattgtttgccggccaggtattaagcgacaacctgaatgcgggcagtcgcaccatcgctttccaacaaagtttgtttctcaacgcctttgccctgattgaatttttcaaagccgtactacgcctgattttttgcccaaacgtggctgaactgcgcccgttcacgattcatgacgagaccgcccgttactggagtcgtcgcctgagctggttaagcagcctgattggctatggtctgattgtggctgtgccgattatctctaatcaggtgaatgtacagataggtgcgctggcaaacgtcatcattatgctgtgcatgacggtctgggcgctgtacctgatctttcgtaataaaaaagagattacccagcatttgctcaacttcgcggagcattcgctggcctttttcagcctgtttatccgcgcctttgcgctggtgtggcactggctggcaagcgcctattttatcgtgctgtttttcttttcgttgttcgatccgggcaacagcctgaaatttatgatgggtgcaacggtgcgcagcctggcgattattggtatcgcagcatttgtttccggtatgttttcccgctggttggcgaaaaccatcaccctctcgccacatactcagcgtaactatcccgagctgcaaaaacggctgaatggatggctttcggcggcactgaaaacagcgcgtattctgacagtctgcgtggcggtaatgctgctgttgagcgcatggggattgttcgatttctggaactggctgcaaaacggagcggggcagaaaaccgtagatatcctgatccgtatcgcactcattcttttcttctcggcggttggctggacggtgctcgccagtttgatagaaaaccggctggcttcggatattcatggccgcccgctacccagcgcccgcacgcgtaccctgctgacgctgtttcgtaacgcgctggcggtgattatcagtaccatcaccatcatgattgtgttgtcggaaatcggcgtcaatatcgcgccattgctggcaggtgccggggcattaggtctggctatctcgtttggttcgcaaacgctggtgaaagatattatcaccggggtatttattcagtttgaaaacggcatgaacactggagatttggtgactatcgggccgttgaccggtactgtggaacggatgtcgattcgctccgtgggcgtgcgccaggataccggggcgtatcacatcattccgtggtcttcgataaccacctttgctaacttcgtccgcggtattggttcggtagtggcaaactacgatgttgatcgccatgaagatgctgataaagccaatcaggcactgaaagatgcggtaacggaattgatggaaaacgaagatattcgcgggctgattattggtgaaccgaactttgccgggattgtcggcttaagcaataccgcgtttacactgcgtgtttcgttcaccacgctgccactcaaacagtggacggtccgctttgccctcgacagccaggtgaaaaaacatttcgacctggcgggcgttcgcgcgccagtgcagacttatcaggtgctgcctgctccgggcgcgaccccggctgaaccgttgccgccgggggaaccaacgctttaa

SEQ ID NO: 768 - DNA, 723 bp, Escherichia coli
gtgattgaatttaaaaacgtctccaagcattttggtccaacccaggtgctgcacaatatcgatttgaacattgctcagggcgaagtcgtggtgattatcgggccgtccggttccggtaaatcgaccctgctgcgctgcatcaacaaactggaagaaatcacctccggcgatctgattgtcgatggcctgaaggttaacgatccgaaagttgatgagcgcctgattcgccaggaagcgggtatggtgttccagcagttttacctcttcccgcatctgacggcgctggaaaacgtcatgtttggcccgctacgcgtgcgtggcgcgaataaagaagaggcggaaaaactggcgcgtgagctgctggcgaaagtcggtctggcagagcgtgcacatcactacccttccgaactttctggtggtcaacagcagcgtgtggcgattgcccgcgcgctggcggtgaagccgaaaatgatgctgtttgatgaaccgacttccgctcttgacccggaactgcgccatgaagtgctgaaggttatgcaggatctggctgaagaagggatgacgatggtgatcgtgacccacgaaatcggttttgccgagaaagtagcttcgcgcctgatctttatcgacaaaggccggattgcagaagatggcgatccgcaggtgttgatcaagaacccgccgagccagcgcttgcaggaatttttgcagcacgtctcttaa

SEQ ID NO: 769 - DNA, 660 bp, Escherichia coli
atgcagtttgactggagtgccatctggcctgccattccgcttctgattgaaggtgccaaaatgaccctgtggatttcggtcctcggtctggctggcggtctggtgatcggattgttggcaggttttgcacgcaccttcggtggttggatagccaaccacgtcgcgctggtctttattgaagtgatccgcggcacacctatcgtcgtccaggtgatgtttatctatttcgccctgccgatggcgtttaacgatttacgcatcgacccgtttactgcggcggtggtcaccatcatgatcaactccggcgcgtacattgcggaaatcacgcgtggtgcggtgctgtctattcacaaaggttttcgtgaagcaggactggcgctcggtctttcacgttgggaaaccattcgctacgtcattttaccgctggcactgcgtcgtatgctgccgccgctgggtaaccagtggatcatcagcattaaagacacttcgctgtttattgttatcggcgtggcggaactgacccgtcaggggcaagaaattattgccggtaacttccgcgcccttgagatctggagcgccgtggcggtgttctatctgattattaccctggtgctgagctttattctgcgtcgtctggaaagaaggatgaaaatcctgtga

SEQ ID NO: 770 - DNA, 747 bp, Escherichia coli
atgaagtctgtattaaaagtttcactggctgcactgaccctggcttttgcggtttcttctcatgccgcggataaaaaattagttgtcgcgacggataccgccttcgttccgtttgaatttaaacagggcgataaatacgtgggctttgacgttgatctgtgggctgccatcgctaaagaactgaagctggattatgaactgaagccgatggatttcagtgggatcattccagcactgcaaaccaaaaacgtcgatctggcgctggcgggcattaccatcaccgacgagcgtaaaaaagcgatcgatttctctgacggctactacaaaagcggcctgttagtgatggtgaaagctaacaataacgatgtgaaaagcgtgaaagatctcgacgggaaagtggttgctgtgaagagcggcactggctccgttgattacgcgaaagcaaacatcaaaactaaagatctgcgtcagttcccgaatatcgataacgcctatatggaactgggcaccaaccgcgcagacgccgttctgcacgatacgccaaacattctgtacttcatcaaaaccgccggtaacggtcagttcaaagcggtaggtgactctctggaagcacagcaatacggtattgcgttcccgaaaggtagcgacgagctgcgtgacaaagtcaacggcgcgttgaaaaccctgcgcgagaacggaacttacaacgaaatctacaaaaaatggttcggtactgaaccgaaataa

SEQ ID NO: 771 - DNA, 504 bp, Escherichia coli
atgagtaccgctaaattagttaaatcaaaagcgaccaatctgctttatacccgcaacgatgtctctgacagcgagaaaaaagcaacagtagagttgctgaatcgccaggttatccagtttattgatctttctttgattaccaaacaagcgcactggaacatgcgcggcgctaacttcattgccgtacatgaaatgctggatggcttccgcactgcactgatcgatcatctggataccatggcagaacgtgcagtgcagctgggcggtgtagctctggggaccactcaagttatcaacagcaaaactccgctgaaaagttacccgctggacatccacaacgttcaggatcacctgaaagagctggctgaccgttacgcaatcgtcgctaatgacgtacgcaaagcgattggcgaagcgaaagatgacgacaccgcagatatcctgaccgccgcgtctcgcgacctggataaattcctgtggtttatcgagtctaacatcgaataa

SEQ ID NO: 772 - DNA, 888 bp, Escherichia coli
atgcctggttcattacgtaaaatgccggtctggttaccaatagtcatattgctcgttgccatggcgtctattcagggtggagcctcgttagctaagtcactttttcctctggtgggcgcaccgggggtcactgcgctgcgtctggcattaggcacgctgatcctcatcgcgttctttaagccatggcgactgcgctttgccaaagagcaacgattaccgctgttgttttacggcgtttcgctgggtggaatgaattatcttttttatctttctattcagacggtaccgctgggtattgcggtggcgctggagttcaccggaccactggcggtggcactgttctcttctcgtcgcccggtagatttcgtctgggttgtgctggcggttcttggtctgtggttcctgctaccgctggggcaagacgtttcccatgtcgatttaaccggctgtgcgctggcactgggggccggggcttgttgggctatttacattttaagtgggcaacgtgctggagcggaacatggccctgcgacggtggcaattggttcgttgattgcagcgttaattttcgtgccaattggaacgcttcaggctggtgaagcactctggcactggtcggttattccattgggtctggctgtcgctattctctcgaccgctctgccttattcgctggaaatgattgccctcacccgtttgccaacacgcacatttggtacgctaatgagcatggaaccggcgctggctgccgtttccgggatgattttcctcggagaaacactgacacccatacagctgctggcgctcggcgctatcatcgccgcttcaatgggttctacgctgacagtacgcaaagagagcaaaataaaagaattagacataaattaa

SEQ ID NO: 773 - DNA, 516 bp, Escherichia coli
atgaaaaaaattgcatgtctttcaacactggccgcagttctggctttcaccgcaggtacttccgtagctgcgacttctactgtaactggcggttacgcacagagcgacgctcagggccaaatgaacaaaatgggcggtttcaacctgaaataccgctatgaagaagacaacagcccgctgggtgtgatcggttctttcacttacaccgagaaaagccgtactgcaagctctggtgactacaacaaaaaccagtactacggcatcactgctggtccggcttaccgcattaacgactgggcaagcatctacggtgtagtgggtgtgggttatggtaaattccagaccactgaatacccgacctacaaacacgacaccagcgactacggtttctcctacggtgctggtctgcagttcaacccgatggaaaacgttgctctggacttctcttacgagcagagccgtattcgtagcgttgacgtaggcacctggattgccggtgttggttaccgcttctaa

SEQ ID NO: 774 - DNA, 1584 bp, Escherichia coli
atgaatttaaccctcaaagaatcgcttgttacccgtagccgggtatttagcccgtggactgcgttctactttttacagtcgctattaattaacctcggcttaggttatcccttcagtttgctctacaccgctgcgtttacggctatgttgcttttgctatggcgaacattgcctcgcgtacaaaaagttctggtcggtgtcagttcgctggtggcggcttgttatttcccttttgctcaggcctacggcgcgcctaatttcaatacattgctggcattgcactccaccaatatggaagagtcgaccgaaatcctgacgatttttccgtggtacagctacctggtcggcttatttatttttgcgctcggcgtaatagcaatcaggcgaaaaaaagagaatgaaaaagcgcgctggaataccttcgacagcctgtgtctggtattcagtgtggcggcattttttgttgctcccgtgcaaaacctggcctggggcggcgtatttaaactgaaagatactggctatccggtatttcgttttgctaaggatgtcatcgtcaataataacgaggtgattgaagagcaagaacggatggcaaaactttccggaatgaaagatacctggacggtcactgccgttaagccgaagtatcagacctatgtggtggtgatcggagaaagcgcgcgtcgcgatgccctcggtgcctttggcggtcactgggacaataccccgtttgccagcagcgttaacggtttgatatttgctgactacattgccgccagtggctccacgcagaaatcgcttggcttaacgctcaatcgcgttgtcgatggcaaaccacagtttcaggataactttgtcaccctggcaaatcgcgcgggcttccagacctggtggttttccaaccagggtcaaatcggcgaatacgataccgccatcgccagcatcgccaaacgagcagatgaagtgtacttcctgaaagaaggtaattttgaagcagataaaaacacgaaagacgaagcgttactggatatgaccgctcaagtgctggcgcaagagcactcgcaaccgcagctgattgttctacatctgatgggctcgcatccgcaggcctgcgaccggacacaaggcaaatacgaaacctttgtgcaatcgaaagaaacgtcgtgctatctctataccatgacgcaaacagacgatttactgcgcaagctgtacgatcagttacgcaacagcggcagcagcttctcgctggtttacttttctgaccacggtctggcctttaaagagcgcggcaaagacgtgcaataccttgcccatgatgataagtatcagcaaaatttccaggtgccttttatggtcatttccagcgacgataaagcgcatcgggtgattaaagcccgccgctcggccaatgacttcttaggctttttctcgcagtggacgggaattaaagcgaaggaaataaatatcaaatacccgtttatatctgagaagaaagccgggccgatatacatcaccaacttccagttacagaaggtggattacaaccatctcggaaccgatattttcgacccgaaaccttaa

SEQ ID NO: 775 - DNA, 129 bp, Escherichia coli
atgaatgagttcaagaggtgtatgcgcgtgtttagtcattctccctttaaagtacggttaatgctgctctctatgttgtgcgatatggtcaacaacaaaccgcagcaagataaaccttccgataaatag

SEQ ID NO: 776 - DNA, 468 bp, Escherichia coli
atgagtcgtcgcgcaggtacgccaacagcaaaaaaagtgacgcagttagtgaacgtggaagagcacgttgaagggttccgccaggtcagagaggcgcatcggcgcgagcttattgatgattacgttgagctgatttctgacttgatcagggaagtgggggaagctcgtcaggtagacatggctgctcgtttgggagtttcgcaaccgacggtggctaaaatgcttaagcggctggcaaccatggggctgattgaaatgatcccctggcgtggcgtgtttttaacggcagaaggagagaagctggcgcaggaaagccgcgagcgacatcagatagtcgaaaatttcttgttggtgttgggcgtcagtccggaaattgcccgtcgcgacgcggaaggcatggagcaccatgttagtgaagagacgctcgacgcttttcgtttgtttacccagaaacacggtgccaaatga

SEQ ID NO: 777 - DNA, 1119 bp, Escherichia coli
atgagcctgccttttttacgcacgctgcaaggtgatcgtttttttcagttattaattcttgttggtatcggattaagctttttcgtgccttttgcaccgaaatcctggcctgctgctatcgactggcacaccatcatcaccttaagcggcctgatgctgctgaccaaaggtgtggagttaagcggttattttgatgtgctggggcgcaaaatggtgcgccgctttgctacggagcgtcggctggcgatgtttatggtgctggcggcggcgctgctttctacctttctgaccaacgatgtcgcgctgtttattgttgttccgctgactatcacgctaaaaagactgtgtgagatcccggttaatcggctgattatttttgaagcgctggcagtcaacgctggttcgctactgacgccaattggcaacccgcaaaatattcttatctggggacgttctggtctttcgtttgccggatttattgcccaaatggcaccactggctggcgcaatgatgctgacgctcctgctcctgtgctggtgttgtttccctggaaaggcactgcaataccatacgggggtgcaaactccggagtggaaaccgcggctggtgtggagttgtctggggctgtatatcgtctttctgacggcgctggagttaaaacaagagctgtggggactggtgattgtggcggcgggctttgcgctgctggcacgtcgcgtggtgttgagtgtggactggacgctgctgctggtgtttatggcgatgtttatcgacgtccatttactaacccaactgccagctttgcagggggtgttaagtaacgtgagtcatttatccgaacccggattatggttaacggcaatcggtttatcgcaggtgatcagtaacgtgccgagtaccatattgttgctgaactatgtgccgccgtcgttgctgctggcatgggcggtaaacgtggggggctttggtttattacccggatcgctggcaaatttgattgcgttacggatggcgaacgatcgccgtatctggtggcgttttcatctttattcgataccgatgctgttgtgggcggcgctggtgggatatgttttgttggttatgatcccggcgggataa

SEQ ID NO: 778 - DNA, 921 bp, Escherichia coli
atgaatatgaaattgaaaacattattcgcagcggccttcgctgttgtcggcttttgcagtaccgcctctgcggtaacttatcctctgccaaccgacgggagtcgcctggttggtcagaatcaggtgatcaccattcctgaaggtaacactcagccgctggagtattttgccgccgagtaccagatgggactttccaatatgatggaagcgaacccgggtgtggataccttcctgccgaaaggcggtactgtactgaacattccgcagcagctgatcctgccggataccgttcatgaaggcatcgtcattaacagtgcagagatgcgtctgtattactatccgaaagggaccaacaccgttatcgtgctgccgatcggcattggtcagttaggcaaagacacgcctatcaactggaccaccaaagttgagcgtaaaaaagcaggcccgacctggacgccgaccgctaaaatgcacgcagagtaccgcgctgcgggcgaaccgcttccggcggtcgttccggctggtccggataacccgatggggctgtatgcactctacatcggtcgcctgtacgctatccatggcaccaacgccaacttcggtatcggcctgcgtgtaagtcatggttgtgtgcgtctgcgtaacgaagacatcaaattcctgttcgagaaagtaccggtcggtacccgcgtacagtttattgatgagccggtaaaagcgaccaccgagccagacggcagccgttatattgaagtccataacccgctgtctaccactgaagcccagtttgaaggtcaggaaattgtgccaattaccctgacgaagagcgtgcagacagtgaccggtcagccagatgttgaccaggttgttctggatgaagcgatcaaaaatcgttccgggatgccggttcgtctgaattaa

SEQ ID NO: 779 - DNA, 1593 bp, Escherichia coli
gtgttagtttccagtaacgtcaccatgcagttcggcagtaagccgttgtttgaaaacatttccgtcaaattcggcggcggcaaccgttacggcctgattggcgcgaacggtagtggtaaatccacctttatgaagatcctcggcggcgacttagagccgacgttgggtaacgtttccctcgatcccaacgagcgcattggtaagctgcgtcaggatcagtttgcctttgaagagttcactgtgctggatacggtgatcatggggcataaagagttgtgggaagtgaagcaggagcgtgaccgcatctatgctttgccggaaatgagtgaagaagacggctataaagtggccgatctggaagtgaaatacggcgaaatggacggttactctgcggaagctcgcgctggtgaactgttgcttggcgtgggaattccagtggaacagcactacggcccgatgagtgaagttgctcctggctggaagctgcgtgtgctgctggcgcaggcgctgtttgctgatccggacattctcctgctcgacgaaccgaccaacaacctcgacatcgacaccattcgctggctggaacaggtgctgaatgagcgtgacagcaccatgatcatcatctcgcacgaccgtcacttccttaacatggtttgtacccacatggcggatctggattacggcgagctgcgcgtttatccgggcaactacgatgagtacatgacggcggcgacccaggcgcgtgagcgtctgctggctgataacgccaagaagaaagcgcagattgctgagctgcaatctttcgttagccgctttagtgccaacgcctcgaaatctcgccaggcaacttcgcgcgcgcgccagattgataaaatcaaactggaagaggtgaaagcctccagccgtcagaacccgttcatccgttttgagcaggataagaaactgttccgtaacgcgctggaagtggaaggtctgaccaaagggtttgataacggtccactgtttaaaaatctcaacctgctgttggaagtgggtgaaaaactggctgtactgggtaccaacggcgtcggtaaatcaacgctgctgaaaacgctggtgggcgatctgcaaccggacagcggcaccgtaaaatggtctgagaacgcgcgcattggttactacgcccaggaccatgaatatgagttcgaaaatgatctgaccgtgttcgaatggatgagtcagtggaagcaggaaggcgatgacgagcaggcggtacgcagcattctcggtcgtttgctgttcagtcaggacgacatcaaaaagcctgccaaagtgctttccggtggggaaaaagggcggatgctgtttggtaagttgatgatgcagaagccgaacattctgatcatggacgaaccgaccaaccacctggatatggaatccattgagtcgctgaacatggcgctggaactgtatcagggcacgctgatctttgtttctcacgaccgtgagtttgtaagctccctggcgacccgtattctggaaatcaccccggaacgcgtgatcgactttagcggtaattacgaagattacctgcgtagtaaagggatcgagtaa

SEQ ID NO: 780 - DNA, 816 bp, Escherichia coli
atgagcgtaaaagttatcgtcacagacatggacggtacttttcttaacgacgccaaaacgtacaaccaaccacgttttatggcgcaatatcaggaactgaaaaagcgcggcattgagttcgttgtcgccagcggtaatcagtattaccagcttatttcgttctttcctgagctaaaggatgagatctcttttgtcgcggaaaacggcgcactggtttacgaacatggcaagcagttgttccacggcgaactgacccgacatgaatcgcggattgttattggcgagttgctaaaagataagcaactcaattttgtcgcctgcggtctgcaaagtgcatatgtcagcgaaaatgcccccgaagcattcgtcgcactgatggcaaaacactaccatcgcctgaaacctgtaaaagattatcaggagattgacgacgtactgttcaagttttcgctcaacctgccggatgaacaaatcccgttagtgatcgacaaactgcacatagcgctggatggcattatgaaacccgtcaccagtggttttggctttatcgacctgattattcccggtctacataaagcaaacggtatttcgcggttactgaaacgctgggatctgtcaccgcaaaatgtggtagcgattggcgacagcggtaacgatgcggagatgctgaaaatggcgcgttattcctttgcgatgagcaatgctgcggaaaacattaaacaaatcgcccgttacgctaccgatgataataatcatgaaggcgcgctgaatgtgattcaggcggtgctggaaaataaaccgccgtttaatctttga

SEQ ID NO: 781 - DNA, 2433 bp, Escherichia coli
atgaccacactaaaactggatacgctcagcgaccgcattaaagcgcacaaaaatgcgctggtgcatattgtgaaaccgcctgtctgtaccgaacgagcacaacactataccgagatgtatcaacaacatctcgataagccgatcccggtacgtcgcgcgctggcactggcgcatcacctggcgaatcgcaccatctggatcaagcacgatgagttgatcattggcaaccaggcaagcgaagttcgcgccgcgccgatcttcccggaatatactgtctcatggatcgaaaaagagattgatgatctggcagatcgtcccggtgctggctttgcggtgagcgaagagaacaaacgcgttctgcatgaagtgtgcccgtggtggcgcggtcagaccgtacaggatcgctgctacggcatgtttaccgatgagcaaaaaggtctgctggcgaccggcatcattaaagcggaaggcaatatgacctccggcgatgcgcacctggcggtcaatttcccggtgctgctggaaaaagggcttgatggtctgcgcgagaaagtagcggaacgtcgctcgcgcatcaacctgacggtgctggaagatttacacggtgagcaattcctgaaagcgattgatatcgtgctggtggcagtcagtgaacacattgaacgtttcgctgccctggcgcgtgaaatggccgcgaccgaaacccgcgaaagccgtcgcgatgaactgctgacgatagcagaaaactgcgatcttatcgcccaccagccgccgcagactttctggcaggcgctgcaactatgttacttcatccagttgattttgcagatcgaatctaacggtcactcggtatcgtttggtcgtatggaccagtatctctacccatactatcgccgcgacgttgaactgaaccagacactggatcgcgaacacgccatcgagatgctgcatagctgctggttgaaattgctggaagtgaacaaaatccgctccggctcacactcaaaagcctctgcgggaagtccgctgtatcagaacgtcaccattggcgggcaaaatctggttgatggtcaaccgatggacgcggtaaatccactctcttatgcgatcctcgaatcttgcggtcgcctgcgttcgactcagcctaacctcagcgtgcgttaccatgcgggtatgagtaacgatttcctcgacgcctgtgtgcaggtgatccgctgcggcttcgggatgccggcgttcaacaacgatgaaatcgtcatcccggaatttattaaactcggtattgaaccgcaggacgcttacgactatgcagcgattggttgtatcgaaaccgccgtcggtggcaaatggggctatcgctgtaccggcatgagctttatcaacttcgcccgcgtgatgctggcggcgctggaaggcggtcgtgatgccaccagcggcaaagtgttcctgccacaagaaaaagcgttgtcagcgggtaacttcaacaacttcgatgaagtaatggacgcatgggatacgcaaatccgttactacacgcgtaaatcaatcgaaatcgaatatgtcgtcgataccatgctggaagagaacgtacacgatattctctgctcggcgctggtcgatgactgtattgagcgagcgaaaagtatcaagcaaggcggcgcgaaatatgactgggtttctggcctgcaggtcggcattgctaacctcggcaacagcctggcggcagtgaagaaactggtatttgaacagggcgcgattggtcagcaacagctggctgccgcactggcggatgacttcgacggtctgactcacgagcagctgcgtcagcggctgattaacggtgcgcctaagtacggcaacgacgatgatactgtcgatacgctgctggctcgcgcttatcagacctatatcgacgaactaaaacagtaccataacccgcgctatggtcgtggtccggttggcggcaattattacgcgggtacgtcatctatctccgctaacgtaccctttggcgcgcagacgatggcaacgccggacggacgtaaagcgcataccccgctggcagaaggcgctagtccggcctccggtactgatcatcttggccctactgcggtcattggctcagtgggtaaactgcctacggccgcgattctcggcggcgtgctgctcaaccagaaactgaatccagcaacgctggagaacgaatctgacaagcagaaactgatgatcctgctgcgcaccttcttcgaggtgcataaaggctggcatattcagtacaacatcgtttcccgcgaaacgctgctggaagcgaaaaaacatccggatcagtaccgcgatctggtagtgcgtgtcgcgggctattccgccttcttcaccgcgctctctccagacgctcaggacgatatcatcgcccgtactgaacatatgctgtaa

SEQ ID NO: 782 - DNA, 900 bp, Escherichia coli
atgattttcaatattcaacgctactcgacccatgatggccccggtatccgcacggtcgtatttcttaaaggctgttcgctgggttgccgctggtgtcagaacccggaaagccgcgcccgcacgcaggatctgctgtatgacccacgactctgtctggaaggctgtgagctgtgcgctaagaccgcaccggaagtgattgagcgcgcgttgaatggtttgcttattcatcgggaaaagttaaccccggagcattttacggcgctaaccgactgctgcccaacacaggcgttaaccgtgtgtggtgaagtgaaaagcgttgaggagatcatggcaaccgttttgcgcgataaaccgttttacgatcgcagcggcggcggcttaacactttctggcggagaaccgtttatgcagccggaaatggcgatggggctactgcaagccagccacgaagccggtattcatactgcggtagaaacctgtctgcatgtgccgtggaaatatatcgccccttctctgtcctatatcgatctgtttcttgccgatttaaaacacgttgccgacgcgccgtttaaacagtggaccgacggtaacgccgccagggtgctggataacctgaaaaaactcgccgcagccggcaaaaaaatcattatccgcgtgccactgattcaaggctttaatgccgacgaaacttctgtgaaagccattaccgattttgccgccgacgagctgcacgttagcgaaattcattttctgccctaccacacactgggcatcaacaaatatcacttacttaatctgccctatgacgccccggaaaaaccgcttgatgcgccagaactgctcgactttgcccagcagtatgcctgccagaaagggttaaccgcgaccttacgaggataa

SEQ ID NO: 783 - DNA, 663 bp, Escherichia coli
atggaactgtatctggatacttcagacgttgttgcggtgaaggcgctgtcacgtatttttccgctggcgggtgtgaccactaacccaagcattatcgcagcgggtaaaaaaccgctggaggttgtgcttccgcaacttcacgaggcgatgggcggtcaggggcgtctgtttgcccaggtaatggctaccactgctgaagggatggtgaatgacgcacgtaaattgcgttctattattgcggatatcgtggtgaaagttccggtgaccgctgagggactggcagcgattaagatgttgaaagcagagggtatcccgacgctgggtaccgcggtgtatggcgctgcgcaagggctgttatcggcgctggcaggtgcggagtatgttgcgccttacgttaatcgtattgatgctcagggcggtagtggtattcagactgtgaccgacttacaccagttattgaaaatgcatgcgccgcaggcgaaagtgttagccgcgagtttcaaaaccccgcgtcaggcgctggactgcttactggcaggatgtgaatcaattactctgccgctggatgtggcacaacagatgattagctatccggcggttgatgccgctgtggcgaagtttgaacaggactggctgggagcgtttggcagaatgtcgatttaa

SEQ ID NO: 784 - DNA, 750 bp, Escherichia coli
atggcggaactcagcgatcaggagatgctgcgctacaaccggcaaatcattctgcgcggttttgattttgacggtcaggaagcattgaaagattcccgcgtgctggtcgtcggccttggtggactcggctgcgcagcttcgcagtatctggcaagcgccggtgtcggcaacctgacgctgctcgacttcgacacggtttcgctctccaatctgcaacgccagacgctgcacagtgatgccacggtcgggcaaccaaaggtggaatccgcccgtgacgccctgacgcggatcaacccacatatcgcgattacgccagtcaatgcgctgcttgatgacgctgaacttgctgcgatgattgcaaaacacgatctggtgctcgactgtacggataacgttgcagtacgtaatcaactgaacgcaggctgttttgccgcgaaggtgccgctggtttccggcgcggcaattcgtatggaagggcaaatcacggtcttcacttatcaggacggcgaaccgtgctatcactgccttagccgtttgtttggcgagaacgcgttaacctgcgtagaagcaggcgtgatggcaccgttgatcggggtgattggttcgttgcaggcaatggaagcgatcaaactgctggccggttatggcaaaccggccagcggaaaaatcgtgatgtacgatgcgatgacctgtcagtttcgcgaaatgaaactgatgcgtaatccggggtgtgaggtgtgcgggcagtaa

SEQ ID NO: 785 - DNA, 1236 bp, Escherichia coli
atggaatttaccaccggattgatgtcgctcgacaccgcgcttaatgagatgctttctcgcgttaccccactgaccgcccaggaaacgctgccactggttcagtgttttggccgtattctggcgagcgatgtcgtttcgccactggatgtcccggggtttgataactccgctatggacggctacgcggtgcgtttagccgatattgcctccgggcaaccgctgcccgttgccggtaaatcctttgccggtcagccgtaccatggtgaatggcctgcgggtacctgcattcgtattatgaccggtgcgccggtgccggaaggctgcgaagcggtggtgatgcaggagcagactgaacaaacggacaatggcgtgcgttttactgctgaagcgcgtagcgggcaaaatattcgccgtcgcggtgaagatatctctgcaggtgcggttgttttcccggcggggactcgcctgactaccgctgaactgccagtgattgcttcgctagggattgccgaagttccggtgattcgtaaagtgcgtgtagcgcttttttctaccggtgatgaactccagttgcccggtcagccgctgggcgacggccaaatctacgataccaaccgtctcgccgtacacctgatgttagaacagttgggatgcgaggtaatcaacttagggattatccgcgacgatccccatgccctgcgcgccgcatttattgaagccgacagccaggcggatgtggtgatcagttccggcggtgtttcagtgggtgaagcggattacaccaaaacgattcttgaagagctgggggagattgccttctggaaactggcgattaaaccgggtaaaccgttcgcattcggtaaacttgctaatagttggttctgcggcctgccgggcaacccggtttcagcgacgctgaccttctatcaactggtacagcctttgctggcaaaactaagcggcaataccgccagtggcctgcccgcgcgccagcgtgtacgcacagcgtcccgcctgaaaaaaacgccaggacgccttgatttccagcgcggcgtgctgcaacgcaacgccgatggcgaactggaagtgacgaccaccggacatcagggttcacatatatttagctcctttagcctcggcaactgctttatcgtgctggaacgcgatcgcggcaatgttgacgtgggcgaatgggtggaagtagaaccgtttaacgcgttgttcggaggcctgtaa

SEQ ID NO: 786 - DNA, 966 bp, Escherichia coli
atgggcaaagcagtcattgcaattcatggtggcgcaggtgcaattagccgcgcgcagatgagtctgcaacaggaattacgctacatcgaggcgttgtctgccattgttgaaaccgggcagaaaatgctggtagcgggcgaaagtgcgctggatgtggtgacggaagcggtgcgtctgctggaagagtgtccactgtttaacgccggaattggcgctgtctttacgcgtgatgaaacccatgaactggacgcctgtgtgatggatggtaacaccctgaaagccggtgcggtggcgggcgttagtcatctgcgtaatccggttcttgtcgcccggctggtgatggagcaaagcccgcatgtgatgatgattggcgaaggggcagaaaattttgcgtttgctcatggcatggagcgcgtctcgccggagattttctccacacctttgcgttatgaacaactaatggcagcgcgcgaggaaggggcaacagtcctcgaccatagcggtgcgccactggatgaaaaacagaaaatgggcaccgtaggggccgtggcgttggatttagacggcaatctggcggcagccacgtccacgggcggaatgaccaataaattacccggacgagttggcgatagtcccttagtgggggccggatgctatgccaataacgccagtgtggcggtttcctgtaccggcacgggcgaagtcttcatccgcgcgttggcggcatatgatatcgccgcgttaatggattacggcggattaagtctcgcggaagcctgcgagcgggtagtaatggaaaaactccctgcgcttggcggtagcggtggcttaatcgctatcgaccatgaagggaatgtcgcgctaccgtttaacaccgaaggaatgtatcgcgcctggggctacgcaggcgatacgccaaccaccggtatctaccgtgaaaaaggggacaccgttgccacacagtga

SEQ ID NO: 787 - DNA, 1872 bp, Escherichia coli
ttgccacacagtgatgaacttgatgccggtgatgtgctggcggttgaaaatctgaatattgcctttatgcaggagcagcagaaaatagctgcggtccgcaatctctcttttagcctgcaacgtggtgagacgctggcaattgttggcgaatccggctccggtaagtcagtgactgcgctggcattgatgcgcctgttggaacaggcgggcggtttagtgcagtgcgataaaatgctgttgcagcggcgcagtcgcgaagtaattgaacttagcgagcagagtgctgcacaaatgcgccatgtgcgcggggcggatatggcgatgatatttcaggagccgatgacatcgctgaacccggtatttactgtgggtgaacagattgccgaatctattcgtctgcatcagaacgccagtcatgaagaagcgatggtcgaggcgaagcggatgctggatcaggtacgcattccggaggcacaaaccattctttcacgttatccgcatcaactctctggcgggatgcgccagcgagtgatgattgcgatggcgctgtcatgccgcccggcggtgctgattgccgatgagccaaccaccgcgctggatgtcactattcaggcgcagatcctgcaattaatcaaagtattgcaaaaagagatgtcgatgggcgttatctttatcactcacgatatgggtgtggtggcagagattgccgatcgggtactggtgatgtatcagggcgaggcggtggaaacgggtagcgtcgaacagatttttcatgcaccgcaacatccttatacccgtgcgctgttagctgctgttccgcaacttggtgcgatgaaagggttagattatccccgacgtttcccattgatatcgcttgaacatccagcgaaacaggagccacccatcgagcagaaaacggtggtggatggcgaacctgttttacgggtgcgtaatctggtctcccgtttccctttgcgcagcggtttgttgaatcgcgtaacgcgggaagtgcatgccgttgagaaagtcagttttgatctctggcctggtgaaacgctatcgctggtgggcgagtctggcagcggtaaatccaccaccgggcgggcgttgctgcgcctggtcgaatcgcagggcggcgaaattatctttaacggtcagcgaatcgataccttgtcacccggtaaacttcaggcattgcgccgcgatattcagtttatttttcaggacccttacgcttcgctggacccacgtcagaccatcggtgattcgattctcgaaccgctgcgcgtacacggtttattgctaggtaaggaagcggctgcacgcgttgcgtggttgctggagcgcgtgggtctgttaccggaacatgcctggcgttaccctcatgagttttccggcggtcagcgccagcgcatctgcattgctcgcgcgttggcattgaatccaaaagtaatcattgccgacgaagccgtctcggcgctggatgtttctattcgcgggcagattatcaacttgttgctcgatctccagcgtgatttcggcattgcgtatctgtttatctcccacgatatggccgtggttgagcggattagtcatcgtgtggcggtgatgtatctcgggcaaattgttgaaattggtccacggcgcgcggtctttgaaaatccgcagcacccttatacgcgtaaattactggcggcagttccggtcgctgaaccgtcccgacaacgaccgcagcgtgtactgctgtcggacgatcttcccagcaatattcatctgcgtggcgaagaagttgcagtcgtctcgttgcaatgcgtcgggccggggcattacgtcgcacaaccacaatcagaatacgcattcatgcgtagataa

SEQ ID NO: 788 - DNA, 1539 bp, Escherichia coli
atggcaagagctgtacaccgtagtgggttagtggcgctgggcattgcgacagcgttgatggcatcttgtgcattcgctgccaaaaatgtggtggtggcggtgggctcgaacttcaccacgctcgatccgtatgacgcaaatgacacgttatctcaggccgtagcgaaatcgttttaccaggggctgttcggtctggataaagagatgaaactgaaaaacgtgctggcggagagttataccgtttccgatgacggccttacttacaccgtgaaattgcgggaaggcattaaattccaggatggcaccgatttcaacgcagcggcggtgaaagcgaatctggaccgggccagcgatccggcgaatcatcttaaacgctataacctgtataagaatattgccaaaacggaagcgatcgatccgacaacggtaaagattaccctcaaacagccattctcagcgtttattaatattcttgcccatccggcgaccgcgatgatttcaccggcagcgctggaaaaatatggcaaggagattggttttcatccggtgggaaccgggccgtatgaactggatacctggaatcagaccgattttgtgaaggtgaaaaaattcgtgggttactggcagccaggattgcccaaactggacagcataacctggcgtccggtggcggataacaacacccgcgcggcaatgctgcaaaccggtgaagcgcagtttgctttccccattccctacgagcaggccgcactgctggagaaaaacaaaaatatcgagttgatggccagtccgtcaattatgcagcgttatatcagtatgaacgtgacgcaaaagccgttcgataacccgaaggtccgtgaggcgctgaattacgccattaaccgcccggcgctggtgaaagtggccttcgcgggctatgcaacgccagctactggtgtggtaccgccgagtatcgcctacgcgcaaagttataaaccgtggccttacgatccggcgaaagcgcgcgaattactgaaagaggcgggatatcccaacggtttcagtaccacgctgtggtcgtcacataaccacagcactgcgcagaaagtgctgcaatttacccagcagcagttagcgcaggtcgggattaaagcccaggtgactgcgatggatgccggacagcgggcggcagaagttgaaggtaaagggcaaaaagagagcggcgtgcggatgttctacactggctggtcggcttcaaccggcgaagcagactgggctctatcgccgctgtttgcctcgcaaaactggccaccgacgctgtttaataccgcgttttacagcaataaacaggtggatgacttcctggctcaggcactgaaaactaatgatccggcggaaaagacccgtttatataaggcggcgcaggatatcatctggcaagagtcgccgtggatcccgctggtggtagaaaaactggtgtcggcacacagtaaaaacctgaccggtttttggatcatgccagacaccggcttcagctttgaagacgcggatttgcaataa

SEQ ID NO: 789 - DNA, 921 bp, Escherichia coli
atgcttaattacgttatcaaacgcttgctggggttgattccgacgctgtttatcgtctcggtgctggtgtttttatttgtccatatgctgcccggcgatccggcgcgattgattgccgggcccgaagctgatgcgcaggttatagaactggtgcgtcagcagctggggttggatcagccgctgtatcaccagttctggcactatatcagcaatgctgtgcagggggattttggcctgtcgatggtgtcgcgtcgtccggttgccgatgagattgccagccgctttatgccaacgctgtggctgaccataaccagtatggtctgggcggtgatatttggtatggcggcgggaattatcgccgccgtctggcgtaaccgttggccggatcgattgagtatgaccattgcggtgtcggggatctcgtttccggcatttgcgctggggatgcttttaattcaggtattctccgttgaacttggctggctgcctaccgtgggagcagacagttggcagcactacattttaccctccctgacgctcggcgcggcagtggcagccgtgatggcgcgctttacccgcgcgtcgtttgtcgacgttttaagcgaagattatatgcgtaccgcgagggcgaaaggggtgagcgaaacctgggttgtcctcaaacacgggctacgcaacgcgatgatcccggtagtgaccatgatgggcttacagtttggatttttactcggtggttccatcgtggtggagaaagttttcaactggcccggacttggacgcttactcgttgactccgttgaaatgcgcgattacccggtgattcaggcggaaattctgcttttctcgctggaatttattcttatcaacttagtggtggatgtgctttacgccgccattaacccggctatcaggtacaagtaa

SEQ ID NO: 790 - DNA, 912 bp, Escherichia coli
atgcgactatttaactggcgacgtcaggcggcgttaaacgccatgccactggtcaaacctgaccaggtacgtacaccgtggcatgaattctggcgacgatttcgccgtcagcatatggcgatgaccgccgcattgttcgttattttattgattgtggtggccatttttgcacgctggatcgctccctatgacgccgaaaattattttgattatgacaatctgaataacggaccttctttgcagcactggtttggtgtcgattcactggggcgcgacattttcagccgtgtcctggttggtgcgcaaatctcgctggcggcgggcgtgtttgccgtgtttatcggtgcggcgatcgggacgttgctgggcttgctggctggatattatgaaggctggtgggatcggctgatcatgcgcatttgcgatgtgttgtttgccttcccgggtattttactggcgatcgctgttgttgcggtgttgggaagcggcattgctaacgtgattatcgcagtcgccattttttccatccccgcgtttgcccggctggtgcgcggcaacacgctggtgttgaaacagcaaacctttatcgagtcagcacgcagtattggtgccagcgatatgaccattttgttgcgtcatatcttgcctgggaccgtctcttctatcgtggtgtttttcaccatgcgcattggcacctcgattatctctgccgccagcctgtcatttctcggcctcggtgcgcagccgccgacaccagagtggggagcaatgctcaatgaggcacgagcggatatggttatcgcgccgcatgtcgctgtttttccggccctggctatttttctgaccgtactggcgttcaatttgttgggcgatggtttacgcgatgcgctggatccgaaaattaaaggatag

SEQ ID NO: 791 - DNA, 2349 bp, Escherichia coli
atgctgagtttatacgaaaagataaagataaggctgataattttatttttattggcagcactgtcatttattggtctttttttcatcattaactatcaactggtatcggaacgcgcggtaaaacgtgccgatagccgctttgaacttattcagaaaaacgttggctatttctttaaagatattgaacgttcggccctgacattaaaggactcactgtatttattaaaaaatacagaggagattcaacgtgccgtgattctgaaaatggaaatgatgccatttttagactcggtgggactggtacttgatgataataaatattatctcttttcgcggagggcgaatgataaaatcgttgtttatcatcaggaacaagtaaatggaccgcttgtcgacgagtcagggcgggttatttttgccgattttaacccatcgaaacgaccgtggtcgatggcttcagatgactctaacaacagctggaatccggcatacaattgctttgatcgtccgggtaaaaaatgtatctcttttacgctacacatcaacggcaaagatcatgatttgttagcggtagataaaattcatgtcgatttaaactggcgatatctgaacgagtatcttgatcacatcagcgctaatgatgaagttctatttttaaagcaaggtcatgagatcattgctaagaatcaactcgctcgtgaaaaattgattatttataatagcgaaggtaattataatattattgattctgtcgatacggaatatattgaaaaaacatcagcggtgccaaacaacgcattattcgaaatctatttttattatcctggtggtaatttattgaacgcatcagataaacttttttatctgccgtttgctttcattattatcgtattgctggtggtttatttaatgaccactcgagtgttccgtcggcaattttctgaaatgacagatttggtcaatacgctggcgtttttgcccgactctacggatcaaatcgaggctctgaagattcgtgaaggcgatgcgaaagagattatcagcatcaaaaattcgatcgcggaaatgaaagatgctgaaattgaacgggcaaataaattgctctcgctgatctcttacgatcaggaaagcggttttattaaaaatatggcgattattgagtccaacaataatcagtatctggctgtggggatcatcaaactgtgtggtctggaagctgtggaagcggtgtttggtgttgatgaacgcaataaaatcgtcaggaaattgtgtcagcgaattgccgagaaatatgcgcaatgctgcgatatcgtgacatttaatgccgatctctatttactcctgtgccgggaaaatgtacagacgtttacccgtaagatagcgacggtaaacgattttgacagcagttttggctaccgcaatctgcgcatccataagtctgctatttgtgaacctttgcagggggaaaacgcctggagttacgcagaaaagctgaaactggcgatttccagtatccgcaaccatatgttctcagagtttattttctgtgatgatgcgaaactcaacgaaatagaagagaatatctggattgcgcgtaatattcgccatgcaatggaaattggcgaactattcctggtctatcaaccgattgttgatattaacacccgcaccattttgggcgcggaggcgttgtgccgttgggtgtctgcggagcgggggattatttcaccgctgaagttcattaccattgctgaagatatcgggtttatcaatgagctgggctatcaaattattaaaaccgcgatgggtgaattcagacattttagtcagcgtgcgtcgctgaaggatgatttcttactgcatattaatgtttcgccctggcagttaaacgaaccacactttcatgagcgttttactaccatcatgaaagaaaatggcctgaaggcgaacagcctttgtgttgagatcaccgaaaccgtgatcgagcgaattaatgaacatttctatctcaatattgaacaactgcgtaaacaaggggtacgggtatcgattgatgactttggcaccggtttgtcaaacctgaaacgtttttatgaaattaatccagacagtataaaggtggattcgcaatttaccggcgatattttcggtactgcaggaaaaattgtgcgcattattttcgatctggcacgctataaccggatcccggtgattgcggaaggcgtagagagcgaagacgttgcgcgtgaattaatcaaattaggatgtgttcaggctcaggggtatctgtaccagaaacccatgccattctccgcctgggataaaagtggaaaattagtaaaagagtag

SEQ ID NO: 792 - DNA, 1329 bp, Escherichia coli
atgtccagaatcaataaattcgtacttacagtcagtctgctgatttttatcatgatttcagcagttgcctgcgggatctacactcaaatggtaaaggaacgggtgtatggcctgaaacagtccgttattgatactgcttttgcggtggcaaatattgctgaatatcggcgtagtgtggcaattgatctcatcaacacgctaaatcctacggaggaacagctgttggttggcttacgcacagcttacgccgactcggtttcaccctcttatttgtacgatgtcggtccttatctgatttccagtgacgaatgtattcaggtaaaggagttcgagaaaaattattgtgcagatattatgcaggttgttaagtatcgacatgtcaaaaatacagggtttatctcttttgatggtaaaaccttcgtctattacctctatccggtaactcacaatcgtagtctgatatttttgcttggtctggaacgtttttctttactgtcaaaatcgctggcgatggatagcgagaacctgatgttctccctgttcaagaacggtaaatcggtgaccggtgatgaatataacgctaaaaacgccatcttcaccgtttcggaagcaatggagcacttctcctatttgccgaccgggttgtacgtatttgcttataaaaaagacgtttattttcaggtatgtacattgattattttctttgccgcattggtggcagtgatatcgggtgccagttgcctctatctggtacgcagagtgattaatcgtggtattgtggagaaagaagccattattaataaccattttgaacgcgtactggatggcgggcttttcttttcggctgccgatgtcaaaaaactctacagtatgtataactcggcattcctggacgatctgaccaaagcgatgggcagaaaatcttttgacgaagatttaaaagcgctgccggaaaaaggcggttatttgtgcctgtttgacgtcgataaattcaaaaacattaacgacaccttcggtcatttgctgggcgatgaagtgttgatgaaagtggtgaaaatccttaaatcacagatcccggtagataaaggtaaagtttaccgcttcggaggtgacgaatttgcggtgatttatactggcggcacgctggaagagttgctatcgattctaaaagaaatcgttcatttccaggtgggaagcattaatttaagcaccagtatcggtgtagcgcattcaaatgaatgtactaccgttgaacgtttgaaaatgctggcggatgagcggctgtataagagtaagaaaaacggcagggcgcagattagctggcagtaa

SEQ ID NO: 793 - DNA, 1326 bp, Escherichia coli
atgagcaaagtaactccccagccgaaaatcggctttgtttcccttggctgtccgaaaaaccttgtcgattcagagcgtattctcaccgaactacgcactgaaggttatgacgtggtaccgagctatgatgatgcggacatggtgatcgtcaacacctgcggctttattgacagcgcggtacaagaatcactggaagccattggtgaagcgttgaatgaaaacggcaaggtaattgtgaccggttgtctgggggcaaaagaagatcagatccgcgaagtccacccgaaagtgctggaaatcaccgggcctcatagctatgagcaggttctggagcacgttcatcactacgtgccaaaaccgaaacacaacccattcctgagcctggtgccagaacaaggtgtgaaactgacgccgcgtcattatgcctatctgaaaatttctgaaggctgtaatcaccgctgcaccttctgcattattccgtctatgcgcggcgatctggtgagccgtccgattggcgaagtgttaagtgaagcgaaacgtctggttgatgcgggcgttaaagaaattctggtgatctcgcaggatacttccgcgtatggcgtcgatgttaaacatcgtactggcttccacaacggcgagccggtaaaaaccagcatggtcagcctgtgcgaacagttatcgaaactggggatctggacacgtctgcactacgtttacccttatccgcatgtggacgacgtcatcccactgatggcagagggcaaaatcctgccgtatctggacattccgttgcagcacgccagcccgcgcattctcaaactgatgaaacgtccgggttctgtagatcgccaactggcgcgcatcaaacagtggcgcgaaatctgcccggaactgaccctacgctcaacctttattgttggcttccctggcgagacggaagaagatttccagatgctactcgacttcctgaaagaagcacgtctggatcgcgttggctgctttaaatacagcccggttgaaggtgcagacgccaatgccctgcctgaccaggttccggaagaagtgaaagaagaacgctggaaccgtttcatgcagttgcagcagcaaatttccgccgagcgcctgcaagagaaagtgggccgtgaaattctggtgattatcgacgaagtggacgaagaaggcgcgattggtcgcagcatggcagatgcaccggaaatcgacggcgcggtttatctcaatggtgaaaccaacgttaagccgggtgatatcctgcgagtgaaagtcgagcacgccgatgagtacgatttgtggggtagccgggtttaa

SEQ ID NO: 794 - DNA, 384 bp, Escherichia coli
atgttcgttgacagacagcgaatcgatatgctgaaccggttgatcgacgcacgcgttgacctcgcagcatacgtgcaactgaggaaggcaaaaggatacatgtccgtcagcgaaagcaatcatctacgagataacttttttaaactgaatcgcgaactgcacgataaatcgctgcggttgaatcttcatctggatcaggaagaatggagtgctcttcatcatgctgaagaagcattagcgacagccgcagtatgtttgatgagtgggcaccatgattgcccgactgttattaccgtcaacgccgataagcttgaaaattgtctgatgagcttaacgctgagtatccagagcctgcagaagcacgccatgcttgagaaggcctga

SEQ ID NO: 795 - DNA, 1116 bp, Escherichia coli
atgcatcgacaatcctttttccttgtgccccttatttgtctttcttccgctctctgggcagctcctgcaacggtaaatgtcgaagtactgcaagacaaactcgaccatccctgggcgctggcctttttacccgataatcacggtatgttaatcactctgcgcggcggcgagttgcgtcactggcaagcaggaaaaggattatctgcgccgctttccggagtgccggacgtttgggcgcacgggcagggcggcctgctggacgtggttttagcgcccgattttgctcagtcgcgccgcatctggttaaattattccgaagttggcgatgatggcaaagccggaactgctgtgggttatggccgcttaagtgatgatctctcaaaagtgaccgacttccgcaccgtctttcgtcagatgccaaaactgtctaccggcaaccattttggcgggcggatggtattcgacggtaaaggttatctttttattgctctgggcgaaaacaatcagcgcccgacggcgcaggatctggataaattacagggcaaactggtgcgtctgaccgacctgggagaaatcccggatgataatccttttataaaggaatccggtgtgcgcgccgagatctggtcttatggcattcgtaatccgcaaggaatggcgatgaatccgtggagtaatgcactatggctgaatgaacatggcccgcgcggtggtgatgaaattaatattccgcaaaaaggcaaaaactacggctggccgctggcaacctggggaatcaactattcgggctttaagataccggaagcgaaaggggagatcgtcgccgggaccgagcaacctgttttttactggaaagattcgcccgccgtgagcggcatggccttctataacagcgacaaattcccccagtggcagcaaaaattatttattggcgcgctgaaagataaagatgtcattgtgatgagcgtcaacggcgacaaagtgacagaagatggccgtattttaacggacagagggcagcgaattcgtgatgttcgcactggacccgacggttatttatacgttctcaccgacgagtccagtggggaattacttaaagttagcccacgcaattag

SEQ ID NO: 796 - DNA, 627 bp, Escherichia coli
atgattacgctgtggggtcggaataattcaaccaacgtaaaaaaagtattgctgacgctcgaagaactggaactaccttatgagcaaattctcgcgggccgtgagtttgggataaatcacgatgctgattttctggcgatgaaccctaacgggctggtgccgttgttgcgtgacgacgaaagtgatctcattctttgggaatcaaacgccattgtccgctatctggcggcacagtacgggcaaaaacgcctgtggatcgactcaccggcacgtcgtgcggaagcagaaaaatggatggactgggcaaaccagacgctcagtaatgctcatcgcgggatcctgatgggattagtcagaacaccaccggaagagcgcgatcaggccgccattgatgccagttgcaaagagtgcgacgccctgtttgccctgctcgatgcggaactggcaaaagtaaaatggttctcaggcgacgagtttggtgtgggcgatatcgctatcgcaccgttcatctacaatttgtttaacgttggcctgacctggacaccgcgtccaaatctgcaacgctggtatcagcaactcactgaacgccccgcagtgcgcaaagtggtgatgattcccgttagctaa

SEQ ID NO: 797 - DNA, 1203 bp, Escherichia coli
atgacgcaatactcctctctccttcgtggtcttgcagcgggttctgcatttttattcctttttgccccaacggcattcgcggcggaacaaaccgttgaagcgccgagcgtggatgcgcgtgcatggattttaatggattacgccagcggtaaagtgctggcagaaggcaatgcggatgagaaactggatcccgcgagcctgactaaaattatgaccagctatgtggttgggcaggcgcttaaggccgataagattaaactcaccgatatggtgacggtcggtaaagatgcctgggcgacgggaaatccggcactgcgtggttcatcggtaatgttcctcaaaccgggcgatcaggtttcggtggcagacttgaacaaaggtgtgattatccagtccggtaatgacgcctgtattgcgctggctgattacgttgccgggagccaggagtcatttattggtttgatgaatggttatgccaaaaaactgggtctgaccaacactaccttccagacggtgcacggcctggatgcgccggggcagttcagtaccgcgcgcgatatggcattgctgggtaaagcattgatccacgatgtgccggaagagtacgccattcataaagagaaagagttcaccttcaacaaaattcgtcagcctaaccgtaatcgtctgctgtggagcagcaatctgaatgttgatggcatgaagacaggaaccacggcaggcgcgggatataatctggttgcttcggctacccagggcgatatgcgtttaatctccgtagtgctgggggcgaaaactgaccgtatccgttttaatgagtctgagaaattattgacctggggcttccgtttctttgaaaccgtgacgccaattaaacctgatgccacatttgtgactcagcgcgtctggtttggtgataagagcgaagtgaatctcggggcaggcgaagcgggctcagtgaccataccgcgtgggcagctgaaaaacctgaaggcgagttatacgttaacggaaccgcagcttaccgcaccgctgaaaaaaggtcaggttgtcggcaccattgatttccagcttaacggtaaatccattgagcagcgtccgctgatcgtgatggaaaatgtggaagagggcggattctttggtcggatgtgggatttcgtgatgatgaaattccatcagtggttcggcagctggttctcttaa

SEQ ID NO: 798 - DNA, 759 bp, Escherichia coli
atggaaacacgtcgcgaagagcgtatcgggcagctgctgcaagaattaaaacgcagtgataagttacatcttaaagacgccgccgccctgcttggggtttcggagatgacgattcgtcgcgatctgaacaaccacagtgcgcccgtcgttttgctcggcggctatattgttctggaaccacgcagcgccagccattacctgttaagcgatcaaaaatcccgcctggtggaagaaaaacgccgggcggcaaaactggctgcgacgctggtagaacccgatcagaccctcttttttgactgtggcaccaccacgccgtggattattgaagcaattgataatgaaatcccttttaccgccgtttgttattcgctaaatacctttctggcgctgaaagagaaaccccattgccgcgcgtttctttgcggtggtgaatttcacgccagcaacgccattttcaaacccatcgattttcagcaaacgctgaataatttttgcccggatatcgctttttattccgctgcgggcgtgcatgtcagtaaaggcgctacctgctttaatcttgaagagttgccggtaaaacactgggccatgtcgatggcgcaaaagcatgtgctggttgtcgaccacagtaaatttggcaaggtgcgtccggcgcgcatgggtgacctgaaacgctttgatattgttgtgagcgattgttgcccggaagatgagtatgtgaagtacgcgcagacgcagcgtattaagttgatgtattaa

SEQ ID NO: 799 - DNA, 597 bp, Escherichia coli
atgctggaaaatttgaatctctctctattctctcttattaacgcaacgccagactctgcgccgtggatgatctcgttggcgatttttattgctaaagatttgattaccgtggtgccgttgctggccgcagtactttggttgtgggggcttacagcacaacggcaactggtgataaaaatcgctatcgcgctggcggtcagcctgtttgtgtcctggacgatgggacatctttttccgcacgaccgaccctttgtcgaaaatatcggctataacttcctgcatcatgcggcggatgactcattcccgagcgatcacggtacggtgattttcacctttgcactggcatttttatgctggcatcgcctgtggtccggctcacttttaatggtgctggccgtcgtcattgcctggtcgcgcgtttatcttggcgtccactggccgctggatatgctcggtggattgctggcaggtatgattggctgccttagcgcccagattatctggcaagcgatggggcataaactctatcaacgtctgcaatcgtggtatcgcttctgttttgcattaccgatccgcaaaggctgggtgcgtgactga

SEQ ID NO: 800 - DNA, 1233 bp, Escherichia coli
atgcaaaataaattagcttccggtgccaggcttggacgtcaggcgttacttttccctctctgtctggtgctttacgaattttcaacctatatcggcaacgatatgattcaacccggtatgttggccgtggtggaacaatatcaggcgggcattgattgggttcctacttcgatgactgcgtatctggcgggcgggatgtttttacaatggctcctggggccgttgtcggatcgtattggccgccgtccggtgatgttggcgggagtggtgtggtttatcgtcacctgtctggcaatattactggcgcaaaacattgaacaattcaccctgttgcgcttcttgcagggcataagcctctgtttcattggcgctgtgggatacgccgcaattcaggaatccttcgaagaggccgtttgtatcaagatcaccgcgctaatggcgaacgtggcgctgattgctccactacttggtccgctggtgggcgcggcgtggatccatgtgctgccctgggaagggatgtttgtcttgtttgccgcattggcagcgatctcctttttcggtctgcaacgagctatgcctgaaaccgccacgcgtataggcgagaaactgtcgctgaaagaactcggtcgtgactataagttggtgctgaagaacggccgctttgtggcgggggcgctggcgctgggattcgttagcctgccgttgttggcgtggatcgcccagtcgccgattatcattattaccggtgagcagttgagcagctatgaatatggcttgctgcaagtgcctattttcggggcgttaattgcgggtaacttgctgttagcgcgtctgacctcgcgccgcaccgtacgttcgctgattattatgggcggctggccgattatgattggtctgttggtcgctgctgcggcaacggttatctcatcgcacgcgtatttatggatgaccgccgggttaagtatttatgctttcggtattggtctggcgaatgcgggactggtgcgattaaccctgtttgccagcgatatgagtaaaggtacggtttctgcggcgatggggatgctgcaaatgctgatctttaccgtcggtattgaaatcagcaaacatgcctggctgaacgggggcaacggactgtttaatctcttcaaccttgtcaacggcattttgtggctgtcgctgatggttatctttttaaaagataaacagatgggaaattcgcacgaagggtaa

SEQ ID NO: 801 - DNA, 279 bp, Escherichia coli
atgaaaaattgtctactgttgggcgcgcttttaatgggctttactggtgtggcgatggcgcaaagtgtcaccgtcgatgtgccgagtggatacaaagtggttgtggttcctgattcagtcagcgttccacaagcggtcagcgtcgcgactgtgccgcaaaccgtctatgtggctcctgcgccagctccggcttaccgcccgcatccttatgttcgccatcttgccagcgtaggtgaagggatggttatcgaacaccagattgacgaccatcaccattaa

SEQ ID NO: 802 - DNA, 816 bp, Escherichia coli
atgagcattaaattaattgcggtagacatggatggtactttcttaagcgatcaaaaaacctataaccgtgagcggtttatggctcagtatcagcaaatgaaagcacaaggcattcgctttgtggtcgccagcgggaatcaatattatcagttgatctctttctttcctgaaattgctaatgaaattgcctttgtggctgaaaacggcggctgggtagtgagcgaaggcaaagatgtttttaatggcgagctgtcgaaggatgcgtttactactgtcgtagaacatttgctgacgcgcccggaagtggaaattattgcctgcggaaaaaatagcgcctataccctcaaaaaatatgacgatgccatgaaaacggtggcggaaatgtattatcaccgtctggaatacgtcgataactttgacaacttagaagatatcttctttaaatttggccttaatctctctgacgaactgatcccacaagtgcaaaaagcattacatgaggccatcggcgatatcatggtaccggtccataccggcaacggcagcatcgatctgattatccccggtgtacataaagccaatggccttcgccaactgcagaaattatggggaatagacgacagcgaagtggtggtctttggcgatggcggtaacgatattgagatgctgcgtcaggcaggctttagttttgcaatggaaaatgccggcagcgcggtcgtcgcagcggcaaaataccgggcaggctccaataaccgtgaaggcgtactggatgtgatcgataaagtgcttaaacacgaagcgccatttaaccaataa

SEQ ID NO: 803 - DNA, 1128 bp, Escherichia coli
atggcgtcctgggcaacccgtacgcctgctatccgcgatattctctctgtctcgatcgctgaaatgggcggtgttctctttggtctgtcgatcggttcgatgagcggtattctctgctcggcgtggttagtgaaacgctttgggacgcgtaatgtcatccttgtgacgatgtcctgcgcattgattgggatgatgatattaagtctggcactctggctgacatcgcccttgctctttgccgttggtctcggcgtctttggggctagttttggttctgcggaagtggcgataaacgttgaaggtgccgccgttgagagagaaatgaataagacggttttaccgatgatgcacggtttttatagcctgggcacgctggcaggcgcaggtgtcgggatggcacttacggcctttggcgttccggcaacggtgcatattttattggcggcgctggtaggcatcgcacctatttatatcgccattcaggcaatccctgacggtacgggcaaaaatgctgccgatggcacccagcatggtgaaaaaggcgtacctttttatcgggatatccagttgctgttgattggtgttgtggtgctggcgatggcctttgccgaaggttctgccaacgactggttacccttattaatggttgatggtcacggttttagccctacttccggctcgctgatttatgccggttttaccctggggatgaccgttggacgctttaccggcggttggttcattgaccgttacagtcgcgttgccgtggttcgggccagtgcactaatgggggcgttgggtattgggctgattatttttgtcgatagcgcctgggtcgctggggtgtctgttgtactttggggactgggtgcctcgttgggcttcccgctgactatttctgccgccagcgataccggccccgatgcaccaacccgcgtcagcgtggtagctacgaccggttatctggctttcctcgtcgggccgccgctgctgggctatctcggcgaacattatggattacgtagtgcaatgctggttgtactggcgctggttattctcgcggctattgtcgcgaaagccgtcgccaaacccgataccaaaacgcagacggcgatggagaatagttga

SEQ ID NO: 804 - DNA, 537 bp, Escherichia coli
atgcgtcgcgctaacgatccgcaacggcgagaaaaaattatccaggccacgctggaggcggtgaaactttacggaatacatgctgttacacaccgcaaaattgctacccttgccggggtgccgttgggatcgatgacctactatttttcaggaattgatgagttgttgctggaggcgttcagccgttttactgagatcatgtcccggcaatatcaggcattttttagcgatgttagtgatgctccaggcgcatgccaggctatcaccgatatgatctacagctcacaggtcgcaacgccggataatatggagctgatgtaccagctctacgcgctggctagccgaaaaccgctcttaaaaacggtaatgcaaaactggatgcagcgcagtcaacaaacgctcgaacaatggtttgaacccggaaccgcccgcgcgcttgatgcgtttattgagggaatgacgctgcattttgtcaccgaccgtaagccgctatcacgcgaggagattttgaggatggttgagaggattgctgggtag

SEQ ID NO: 805 - DNA, 1686 bp, Escherichia coli
gtgaatataaacgtcgccgaattgttaaatgggaattacattctgttattatttgtggtcctcgcgcttgggctatgtctcgggaaattacgacttggttcgatccaactgggtaattccattggcgttttagtcgtatcgctgttattaggccaacaacatttcagcattaacaccgacgcgcttaatcttggctttatgctgtttattttctgcgtcggggtcgaagccggaccgaactttttttccattttttttcgcgatgggaaaaattacctaatgttagcactggtgatggttggcagtgcgctggtgatcgccttagggttaggtaagctgtttggctgggatattggcctgacggccggtatgttagctggctctatgacgtcgacaccggttctggtcggtgctggcgatacactgcgtcattccggcatggaaagcaggcagctctcactggcactggataatctgagcctcgggtatgccttaacctatttaatcggtctggtgagtttgattgttggtgcgcgttacttgccgaaattgcagcatcaggacttacagaccagcgcccagcaaatcgcccgcgaacgtggcctggacactgatgccaaccgtaaggtttatttaccggtgatccgcgcctaccgcgtcggcccggagctggtggcctggaccgacggcaaaaatctgcgtgaactgggtatttatcgacaaactggctgctacattgaacgtattcgacgtaacgggattctggcgaatccagacggtgatgctgtgctacaaatgggcgatgaaatagcgttggtaggctatcccgacgcccacgcacgactcgatcccagcttccgtaacggcaaagaagttttcgatcgtgaccttctcgacatgcgtatcgtcactgaagaagtggtcgttaaaaaccataacgccgtgggcaaacgtctcgcacaactgaagttgaccgatcacggttgcttccttaaccgcgtcattcgtagccagattgagatgccgatagatgacaacgtcgtgcttaacaaaggtgacgttttacaagtcagcggcgatgcccgtcgcgtaaaaaccatcgccgatcgcatcggctttatctcgattcacagccaggtcactgacttgctggcattctgcgccttctttgttattgggctgatgatcgggatgatcaccttccagttcagcacattcagtttcggcatggggaacgctgccgggttgttattcgccggaattatgctgggatttatgcgcgctaaccacccgaccttcggttacattccgcagggtgcattaagcatggtgaaagagtttggcttaatggtgtttatggcaggcgttggtctgagcgccggtagcggtattaataacggcctgggcgcgattggcggtcagatgttgattgccggattgattgtcagtcttgtgccagtggttatctgtttcttgttcggtgcttatgtattgcgaatgaaccgcgcactgttgttcggcgcaatgatgggcgcacgcacctgcgcgccggcaatggagatcatcagtgatacagctcgcagtaacatcccggcgctgggctatgcgggcacctatgcaatcgccaacgtcctgctgacgctggcagggacaatcatcgtcatggtatggccaggattaggataa

SEQ ID NO: 806 - DNA, 378 bp, Escherichia coli
gtgaaacataaacaacgttgggcgggggcaatctgctgttttgtcctcttcattgtggtgtgtctttttctggcgacgcacatgaaaggcgcttttcgggctgccgggcatcctgaaatcggtttgctatttttcattcttcctggtgcagttgccagcttcttttcacatcgtagagaagtcctgaaacctctgtttggcgcaatgctggcggcaccctgttcgatgctcattatgcggctgtttttttcaccgacgcgctcattctggcaagagctggcatggttattaagtgcggtgttctggtgtgcgctgggggcattgtgtttcttatttatcagtagtttgtttaaaccacagcacagaaaaaatcaataa

SEQ ID NO: 807 - DNA, 258 bp, Escherichia coli
atgcaaaccgttatttttggtcgtccgggttgcccttactgtgtgcgtgcaaaagatctggctgagaaattgagcaatgaacgcgatgatttccagtatcagtatgtagatattcgtgcggaagggatcactaaagaagatctacaacaaaaggcaggtaaacccgtagaaaccgtgccgcagatttttgtcgatcagcaacatatcggcggctataccgattttgctgcatgggcgaaagagaatctggacgcctga

SEQ ID NO: 808 - DNA, 288 bp, Escherichia coli
atgcgcgcgatcggtaaattgcctaaaagcgtgttgatactggaatttatcggaatgatgttgctggcggtggcgctgctgtcggtaagcgactccctgtcgctacctgagccattttctcggccagaagtgcagattctgatgatttttctcggtgttttgctcatgcttcccgctgcggtggtggttattcttcaggtggcaaaacgtcttgccccacagctgatgaaccatccaccgcaatattcacgttcagaaagagaaaaagataatgacgccaaccattga

SEQ ID NO: 809 - DNA, 723 bp, Escherichia coli
atgacgccaaccattgaacttatttgtggccatcgctccattcgccatttcactgatgaacccatttccgaagcgcagcgtgaggcgattattaacagcgcccgtgcgacgtccagttccagttttttgcagtgcagtagcattattcgcattaccgacaaagcgttacgtgaagaactggtgacgctgaccggcgggcaaaaacacgtagcgcaagcggcggagttttgggtgttctgtgccgactttaaccgccatttacagatctgtccggatgctcagctcggcctggcggaacaactgttgctcggtgtcgttgatacggcaatgatggcacagaatgcattaaccgcagcggaatcgctgggattgggcggggtatatatcggcggcctgcgcaataatattgaagcggtgacggaactgctgaaattaccgcagcatgttctgccgctgtttgggctgtgccttggctggcctgcggataatccggatcttaagccgcgtttaccggcctccattttggtgcatgaaaacagctatcaaccgctggataaagacgcactggcgcagtatgacgagcaactggcggaatattacctcacccgtggcagcaataatcgccgggatacctggagcgatcatatccgccgaacaatcattaaagaaagccgcccatttattctggattatttgcacaaacagggttgggcgacgcgctaa

SEQ ID NO: 810 - DNA, 903 bp, Escherichia coli
gtgaaaattgccatattgtcccgggatggaacgctctattcgtgtaagcggctgcgtgaagccgctatacagcgcggtcacctggttgaaattcttgatccgctttcttgctacatgaacataaatcctgcggcgtcttctattcactacaaaggccgcaagttaccccattttgacgcagtgatcccgcgtattggcaccgccattaccttttatgggacggcggcactgcgccagttcgagatgctggggagctatccgctcaatgagtcggtcgccattgcccgggcgcgtgacaaattgcgttccatgcaactgctggcgcgtcagggcatcgacctgcctgtcacgggcattgcgcattcgccggatgataccagcgatttaatcgacatggtcggtggtgcgccgctggtggtcaagctggttgaaggcacgcagggaattggtgtcgtgctggcggagacgcgtcaggcggccgaaagcgtgattgacgctttccgcggtctgaacgcgcatattctggtgcaggaatatatcaaagaggcgcaagggtgcgatatccgctgtctggttgttggcgatgaagtagtcgctgcgattgaacggcgagcgaaagagggcgattttcgttccaatttgcatcgtggcggcgcggcaagcgtcgccagtatcacaccacaggagcgtgaaatcgcgataaaagccgcgcgaacgatggcgctggacgttgctggtgtggatattctgcgtgctaatcgcgggccgttggtgatggaagtgaatgcgtcgccagggctggaaggaatagaaaaaaccaccggtatcgacatcgcgggtaaaatgatccgctggatcgaacgccacgctacgacagaatattgcctgaaaacgggtggttag

SEQ ID NO: 811 - DNA, 477 bp, Escherichia coli
atgacatcgctggtcgttcctggtctggatacgttgcgtcaatggctcgatgacctggggatgagtttttttgaatgtgataactgtcaggctctgcatctgccccatatgcagaatttcgacggtgtctttgatgctaaaatcgatctgatcgataacacgatcctgttttctgccatggcggaagtccgaccttcagccgtattgccgctggcggcggatttatcagccatcaatgccagttcgctgaccgtgaaagcatttcttgatatgcaggatgataatctgccaaagctggtggtttgccagtctttatccgttatgcagggcgtaacctatgagcagtttgcatggttcgtgcgtcagagcgaagagcagatttcgatggtcattcttgaagctaatgcccatcaactgctgttaccgactgacgatgaagggcaaaataacgttaccgaaaactatttcctccactga

SEQ ID NO: 812 - DNA, 1113 bp, Escherichia coli
atgaccgccttaaataaaaaatggctatcgggtctggttgcgggggctctgatggccgtctctgtcagcacgctcgcggctgaacaaaaaacactccacatttataactggtctgattatatcgccccggacacggtggccaactttgaaaaagaaaccggtattaaagtcgtctacgatgttttcgattctaacgaagtactggaaggcaaattaatggcggggagcaccggctttgatctggtggtgccgtcagcaagctttcttgagcgccagctgacagcgggagttttccagccgctggataaaagcaaattgccggagtggaagaatctcgatccggagctgctgaagttggtcgccaaacacgatcccgacaataaatttgctatgccctatatgtgggcgacgaccgggattggctataacgtcgataaagttaaagcggtgctgggcgaaaacgcgcccgtcgatagctgggacttgatcctcaaacctgaaaatctggaaaaactgaaaagctgcggtgtctctttcctcgatgcgccagaagaagtgtttgctaccgtgctgaattatctcggcaaagatcctaacagcactaaagcggatgattacaccggaccggctaccgatctgctgttaaagctgcgcccgaacattcgttatttccattcatcccaatacatcaatgatctggcgaatggtgacatctgtgtcgctattggctgggcgggcgatgtctggcaggcgtcaaaccgcgcgaaggaagcgaagaatggcgtgaatgtctcgttctcgattccaaaagaaggggcgatggcgttctttgatgtattcgccatgcctgcggatgccaaaaacaaagacgaagcctatcagttcctgaattacctgctgcgtcctgatgtggtggcacatatctctgaccatgtgttctatgctaacgccaataaagcagccacgccgctggtgagtgcggaagtccgtgataacccgggtatttatccgcctgcggatgttcgtgcgaagctgttcactctgaaagtgcaggacccgaaaatcgaccgtgtgcgcacccgcgcgtggaccaaagtgaagagcggaaaataa

SEQ ID NO: 813 - DNA, 1134 bp, Escherichia coli
gtgaatgacgctatccctcgcccgcaggcgaaaacccgtaaggcgctgacgccgctattagaaatccgtaacctgaccaaatcctacgatggtcaacatgcggtggatgatgtcagcctgaccatctacaaaggtgaaatcttcgcgctgctgggcgcatccggctgtggcaagtccacgctgctgcgtatgctggcaggttttgaacaaccttctgccgggcagattatgctcgatggcgtcgatttgtcacaggtgccgccttacctgcgccccatcaatatgatgtttcagtcttacgcgctgtttccgcatatgaccgtggaacagaacatcgcttttggcctgaaacaggacaaactaccgaaagcggaaattgccagccgggtcaatgagatgcttgggctggtgcatatgcaggagttcgccaaacgcaaaccgcatcagctttccggtggtcagcgtcagcgtgtggccctggccagaagccttgccaagcgcccgaaactattactgctcgatgagccgatgggcgcgctggataaaaagctgcgtgaccggatgcagcttgaagtggtggatattctggagcgtgtcggtgtgacttgtgtgatggtcacccacgatcaggaagaggcgatgaccatggcggggcgtatcgccattatgaatcgtgggaaatttgtccagattggcgaaccggaagagatctacgagcatccgaccacccgctatagcgctgaatttatcggttcggttaatgtctttgaaggtgtactcaaagagcgtcaggaagatggtctggtgctttattcgccgggactggtgcacccactgaaagtcgatgcagatgcttcagtggttgataacgtgccggtacacgtagcgctgcgtccggaaaaaatcatgctttgcgaagagccgcccgccaatggttgtaacttcgcggtgggggaggtgatacacattgcctatctcggcgatctttcggtgtatcacgttcgtctgaaaagtgggcagatgatcagcgcccagctacaaaacgcccatcgtcatcgtaaagggttaccgacctggggcgacgaagtacgtttgtgctgggaagtggacagctgtgtggtgctgacggtttaa

SEQ ID NO: 814 - DNA, 384 bp, Escherichia coli
atgagtacacttgaacctgctgcccagtcgaaaccgccgggcggatttaagctgtggttgtcgcagctgcaaatgaagcatgggcgcaaactggtcattgcgttgccatatatctggttgatcttgctgtttctgctgccatttctgatcgtctttaaaataagcctggcggagatggcgcgcgctattccaccttataccgaattgatggagtgggctgacgggcaactttctatcactcttaatctcggtaattttctgcaactgaccgacgatccgctctattttgatgcttatctccagtcgttacaggtggcggcgatttcgactatttgctgtttactgatcggctatccgctggcgtgggccggtggcgcacagtaa

SEQ ID NO: 815 - DNA, 585 bp, Escherichia coli
gtggcgcacagtaagccttcgacccgtaatatcttattactactggtgatcctgccgtcgtggacctcgtttctgattcgtgtctacgcctggatgggaatattaaaaaacaacggtgtgctgaataattttctgctgtggctgggggttatcgatcaaccgctgaccattctgcataccaactttgcggtttatattggcattgtttacgcctacgtgccgtttatggtgctgccgatttacaccgcgttgattcgtattgattattcgctggtagaagcggcactggatctcggtgcacgaccgctgaaaacgttctttaccgtgatcatgccactcaccaaaggggggattattgccggatcgatgctggtgtttatccctgctgtgggcgagtttgtgatcccggaactgctcggtggcccggacagcatcatgatcgggcgcgtgctgtggcaggagttctttaacaaccgcgactggccggtagcctcggcggtagcgatcatcatgttgctgctgctaattgtgccgataatgtggtttcacaaacaccagcaaaaaagcgtgggagaacacggatga

SEQ ID NO: 816 - DNA, 846 bp, Escherichia coli
atgaataatttaccggttgttcgttcgccctggcggattgtgattttgctgctgggcttcacctttctctacgcgccaatgctgatgctggttatctattcattcaacagctcgaaactggtgacggtgtgggccggctggtcaacgcgctggtatggcgaattattgcgcgatgacgcgatgatgagtgcggttggtttaagtctgacaattgcagcctgtgcggcaacggcagcggcgatcctcgggacgattgcggcggtggtgttggtgcgttttggcaggtttcgcggatcaaatggttttgcctttatgatcaccgcgccgctggtgatgccagatgtcatcacgggtttgtcgctgttgttgttattcgtcgcgcttgctcatgctattggctggcctgcggaccgcggtatgctcaccatctggctggcgcatgtcactttctgtacggcttatgtggcagtcgttatttcgtcgcgtctgcgggaactggatcgctcgatagaagaagccgcgatggatctcggtgcgacgccgctgaaagtgttttttgtcattacgctaccgatgatcatgcccgcgatcatttctggctggttactggcttttactttgtcgcttgatgatctggtgatcgccagctttgtttccgggccgggagccaccactttaccgatgctggtcttttccagcgtgcggatgggggtgaatccggaaatcaacgccctggcaacattgatcctcggcgcggtcggaattgtcggatttatcgcctggtatctgatggcgcgcgcagaaaaacagcggatacgcgacatccagcgtgcaagacgtggctga

SEQ ID NO: 817 - DNA, 489 bp, Escherichia coli
atggaagacgaaacgttgggattttttaagaaaacatcttcatctcatgctcgcctgaatgtgcctgcgctggtgcaggtggcggcgctcgccattattatgatccgtggcctcgacgtgctgatgattttcaatacgctgggcgtgcgcggtattggcgagttcattcatcgcagcgtacaaacctggagtttaacgctggtctttttgagcagtctggtgctggttttcattgagatctggtgtgcgttttcactggtgaaagggcgtcgctgggcgcgctggctgtatctgttgacacaaatcacagccgcaagttacttgtgggcggcctcgctggggtatggttatccggagctgttcagcattcccggtgaatcaaaacgtgaaatcttccatagcctgatgctgcagaagctgccggatatgctcatcctgatgctgctgttcgttccctcgaccagtcggcggttcttccagttgcaataa

SEQ ID NO: 818 - DNA, 1128 bp, Escherichia coli
atgcagtgcgcactttacgacgcgggtcgctgtcgttcctgtcagtggataacgcagccgattccagagcaactctccgctaaaaccgtcgatcttaaaaatctgctcgccgattttccggttgaggaatggtgtgcgccggtgtcaggcccggaacaagggtttcgtaataaagccaaaatggtggtgagtggtagcgttgaaaaaccactgctcggtatgctgcatcgggatggtacaccggaagacctttgtgactgcccgctttatccagcctcatttgcgcccgtttttgcggcgctaaaaccgtttatcgcccgtgcgggtttaacgccttacaacgtggcgcgtaaacgtggtgaactgaaatacattctgctgactgaaagccagagcgatggcggcatgatgctgcgttttgtactgcgttctgataccaaactggcgcaactgcgtaaggcgctgccgtggttacaggaacaattaccgcagctgaaagttattaccgtcaatattcagccggtacatatggcgattatggaaggggagacggagatctacctgaccgaacaacaggcactggcagagcgttttaatgacgtaccgctgtggatccgtccgcaaagtttcttccagactaatccggcggtcgccagccagttgtacgccaccgcgcgcgactgggtacgacagctgccggttaaacatatgtgggatctgttctgcggtgtggggggctttggtttacactgcgcgacgcctgacatgcagttaaccgggatcgaaattgcaccagaggccattgcctgtgcgaagcagtcagccgctgaactgggcttaacgcgtttgcaatttcaggcgctggactctacgcagtttgccaccgctcagggggaagtgccggagctggtgctggttaacccgccgcgccgcggcatcggtaaaccgctgtgtgattatctctcaacgatggcaccgcgttttattatctactccagctgtaacgcccaaactatggcgaaagatatccgcgaactgcctggttatcgcatcgaacgggtacagctttttgatatgttcccgcacaccgcgcactatgaagtgctgacgctgctggtgaagcaataa

SEQ ID NO: 819 - DNA, 732 bp, Escherichia coli
atgaaaaagttagttcttgccgctttacttgcttcttttactttcggtgcttctgccgcagagaaaatcaattttggcgtttcagccacctatccaccctttgaatctataggtgctaataatgagattgtcggctttgatatcgacctggcaaaagccttgtgcaaacaaatgcaggcagaatgtacttttactaatcacgctttcgacagcctgatcccgtcactgaaattcagaaaatatgacgccgtaatctccggaatggatatcacgccggagcgtagcaaacaggtatcgtttaccacgccctactacgaaaactcagccgtcgtgattgccaaaaaagatacctacaaaacgtttgccgatctgaaaggcaaacgtattgggatggaaaacggcaccacgcaccagaaatatattcaggatcagcacccggaagtaaaaactgtctcctatgacagttatcagaatgcctttatcgatctgaaaaatggccgtattgatggcgtatttggtgacaccgcagtggtaaacgaatggctgaaaaccaatccgcaactgggcgttgctactgaaaaagtgaccgatccgcaatacttcggcaccggcctgggtatcgctgtacgtccggataacaaagctctgctggaaaaactgaataacgcgctggcagcaattaaagctgacggtacatatcagaaaatcaatgaccagtggttcccacagtaa

SEQ ID NO: 820 - DNA, 669 bp, Escherichia coli
atgtttgagtatttacccgaactgatgaaagggctgcacaccagcctgacgctaaccgttgcctcgctgattgtggcactgattctggcattgatttttaccatcatcctgacgctgaaaacgccggtgctggtgtggctggtgcggggctatatcacgctgtttaccggtacgccgctgctggtgcagatcttcctgatttattacggaccgggccagttcccaacgttgcaggagtatccggcactgtggcatttgttgtcagaaccgtggttatgtgcgctgattgcgttgtcgctgaacagtgcggcgtacaccacgcagctgttttacggtgcgattcgcgcgatcccggaaggtcaatggcagtcctgtagcgccctgggaatgagcaaaaaagatacgctggcgatcctgctgccgtacgcgtttaaacgctcgctctcttcttattccaacgaagtggtgctggtgttcaaaagtacctctctggcttacaccattacgctgatggaagtgatgggatacagccagttgttgtacggacgcacctacgatgtaatggtatttggcgcggcggggattatttacctggtcgtcaacggcctgctgacgctgatgatgcgtctgatcgagcgtaaagcactggcattcgaacggcggaattaa

SEQ ID NO: 821 - DNA, 717 bp, Escherichia coli
atgaatgaattttttcctttagcaagcgccgccgggatgaccgtcggccttgccgtttgtgcattgattgtcgggctggcgctggcgatgttctttgcggtatgggagtctgcgaaatggcgtcctgtcgcgtgggcaggttcagcgctggtaaccattctgcgtggcctgccagaaattctggtggtgctgtttatctattttggctcctcgcagctgctgctgacgctttcggatggcttcactatcaatcttgggttcgtgcagatcccggtgcagatggacattgagaacttcgacgttagcccgttcctttgtggtgtcatcgcactgtcactgctgtatgccgcctatgcctcgcaaacgctgcgtggtgcattaaaagcggtgccggtgggtcagtgggaatccggtcaggcgctggggctgtcgaaatcggctatctttttccgtctggtgatgccgcagatgtggcgtcatgcgctgccgggtctcggtaaccagtggctggtgctgctgaaagataccgcgctggtcagtttgattagtgtgaatgatttaatgctacaaaccaaaagcatcgctacccgtacacaggaaccgtttacctggtacattgtggcggcggtgatttacctggtgatcaccctgctcagtcagtacattctcaaacgcattgacctgcgcgcgacacgttttgagcggaggcccagctaa

SEQ ID NO: 822 - DNA, 732 bp, Escherichia coli
atgaaaaaagttctgattgccgcgttaattgcaggttttagtctttccgccacagcagccgaaaccattcgttttgccaccgaagcctcctatcctccgtttgaatcgattgatgcaaacaaccagatcgttggttttgatgtcgacctggcgcaggcattgtgtaaagagattgatgcaacctgcactttctctaaccaggcgtttgacagcctgatcccaagcctgaaattccgtcgcgtagaagcagtgatggcgggcatggatatcactccggagcgtgaaaagcaggtgctgtttaccaccccgtactatgacaactctgccctgtttgtgggtcagcaaggcaaatacaccagtgttgatcagctgaaaggcaaaaaagtcggcgttcagaacgggacgacacaccagaagttcattatggataagcatccggaaatcactaccgtgccatatgacagttaccagaacgcaaaactggatctgcaaaacggtcgtatcgacagcgtatttggtgacaccgcagtggtaaccgaatggctgaaagataacccgaaactggcggcagtgggcgataaagtgaccgataaagattacttcggtactggcctcggcatcgcagtacgccagggcaacactgaactgcagcagaaactcaacactgcgctggaaaaagtgaagaaagatggcacttacaaaaccatctacaacaaatggttccagaagtaa

SEQ ID NO: 823 - DNA, 729 bp, Escherichia coli
atgagtattcaattaaacggcattaattgcttctacggcgcgcatcaggcgctgttcgatatcacgctggattgcccacagggcgaaacgctggtgttacttggccccagcggcgcgggtaaaagctcgctgctgcgtgtactcaatctgcttgagatgccgcgctccggtacgctcaacattgcaggcaaccatttcgatttcaccaaaaccccctctgacaaagcgattcgcgatttgcgtcgtaacgttggcatggtgtttcagcaatacaacctgtggccgcatctgaccgtgcagcaaaacctgattgaagcgccctgtcgtgtactggggttgagtaaagatcaggcgctggcccgtgcagaaaaactgctggaacgtctgcgtctcaaaccttatagcgatcgttacccgctgcatctttctggaggtcagcagcagcgtgttgctattgcccgtgcgttgatgatggaaccgcaggtactgctgttcgatgaaccgaccgccgcactggaccccgaaattacggcacaaatcgtcagcatcattcgtgagctggcagaaacgaatattacccaggtgatcgtcacccacgaagttgaagtggcgcgtaaaaccgccagccgagtggtgtatatggaaaacggtcatatcgtagaacaaggcgacgcgagctgctttaccgagccgcaaaccgaagcatttaaaaactatctctctcactaa

SEQ ID NO: 824 - DNA, 516 bp, Escherichia coli
atgcgctatagcaaattgaccatgcttatcccttgcgcactgctactcagtgcctgtaccaccgtcacgccagcttataaagataacggcccccgcatcggttcctgtgtccagggggggcctgatagcgtggctcaacagttctatgactaccgcattcaacatcgcggcaatgacattaccgctctgcgcccctatttgagtgacaaactggcaaccctacttagcgatgccagccgcgataatagtcatcgtgaattgttaagcagcgatccgttctccagtcgaaccaccttgccagacagcgcccacgttgccagtgcatctactatccctaatcgtgatgcccgtaacattccattgcgcgtggatctcaagcagggtgaccagggctggcaggatgaagtgttaatgattcaggaaggccagtgttgggtcatcgacgatgtgcgctacttaggcggtagcgttcatgccacggcgggtacgctccgtcagtccatcgagaatcgctaa

SEQ ID NO: 825 - DNA, 324 bp, Escherichia coli
atgcaattttctacaaccccaactctggaaggccagaccatcgttgaatattgcggtgtggtgactggcgaagcgattttaggcgcgaatattttccgtgatttctttgccggtatccgcgatatcgttggcggacgctccggtgcctacgaaaaagaactgcgtaaagcgcgggagattgcctttgaggagctcggctcccaggcgcgagcgctgggggctgatgccgtcgtcggtattgatatcgactacgaaacggtcgggcaaaacggcagtatgctgatggttagcgtcagcggtacggcggtgaaaacgcgtcgatga

SEQ ID NO: 826 - DNA, 831 bp, Escherichia coli
atgagaagagtcttctggctggtcgctgccgctctgttactggcagggtgcacaggcgaaaaaggcattgtcgagaaagagggatatcagcttgatacccgacgccaggcgcaggcggcgtatccgcgcattaaagtgctggtgatccactacaccgcagatgattttgatagctcgctggcgacactgaccgataagcaggtcagctcgcattatctggtccctgcggtgccaccgcgatacaacggtaaaccgcgcatctggcaactggtgccggaacaagaactggcctggcatgcggggattagcgcctggcgcggggcaacgcgccttaacgacacctctattggcattgagctggaaaaccgtggctggcaaaaatcggcgggagtgaaatattttgccccgtttgaaccggcacagattcaggcgcttattccgctggcgaaagatattattgcccgttatcacatcaagccggaaaacgtagtagcacatgcggatattgcgccgcagcgcaaagacgatccggggccattattcccctggcagcaactggcacagcaggggattggtgcatggccggatgcgcagcgggtgaacttttaccttgccgggcgcgcgccacacacaccggtagagaccgcgtcattgctggagcttttggcgcgttatggttatgacgtaaagcctgatatgactccgcgcgagcagcggcgcgtgattatggcgttccagatgcatttccgcccgacgttatataacggcgaagcggatgcagaaactcaggcgattgccgaagcgttgctggagaaatacgggcaggattag

SEQ ID NO: 827 - DNA, 1014 bp, Escherichia coli
atgaaggtactggttaccggcgccaccagcggcttaggtcgaaacgcggtagagtttttatgccagaaaggcatcagcgtgcgagcgaccggtcgcaacgaggcaatgggtaaattgctggaaaaaatgggcgcagagtttgttccggcggatctgaccgagctggtctcatcacaagctaaagtgatgctcgcaggcattgatacgctgtggcactgctccagctttacctcgccctgggggacacaacaggctttcgatctggctaacgttcgcgccactcgccgcctgggtgaatgggctgtcgcctggggtgtgcgtaactttattcatatctcttctccctccctgtacttcgattatcaccaccatcgcgatattaaagaagattttcgccctcaccgctttgccaacgagtttgcccgcagcaaagcagccagcgaagaagtgatcaatatgctttcgcaggcgaatccacaaacgcgctttactattctgcgcccacaaagtctgttcggaccgcacgataaagtctttatccctcgtctggcgcatatgatgcatcactacggcagtattctgttaccgcatggcggcagtgcgctggtcgatatgacctactatgaaaatgccgtgcacgccatgtggctggcaagccaggaagcctgcgataagctaccttccgggcgtgtgtacaacatcaccaacggcgagcatcgcacactgcgcagcatcgtgcagaagctgatagacgaattgaatattgactgtcgtattcgttccgtcccttacccgatgctggatatgatcgcccgcagcatggagcgtttaggccgcaagtcagcaaaagagccgccgctgacccactacggcgtctccaagttgaattttgactttacgctggatattacgcgcgcgcaggaagagctaggttatcagccagtccttaccctggatgaaggtatcgagaaaactgccgcctggctgcgcgaccacggaaaactgccgcgctaa

SEQ ID NO: 828 - DNA, 1431 bp, Escherichia coli
gtgccgcaacgcattttagttctcggtgccagtggctacattggtcagcatctggtgcgcacgctcagccagcaagggcatcagatcctggcggcggcacgtcatgtcgacagacttgcaaaactgcaactggctaatgtcagttgccataaagtcgatctcaactggccggataaccttccggccctgttgcagaatattgatactgtctattttctggtgcacagcatgggcgaaggcggtgattttatcgctcaggagcgccaggtggctctcaacgtccgcgatgcgctacgcgaagtaccggtaaagcaattaatctttctcagttcattgcaggcgccgcctcatgaacaatctgatcatctgcgtgctcgtcaggccacagcggatattttacgtgaagcgggtgtcccggtgaccgaactacgtgccggaattatcgttggcgcgggttcagcggcattcgaagtcatgcgcgatatggtttacaacttgcccgtgttaacgccgccacgctgggtacgttcacacaccacgcccatcgcgctggaaaacttgctgcactatctggtggcgctgttagatcatccggcctgcgaacatcgcatcttcgaagccgccggaccagaagtgctcagttatcagcaacagtttgaacattttatggcggtgagcggtaagcgccgctggttgctccccatccccctccccacccgctggatttcggtgtggtttcttaatgtgattacttcagtaccgcccaccaccgccagggcgttgattcaggggctgaaacacgatctgctggcggatgacaccgcgctacgtgcgctcatcccacaacggctgatcgctttcgatgacgcggtacgtagcacgttgaaagaggaagaaaaactggtcaactccagcgactggggatatgacgcgcaggcttttgctcgctggcgaccagaatacggttattttgccaaacaggcggggtttaccgttaaaacgtctgccagccttcaggcgctatggcgggtggtcaatcaaatcggcggtaaagagcgttatttctttggcaatattttgtggcagacacgggcgttgatggaccttgcgatcggtcataagctggcaaaaggccgcccggagcgcgaatatttacagaccggcgatgcggtggatagctggaaagtgattgtcgttgaaccggaaaaacaacttacgttgttatttggcatgaaagcgccggggctgggacgactgtgttttaccctggaagataaaggcgactatcgtactatcgatgttcgcgcattctggcatccgcacggtatgccggggctgttttactggttattgatgatccccgcgcatctgtttatttttcgcggaatggcaaaacgaatcgccagactggcagaacaaagcacagattaa

SEQ ID NO: 829 - DNA, 1002 bp, Escherichia coli
atgattgatttacgcagtgataccgttacccgaccgagccgcgccatgctcgaagcgatgatggccgccccggttggggacgacgtttacggagacgaccctaccgttaatgctctgcaggactatgcagcagagctttctggtaaagaagccgccatttttctgcctaccggcactcaggccaacctggtcgctctgctcagtcactgcgaacgcggcgaagagtatatcgtcggtcaggccgcgcataactatctgtttgaagccggtggcgcagcagtgctgggcagtattcagccgcaacccatcgacgcagctgccgacggtacgctaccgctggataaagtggcgatgaaaatcaaacccgacgatatccatttcgcccgcaccaaattactcagtctggaaaacacccacaacggcaaagtgctgccgcgtgaatacttaaaagaggtatgggaatttacccgcaagcgcaatctggcgctgcatgttgacggtgcgcgcatctttaatgccgtggtggcttacggctgcgaactgaaagagatcacgcaatattgtgactcgttcaccatttgcctgtcgaaaggtcttgggacgccagtcggttcattactcgtcggtaatcgtgattacattaaacgtgccattcgctggcggaaaatgacaggtggcgggatgcgtcagtccggcattctggctgccgccgggatgtatgccctgaaaaataacgtcgcacgtttgcaggaagaccacgataacgccgcctggatggcggagcagttgcgtgaagcaggcgcggatgtgatgcgtcaggacaccaatatgctgtttgttcgcgtcggggaagaaaatgctgccgcgttaggcgaatacatgaaagcgagaaacgtgctgattaacgcctcgccgattgtccgcctggtgacccatcttgacgtctcgcgtgaacaactggcggaagttgccgcccactggcatgcgttcctggcgcgttaa

SEQ ID NO: 830 - DNA, 1719 bp, Escherichia coli
atgaaacaaacggttgcagcttatatcgccaaaacactcgaatcggcaggcgtgaaacgcatctggggagtcacgggcgactctctgaacggtcttagtgacagtcttaatcgcatgggcaccatcgagtggatgtccacccggcatgaagaagtggcggcgtttgccgctggcgctgaagcacaacttagcggagaactggcggtctgtgccggatcgtgcggtcccggcaacctgcacttaatcaacggcctgttcgattgccaccgcaatcacgttccggtactggcgattgccgctcatattccctccagcgaaattggcagcggctatttccaggaaacccacccacaagagttattccgcgaatgtagtcactattgcgagctggtttccagcccagagcagatcccacaagtgctggcaattgctatgcgcaaagcggtgcttaaccgtggcgtttccgttgttgtgttaccgggcgacgtggcgttaaaacctgcgccagaaggggcaactacccactggtatcatgcgccacagccggtagtaacaccggaagaagaagagttacgcaaactggcgcaactgctgcgttattccagcaatatcgccctgatgtgtggcagcggctgtgcgggggcgcataaagagttagttgagtttgccgggaaaattaaagcgcctatagttcatgccctgcgcggtaaagaacatgtcgaatacgataatccatatgatgttggaatgacgggattaatcggcttttcgtcaggtttccataccatgatgaacgccgatacgttagtgctgctcggtactcagtttccctaccgtgcgttctacccgaccgatgccaaaattattcagattgatatcaacccagccagcatcggcgcgcatagcaaggtagatatggcgctggtcggcgatatcaaatcaaccctgcgcgcattgctgccactggtggaagaaaaaaccgaacgcaattttctggataaggcgctggaagattaccgcgacgcccgcaaagggctggacgatttagctaaaccgagcgagaaagccattcacccgcaatatctggcgcagcaaattagtcattttgccgccgatgacgctattttcacctgtgacgttggtacgccaacggtgtgggcggcacgttatctaaaaatgaacggcaagcgtcgcctgttaggttcgtttaaccacggttcgatggctaacgccatgccgcaggcgctgggcgcgcaggcaaccgagccagaacgccaggtggttgccatgtgcggcgatggcggttttagcatgttgatgggcgatttcctctcggtagtgcagatgaagctgccagtgaaaattatcgtctttaataacagcgtgctgggctttgtggcgatggagatgaaagctggtggctatttgactgacggcaccgaactacacgacaccaactttgcccgcattgccgaagcgtgcggaattacgggtattcgtgtagaaaaagcctctgaaatcgatgaagccctgcaacgcgccttctccatcgacggtccggtgttggtggatgtggtggtcgccaaagaagagttagccattccaccgcagatcaaactcgaacaggccaaaggtttcagcctgtatatgctgcgcgcaatcatcagcgggcgcggtgatgaagtgatcgaactggcgaaaacgaactggctaaggtaa

SEQ ID NO: 831 - DNA, 969 bp, Escherichia coli
atgacgatgccaacgaatcaatgcccgtggcggatgcaggttcatcacattacgcaagaaacgccggatgtgtggacgatttccctgatttgccacgattactacccgtatctcgccgggcaatatgcgctggtcagcgtgcgtaactcagcggaaacgctgcgtgcttacaccatttcctccacgccaggcgtgagtgaatacatcaccctgaccgtgcggcggattgatgacggtgtcggctcccggtggctgacgcgcgatgtaaaacgcggtgattatctctggctttcggactcgatgggggaatttacctgcgacgataaagcagaagataaattcctgttgctggcggcaggctgcggcgttacgccgattatgtcgatgcgtcgctggctggcgaagaaccgtccacaggccgatgtgcaggtgatctacaacgtgcgtacgccgcaggatgtgattttcgccgatgagtggcgtaactatccggtaacgctggtggcggaaaataacgttaccgaaggctttatcgctggtcgtctcactcgcgaactgctggcaggtgtccctgatttagcctcacgtaccgtgatgacctgtggccctgctccatatatggattgggtagagcaggaagtgaaaacgctcggcgtgacgcgtttctttaaagagaaattcttcaccccagtagcggaagcggcgaccagcggtctgaaattcaccaaactgcaaccggcacgagaattttacgctccggttggcaccacgctactggaggcgctggaaagcaataacgttccggttgtcgccgcctgccgtgcgggtgtttgcggctgctgtaagacgaaagtgatttccggtgaatatacggtgagcagcacaatgacgctgaccgacgccgaaatcgctgaaggttacgtactggcctgctcctgccatccgcagggggatttggttctcgcataa

SEQ ID NO: 832 - DNA, 1653 bp, Escherichia coli
atgttttgtgtgcaatgtgaacaaactatccgtactccggcaggaaacggctgctcatacgcacaggggatgtgtggtaaaacggcggaaacctctgaccttcaggatttactcatcgcgacgctgcaagggctttcggcctgggcagtgaaagcacgtgaatacggcatcatcaaccacgatgtagacagctttgcgccacgtgcctttttctcaaccctgaccaacgttaacttcgattctccgcgtattgtcggctacgcacgtgaagcaattgccctgcgcgaggcgctgaaagcacaatgcctggctgtagatgccaacgcccgcgtcgataacccgatggctgacctgcaactggtgagcgacgatctcggcgagctgcaacgtcaggcagcagaatttacccctaacaaagataaagcggcgattggcgaaaacattctcggcctgcgtctgctgtgcctgtatggcctgaaaggtgcggcggcctatatggaacacgcgcatgttctcggtcaatacgacaacgatatttatgcccagtaccataaaatcatggcgtggctggggacctggcctgccgatatgaacgcgcttcttgagtgttcaatggaaatcggccagatgaacttcaaagtgatgagcattctggacgcaggcgaaaccggtaaatacggtcacccgacgccaactcaggtcaacgtcaaagcgacggcgggtaaatgcattctgatttccggtcacgatctcaaagatctctacaacctgctggaacagaccgaaggcacgggcgttaatgtctacacccacggcgaaatgctgcctgcgcatggttacccggagttgcgtaaattcaagcatctggtcggtaactacggcagcggctggcagaatcagcaagtggagttcgctcgtttcccaggccccatcgtgatgacctcgaactgcatcatcgacccaaccgtaggcgcttatgacgatcgtatctggacccgcagcatcgttggctggccgggtgtgcgtcatctggatggcgaagatttctctgcagtcattgcccaggcgcaacagatggcgggcttcccgtacagcgaaattccgcacctgatcaccgtgggctttggtcgccagacactgcttggcgcagccgatacgctgattgatctggtgagccgtgaaaaactgcgtcatatcttcctgcttggcggttgtgacggcgcacgcggcgagcgtcactatttcaccgatttcgccaccagcgtgccggatgactgcctgatcctgaccctcgcttgcggtaaatatcgctttaataaacttgagtttggcgatatcgaaggtctgccgcgtctggtagatgctggtcaatgtaacgatgcttactcagcaattattctggcggtaacgctggcagagaaactgggctgcggagtcaacgatctgccgctgtcgctggtgctctcctggtttgaacagaaagcgattgtcattctgctgacgctgctttctctgggtgtgaaaaatatcgtcaccggcccgactgcacctggtttcctgacaccagacctgctggcggtgctgaacgagaaattcggcctgcgttctatcaccactgttgaagaagacatgaagcaactgttgagcgcgtaa

SEQ ID NO: 833 - DNA, 900 bp, Escherichia coli
atgttttctgggctgttaatcattctggttcccctgattgtgggttacctcattccgcttcgccaaaaagctgcattaagagttattaatcagctattaagttggatggtttaccttattctcttttttatgggtatcagtctggcgtttctcgataacctcgccagtaacttgttggcaattctgcattattctgccgtcagtattaccgttattttactgtgtaatattgccgccctgatgtggctggagcgcggcctgccatggcgcaaccaccatcatcaagaaaaactcccgtcgcgtattgcgatggcgctggagtcgctaaaactgtgcggcgtagtagtgattggttttgccattggtctgagtggactggctttcttacaacacgcgaccgaagccagtgaatacaccttaattctgctacttttcctcgtcggtattcagttgcgcaataatggcatgaccttaaagcagattgtccttaatcgccggggaatgattgtcgccgtggtggtggttgccagttcattaattggtggtttaattaacgcctttattcttgatcttcccatcaataccgcgctggcaatggcctccggtttcggctggtattctctttccggtattttattgaccgaatcttttggtccggtaatcgggagcgcggcgttttttaatgatctggcccgtgagctgattgctattatgttaatccctgggctgattcgccgtagccgctctactgcactgggcttatgcggtgcgacgtcgatggatttcaccctgcccgttcttcaacgtacaggcgggctggatatggtcccggcggcgattgttcacggttttattcttagtctgttagtgccgattctcatcgcctttttctctgcataa

SEQ ID NO: 834 - DNA, 696 bp, Escherichia coli
atgttcagaaaattagcagctgaatgttttggtactttctggcttgtttttggcggctgtggtagtgccgtactggccgcaggcttcccggaattaggcattggttttgccggcgtggcgttggcgttcggtctgaccgttctgacaatggcctttgctgttggtcatatttctggtggtcattttaacccggcggtcactattggtttatgggctggcggacgtttcccggcaaaagaagtcgttggctacgtaattgcccaggttgtcggcggtattgttgcggcggcgctgctgtatttaattgccagtggtaaaacgggttttgacgcggcagccagcggttttgcttctaacggttatggcgagcattcaccaggcggttattccatgctttccgcgctggtagttgaactggtattgagtgcaggtttcctgctggtgatccacggcgcaactgacaaattcgctcctgctggttttgcgccaattgccattggtctggccttaaccctgattcacttaatcagtattccggtgactaacacttccgttaacccggcgcgcagtactgcggttgctatcttccagggcggctgggcattagaacaactgtggttcttctgggtggtgccaattgtcggcggtattatcggtggtctgatttaccggactctactggaaaaacgcgattaa

SEQ ID NO: 835 - DNA, 1659 bp, Escherichia coli
atgattcttgagcgcgttgaaattgtgggttttcgcggtatcaaccgtttgtcgttgatgctggaacaaaacaacgtcctgattggggagaacgcgtggggtaaatccagcttgctggacgccttaaccctgctgctatcgccagaatcagatctctaccattttgagcgcgacgatttctggttcccgccgggagatatcaacgggcgagaacatcatctgcatattattttgaccttccgcgaatcgctgccaggccgacatcgggttcgccgctatcggccgctggaagcgtgctggacgccatgcaccgatggttatcaccgtattttttatcgtctggaaggggagagtgcggaagacggcagcgtgatgacactccgcagttttctcgataaagacggacatccgattgatgttgaggatattaacgatcaggctcgtcatctggtgcgtttaatgccggtgctgcgcttgcgtgatgcccgttttatgcgccgtattcgtaacggcacggtgccaaatgtccccaatgtggaagtcaccgcgcgccagctcgatttcctcgcccgtgaattatcctcacatccgcaaaatctctctgatgggcagattcgtcagggactttccgcaatggtacagctgcttgagcattatttctctgagcagggggccggacaggcgcgatatcgtttaatgcggcggcgagccagcaatgagcaacgaagctggcgctatctggatatcatcaaccggatgattgaccgacctggagggcgctcgtatcgggttattttgctcggcctgtttgctactttgttgcaggcaaaaggcacattgcgactggataaagacgcccgtccattgttgctgatcgaagatccagaaacccgtttacaccccattatgctttcagttgcctggcatctgttgaatcttctgccattgcagcgcattgccaccaccaactctggcgagctgctttcgttaacgccggtagagcatgtttgccgactggtacgtgagtcctcgcgcgttgccgcctggcgtctgggaccgagtggcttgagtaccgaagatagccgacgcatctcctttcacattcgttttaaccgtccgtcatcgctgtttgcccgctgttggctgctggtggaaggggaaacggaaacctgggttatcaatgaactggcgcgtcagtgcggacatcattttgatgccgaagggatcaaggtcattgagtttgcccagtccggactaaagccactggttaaatttgcccggcgaatggggattgaatggcatgtactggtcgatggcgatgaagcagggaagaaatatgccgctacggtacgcagcctgttgaataacgatcgggaagccgaacgagaacatttaacggcgttaccggcgctggatatggaacattttatgtatcgccagggattttccgatgtgttccaccgcgtggcgcaaatcccggaaaatataccgatgaatctgcgcaaagttatctcgaaagcgatccatcgctcttccaaacccgatcttgccattgaagtggcaatggaggccggacgtcgtggtgtggactccgtaccgacgctgctgaaaaaaatgttctcacgcgtgctgtggctggcgcgcggtcgggccgactaa

SEQ ID NO: 836 - DNA, 993 bp, Escherichia coli
atggttaaatcgacgtcatgtataaccattgatttcatgaatatgtcgcagctaactgaacggacctttacgccatctgaatctctcagcagcctgtcactttttcttagtctggcacgaggacagtgtcggccgggtaaattctggcatcgccgtagttttcgccagaaatttttgctgcgctcgttgattatgccgcgtttaagcgttgagtggatgaacgaactttcccactggcctaatctcaatgtgttgttaacgcgccagccgcgactgcctgtacgtctacatcgcccttaccttgcggcgaatcttagccgtaagcaattgctggaggcgttacgttaccattatgcgttactccgcgggtgtatgtcggcggaagaattcagcttatatttgaatacccccgggctgcaactggcgaagctggaaggcaaaaacggcgagcagttcacgcttgagctgaccatgatgatctcaatggataaagaaggtgacagcaccatcctgttccgcaacagcgaaggtattcctctggcagagctcacttttaccctgtgtgaatatcaggggaaaaggacgatgtttattggcggactgcaaggcgcaaaatgggaaattccacaccaggaaatccagaatgcgacgaaagcctgccacgggctatttcccaaacgcctcgtgatggaagcggcctgtctgtttgcccaacgtttgcaggtagagcagattattgccgtcagcaatgaaacgcatatttaccgcagcctgcgttatcgcgataaagagggcaagatccatgccgattacaacgctttctgggaatcggttggcggcgtatgtgatgctgaacgccattaccgccttccagcacagatagcacgaaaagagattgccgaaatcgccagtaaaaaacgggctgaataccgtcggcgctatgagatgctcgacgctattcagccacaaatggccacgatgttttgtagttag

SEQ ID NO: 837 - DNA, 1098 bp, Escherichia coli
gtgaagaagcgttacgttattgcgatggtgatagtcatcgccgggctgattacgttatggagaattcttaacgcacccgtgccgacttatcagacgctgattgtgcgccccggtgatttacagcaaagcgtgctggcgaccggaaagctggacgcgctgcgtaaggttgacgtgggcgcgcaggtcagcggtcagttgaaaacgctgtcggtggcgattggcgataaagtaaaaaaagaccagcttttaggggttattgatcctgaacaggctgaaaaccagatcaaggaggtggaagcaacgctgatggagctacgcgcgcagcggcagcaggcggaagcggagctgaaactggcgcgggtgacgtattcccgtcagcaacgtcttgcacaaacgcaagcggtttcacagcaggatctcgataccgccgcgacggagatggctgtgaaacaggcgcaaattggcaccattgacgcgcaaatcaagcgcaatcaggcctcactcgatacggctaaaaccaatctcgattacacccgcatcgttgccccgatggccggggaagtcacgcaaatcaccactctgcaaggccagacggtgattgccgcacaacaagcaccgaacattctgacgctggcagatatgagcaccatgctggtaaaagcgcaggtttctgaagcggatgtaatccacctgaagccggggcaaaaagcctggtttacggtgcttggcgatccactgacgcgctacgaggggcaaatcaaggatgtgctaccgacgccggaaaagattaacgacgctattttctattacgcccgttttgaagtacccaatcccaatggtttactgcgactggatatgaccgcgcaagtgcatattcagctcaccgatgtgaaaaatgtgctgacgatccctctgtcggcgttaggcgatccggttggcgataatcgttataaagtcaaattgttgcgtaatggtgaaacacgcgagcgtgaagtgacgattggcgcacgtaacgataccgatgttgagattgtcaaagggctggaagcgggcgatgaagtggtgattggtgaggccaaaccaggagctgcgcaatga

SEQ ID NO: 838 - DNA, 1947 bp, Escherichia coli
atgacgcccttgctcgaattaaaggatattcgtcgcagctatcctgccggtgatgagcaggttgaggtgctgaagggcatcagcctcgatatttatgccggtgagatggtggcgattgtcggcgcttcgggttccggtaaatcgaccctgatgaatattctcggctgcctggataaggccaccagcggcacctatcgcgtcgccggtcaggatgttgccacgctggacgccgatgcgctggcgcaactgcgccgcgagcatttcggctttattttccagcgttaccatttgctttcgcatttaaccgccgagcagaacgttgaagtacccgccgtctatgccggtcttgagcggaaacagcggctgcttcgcgcccaggagttactgcaacgactggggctggaagaccgtacagagtattacccggcacagctttcgggtggccagcaacagcgcgtcagcatcgcgcgggcattgatgaacggcggtcaggtaattcttgccgatgaaccgaccggcgcactggacagccattctggcgaagaggtgatggcgatcttgcatcagctgcgcgatcgcgggcatacggtgattatcgtcacccacgatccgcaggttgctgctcaggccgagcgggtgatcgaaattcgcgacggcgaaattgtgcacaatcctcccgccgttgaaaaagtgaatgctactggcgggacggaacctgttgtcaacacggcgtctggctggcggcagtttgtcagcggttttaacgaggcgctgacgatggcatggcgggcgctggcagcgaataaaatgcgtactttactgaccatgctggggattattatcggtattgcgtcggtggtttccattgtcgtggtgggcgacgccgccaaacaaatggtgctggcggatattcgttctattggtacgaatactattgatgtctatcccgggaaagattttggcgatgacgatccgcaatatcagcaggcgctgaagtacgacgacttaatcgccatccaaaaacaaccgtgggttgcctctgccacgcccgccgtctcgcaaaacctgcgcctgcgttataacaatgttgatgtggctgccagtgccaatggcgtgagcggcgattattttaatgtctatggcatgaccttcagtgaagggaacacctttaatcaggagcagctgaacggtcgtgcgcaggtcgtggttctcgacagtaatactcgccgccagcttttcccccataaagcagatgtggttggcgaggtgattctggtcggcaatatgcccgccagagtcattggtgtggcggaagaaaaacagtcgatgtttggtagcagtaaagtgctgcgtgtctggctaccttacagcacgatgtccgggcgagttatgggccagtcgtggctgaactccattactgtcagggtgaaagaaggctttgacagcgctgaggcggaacagcaactcacgcgtttactttcactgcgccacggtaagaaggatttctttacctggaacatggatggcgtcttgaaaaccgttgaaaagaccacacgtactttacaactgtttctgacgctggttgcggtgatttcgctggtggtgggcggtattggtgtaatgaatattatgctggtgtcagtgaccgagcggacacgggaaattggcattcgcatggctgtaggtgcgcgagcaagcgatgttttgcaacagtttttgatcgaagccgtactggtttgcctggttggtggcgcgttgggaataacactgtcactgttaattgctttcaccttgcagcttttcttacccggctgggagattggtttttcaccgttggcactgctgctggcgtttctctgctcgacggtcaccgggattttatttggctggttacccgcacgaaatgcggcacgactggatccagtagatgctctggcacgagagtaa

SEQ ID NO: 839 - DNA, 225 bp, Escherichia coli
atggaaaagggtactgttaagtggttcaacaatgccaaagggtttggtttcatctgccctgaaggcggcggcgaagatattttcgctcattattccaccattcagatggatggttacagaacgctaaaagctggacaatccgttcagtttgatgtccaccaggggccaaaaggcaatcacgccagtgttattgtgcccgtcgaagtagaagcggcagtcgcatag

SEQ ID NO: 840 - DNA, 321 bp, Escherichia coli
atgggtaaaacgaacgactggctggactttgatcaactggcggaagaaaaagttcgcgacgcgctaaaaccgccatctatgtataaagtgatattagtcaatgatgattatactccgatggagtttgttattgacgtgttacaaaaattcttttcttatgatgtagaacgtgcaacgcaattgatgctcgctgttcactaccaggggaaggccatttgcggagtctttaccgctgaggttgcagaaaccaaagtggcaatggtgaacaagtacgcgagggagaatgagcatccattgctgtgtacgctagaaaaagcctga

SEQ ID NO: 841 - DNA, 2277 bp, Escherichia coli
atgctcaatcaagaactggaactcagtttaaatatggctttcgccagagcgcgcgagcaccgtcatgagtttatgaccgtcgagcacttgttactggcgctgctcagtaacccatctgcccgggaggcgctggaagcgtgttctgtggatttggttgcgctccgtcaggaactggaagcctttattgaacaaaccacacccgttctgcctgccagtgaagaggagcgcgacacacagccgacgctgagttttcagcgtgtactgcaacgtgcggtcttccatgtccagtcctccggtcgcaatgaggttaccggtgcaaacgttctggtcgctatctttagcgaacaggagtcgcaggcggcatatctgttgcgcaaacatgaagtcagccgtctcgatgtggtgaactttatctctcatggcacgcgtaaagacgagccgacacagtcttctgatcctggcagccagccaaacagcgaagaacaagctggtggggaggaacgtatggagaatttcacgacgaacctgaatcagcttgcgcgagtgggcggaatcgacccactgattggtcgtgagaaggagctggagcgtgctattcaggttctctgccgtcgccgtaaaaacaacccgctgctggtgggggagtctggtgtcggtaaaaccgcgattgcggaggggcttgcatggcgaattgttcagggcgatgtgccggaagtgatggctgactgtacgatttactctctcgatatcggttctctgttagcgggcacaaaatatcgcggcgactttgaaaaacgttttaaagcgttgctcaagcagctggagcaagacactaacagcatcctgtttattgatgagatccacaccattatcggtgcgggtgcagcgtctggtggccaggtcgatgcggctaacctgattaaaccgttgctctccagcggtaaaatccgcgtaattggttcgacaacctatcaggagttcagcaacattttcgagaaagaccgtgctctggcgcgtcgcttccagaaaattgatattactgaaccgtcaatcgaagaaactgttcaaatcatcaatggcctgagaccgaagtatgaagcgcaccacgacgtgcgttataccgcaaaagcggtgcgtgctgcggtagagctggcggtgaaatacattaacgatcgtcatctgccggataaagcgattgatgttatcgacgaagcgggcgctcgcgcacgtctgatgccggtaagcaaacgcaagaaaaccgttaatgtggcggatattgaatccgtggtggcccgtattgcacgcattccagagaagagtgtttctcagagtgaccgcgataccctgaaaaacctcggcgatcgcctgaaaatgctggtcttcggtcaggataaagccattgaggcgctgactgaagccattaagatggcgcgtgcaggtttaggtcacgaacataaaccggtcggttcgttcctgtttgccggccctactggggtcgggaaaacagaggtgacggtacagctttcgaaagcgttgggcattgagcttctgcgctttgatatgtctgagtatatggaacgccataccgtcagccgtctgattggtgcgcctccgggatacgttggttttgatcagggcggtttgctgactgatgcggtcatcaagcatccacatgcggtgctgctgctggacgaaatcgagaaagcgcacccggacgtgttcaacatcctcttgcaggtgatggataacggtacgctgaccgataacaacggacgcaaagcggacttccgtaacgtggtgctggtgatgaccactaacgcgggggtacgtgaaaccgagcgcaaatccattggtcttatccaccaggataacagcaccgatgcgatggaagagatcaagaagatctttacaccggaattccgtaaccgtctcgacaacattatctggttcgatcatctgtcaaccgacgtgatccatcaggtggtggataaattcatcgtcgagttgcaggttcagttggatcagaaaggtgtttctctggaagtgagccaggaagcgcgtaactggctggccgagaaaggttacgaccgggcaatgggcgcacgtccgatggcgcgtgtcatccaggacaacctgaaaaaaccgctcgccaacgaactgctgtttggttcgctggtggacggcggtcaggtcaccgtcgcgctggataaagagaaaaatgagctgacttacggattccagagtgcacaaaagcacaaggcggaagcagcgcattaa

SEQ ID NO: 842 - DNA, 984 bp, Escherichia coli
atgtcttcgaattaccttacgccttccgatctcaaaaccattctccactccaaacgcgccaatatttattatctggaaaaatgccgggtacaggtgaatggtgggcgggtggagtatgttaccagcgaaggtaaagagtcgtactactggaatatccccattgcgaataccacggcgttgatgctgggaatgggaacttccgttacccaggcggcgatgcgtgaatttgctcatgccggggtgatggtaggcttttgtggtacggatggcacgccgctgtattcagcaaatgaagtggatgttgatgtctcctggctcagcccacaaagtgaatatcgccctacagagtatctccagcagtgggtttctttctggtttgttgaagacaaacgacttgctgccgcgaaacgttttcagttaatccgcctgacacatatcgataagcactggtccagctcgaaaatgctgcgtgaacacgcatttcaacctgatgttaatgcgctgcataccctcctgaatcgtacttgtgaagaaatagacgcggcagaaaaccatacgcagcttatgctcgttgaggccaaattgactaaagcgttatacaaaatggtcagtcaaaccgtggggtatggcgatttcactcgcgcaaaacggggcggtggtatcgatatggccaaccgcttcctcgatcaagggaattatctggcttatggactggcagcagtggcggcgtgggtaacaggtatcccgcacggtttagctgtaatgcatggtaagacacgtcgcggcgggcttgtttttgaccttgccgatctgattaaagatgctcttgttatgccgcaagcatttattgccgcaatggcgggagaagatgctcaggagtttcgtcaacgctgtgttaatatctttcaacaagcggatgcgctggatgtcatgatcacctctctgcaggaaacggcccaggcactggctaaggctgaccaatga

SEQ ID NO: 843 - DNA, 3234 bp, Escherichia coli
atgaatgtcctaattatctcacgctgtacgaaaaatgctcgcgtggaaagctgccgtattattgatcagtttgccgaacgcactggtgacgcagcatggcaaacggtgattactctggaaggcgttaatacactccgccgtttactgcgcaaaaccgccaggcgaaataccgcagtggcttgtcactggctgaagaagaatgggcaaacggagctgatgtggattgtcggcaatattcgtcgctttaatgctcaaggccgcgttcccacaaatcgaacaacgcaaatcagcctggtgaacaaagaagaaaatcgctggcagtgcgcggaaagtattgcactgctggcggctatcgctgggctatttcatgattttggtaaatcaggacgcagctttcagcaaagcctgactcaaaagaatacccgcagttatcaaccttaccgacatgaatggatctcactgcggctctttcagacgtttgtcggtgatcggcccgacgatgtgtggctggcgaagcttggcgaactcacggcagatgatgaatctgcgattcttgagcgcctgcaaaaagacactcctcaattttcaaatagcccgttcagttcgctgcaaccattagccaaaacggtaggctggctgatcctttcccatcatcgaatgccggagaatctttctccacagtcggaacaatcatgtaaagggtgtgaaagttggctggagaagcaacttaatgctgactggaatgccgttaaccaccgcagagatgactggtcacaacaggattttgcgcacgtctggcagtttccatcaggaacgccgcttcaaagcgcgagctggcgggaaaaagcgcgtcagatagcccgccgggcaagcaacgcgctcggtttaaagacatatgggcagatggaacagttgttccccttacatatggcgcgtttttgtctgatgcttgccgatcattactattcctcaagcgatgcgcagcaaaaatggcaggacccggattatatcgtctgggcaaatagcgatcgccaaagcggcacgctcaaacaacgggtagacgaacaccttgtgggcgtcgcgcatcatgcgtatctgcttgggcggcaactgatgcacacacgggcatcgcttccggcaattgcccgacataaaggttttagccagcgggctacagatgtgaattatcgctggcaagataaagcctgggatgtggcgcgagcgttacgtgaacgaagtcgtgaagagggatttttcggcgtcaatatggcttcgacggggtgtggtaaaacctttgcgaacgcccgcattatgtatgcacttgccgacgagcgagaagggtgccgctttaccgttgcgctgggattgcgcacgctgactttacaaaccggcgatgctctgcgcagtcggcttgggctgggtgaggatgagctggcggtactgattggttcggcggcagttaatcaactgtggcaacaggaaaaaatagacaatgattgcggaagtgcttcgcaagagtcgccggcagaggagcaacagttcgttaagtacgaaggcagcctgcataccggggcgctggaaaaatggttgaaggatgacagcaaacttaaggagttagtaagcgcgccgattctggtctcgacgattgatcatcttatttccgcgaccgagggcgtgcgaggcgggaaacagcttccggcgatgttgcgcctgttaaccagcgatttagtgctcgacgaacctgatgactttgatattgccgatcttcatgcggtatgtcgattgatgaactgggccgggatgctgggaacgcgggtattactttcttccgcgacgttaccgccaggtttgattcaggcgctgttcgcggcttatcttgctgggcgaaaaatgtggcaggcgtcttgtggtatcaacggcaggcctgtcaatatatgctgcgcctggtttgatgaaaaagatgctgatgccacgcaaatttacgacggacctgggtttcgtgatgctcatgccaaatttgttgcacgacgagcggtaatgctggctgaaaaagaacgactgcatttcgggcgtgtagcttcggtttcatcagcatcaggcgcgatacaagatgttaccgaaagtgtggcccagacggtgcatacgcaaatgctgaagttgcatcaggcgcatcgccagcgacacgaaagcggtaaaaccgtttcgctgggcttggtgcgcttcgcgaatatcaatccactggttgcggtgaccaaagccctgattgccattccttcaccagaagatgtctgcattcattactgtgtttaccactcccgacatccgctggcggtgcgttcagatattgagaagcgactggaccgcgcttttactcgtcataacgaactcgatttctggaacaacgaagatatcgcagatgccttacataaccgtccggaatcgcaccatctgtttgtggtgttggggacatcggttatagaagtggggcgtgactgggatgcggactggggaattatcgaaccaagctccatgcgttcgataattcaatttgccggacgtattcagcgccaccgtagaaatgtgccgaccagtgagaatctggttattttgcgtagcaatatcaaatcattgcagaaaaaagcccccgcattttgtaagcctggtttcgaaacaaaagaacacttgctgaatagccacgatatttgcgaactgattccgatcgcggactaccggacgattaacgccttgccgcggatcctgtctgccaataatgccaacaaactggcggagctagaacatagtcgtttatccgccgaattgatgagcagtaaaagcaaacatgtggtggcggcgcaatggtggcgtgcaccgctaagctggaacggctggatgcagcgccagacgccatttcgttattcccctttgccggaggcggtgttttttctgcatatggatgatgaagaaagcgaagcgcgtttctattcccgcacgggcgacaacgagcgtaaagcgcaagggaatttcaggcgagaagaggtgagatgcgccagcggcgtcgcttgctggggcgtgatggattaccaacacgttttgttgaatttagctgataagcaaagttgtgagatagcaaacgttggggaaaagtttgcggaggtgagagtacccgtcagtgaagaagatgcggtcgatgactggcgttatcacccctggttaggtgtgtttcgcaacatgtga

SEQ ID NO: 844 - DNA, 1308 bp, Escherichia coli
atggaaaaaacggcgctaatacaatttattactgaatacatcgcttcgcgaaggcaacccaaaatcgatgcctttgaaaaagaagccgcaaagcgagtggaacagggcgaggacgccagcgttatcgctcaggagcggcaggaactcgaagcacgctacttgccacgtaactggttaacggatgcggcaaagcgcgccgggcaaatcaaattagtcactcatggcgctaaattcagtcatggtgattctaaagccagtagcttttatctggaaacctccgctaacgaaagctatttaaacacagcatcgttggcgaatgtcgctactgacgcgattggtaacgccgctgcacttgacgtagcaaagttgctacaaaccgatgtgaacggagattcactgcttgccagcctgaagcgtggtgattatcaggcattaagtacgtttgcagaggataaagtgcaactggagctgtgggtagctgggtttagccaggcatggactactggacagccttccagccataaactggcgaaacaaatctatttccctgttgcggatggttatcacctgttatgcccactgttttccagttcactggcccaggcgatgtatgaaaagctaaccgccgggcgctttagtgaggaatcgaaagccattcgcgatgcccgcaaagcaggaaaatggcactcccagccagatatccggtttcctaatcttgccgaaatgcatttcggcggcacaaaaccgcagaatatttctttgctaaacagtgtgcgtggtgggcgcgtctggctgttgccgtcaatgccgcctgcctgggggccgctggatcgcgcaccacaaaaaatgcacagtatttttgccttacgcggcgatttcaatagggcggcttcaggcatcatagcccggatgacttacctgctgaaggttgacacaaataatgttcatatccgaactgtgcgggcgaaatatattgatgagttgatcgatttgctgttcatgcaggcatccgcttttcagcaagaaaaatggcagggatggtccgcacaatcaccagacttacctcgccaccaacaactttggctggacccgtggcgaagcctctcagatgagactttcaaacaggagcgtgagaaaaacgactggcaagtaactgtcgccgatgatttcgcacgctggctgaattatcgcctgaaaaaatccagttttgacgtaggcgctgtcgaacaaaaagagtggcgcagccagtctctgttcgctcaacggatgcgtgaaatggaagctgttttgcaggaggcgctgaaatga

SEQ ID NO: 845 - DNA, 924 bp, Escherichia coli
atgagttatctgctcttgttaccccatatacgcatcgaaaacgctaacgctgtctccgggttgacctggggattcccgtcgatgacccattttctcggttatgtccatgcgctttctcgcaaagtcgtggatgaatttggcgtaagttttgatggttgtgcggtagtaagccatgaacagcatattcaggcgtacagctctgggcgcgattttcagttcgctctcacccgtaacccattaaccagagaaggtaaaaccgcctcgttcaatgaagagggccgcatgcacttgacggtttctctactgattgaatgtaatggcgaaatcaccaatggtgaatatggcagaaaagttctttgtgactatctgaaaatgctttgccagagccacaaactggcgggcggcagcattgtcagtatgcgcgatccgcagctttttcatgcgcctgaagatgaaaagcaactgcgtaaaatcgtctggcggttaatgccgggttatgcgctttacgatcgcagtgaatggctggctgaacatcaccaacaacatcccgacatctcgttgctggatgcctggcttgatttcgccgcgattaaatatcaggccgaatctccggctgaagacaacagcgcaaaatgggtataccagccgaagccaatacctggtttcctggtaccgttaatgtgtggctaccaacgcatttctcctgtttacgcacccggtgaagttgaaaatgcgcgcgacaccgtgacgccatttgcctttgccgaagcggtatatggcattggcgaatggcgcggattacatcgcactacagacttgcaagcgctgatgtggcgttaccgcacaacggacactggctactattgttcggcaacgccagttgttgatgattttacctttaatgaatatgacgatttagaataa

SEQ ID NO: 846 - DNA, 1002 bp, Escherichia coli
atggcaaaggctcctgtagcaataaaaacggcgtcggtactggcatttgagcgcaaactggcaacctctgacgcggtaatgtacgcaggtaactggcaaggaaatgaatggcaacccattgagattcaggagaaagcggtccgcggaaccatctctaatcgcctgaaaaatgccattgtcagcgatcccacaaaactggatgctgaaatccaaaaagccaacctgcaacgggtggatgtggcttcgcttccggtagatacggatacgttaaaggtggtgtttacgctgcgtgtgctgggtaatttatccacaccgtcagtatgtaatgatatggcttaccaggaggcgctttccggggtcattgaaggttacatcagcgaacatggctttaaagagctggcgcttcgctatgcgctgaatctggcaaatggtcgttttctgtggcgcaaccgcattggtgccgaacagatccaggtgaaagtgactgctaacgagacgtcatggacttttaacagccatgacttctctttacgtcaatttgaccagggacaggcagcggtcacgcagctggcggccattatagagcaaggattaagcgcaaaagagtgggtgatgcttaccgttgaagcgcaggttcgtcttggtgccgggcaagaagtttttccgtcgcaggagctggtactcgacagcaacagtagtaaaagtcgcgtgttataccaggtggctggcattgccggtattcactctcagaagattggcaatgctttacgtaccattgatacctggcatccaaaggttgatgaattgggggctatagccgtggaaccttacggttctgtaaccagtcgcggtgtggcctgccgtcaaccgaaagaaaaactcgacttttataccttactggacaattgggtgactaaagggatgaaaccagacgttgagcagcagcactacgtgatggctgtgctgatccgtggcggtgtctttggtgagaaatcggaataa

SEQ ID NO: 847 - DNA, 555 bp, Escherichia coli
atggatcactaccttgagatccgcgttctgccagatcctgaattttcgagcgaaatgttgatggcggcgttatttgcaaaactgcatcgggtattaggtgcaagagggcaaggcgatatcggcgtgagtttccctgacgtaaatgttatgcctggagcgcgtttacgcttgcatggtagcgcccaggcattgcaggcgcttgaagcctcaacgtggcgtaaaggactaacggactattgccaatgttcacctgtcactcccgttccagaaataaaaggctggcgagtagtaagccgtgtgcaggttaaaagtaaccctcagcgtctgttaaggcgttcagtgaaaaaaggctggctaactgaagaacaggcaattgaacgactggcgacgcaggctgaacagcggactgatttaccttttctcaatatgaagagtttgtcgagtcagcaactgttcaagttgtttatccgtcatggtgatttgctcaaagaaccggttaaaggggaatttagtagttatggattaagcgcaaccgccactattccctggttttga

SEQ ID NO: 848 - DNA, 219 bp, Escherichia coli
atggccaaagaagacaatattgaaatgcaaggtaccgttcttgaaacgttgcctaataccatgttccgcgtagagttagaaaacggtcacgtggttactgcacacatctccggtaaaatgcgcaaaaactacatccgcatcctgacgggcgacaaagtgactgttgaactgaccccgtacgacctgagcaaaggccgcattgtcttccgtagtcgctga

SEQ ID NO: 849 - DNA, 705 bp, Escherichia coli
atgcgcctggttcagctttctcgccattcaatagccttcccttccccggaaggcgcattacgtgagcctaacggcctgctggcactggggggcgatcttagccctgcgcgcctattaatggcttatcagcgtggtattttcccgtggttttctcctggcgaccccatcctctggtggtcgcccgatccccgcgcggtgttatggccagaatcactgcatatcagccgtagtatgaagcgatttcataaacgctcaccctatcgtgtcacgatgaattacgcttttggtcaggtcatcgaaggctgtgccagcgatcgcgaagaaggaacctggatcacgcgtggcgtggtcgaagcctaccatcgccttcacgaactcggtcatgcccactccattgaagtctggcgtgaagatgagcttgtcggcggtatgtacggcgtggcccagggaacactattttgtggcgagtccatgttcagccggatggaaaatgcgtccaaaacggcgcttctggtcttctgtgatgaatttatccgtcatggcggtaaacttatcgactgccaggtccttaacgatcacacagcatcgcttggtgcctgcgaaattccccgccgggattaccttaattatctcaatcaaatgcgcctcggacgattgccgaataatttctgggtacctcgatgcttgttttcaccacaagaatga

SEQ ID NO: 850 - DNA, 1722 bp, Escherichia coli
atgcgcgctttgctaccctatctggcactgtataaacgtcataaatggatgttaagtcttggtattgtgctggcaattgtcacgctgctcgccagtatcggtctgttgacactttccggctggttcctctccgcctcagcggtagcgggggttgccggactgtacagcttcaactatatgctacccgctgcgggcgtgcgtggcgcagcaatcacccgtactgccgggcgttattttgaacgtctggtaagtcacgacgcgactttccgcgtgttgcagcatctgcgcatatacaccttcagcaaattgctgcccctctcccctgccggactggcgcgctatcgtcagggtgaattactcaaccgcgtggtggcggatgttgatacgctcgatcatctttacctgcgcgttatctcgccgctggtaggtgcttttgtggtgattatggtggtgacaatcgggttaagtttccttgatttcaccctcgcctttacgctgggcggcattatgttactgacgcttttcctgatgccaccactgttttatcgtgcgggaaaaagcaccgggcaaaatctgactcatcttcgcgggcagtatcgccaacaactgacggcctggctgcaagggcaagctgagctgaccatttttggtgccagcgatcgttatcgcacgcaattagagaatacagaaattcagtggctggaagcgcaacgccgtcaatctgaactgaccgcattgtcgcaagcgataatgctgctcattggcgcgttagcggtgatcctgatgctgtggatggcgtccggtggcgttggcggcaatgctcaacccggcgcgttaattgccctgtttgtcttctgcgcgttagccgcgtttgaagcgctggcaccagtaacgggtgcatttcagcatctggggcaagtcattgcctctgccgtacggatcactgatttaacggatcaaaaaccggaagtcaccttccctgatacccaaactcgtgttgccgatcgcgtttcgctgacattacgggatgttcagttcacttatccggagcaatcccaacaggcacttaaagggatttatcttcaggtaaacgccggggaacatattgcgattctcgggcgaaccggatgcggcaaatcaacactgttacaactgctgacccgcgcatgggacccgcaacagggcgagattttgcttaacgatagtcccatagccagcctgaatgaagcggctctacgacagaccatcagcgttgttccccagcgagtgcatctgtttagcgccacgctgcgtgataatctgttactcgcctcgcctggtagtagtgatgaggctctggcggagatcttgcgtcgcgttggtctggagaagctgctcgaggatgcaggtctcaacagttggttaggtgaaggcggacgccagctctccggtggtgaactgcgccgtctggctatcgcccgtgcgctgttacatgatgcgccgctggtattgctggatgaacctacagaaggcttagatgccacaaccgaaagtcagatccttgaattgcttgcagaaatgatgtgcgagaaaacggtgttaatggtcacccatcgacttcgcggactctctcgtttccaacaaataatagtgatggacaacgggcaaattattgagcaaggtactcacgcagaactgcttgccagacaggggcgttattaccagtttaagcagggtttgtaa

SEQ ID NO: 851 - DNA, 1767 bp, Escherichia coli
atgaataaatcccgtcaaaaagaattaacccgctggttaaaacagcaaagcgtcatctcccaacgttggctgaatatttctcgtctgctgggctttgtgagcggcatattgatcattgcccaggcctggttcatggcgcgaattctgcaacatatgattatggagaatattccccgtgaagccctgctgcttccctttacgttactgtttctgacctttgtactgcgcgcatgggtggtctggttacgcgaacgggtgggttatcacgccgggcagcatatccgctttgccatccgccgtcaggttctcgaccgtctgcaacaagcagggccagcgtggattcagggtaaaccggcggggagctgggcgacgctggtactcgagcaaattgacgatatgcatgattactatgcacgctacctgccgcaaatggcgctggcagtgtcggtgccgttgctgattgtggtggctatcttcccctctaactgggctgcggcgctcattctgctgggcactgctccgttaattccgttgtttatggcgctggttggaatgggggctgccgatgctaaccgacgtaactttctcgctcttgctcgcttaagtgggcattttctcgatcgcctgcgcggcatggaaacattgcgtatttttggtcgtggtgaagctgaaattgaaagtattcgttctgcttcggaagatttccgccaacggacaatggaagtgctacggctggcgtttttatcctccggcattctcgaattttttacctcgctgtcaattgctctggtggcggtctactttggtttttcctacctcggcgagctggattttggtcactacgatactggcgtgacgctggctgcgggttttctggccctgatccttgcgccagagtttttccagccattacgcgatctcggtacgttttatcatgctaaagcccaggctgttggtgcagctgacagtttgaaaacgtttatggaaaccccgctcgcccatccgcaacgtggtgaggcggaattagcatcaaccgatccggtgaccattgaagccgaggatctgtttattacatcaccagaaggtaaaacgctggctggaccgctgaactttactttgccagcaggccaacgtgcagtgttggttggtcgcagcggttcaggtaaaagctcactgctgaacgcgctttctggttttctctcatatcagggatcgctacgaatcaacgggatagaattacgcgatttatcaccggaatcatggcgtaagcatctctcctgggttgggcaaaacccacaattaccggcagcaacactacgggataacgtactactggcacgacctgatgccagcgaacacgagttacaaacagcgctggataacgcctgggtcagtgagtttctacagctcctgccacaaggcgttgatacgcctgttggcgaccaggctgcccgcctttccgtggggcaggcacagcgcgtggcggtggcccgagcattactaaatccctgttcgctattactgttggatgaacccgctgccagccttgatgctcacagtgaacagcgcgtaatggaggcgcttaatgccgcctctctgcgccagacaacgttaatggtcacccaccagttagaagatcttgctgactgggatgtcatttgggtaatgcaggatggtcagattattgagcaaggacgttacgcggaattaagcatggctggtggtcctttcgccacattgctggcccatcgtcaggaggagatttaa

SEQ ID NO: 852 - DNA, 1071 bp, Escherichia coli
atgctgccgattgcacaaattgttaacaaaatcgtcatactctttttttacgtctgtaaattccctacaatcctgccattgtctgccaacaactatggggatctcatgggcacgaccaaacacagtaaactgcttatcctgggttcaggcccggcgggatacaccgctgctgtctacgcggcgcgcgccaacctgcaacctgtgctgattaccggcatggaaaaaggcggccaactgaccaccaccacggaagtggaaaactggcctggcgatccaaacgatctgaccggtccgttattaatggagcgcatgcacgaacatgccaccaaatttgaaactgaaatcatctttgatcacatcaacaaagttgatttgcagaatcgtccgttccgtctgactggcgatagcggcgaatacacttgcgacgcgctgattattgccaccggagcttctgcacgctatctcggcctgccctctgaagaagcctttaaaggccgtggagtttctgcttgtgcaacctgcgacggtttcttctatcgcaaccagaaagttgcggtcatcggcggcggcaataccgcggttgaagaggcgctgtatctgtctaacatcgcttcggaagttcatctgattcaccgccgagatggtttccgtgcggaaaaaatcctcattaagcgtctgatggataaagtggagaacggcaacattattctgcacatcaaccgtacgctggaagaagtgaccggcgatcagatgggcgtcactggcgttcgtctgcgcgatacgcaaaacaccgataatatcgagtcactcgacgttgccggtctgtttgttgctatcggtcacagcccgaatactgccattttcgaagggcagctggaactggaaaacggctacatcaaagtacagtcgggtattcatggtaatgccacccagaccagcatccctggcgtctttgccgcaggcgacgtgatggatcacatttatcgccaggccattacatctgctggtacaggctgcatggcagctcttgatgcggaacgctacctcgacggtttagctgacgcaaaataa

SEQ ID NO: 853 - DNA, 495 bp, Escherichia coli
atggtagatagcaagaagcgccctggcaaagatctcgaccgtatcgatcgtaacattcttaatgagttgcaaaaggatgggcgtatttctaacgtcgagctttctaaacgtgtgggactttccccaacgccgtgccttgagcgtgtgcgtcggctggaaagacaagggtttattcagggctatacggcgctgctgaacccccattatctggatgcatcacttctggtattcgttgagattactctgaatcgtggcgcaccggatgtgtttgaacaattcaataccgctgtacaaaaacttgaagaaattcaggagtgtcatttagtatccggtgatttcgactacctgttgaaaacacgcgtgccggatatgtctgcttaccgtaagttactgggggaaaccctgctgcgtctgcctggcgtcaatgacacacggacatacgttgttatggaagaagtcaagcagagtaatcgtctggttattaagacgcgctaa

SEQ ID NO: 854 - DNA, 4044 bp, Escherichia coli
ttgagccaggaatacactgaagacaaagaagtcacattgacaaagttaagtagcggccgccgtcttctggaggcgttgctgatccttattgtcctgtttgccgtctggttgatggctgccttactaagctttaacccttcggaccccagctggtcgcaaacggcctggcatgaacctatccataatttaggtgggatgcccggtgcgtggttggcagatacgctgttctttatttttggcgtgatggcttacaccattcccgtcattattgtcggcggttgttggtttgcctggcgtcatcagtccagcgacgaatacattgattattttgccgtttcgctacgcatcattggcgttttggcgctcatccttacctcctgtggtctggcggcaatcaacgctgacgatatctggtattttgcctccggtggcgtcattggcagcttactaagcactacgctacaaccactgctacacagtagcgggggaactattgcgctgctctgcgtttgggcagcgggcctgacgctgttcaccggttggtcatgggtgaccattgctgaaaaactcggcggctggattttaaatattcttaccttcgccagtaatcgtacccgtcgcgatgatacctgggtcgatgaagatgagtatgaagacgacgaagagtatgaagatgaaaatcacggcaaacagcatgaatcacgccgtgcccgtattcttcgcggcgcgctagcgcgtcgtaaacggttggcggaaaaattcattaatccgatggggcggcaaacagatgctgcgctgttctccggtaagcggatggatgatgaagaagagattacctacactgcacgcggtgtggctgccgaccctgacgacgtcctgttttcgggcaatcgtgcaacgcagccagaatatgacgaatacgatccattattaaacggtgcgccaattaccgaacctgttgctgtagcagctgctgctaccacggcgacacaaagctgggctgcaccggttgaacctgtgactcagacgccgccagttgcctctgttgatgttccacctacgcaacctacagtagcctggcagcctgtaccggggccgcaaacgggagaaccggttattgcacctgcaccggaaggttacccacagcagtcacaatatgcgcagcctgcagtgcaatataatgagccgctgcaacaacctgtacagccacagcagccgtattatgcgcctgcggctgaacaacctgtgcaacaaccttactacgctcctgcggcggaacaacctgttcagcaaccgtattacgcccctgcgccagaacaaccggtggcaggtaacgcctggcaagccgaagagcagcaatccacttttgctccacagtctacataccagacggagcaaacttatcagcagccagctgctcaggagccgttgtaccaacagccgcaacccgttgaacagcagcctgttgtggagcctgaacccgttgtagaagagacaaaacccacgcgtccgccgctttactattttgaagaagtggaagagaagcgagcccgtgaacgtgaacaacttgcggcctggtatcaaccgattccagaaccggttaaagaaccggaaccgatcaaatcttcgctgaaagcaccttctgttgcagcagtacctccagtagaagccgctgccgctgtttctccgctggcatctggtgtgaaaaaagcgacactggcgacgggggctgccgcaaccgttgccgcgccagtcttcagtctggcaaatagcggtggaccgcgtccgcaggtcaaagaggggattggcccgcagttgccacgaccgaaacgcatccgcgtgccaactcgtcgtgaactggcgtcttacggtattaagctgccctcacagcgtgcggcagaagaaaaagcccgtgaagcccagcgtaatcagtacgattctggcgatcagtacaacgatgatgaaatcgatgcgatgcagcaggatgaactggcacgtcagttcgcccagacgcagcagcaacgctatggcgaacagtatcaacatgatgtgcccgtgaacacagaagatgcagatgctgcggcagaggcagaactggctcgtcagtttgctcaaactcaacaacaacgttattccggcgaacaaccggctggggcgaatccgttctcgctggatgattttgaattttcgccaatgaaagcgttgctggatgatggtccacacgaaccgctgtttacgccaattgttgaacctgtacagcagccgcaacaaccggtagcaccgcagcagcaatatcagcagccgcaacaaccggttgcaccgcagccgcagtatcagcagccgcaatatcagcagccacaacagccggttgcacagcagccgcaatatcagcagccgcaacaaccggttgcaccgcagcagcaatatcagcagccgcaacagccggttgcacagcagccgcaatatcagcagccgcaacagccagttgcgccgcagccgcatgataccctgcttcatccgctgttgatgcgcaatggtgacagccgtccgttgcataaatcgacgacgccgctgccttctctggatttgctgacacctccgccgagcgaagtggagccggtagatacctttgcgcttgaacaaatggcgcgcctggtagaagcgcgtctggctgatttccgtattaaagccgatgttgtcaattactctccggggccagttatcactcgctttgaattgaacctggcaccgggcgtaaaagcagcgcgcatttctaacttgtcacgtgaccttgcccgttcactttcgacggtggcggtgcgtgtcgttgaagttattcctggcaaaccctatgtaggtctggagttaccgaataaaaaacgacaaaccgtttatctgcgcgaagttttggataacgccaaattccgcgataatccgtcgccattaaccgtggtgctgggtaaagatatcgccggtgagccggtggttgccgatctggcgaaaatgccgcacttgttggttgcggggactaccggttccggtaagtctgtcggggtgaacgcgatgatcctgagcatgctttataaagcacagccagaagatgtgcgtttcatcatgatcgacccgaaaatgctggagctttcggtttatgaaggcattccgcatctgttaacggaagtcgttaccgatatgaaagatgccgccaacgcgctgcgctggtgtgttaacgagatggagcgtcgttataaactgatgtctgcgctgggtgtgcgtaatctggcgggttataacgaaaaaattgctgaagccgataggatgatgcgtccgattccagacccgtactggaagccgggtgacagtatggatgcccagcatccggtgctgaaaaaagaaccgtacattgtggtgttggtggacgaatttgccgacctgatgatgacggtaggtaaaaaagtggaagagctgatagcacgtctggcgcaaaaagcccgtgccgcgggtatccacctcgtactggcaacgcagcgtccatcggttgatgttattactggtctgattaaagcgaatattccgacccgtatcgcctttaccgtatccagtaagattgactcacgtaccattcttgatcaggctggtgcggaatcactgctgggtatgggggatatgctctactctgggccgaactccacgttgccggtacgtgtccatggtgcttttgttcgcgatcaggaagttcatgccgtggtgcaggactggaaagcgcgtggtcgcccacagtatgttgatggcatcacctccgacagtgaaagcgaaggtggcgtgggcggtttcgatggcgctgaagaactggatccgttgttcgatcaggcggtgcagtttgtcactgaaaaacgcaaagcgtcaatttctggcgtacagcgtcagttccgcattggttataaccgtgcagcgcgtattatcgaacagatggaagcgcaggggattgtcagcgaacaggggcacaacggtaatcgtgaagtgctggccccaccgccatttgactaa

SEQ ID NO: 855 - DNA, 612 bp, Escherichia coli
atgaaaaaaattgccatcacctgtgcattactctcaagcttagtagcaagcagcgtttgggctgatgccgcaagcgatcttaaaagccgcctggataaagtcagcagcttccacgccagcttcacacagaaagtgactgacggtagcggcgcggcggtgcaggaaggtcagggcgatctgtgggtgaaacgtccaaacttattcaactggcatatgactcaacctgatgaaagcattctggtttctgacggtaaaacactgtggttctataacccgttcgttgagcaagctacggcaacctggctgaaagatgccaccggtaatacgccgtttatgctgattgcccgcaaccagtccagcgactggcagcagtacaatatcaaacagaatggcgatgactttgttctgacgccgaaagccagcaatggcaatctgaagcagttcaccattaacgtgggacgtgatggcacaatccatcagtttagcgcggtggagcaggacgatcagcgcagcagttatcagctgaaatcccagcaaaatggggctgtggatgcagcgaaatttaccttcaccccgccgcaaggcgtcacggtagatgatcaacgtaagtag

SEQ ID NO: 856 - DNA, 1344 bp, Escherichia coli
gtgagcaatctgtcgctcgatttttcggataatacttttcaacctctggccgcgcgtatgcggccagaaaatttagcacagtatatcggccagcaacatttgctggctgcggggaagccgttgccgcgcgctatcgaagccgggcatctgcattctatgatcctctgggggccgccgggtaccggcaaaacaaccctcgctgaagtgattgcccgctatgcgaacgctgatgtggaacgtatttctgccgtcacctctggtgtgaaagagattcgcgaggcgatcgagcgcgctcggcaaaaccgcaatgcaggtcgccgcactattctttttgttgacgaagttcaccgtttcaacaaaagccagcaggatgcatttctgccacatattgaagacggcaccatcacttttattggcgcaaccactgaaaacccgtcgtttgagcttaattcggcactgctttcccgtgcccgtgtctatctgttgaaatccctgagtacagaggatattgagcaagtactaactcaggcgatggaagacaaaacccgtggctatggtggtcaggatattgttctgccagatgaaacacgacgcgccattgctgaactggtgaatggcgacgcgcgccgggcgttaaatacgctggaaatgatggcggatatggccgaagtcgatgatagcggtaagcgggtcctgaagcctgaattactgaccgaaatcgccggtgaacgtagcgcccgctttgataacaaaggagatcgcttttacgatctgatttccgcactgcataagtcggtacgtggtagcgcacccgatgcggcgctgtactggtatgcgcgaattattaccgctggtggcgatccgttatatgtcgcgcgtcgctgtctggcgattgcgtctgaagacgtcggtaatgccgatccacgggcgatgcaggtggcaattgcggcctgggattgctttactcgcgttggcccggcggaaggtgaacgcgccattgctcaggcgattgtttacctggcttgcgcgccaaaaagcaacgctgtctacactgcgtttaaagccgcgctggcggatgcacgcgaacgtccggattatgacgtgccggttcatttgcgtaatgcgccgacgaaattaatgaaggaaatgggctacgggcaggaatatcgttacgctcatgatgaagcaaacgcttatgctgccggtgaggtttatttcccgccggaaatagcacaaacacgctattatttcccgacaaacaggggccttgaaggcaagattggcgaaaagctcgcctggctggctgaacaggatcaaaatagccccataaaacgctaccgttaa

SEQ ID NO: 857 - DNA, 1293 bp, Escherichia coli
atgctcgatcccaatctgctgcgtaatgagccagacgcagtcgctgaaaaactggcacgccggggctttaagctggatgtagataagctgggcgctcttgaagagcgtcgtaaagtattgcaggtcaaaacggaaaacctgcaagcggagcgtaactcccgatcgaaatccattggccaggcgaaagcgcgcggggaagatatcgagcctttacgtctggaagtgaacaaactgggcgaagagctggatgcagcaaaagccgagctggatgctttacaggctgaaattcgcgatatcgcgctaaccatccctaacctgcctgcagatgaagtgccggtaggtaaagacgaaaatgacaacgttgaagtcagtcgctggggcaccccgcgtgagtttgactttgaagttcgtgaccatgtgacgctgggtgaaatgcactctggcctcgactttgcagccgcagttaagttgactggttcccgctttgtcgtcatgaaagggcagattgctcgcatgcaccgcgcactgtcgcagtttatgctggatctgcataccgaacagcatggctacagtgagaactatgttccgtacctggttaaccaggacacgctgtacggtacgggtcagctgccgaaatttgctggcgatctgttccatactcgtccgctggaagaagaagcagacaccagtaactatgcgctgatcccaacggcagaagttccgctgaccaacctggtacgcggtgaaatcatcgatgaagatgatctgccaattaagatgaccgcccacaccccatgtttccgttctgaagctggttcatatggtcgtgacactcgtggtctgatccgtatgcaccagttcgacaaagttgaaatggtgcagatcgtgcgcccggaagactcaatggcggcactggaagagatgaccggtcatgcggaaaaagtcctgcagctgctgggtctgccgtaccgcaaaatcatcctttgtaccggcgacatgggctttggtgcttgcaaaacttacgacctggaagtatggatcccggcacagaacacctaccgcgagatctcttcctgctccaacgtctgggatttccaggcgcgtcgtatgcaggcacgttgccgcagcaagtcggacaagaaaacccgtctggttcataccctgaacggttctggtcttgctgttggtcgtacgctggttgcagtaatggaaaactatcagcaggctgatggtcgtattgaagtaccagaagttctgcgtccgtatatgaacggactggaatatattggctaa

SEQ ID NO: 858 - DNA, 2445 bp, Escherichia coli
atgaaaactaaaatccctgatgcggtattggctgctgaggtgagtcgccgtggtttggtaaaaacgacagcgatcggcggcctggcaatggccagcagcgcattaacattaccttttagtcggattgcgcacgctgtcgatagcgctattccaacaaaatcagacgaaaaggttatctggagcgcctgtacagttaactgtggtagtcgctgcccgctacgtatgcacgtagtggacggtgaaatcaaatatgtcgaaacggacaataccggcgatgacaattacgacggcctgcaccaggttcgcgcctgtctgcgtgggcgttccatgcgtcgccgtgtctacaatccggaccgcctgaaatatccgatgaaacgagtcggggcgcgcggtgaaggcaaattcgagcgcattagctgggaagaagcctacgacatcatcgcgaccaaaatgcagcgcctgatcaaagagtacggcaacgagtctatctatctgaactatggcaccggtacgctgggcggcaccatgacccgctcgtggccgccgggaaataccctggtcgcgcggctaatgaactgctgcggcggttatctgaaccattatggcgactactcctccgcgcaaattgcggaaggtctgaactatacctacggcggctgggcagatggtaacagcccgtcggatatcgaaaacagtaaactggtagtgctgtttggtaataaccctggcgaaacgcgaatgagtggcggtggggtgacttactatcttgaacaggcgcgccagaaatctaatgctcgcatgatcatcatcgatccgcgctataccgacaccggtgccgggcgtgaagatgagtggatccctattcgtccgggaacagatgccgcactggttaacggtctggcgtatgtcatgatcaccgaaaacctggtagatcaggaattcctcgataaatattgcgttggctacgacgagaaaaccctgccagccagtgcgccgaaaaatggtcactataaagcttatattctgggtgaaggacccgatggcgtggctaaaacaccggaatgggcctcgcaaatcaccggtgttccggcagacaaaatcatcaaactggctcgtgaaatcggcagtaccaaaccggcgtttatcagccagggatggggcccgcagcgtcatgctaacggtgaaatcgcaacccgtgctatctcgatgctggcgattctgaccggtaacgttggtattaacggggggaacagcggcgcgcgcgaaggttcatacagcttaccgtttgtccgtatgccgactctcgaaaacccgatccagaccagcatttctatgtttatgtggaccgatgccattgaacgtggcccggaaatgacggcgctgcgtgatggtgtgcgcgggaaagataagctggatgtgccgatcaaaatgatctggaactatgccggtaactgcctgattaatcagcattctgaaatcaaccgtacccatgaaatccttcaggatgataagaagtgcgagctgattgtggttatcgactgccacatgacctcatcggcgaaatatgctgacatcctgctgcctgactgcaccgcttccgaacagatggactttgcactggatgcatcctgcgggaatatgtcttacgttattttcaatgatcaggtcattaaaccgcgctttgaatgtaagactatctatgagatgaccagcgaactggcaaaacgtcttggcgtcgaacaacagtttactgaaggtcgtactcaggaagagtggatgcggcatctgtatgcccagtcgcgggaagcgattcctgaactgccaacgtttgaagaattccgtaagcaggggatctttaaaaagcgcgatccgcaagggcatcacgttgcttacaaagccttccgtgaagatccgcaggctaatccattgaccacgccatcgggcaaaattgagatctattcacaggcgctggctgacattgccgctacctgggaattgccagaaggtgatgtgatcgatccactgccgatctatacgccgggctttgaaagttatcaggatccgctgaacaaacagtatccgctgcagcttacgggtttccactataaatctcgcgttcactcaacttacggcaacgttgatgtgctgaaagcagcttgccgtcaggaaatgtggatcaacccgcttgatgcgcaaaaacgcggtatcagcaacggcgataaagtcaggatctttaatgatcgtggtgaggttcatattgaggcgaaagtgacgccacgaatgatgccgggtgtggtcgcactgggtgaaggtgcctggtatgacccggatacaaaacgtgtcgataagggcggttgtattaacgtactgaccactcaacgtccgtctcctcttgccaaggggaatccatcacatacgaaccttgttcaggttgaaaaggtgtaa

SEQ ID NO: 859 - DNA, 618 bp, Escherichia coli
atgacaacccagtatggattttttattgattccagccgttgcaccggttgcaaaacctgcgagctggcctgtaaagactacaaagatctgacgccggaagttagtttccgccgcatttatgaatatgctggtggagactggcaggaagataacggcgtctggcatcaaaacgtatttgcctactatttgtcgatttcatgcaaccactgcgaagatccggcttgtaccaaagtctgcccaagcggtgcgatgcataaacgtgaagatggttttgtcgttgtcgatgaagatgtgtgtattggctgtcgttactgccatatggcctgcccgtatggcgcaccgcagtacaacgcaaccaaaggtcatatgaccaaatgtgatggttgctatgaccgcgtcgcagaaggtaaaaaaccgatctgcgtcgaatcttgcccgctacgggcgctggatttcggacctatcgacgagctgcgtaaaaaacacggcgatctggcggctgttgcgccgttgccgcgtgcgcacttcaccaaaccgaatattgtgatcaaacctaacgccaatagccgcccaaccggggataccactggctatctggcaaacccgaaggaggtgtga

SEQ ID NO: 860 - DNA, 864 bp, Escherichia coli
atgggaagtggatggcatgaatggccgctgatgatcttcacggttttcgggcaatgtgtagcgggtggttttatcgttctggctttggcgctgctcaaaggcgacctgcgagcagaagcccagcagcgtgttatcgcctgcatgttgggtttatgggtgctgatgggcattggctttatcgcctctatgcttcatcttggttcaccgatgcgcgcttttaactcgctcaatcgggtaggggcttcagcactcagtaacgaaatcgccagcggttcgatcttttttgctgtaggcggcatcggctggttgctggcaatgctgaaaaagctttcaccggcattgcgtacgctttggctggtggtgacgatggttcttggcgtagtctttgtctggatgatggtgcgtgtgtataacagcatcgatacagtacccacctggtacagcatctggacaccgatgggcttcttcctgacgatgtttatgggcggcccgttactgggttacctgttgctgagtctggctggtgtcgatggctgggcgatgcgtctgctgccagccatttctgttctggcactggtagtgagtggcgtgatgtcagtgatgcagggcgcagagctggcgactattcatagctctgtgcagcaggccgcagcgctggtgccggactatggtgcgctgatgtcctggcggatcgtgcttttggccgttgccctgtgcttgtggattgcaccacagctaaaaggttatcagcctgcggttccgctactttctgtatcattcattctgcttctggcaggggaattaatcggtcgtggcgtattctatggtttgcatatgaccgtggggatggctgtcgcaagttaa

SEQ ID NO: 861 - DNA, 627 bp, Escherichia coli
atgaccaaaccgtatgttcgtcttgataaaaatgatgctgccgttttgcttgttgatcaccaggctggtttactttcccttgtacgggatatcgaacccgataagtttaaaaataacgtgctggcgctgggtgacctggctaagtatttcaacttaccaactattcttaccaccagttttgaaaccggtcctaacggcccattagttccagaactgaaagcacaattccccgatgcaccttacattgctcgcccgggaaatattaacgcctgggataacgaagattttgtaaaagctgtcaaagcgacaggtaaaaaacagttaattattgccggtgtggtaaccgaagtttgcgtggcattcccggcgctttcagccattgaagaagggtttgacgtctttgtcgtgactgacgcgtcagggacctttaatgaaattacccggcattcggcatgggatcgcatgtcgcaagctggtgcgcaattgatgacatggttcggcgtggcatgcgagctgcatcgcgactggcgtaatgatattgaaggactggcgacgttgttctctaaccacattcctgattatcgtaacttgatgaccagttatgacacgttaacgaagcagaaataa

SEQ ID NO: 862 - DNA, 1149 bp, Escherichia coli
atgtccacgtatacccggcctgtcatgcttttgctgtctggcctgcttttgttgactctggcgatcgcggtgttaaatacactcgcgccgctttggctcgcccaggaacacatgtctacatggcaggtaggcgttgtcagctcatcctattttaccggcaaccttgtcggtacattgctgacagggtatgtcattaaacgcattggctttaaccgtagctattatctggcctccttcatttttgccgctggctgtgccggccttggcctgatgattggattctggagttggttggcgtggcgttttgtcgctggcatcggctgtgccatgatttgggtagttgttgagagtgcgctgatgtgcagtgggacgtcgcgtaaccgcgggcggttgcttgctgcgtatatgatggtttattacgtcggaacgtttttaggccagttactggtcagcaaagtctcaaccgagttgatgagtgtattgccgtgggttacaggtttgacgttggcaggaatcttaccgctgttgtttacgcgtgtcctgaatcagcagactgaaaaccatgattcgacgtcaattacgtcaatgctaaaactccgtcaggcgcggcttggcgtgaatggctgcattatctcaggaatcgtgctgggatctctatatggcctgatgccgctgtacctcaatcacaaaggggtgagcaatgccagcattggtttctggatggcggtactggtcagtgcgggtatcctcgggcaatggccgattggacgtctggcggataagtttggtcgactgctggtgttgcgtgttcaggtctttgtcgtcattctcggcagtattgcgatgcttagccaggcggcgatggccccagcgttattcatcctcggtgccgctggctttacgctatatccggtggcgatggcctgggcttgtgagaaagttgaacatcatcaactggtggcgatgaaccaggccttactgttgagctataccgtgggaagcctgcttggcccgtcatttaccgctatgctaatgcagaatttctccgataatttattatttatcatgatcgccagcgtatcgtttatctatttgctgatgctgcttcgtaacgccggtcatacgccgaaacccgtggctcacgtgtaa

SEQ ID NO: 863 - DNA, 741 bp, Escherichia coli
atgtcagttattggtcgcattcactcctttgaatcctgtggaaccgtagacggcccgggtattcgctttatcacctttttccagggctgcctgatgcgctgcctgtattgtcataaccgcgacacctgggatacgcatggcggtaaagaagttaccgttgaagatttgatgaaggaagtggtgacctatcgccactttatgaacgcttccggcggcggcgttaccgcatccggcggtgaggcaatcctacaagctgagtttgttcgtgactggttccgcgcctgcaaaaaagaaggcattcatacctgtctggacaccaacggttttgttcgtcgttacgatccggtgattgatgaactgctggaagtaaccgacctggtaatgctcgatctcaaacagatgaacgacgagatccaccaaaatctggttggagtttccaaccaccgcacgctggagttcgctaaatatctggcgaacaaaaatgtgaaggtgtggatccgctatgttgttgtccctggctggtctgacgatgacgattcagcgcatcgcctcggtgaatttacccgtgatatgggtaacgttgagaaaatcgaacttctcccctaccacgaactgggcaaacacaaatgggtggcgatgggtgaagaatacaaactcgatggtgttaaaccaccgaagaaagagaccatggaacgcgtgaaaggcattcttgagcagtacggtcataaggtcatgttctaa

SEQ ID NO: 864 - DNA, 2283 bp, Escherichia coli
atgtccgagcttaatgaaaagttagccacagcctgggaaggttttaccaaaggtgactggcagaatgaagtaaacgtccgtgacttcattcagaaaaactacactccgtacgagggtgacgagtccttcctggctggcgctactgaagcgaccaccaccctgtgggacaaagtaatggaaggcgttaaactggaaaaccgcactcacgcgccagttgactttgacaccgctgttgcttccaccatcacctctcacgacgctggttacatcaacaagcagcttgagaaaatcgttggtctgcagactgaagctccgctgaaacgtgctcttatcccgttcggtggtatcaaaatgatcgaaggttcctgcaaagcgtacaaccgcgaactggacccgatgatcaaaaaaatcttcactgaataccgtaaaactcacaaccagggcgtgttcgacgtttacactccggacatcctgcgttgccgtaaatccggtgttctgaccggtctgccagatgcttatggccgtggtcgtatcatcggtgactaccgtcgcgttgcgctgtacggtatcgactacctgatgaaagacaaacttgcacagttcacctctctgcaggctgatctggaaaacggcgtaaacctggaacagactatccgtctgcgcgaagaaatcgctgaacagcaccgcgctctgggtcagatgaaagaaatggctgcgaaatacggctacgacatctctggtccggctaccaacgctcaggaagctatccagtggacttacttcggctacctggctgctgttaagtctcaaaacggtgctgcaatgtccttcggtcgtacctccaccttcctggatgtgtacatcgaacgtgacctgaaagctggcaagatcaccgaacaagaagcgcaggaaatggttgaccacctggtcatgaaactgcgtatggttcgcttcctgcgtactccggaatacgatgaactgttctctggcgacccgatctgggcaaccgaatctatcggtggtatgggcctcgacggtcgtaccctggttaccaaaaacagcttccgtttcctgaacaccctgtacaccatgggtccgtctccggaaccgaacatgaccattctgtggtctgaaaaactgccgctgaacttcaagaaattcgccgctaaagtgtccatcgacacctcttctctgcagtatgagaacgatgacctgatgcgtccggacttcaacaacgatgactacgctattgcttgctgcgtaagcccgatgatcgttggtaaacaaatgcagttcttcggtgcgcgtgcaaacctggcgaaaaccatgctgtacgcaatcaacggtggcgttgacgaaaaactgaaaatgcaggttggtccgaaatctgagccgatcaaaggcgatgtcctgaactatgatgaagtgatggagcgcatggatcacttcatggactggctggctaaacagtacatcactgcactgaacatcatccactacatgcacgacaagtacagctacgaagcctctctgatggcgctgcacgaccgtgacgttatccgcaccatggcgtgtggtatcgctggtctgtccgttgctgctgactccctgtctgcaatcaaatatgcgaaagttaaaccgattcgtgacgaagacggtctggctatcgacttcgaaatcgaaggcgaatacccgcagtttggtaacaacgatccgcgtgtagatgacctggctgttgacctggtagaacgtttcatgaagaaaattcagaaactgcacacctaccgtgacgctatcccgactcagtctgttctgaccatcacttctaacgttgtgtatggtaagaaaactggtaacaccccagacggtcgtcgtgctggcgcgccgttcggaccgggtgctaacccgatgcacggtcgtgaccagaaaggtgctgtagcgtctctgacttccgttgctaaactgccgtttgcttacgctaaagatggtatctcctacaccttctctatcgttccgaacgcactgggtaaagacgacgaagttcgtaagaccaacctggctggtctgatggatggttacttccaccacgaagcatccatcgaaggtggtcagcacctgaacgttaacgtgatgaaccgtgaaatgctgctcgacgcgatggaaaacccggaaaaatatccgcagctgaccatccgtgtatctggctacgcagtacgtttcaactcgctgactaaagaacagcagcaggacgttattactcgtaccttcactcaatctatgtaa

SEQ ID NO: 865 - DNA, 1197 bp, Escherichia coli
atgccccgctttacatatatttgcattaataaaataattgtaattataaggttaaatatcggtaatttgtatttaataaatacgatcgatattgttactttattcgccaggtgctcccttttaattaactgttttagcggaggatgcggaaaaaattcaactcatttgttaatttttaaaatttatttttatttggataatcaaatatttactccgtatttgcataaaaaccatgcgagttacgggcctataagccaggcgagatatgatctatatcaatttctcatctataatgctttgttagtatctcgtcgccgacttaataaagagagagttagtgtgaaagctgacaacccttttgatcttttacttcctgctgcaatggccaaagtggccgaagaggcaggtgtctataaagcaacgaaacatccgcttaagactttctatctggcgattaccgccggtgttttcatctcaatcgcattcgtcttctatatcacagcaaccactggcacaggtacaatgcccttcggcatggcaaaactggttggcggcatttgcttctctctggggttgattctttgtgttgtctgcggagccgatctctttacttccacagtgttgattgttgttgccaaggcgagtgggcgcatcacctggggtcagttggcgaaaaactggctaaatgtttattttggcaacctggtcggcgcactgctgtttgtacttttaatgtggctttccggcgagtatatgaccgcaaatggtcaatggggactaaacgtcctacaaaccgccgaccacaaagtgcaccatacttttattgaggccgtctgtcttggtatcctggcgaacctgatggtatgtctggcagtatggatgagttattctggccgcagcctgatggacaaagcgttcattatggtgctgccggtcgcgatgtttgttgccagcggttttgagcacagtatcgcaaacatgtttatgatcccgatgggtattgtaatccgcgacttcgcatctccggaattctggaccgctgtcggttctgcaccggaaaatttttctcacctgaccgtgatgaatttcatcactgataacctgattccggttacgatcggtaatattatcggcggtggtttgttggttgggttgacatactgggtcatttacctgcgtgaaaacgatcaccattaa

SEQ ID NO: 866 - DNA, 1794 bp, Escherichia coli
ttgcgcgctttccgtacgactaaagtgattttcatgacgcaaacatttatccccggcaaagatgccgctctggaagattccatcgcacgcttccagcaaaaactttcagacctcggttttcagattgaagaggcctcctggctgaatcccgtgcctaatgtctggtctgtacatattcgcgacaaagagtgcgcactgtgttttaccaacggtaaaggcgcaaccaaaaaagcggcgctggcttctgccctcggtgaatatttcgagcgtctctcaaccaactacttttttgcggacttctggctgggcgaaaccatcgccaacggcccattcgtgcattatcccaacgaaaaatggttcccactgaccgaaaatgacgatgtaccagaagggctgctcgatgaccgtctgcgcgcattttacgatccggagaatgaactgaccggtagtatgctgattgacctgcaatccggtaacgaagatcgtggtatttgcggtctaccgtttacgcgccagtccgacaatcagaccatttatattccgatgaatatcattggtaacttgtacgtttctaacggtatgtctgctggcaatacccgtaacgaagcacgcgttcagggattgtctgaagttttcgaacgttacgtgaaaaaccgcattattgctgaaagcatcagcttgccggaaatcccggcagacgtgctggcacgttatccagcagtagttgaagcgatcgaaacgctggaagcggaaggtttcccgatcttcgcttatgacggttcgcttggcggccagtatccggtgatttgcatggtactgttcaatcctgctaacggtacctgctttgcctcattcggtgcgcatcctgattttggcgttgcactggaacgtaccgtgaccgagctgctgcaaggtcgtggcctaaaagatctggatgtgtttactccaccaaccttcgatgatgaagaagtcgctgaacataccaacctcgaaacgcactttatcgattccagcggtttaatctcctgggacctgttcaagcaggatgccgattatccgtttgttgactggagcttctccggcaccacggaagaagagttcgccacgctgatggctatcttcaaaaaggaagataaagaagtttatattgccgattacgagcatctgggtgtctacgcttgccgtattatcgtgcctggcatgtccgatatttatccggctgaagatctgtggctggcgaataacagtatgggcagccatttacgtgaaacgattctttcgctaccaggtagcgagtgggaaaaggaagattacctgaacctcatcgagcaactggatgaagaaggttttgatgactttacccgcgtgcgtgaactgttgggtctggcgaccgggtcggataacggctggtacactctgcgtatcggtgaattaaaagccatgctggcgctggctggtggcgatctggaacaggctctggtctggaccgaatggacgatggagtttaactcatcagtattcagcccggaacgcgccaattattatcgctgcctgcaaacgttgttattactggcgcaggaagaagatcgccagccgctgcaatatctgaatgcgtttgttcgcatgtacggcgcagatgccgtggaagccgccagtgcggcaatgagcggcgaagcggcattttatggcttgcaaccagtagatagcgatctgcacgcgtttgctgcacatcagtcgttgttgaaggcctacgaaaagctgcaacgcgccaaagcagcattctgggcaaaataa

SEQ ID NO: 867 - DNA, 693 bp, Escherichia coli
atgaaggcgtttgatctccaccgtatggcattcgataaagtgccttttgatttccttggcgaagttgcactacgtagtctttatacctttgtactggtttttttgttcctcaaaatgaccggaagacgcggtgtgcggcagatgtcgctgtttgaagtgttaatcattctgacactgggttcagcggcgggagatgtggcgttttatgatgatgtgccgatggtcccggtacttatcgtctttattactctggcgttgttataccgcctggtaatgtggttgatggcgcacagtgaaaaactggaagatcttctggaaggcaagccggttgtcattattgaagatggcgagctggcctggtcgaaactcaataactccaacatgacggaatttgagttctttatggagctacgattgcgcggtgtagagcagttggggcaggtacgtctggcgattctcgaaaccaacgggcaaatcagtgtttatttctttgaagatgacaaggtgaaaccgggattacttattttacccagtgactgtactcagcgttacaaagtggtgccggagtcggcggactatgcctgcatccgttgcagtgaaatcattcatatgaacgcgggggaaaaacaattatgtccgcgctgtgcaaatccagaatggacgaaggcaagtcgagctaaacgggtgacctga

SEQ ID NO: 868 - DNA, 1089 bp, Escherichia coli
atggctcaaatcttcaattttagttctggtccggcaatgctaccggcagaggtgcttgaacaggctcaacaggaactacgcgactggaacggtcttggtacgtcggtgatggaagtgagtcaccgtggcaaagagttcattcaggttgcagaggaagccgagaaggattttcgcgatcttcttaacgtcccctccaactacaaggtattgttctgccatggcggtggtcgcggtcaatttgctgctgtaccgctgaatattcttggtgataaaaccactgcagattatgttgatgcgggttactgggcagcaagtgctatcaaagaagcgaaaaaatactgcacaccaaatgtgtttgatgcgaaagtgaccgttgatggtcttcgcgcagttaagccaatgagtgaatggcaactctctgataatgctgcttatatgcattactgcccgaacgaaaccattgacggtatcgctatcgatgaaacaccagacttcggtaaagacgtggtggtcgccgctgacttctcttcaaccattctttcccgtccgattgatgtcagccgttatggtgtaatttacgctggcgcgcagaaaaatatcggcccggctggcctgacaatcgtcatcgttcgtgaagatttgctgggcaaagcgaatatcgcctgcccatcgattctggattactccatcctcaacgataacgattccatgttcaacacgccgccgacatttgcctggtacttatctggcctggtcttcaaatggctgaaagcgaacggcggtgtggctgcaatggataagatcaatcagcaaaaagcagaactgctgtatggggtgattgataacagcgatttctaccgcaatgatgtggcgaaagctaaccgttcgcggatgaacgtgccgttccagttggcggatagcgcgcttgataaattgttcctcgaagagtctttcgctgcgggcttacatgcgctgaaaggtcaccgagtggtcggcggaatgcgtgcgtctatttataacgccatgccgctggaaggtgttaaagcactgacagacttcatggttgagttcgaacgtcgtcacggctaa

SEQ ID NO: 869 - DNA, 1284 bp, Escherichia coli
atggaatccctaacgttacaacccatcgctcgtgtcgatggcactattaatctgcccggttccaagagcgtttctaaccgcgctttattgctggcggcattagcacacggcaaaacagtattaaccaatctgctggatagcgatgacgtgcgccatatgctgaatgcattaacagcgttaggggtaagctatacgctttcagccgatcgcacgcgttgcgaaattatcggtaacggtggtccattacacgcagaaagtgcccgggagttgttcctcggtaacgccggaacggcaatgcgtccgctggcggcagcactttgcctgggtagcaatgatattgtactgaccggtgaaccgcgaatgaaagaacgcccgattggtcatctggtggatgcgctgcgccagggcggggcgaagatcacttacctggaacaagaaaattatccgccattgcgtttacagggcggctttactggcggcaacgttgatgttgatggctccgtttccagccagttcctcaccgcactgttaatgactgcgcctcttgcgccggaagatacggtgattcgtattaaaggcgatctggtttctaaaccttatatcgatatcaccctcaatctgatgaagacgtttggtgttgaaattgaaaatcagcactatcaacaatttgtcgtaaaaggggggcagtcttatcagtctccgggtacttatttggtcgaaggcgatgcatcctcggcttcttatttcctggcagcagcagcaatcagaggcggcactgtaaaagtgaccggcattggacgcaacagtatgcagggtgatattcgctttgctgatgtgctggaaaaaatgggtgcgaccatttgctggggcgatgattatatttcctgcacgcgtggtgaactgaacgccattgatatggatatgaaccatattcccgatgcggcgatgaccattgccaccgcggcgttatttgcaaaaggcaccaccacgctgcgcaatatctataactggcgtgttaaagagaccgatcgcctgtttgcgatggcaacagaactgcgtaaagtcggtgcggaagtcgaagaggggcatgatttcattcgcattacgccaccggaaaaactgaaatttgctgagatcgccacttataatgatcaccggatggcgatgtgtttctcgctggtcgcattatcagatacgcctgtgacgattcttgatccaaaatgtaccgctaaaacttttccagactatttcgagcaattggcgcggataagtcaacccggctga

SEQ ID NO: 870 - DNA, 765 bp, Escherichia coli
atgaagaatactaaattattgctggcgattgcgacctctgcagccttactgacaggatgtcagaatacgcacggtattaataccgatttggctatcagctcaggtctgaatgcttataaagccgcaacattaagcgatgctgatgctaaagcaatcgccaatcagggctgtgtcgaaatggacagcggcaataaagtggcaagcaaatccagcaagtacgggaaacgtctggcaaaaatcgccaaagcattgggtaacaatattaatggcacgccagtcaactataaggtttatatgaccagcgacgtcaacgcatgggcgatggcgaacggttgtgttcgtgtctacagtggcctgatggacatgatgaacgacaacgaaattgaaggcgttctgggccatgaactgggccacgtcgcgttgggtcactcgctggctgaaatgaaagcttcttatgcgatcgtggccgcacgcgatgccatttcagctaccagcggtgtggcttcccagctttcccgttcacaattaggtgatatcgcagaaggcgctatcaatgctaaatactcccgtgataaagaatccgaagcagatgatttctcttttgatctgttgaagaaacgtggcatcagtacccaggggctggttggtagctttgaaaaactggccagcctggatggcggtcgcacccagtccatgtttgattctcacccaccatcaacagagcgtgcgcaacacatccgtgatcgtatcgcctctggtaagtaa

SEQ ID NO: 871 - DNA, 684 bp, Escherichia coli
atgacggcaattgccccggttattaccattgatggcccaagcggtgcagggaaaggcaccttgtgtaaggctatggcggaagcgttgcaatggcatctgctggattcgggtgcaatttatcgcgtactggcactagcggcattacatcaccatgttgatgttgcatcggaagatgcgctggtgccgctggcatcccatctggatgtacgttttgtgtcaaccaacggcaatctggaagtgatcctcgaaggggaagatgtcagcggcgaaattcgtactcaggaggtggcgaatgctgcttcacaagtcgcggcattcccacgcgttcgtgaagcattattgcgtcgccaacgcgcgtttcgcgaattaccaggcctgattgccgatgggcgcgacatgggaacggtggtattccctgatgcgccagtgaaaattttccttgacgcctcctcggaagaacgtgcgcatcgccgcatgctacagttgcaggagaagggctttagtgttaactttgagcgccttttggccgagatcaaagaacgcgacgaccgcgatcgtaaccgagcggtagcgccactggttccggcagtcgatgctttagtgttggattccaccaccttaagcattgagcaagtgattgaaaaagcgctacaatacgcgcgccagaaattggctctcgcataa

SEQ ID NO: 872 - DNA, 1674 bp, Escherichia coli
atgactgaatcttttgctcaactctttgaagagtccttaaaagaaatcgaaacccgcccgggttctatcgttcgtggcgttgttgttgctatcgacaaagacgtagtactggttgacgctggtctgaaatctgagtccgccatcccggctgagcagttcaaaaacgcccagggcgagctggaaatccaggtaggtgacgaagttgacgttgctctggacgcagtagaagacggcttcggtgaaactctgctgtcccgtgagaaagctaaacgtcacgaagcctggatcacgctggaaaaagcttacgaagatgctgaaactgttaccggtgttatcaacggcaaagttaagggcggcttcactgttgagctgaacggtattcgtgcgttcctgccaggttctctggtagacgttcgtccggtgcgtgacactctgcacctggaaggcaaagagcttgaattcaaagtaatcaagctggatcagaagcgcaacaacgttgttgtttctcgtcgtgccgttatcgaatccgaaaacagcgcagagcgcgatcagctgctggaaaacctgcaggaaggcatggaagttaaaggtatcgttaagaacctcactgactacggtgcattcgttgatctgggcggcgttgacggcctgctgcacatcactgacatggcctggaaacgcgttaagcatccgagcgaaatcgtcaacgtgggcgacgaaatcactgttaaagtgctgaagttcgaccgcgaacgtacccgtgtatccctgggcctgaaacagctgggcgaagatccgtgggtagctatcgctaaacgttatccggaaggtaccaaactgaccggtcgcgtgaccaacctgaccgactacggctgcttcgttgaaatcgaagaaggcgttgaaggcctggtacacgtttccgaaatggattggaccaacaaaaacatccacccgtccaaagttgttaacgttggcgatgtagtggaagttatggttctggatatcgacgaagaacgtcgtcgtatctccctgggtctgaaacagtgcaaagctaacccgtggcagcagttcgcggaaacccacaataagggcgaccgtgttgaaggtaaaatcaagtctatcactgacttcggtatcttcatcggcctggacggcggcatcgacggcttggttcacctgtctgacatctcctggaacgttgcaggcgaagaagcagttcgtgaatacaaaaaaggcgacgaaatcgctgcagttgttctgcaggttgacgcagaacgtgaacgtatctccctgggcgttaaacagctcgcagaagatccgttcaacaactgggttgctctgaacaagaaaggcgctatcgtaaccggtaaagtaactgcagttgacgctaaaggcgcaaccgtagaactggctgacggcgttgaaggttacctgcgtgcttctgaagcatcccgtgaccgcgttgaagacgctaccctggttctgagcgttggcgacgaagttgaagctaaattcaccggcgttgatcgtaaaaaccgcgcaatcagcctgtctgttcgtgcgaaagacgaagctgacgagaaagatgcaatcgcaactgttaacaaacaggaagatgcaaacttctccaacaacgcaatggctgaagctttcaaagcagctaaaggcgagtaa

SEQ ID NO: 873 - DNA, 285 bp, Escherichia coli
atgaccaagtcagaattgatagaaagacttgccacccagcaatcgcacattcccgccaagacggttgaagatgcagtaaaagagatgctggagcatatggcctcgactcttgcgcagggcgagcgtattgaaatccgcggtttcggcagtttctctttgcactaccgcgcaccacgtaccggacgtaatccgaagactggcgataaagtagaactggaaggaaaatacgttcctcactttaaaccaggtaaagaactgcgcgatcgcgccaatatttacggttaa

SEQ ID NO: 874 - DNA, 2265 bp, Escherichia coli
atgaaaataacgacagtcggcgtatgcataatttgcggaatttttccgttgctgattttgccccaattgccagggacagtaacccttgcgtttctgactctcttcgcctgtgtactggcatttatccctgttaaaaccgtccgttatatcgcgctgacgttgctgtttttcgtttggggcatattagcagcaaagcaaattttgtgggcaggagaaaccttaactggcgcgacgcaggatgcaattgttgagatcattgctactgacggcatgaccactcattacggtcaaattactcatctacaaggtcgacgtatattccctgcgccaggcctcgtactgtatggcgaatatcttccgcaagcggtttgtgccggacaagtatggtcaatgaaactcaaagttcgtgcagttcatggtcaacttaatgatggcggctttgatagccagcgttatgccattgcccagcatcaaccgctcaccggccgttttctgcaggcaagtgtcattgaaccgaattgtagcctgcgtgcacagtatctggcgtcactacaaacaacgctgcaaccctatatgtggaacgcggttattcttggattaggtatgggggaacggttatccgtccccaaagaaatcaaaaatatcatgcgtgatactggaacggcgcatttaatggcaatatcaggattgcacatcgcttttgcggcgttgctggctgcaggactcattcgcggtgggcaagtttttctgcctgggtgctggatccactggcaaatgccattaattggtggaatctgctgtgctgctttttatgcctggcttacgggaatgcaacctcctgcattgcgtaccgtggtggcgcttgccatttggggaatgcttaagttaagtggacgacaatggagtggctgggatgtatggctatgttgtctggcggcaattttgctgatggatcctgttgccattctctcgcaaagtttatggctatctgccgctgcggtcgcggcactgattttttggtatcagtggtttccctgtccggagtggcagctgccgccggtattgcgcgcggttgtttccctcatccatctgcaactgggaatcaccctcctgcttatgcccgtgcaaattgtcatatttcatggcattagtctgacctcgtttattgcaaatctttttgcaattcccctggtgacatttatcacggttccgttgattctcgccgcgatggttgtgcatttaagcgggccgtttattctggaacaagggttatggtttcttgccgaccggtctttggctttacttttctgggggttaaagagtttgccggaagggtggatcaacattgctgaacgttggcaatggctaacattttccccatggttcttactggtggtatggcgattaaacgcctggcgaacgttgccagcaatgtgtgtggctgtaggcttgctgatgtgcttgccgctgtggcaaaaacctcgacctgacgagtggcaagtgtacatgcttgatgtcgggcaagggctggcaatggtcattgcgcgaaacggcaaagcgattctctatgatacgggactggcctggcccgaaggggatagtgggcaacaactgattatcccctggctccactggcataatcttgaaccggaaggcgttattttgagtcatgaacatctggatcaccggggagggctggactcaatattgcacacatggccgatgttatggatccgaagtccgttaaactgggaacatcatcagccctgtgtgcgtggcgaagcgtggcaatggcaaggattgcgtttcagcgcgcactggcctttacaaggtagcaacgataaaggaaataaccattcctgtgtggttaagattgatgacgggacgaatagcattcttctaaccggtgatattgaagcccccgctgaacaaaagatgctaagccgttactggcagcaaatgcaggcaacattacttcaggtacctcaccatggcagtaatacctcatcatcgttgccattaattcagcgagtgaatggaaaagtggcactcgcatcggcatcgcgctataacgcatggcgactgccctcaagcaaagttaaacatcgctatcaacaacagggttataagtggcttgatactccacatcagggtcaaataacggtcaatttttcagcgcaaggctggcggattagcagcctcagagagcaaattttacctcgttggtatcatcagtggtttggcgtgccagtggataacgggtag

SEQ ID NO: 875 - DNA, 1749 bp, Escherichia coli
atgcataacgacaaagatctctctacgtggcagacgttccgccgactgtggccaaccattgcgccttttaaagcgggtctgatcgtggcgggcgtagcgttaatcctcaacgcagccagcgataccttcatgttatcgctccttaagccacttcttgatgatggctttggtaaaacagatcgctccgtgctgatgtggatgccgctggtggtgatcgggctgatgattttacgtggtatcaccagctatatctccagctactgtatctcctgggtatcaggaaaggtggtaatgactatgcgtcgccgcctgtttggtcacatgatgggaatgccggtttcattctttgacaaacagtcaacgggtacgctgttgtcacgtatcacctacgattccgaacaggtcgcttcttcttcttccggcgcactgattactgttgtgcgtgaaggtgcgtcgatcatcggcctgttcatcatgatgttctattacagttggcaactgtcgatcattttgattgtgctggcaccgattgtttcgattgcgattcgcgttgtatcgaagcgttttcgcaacatcagtaaaaacatgcagaacaccatggggcaggtgaccaccagcgccgaacaaatgctgaaaggccataaagaagtattgattttcggtggtcaggaagtggaaacgaaacgcttcgataaagtcagtaaccgaatgcgtcttcaggggatgaaaatggtttcagcctcttctatctctgatccgatcattcagctgatcgcctctttggcgctggcgtttgttctgtatgcagcaagcttcccaagtgtcatggatagcctgactgccggtacgattaccgttgttttctcttcaatgattgcacttatgcgtccgctgaaatcgctgaccaacgttaacgcccagttccagcgtggtatggcggcttgtcagacgctgtttaccattctggacagtgagcaggagaaagacgaaggtaagcgcgtgatcgagcgtgcaactggcgacgtggaatttcgcaatgtcacctttacttatccaggacgtgacgtgcccgcattgcgtaacatcaacctgaaaattccggcagggaagacggttgctctggttggacgatctggttcaggtaaatcaaccatcgccagcctaatcacacgtttttacgatattgatgaaggcgaaatcctgatggatggtcacgatctgcgcgagtataccctggcgtcgttacgtaaccaggttgctctggtgtcgcagaatgtccatctgtttaacgatacggttgccaacaacattgcttacgcaaggactgaacagtacagccgtgagcaaattgaagaagctgcgcgtatggcctacgccatggacttcatcaataagatggataacggtctcgatacagtcattggtgaaaacggcgtgctgctctctggcggtcagcgtcagcgtattgctatcgctcgagccttgttgcgtgatagcccgatactgattctggacgaagctacctcggcgttggataccgaatccgaacgtgcgattcaggcggcactggatgagttgcagaaaaaccgtacctctctggtgattgcccaccgcttgtctaccattgaaaaggcagacgaaatcgtggttgtcgaggatggtgtcattgtggaacgcggtacgcataacgatttgcttgagcaccgtggcgtttacgcgcaacttcacaaaatgcagtttggccaatga

SEQ ID NO: 876 - DNA, 987 bp, Escherichia coli
atgatcgaaaaaatctggtctggtgaatcccctttatggtggctattgctgccactctcctggttgtatggcctggtgagtggcgcgatccgtctttgctataaactaaaactgaagcgcgcctggcgtgcccccgtaccggttgtcgtggttggtaatctcaccgcaggcggcaacggaaaaaccccggtcgttgtctggctggtggaacagctgcaacagcgcggtattcgcgtgggggtcgtatcgcggggatatggtggtaaggctgaatcttatccgctgttattgtcggcagataccaccacagcacaggcgggtgatgaacctgtgttgatttatcaacgcactggcgcgcctgttgcggtttctcccgtgcgttctgacgcggtaaaagccattctggcgcaacaccctgatgtgcagatcatcgtaaccgacgatggtttacagcattatcgtctggcgcgtgatgtggaaattgtcgttattgatggtgtgcgtcgctttggcaatggctggtggttgccggcggggccaatgcgtgagcgagcggggcgcttaaagtcggttgatgcggtaatcgtcaacggcggtgtcccccgcagcggtgaaatccccatgcatctgctgccgggtcaggcggtgaatttacgtaccggtacgcgttgtgacgttgctcagcttgaacatgtggtggcgattgcggggattgggcatccgccgcgcttttttgccacgctgaagatgtgcggcgtacaaccggaaaaatgtgtaccgctggccgatcatcagtctttgaatcatgcggatgtcagcgcgttggtaagcgccggacaaacgctggtaatgactgaaaaagatgcggtgaaatgccgggcctttgcagaagaaaattggtggtatttgcctgtagacgcacagctttcaggtgatgaaccagcgaaactgcttgcgcaactaacctcgctggcttctggccactag

SEQ ID NO: 877 - DNA, 1233 bp, Escherichia coli
atgtcgctgccgcacctctcccttgctgatgcgcgtaatcttcaccttgccgcgcaaggcctgttaaacaaaccccgccgtcgagcgtcgttggaggatattccggcaacgatctcccgcatgtccttgctgcaaatcgataccatcaatattgttgcccgtagtccatatctggtgcttttcagtcgtctgggaaattatcctgcccagtggctggatgagtctctggcgcgtggcgaattaatggaatactgggcgcatgaagcctgctttatgccgcgtagcgattttcgtcttattcgccaccgcatgctggcacctgaaaaaatgggctggaaatataaagacgcctggatgcaggaacatgcggcggaaattgcacagttaattcagcatattcatgataaggggccagtacgttcagccgattttgagcatcctcgtaaaggggcgagcggctggtgggagtggaagccgcataaacgacatctggaaggtttatttactgccggaaaggtgatggtgattgaacggcgcaacttccagcgcgtttatgatttaactcaccgtgtcatgcctgagtggaatgatgagcgcgatctcgtttcgcaagcagaagcagaaatcatcatgctggataacagtgcgcgtagcctgggaatatttcgcgaacagtggctggcagattactaccggctaaaacgtccggcactggcggcttggcgcgaagcgagggctgaacagcagcaaatcattgctgtgcatgttgaaaaattgggcaatctttggctgcatgctgatttgctgccgctactcgagcgtgcgctggccggaaagctcactgcaacgcacagcgcggtactttcgccttttgatcctgttgtctgggatcgcaaacgcgcagagcagctttttgattttagctaccggctggagtgctataccccagcgccgaaacgccagtatggctattttgttctgccgttattacatcgtgggcaattagttgggcgaatggatgccaaaatgcatcgccagacaggcatccttgaagttatctctctgtggttacaggaaggcattaaaccaacgacaacgctgcaaaaagggttacgtcaggcgattactgatttcgctaactggcagcaggcaacgcgggtgacattaggacgctgcccgcaaggcctctttactgattgccgcaccggctgggaaatagaccccgtcgcataa

SEQ ID NO: 878 - DNA, 183 bp, Escherichia coli
atggatcatcgtctgcttgaaatcattgcctgcccggtttgcaacggaaaactttggtataaccaggaaaaacaagaaattatttgcaaactggacaacctggctttcccgctgcgcgatggcattccagtgttgctggaaacggaagcccgcgtgctgactgctgatgagagtaaatcatga

SEQ ID NO: 879 - DNA, 747 bp, Escherichia coli
atgagttttgtggtcattattcccgcgcgctacgcgtccacgcgtctgcccggtaaaccattggttgatattaacggcaaacccatgattgttcatgttcttgaacgcgcgcgcgaatcaggtgccgagcgcatcatcgtggcaaccgatcatgaggatgttgcccgcgctgttgaagccgctggcggtgaagtatgtatgacgcgcgccgatcatcagtcaggaacagaacgtctggcggaagttgtcgaaaaatgcgcattcagcgacgacacggtgatcgttaatgtgcagggggatgaaccgatgatccctgcgacaatcattcgtcaggttgctgataatctcgcccagcgtcaggtgggtatggcgactctggcggtgccaatccacaatgcggaggaagcgtttaacccgaatgcggtgaaagtggtcctcgacgctgaagggtatgcactgtacttctctcgcgccaccattccttgggatcgtgatcgttttgcaaaaggccttgaaaccgttggcgataacttcctgcgtcatcttggtatttatggctaccgtgcaggctttatccgtcgttacgtcaactggcagccaagtccgttagaacacatcgaaatgttagagcagcttcgtgttctgtggtacggcgaaaaaatccatgttgctgtcgcccaggaagttcctggcacaggtgtggatacccctgaagatctcgagcgcgttcgcgctgaaatgcgctaa

SEQ ID NO: 880 - DNA, 894 bp, Escherichia coli
atggaacagctgcgtgccgaattaagccatttactgggcgaaaaactcagtcgtattgagtgcgtcaatgaaaaagcggatacggcgttgtgggctttgtatgacagccagggaaacccaatgccgttaatggcaagaagctttagtacgcccggaaaagcccgacaactggcatggaaaaccaccatgctggcaagaagtgggactgtccgtatgccgactatttatggtgtgatgacgcatgaagaacaccccggccccgatgtcctgctactggagcgaatgcgtggtgtttcggtggaggcaccagcccgaacaccagaacgctgggaacaactcaaagatcaaatcgttgaagccttactggcctggcaccgtcaggacagtcgcggttgcgtcggcgcggtcgacaatactcaggaaaatttctggccctcatggtaccggcaacatgttgaagtgctatggaccacgctcaatcagttcaataacaccggtctaacgatgcaggataagcggatcctgtttcgcactcgcgaatgtctcccggcattatttgaaggctttaacgacaattgtgtactgattcacggtaacttctgtttacgtagcatgctgaaagattcgcgcagcgatcagttactggcgatggtcggaccgggactaatgctttgggcaccgcgagaatacgaactgttccgactaatggataattctctggcggaagatttgctctggagttatctgcaacgcgcgccagtggcggagtcgttcatctggcggcgttggttgtatgtgttatgggatgaagttgcgcaactggtcaacaccggacgatttagtcggcgtaacttcgatctggcatcaaaatcactcttgccgtggctcgcctga

SEQ ID NO: 881 - DNA, 780 bp, Escherichia coli
atgctttttacactgaaaaaagtgattggcaatatgttgctgccacttccgctgatgttgttgattattggcgctggcctggcgctgctgtggtttagccgttttcaaaaaaccgggaagatttttattagcattgggtggctggcgctcttgttattgagtttgcaaccggtagccgaccgcctgctgcgtcccatcgaaagcacctatccgacatggaataattcgcaaaaagtggactatatcgtggtgctcggaggtggttatacctggaacccgcagtgggcaccaagctcgaatttaatcaataacagtctgccccgcctgaatgaaggtattcgcttatggcgcgaaaatccgggatcaaaactgatcttcacgggaggcgtagcaaaaaccaatacggtgagtacagccgaagtaggtgcaagagttgcgcaatcgctgggcgtgccgcgcgagcaaattatcactctggatttgccaaaagataccgaagaagaagctgcggcagtgaaacaggcaattggtgacgcccctttcctgctggtgacctccgcatcacatctgccgcgggcgatgatcttttttcagcaggaagggctaaatccgctgccagccccggcgaatcagttggccatcgactcgccgcttaatccgtgggaacgggcaatcccttctccggtttggttgatgcatagcgatcgtgttggctatgaaacgcttggccgcatctggcagtggctaaaaggttcgtcaggcgagccacggcaagagtga

SEQ ID NO: 882 - DNA, 786 bp, Escherichia coli
atgcaggatcgcaattttgatgatattgcggaaaagttttcccgtaacatttacggcaccaccaaagggcagcttcgacaggctattctgtggcaggatctcgatcgcgtgctggcggaaatgggcccgcaaaaactgcgtgtgctggatgctggcggcggagaagggcagaccgcaatcaaaatggccgagcgcgggcatcaggtcattttatgcgatctttctgcgcagatgatcgaccgcgcaaaacaggcggcagaagcaaaaggtgtgagcgacgacgtgcaatttatacattgcgccgctcaggatgttgcttcgcatttggaaacgcccgttgatctgatattgttccatgcggtgctggagtgggtggccgatccccgcagcgtattacagaccctgtggtcagttttgcgtccaggcggtgtgttgtcgttaatgttctacaatgcgcatggtttgttgatgcataacatggtcgccgggaattttgattacgtgcaggcgggaatgccgaaaaagaaaaaacggacgctttcgccagattatccacgcgacccggcgcaggtttatctgtggctggaagaagctggttggcaaattatgggtaagacaggcgttcgcgtgtttcatgattatctgcgcgagaagcaccagcagcgcgactgctatgaagcattacttgaattagaaacgcgttattgccgtcaggaaccgtatattaccctggggcgttatattcatgtcaccgcgcgcaaaccgcagagcaaggataaagtatga

SEQ ID NO: 883 - DNA, 1323 bp, Escherichia coli
atgagtgaattttcccagacagtccccgaactggttgcctgggccagaaaaaatgacttctccatctcgctgccggtagaccgactctcttttctgctggcggttgccacgctgaacggcgagcgtctggatggtgagatgagtgaaggcgagctggtggatgcattccgccatgtgagtgatgcgtttgagcaaaccagcgaaaccatcggcgtgcgcgccaacaacgcgatcaacgacatggtgcgtcaacgtctgctgaaccgctttaccagcgagcaggcggaagggaacgcaatttaccgtctgacgccgctcggcatcggcatcactgactattacattcgtcagcgcgagttttctacgctgcgtctttctatgcagttgtcgattgtggcgggtgagctaaaacgcgcagcagatgccgccgaagagggcggtgatgaatttcactggcaccgtaatgtctatgcgccactgaaatattcggtagcagaaattttcgacagtattgacctgacgcaacgtctgatggacgaacagcagcagcaggtgaaagatgatatcgcccagttgttgaacaaagactggcgggcggcgatctccagctgtgaattgttgctttcagaaacttccggaacgctgcgtgaattgcaggatacgctggaagcggcaggcgacaaattgcaggctaatctgttgcgcattcaggatgcgacgatgacccatgacgatctgcattttgtcgatcgtctggtgttcgatctgcagagcaaacttgaccgtattatcagttggggccagcaatccatcgacttgtggattggctacgaccgccacgtacacaaatttatccgtaccgcaatcgatatggataaaaaccgcgtctttgctcagcggttacgtcagtcggtacaaacctattttgatgagccgtgggcgctaacttatgccaatgccgatcgtctgctggatatgcgtgacgaagagatggtactgcgcgatgaagaagtgactggggaacttcctgaggatctggagtacgaagagtttaacgagatccgcgaacagctggcggcgatcatcgaagaacaacttgccgtgtacaaaaccagacaagtgccgctggatcttggtctggtggtacgcgaatatctgtcacagtatccgcgtgcacgtcactttgacgttgcgcgcattgttattgatcaggcggtacgtcttggcgtagcgcaagcagatttcaccggactgccagcgaaatggcagccgattaatgattacggagccaaggtacaggcgcatgtcatcgacaaatattga

SEQ ID NO: 884 - DNA, 705 bp, Escherichia coli
atgtcatcgacaaatattgaacaagtgatgccggttaagctggcgcaggcgctggcgaatccgttatttccggcgctggatagcgccttacgttcaggccgccatattggcctcgacgaactggataatcatgcattcctgatggattttcaggaatatctggaagagttttacgcgcgttataacgttgagcttattcgtgcaccggaagggttcttctatctacgcccacgttccaccacgctgatccctcgttccgtcttgtcggaactggatatgatggtcgggaaaatcctctgttatctctatctcagcccggaacggctggcgaatgaggggatttttactcaacaggaactgtacgacgaactgctcaccctggccgatgaagcgaaactgctgaaactggtgaacaaccgttcaaccggttcagacgttgaccgtcagaagttgcaggaaaaagtacgttcttcgctcaaccgtctgcgtcgtttaggcatggtgtggtttatgggccacgacagcagcaagttccgcattaccgaatcggtgttccgcttcggagccgatgtgcgtgctggcgacgatccccgtgaagcacagcgtcgcctgattcgtgacggcgaagcaatgccgattgaaaatcatctgcaactcaacgatgaaaccgaagagagtcagccagatagcggagaggaagaataa

SEQ ID NO: 885 - DNA, 4461 bp, Escherichia coli
atgattgaacgcggtaaatttcgctcactgacgctgattaactggaacggcttttttgcccgaacttttgaccttgacgagctggtcacgacgctttctggcggtaacggggcgggtaaatccaccaccatggcggcgttcgttacggcgcttatccccgatctgaccctgctgcatttccgtaacactacggaagccggggccaccagcggttcgcgcgataaaggtctgcacggtaagctgaaagcgggtgtctgttattcgatgctcgacaccattaactcgcgccaccagcgtgtagtggtcggtgtgcgtctgcaacaggttgccggacgcgatcgtaaagtggatatcaaaccatttgccattcagggcctgccgatgtcggtgcagccgacacaactggtgaccgaaactctgaacgaacgccaggcgcgcgtgctgccgcttaacgagctgaaagacaagctcgaggcgatggaaggcgtgcagtttaaacagttcaactccattaccgattaccactcgctgatgttcgatctgggcatcatcgcgcgtcgtctgcgctcagcgtctgaccgtagtaaattctatcgtctgatcgaagcctcgctgtatggcgggatctccagcgccattactcgttctctgcgcgactacctgttgccggaaaacagtggggtgcggaaagcgttccaggacatggaagcggcgctgcgtgaaaaccgcatgacgctggaagcgattcgtgtcacccagtcggaccgtgacctgtttaagcatctgatcagcgaagccaccaactacgtggcggcggactacatgcgtcacgccaacgagcgccgtgttcatctcgataaggccctggagtttcgtcgcgagctacatacttcgcgtcagcaactggcggctgagcagtacaaacacgtcgatatggcgcgtgagctggcagagcacaacggtgccgaaggcgatctggaagcggattatcaggcggccagcgatcacctgaacctggtgcaaaccgcactgcgtcagcaggagaagatcgaacgctacgaagcggatctcgatgagctgcagatccgtctggaagagcaaaacgaagtggtggcagaagccatcgaacgccaggaagagaacgaggctcgtgcggaagctgccgaactggaagtggacgagctgaaaagccagcttgctgactaccagcaggcgctggacgtccagcaaacgcgcgcgatccagtataaccaggcgattgctgcgcttaatcgtgccaaagaactgtgccatctgccggacttaaccgccgacagcgctgccgaatggctggaaaccttccaggcgaaagagctggaagcgaccgaaaaaatgctctctcttgagcagaaaatgagcatggcgcaaaccgcgcacagccagtttgagcaggcttatcagctggtggtggcaatcaacggcccgctggcgcgtaacgaggcgtgggatgtcgctcgcgaactattgcgcgaaggggtcgatcagcgtcacctggcagagcaggttcagccgttgcggatgcgcttaagcgaactggaacagcgtctgcgtgagcagcaagaagctgagcgtctgctggcagatttctgcaaacgtcagggcaagaattttgatattgatgaactggaagctctgcatcaggagctggaagcacgcattgcctctctttccgatagcgtctctaacgcccgagaagagcggatggcactgcgccaggagcaggaacagctgcagtctcgcattcagagtttgatgcagcgtgcgccggtttggctggcagcgcaaaacagtctcaaccagttgagcgaacagtgcggcgaagagttcacctccagccaggatgtcaccgaatttctgcaacagttgctggagcgtgagcgcgaggcaattgttgaacgcgatgaagtaggcgcgcgcaaaaacgccgtcgatgaagagatcgaacgtttaagccagccaggtggttctgaagatcagcgtctgaacgcgctggcggagcgttttggtggtgtgctgctgtcagaaatttatgacgacgttagcctggaagatgcgccgtacttctcagcactgtatggcccgtcacgccacgccatcgtggtgccagatctgtcacaggtaaccgaacacctggaaggcttgaccgattgcccggaagatctctatttgatcgaaggggatccgcagtcattcgatgacagcgtgttcagcgttgatgagctggaaaaagcggtggtggtgaaaatcgccgatcgtcagtggcgttattcacgtttcccggaagtgccgctgtttggtcgtgctgcgcgtgaaagccgtattgaaagcctccatgccgagcgggaagtgctttccgaacgcttcgccacgctctcctttgatgtacagaaaacccagcgtctgcatcaggcgttcagccgctttatcggcagtcatctggcggtggcgtttgagtctgacccggaagcagaaatccgtcaactgaacagccgtcgcgtcgaactggaacgggcgttgagtaatcatgaaaatgataaccagcagcagcgtattcagtttgagcaggcgaaagagggcgttacggcgctgaaccgcattctgccgcgtctcaacctgttggctgatgacagcctggcggatcgcgtcgatgaaatccgcgaacgtctggatgaagcccaggaagccgcgcgttttgttcagcagtttggcaatcaactggcgaaactggaaccgatcgtttcggtattgcagagcgacccggaacagttcgaacagttaaaagaagattacgcgtactctcagcagatgcagcgcgatgcccgtcagcaggcgtttgccctgacggaagtggtacagcgtcgtgcgcactttagctactctgactcggcagaaatgcttagcggtaacagcgatctcaacgaaaaactgcgtgaacgtctggaacaggcggaagcggagcgtacccgcgctcgtgaagcgttgcgcggacacgcagcgcagttgaatcagtacaaccaggtgctggcttcgctgaaaagttcgtatgacaccaaaaaagagctacttaacgatctgcaacgtgaattgcaggatatcggcgtgcgtgctgatagcggggcagaagagcgggcacgtattcgccgtgacgagttgcacgcgcaactgagcaataaccgttcacgacgcaatcaactggaaaaagcgcttacattctgcgaagcggagatggacaacctgacccgtaaactgcgcaagctggagcgggattactttgagatgcgcgagcaggtagtgaccgccaaagcgggctggtgtgcggtgatgcgcatggtgaaagataatggcgttgagcgtcgcttacaccgtcgtgagctggcttatctctccgctgatgatttgcgttccatgtcggataaggcgttaggtgcgctgcgtctggcggtggcagataacgaacatctgcgcgacgtgctgcggatgtcggaagatccaaaacgtccggaacgtaaaattcagttcttcgtggcggtttatcagcatctgcgtgaacgtattcgtcaggatattattcgtaccgatgatccggtggaagctatcgaacagatggagatcgagcttagccgtctgaccgaagaattaacctcccgtgaacagaaactggcgatcagttcccgcagcgtggcgaacatcattcgcaaaaccattcagcgcgagcagaaccgtatccgtatgctcaaccaggggttgcagaacgtatcgtttggccaggtgaacagtgtacgtctgaacgtgaacgtacgtgaaacgcacgccatgctgctggatgtgctctctgaacagcacgagcagcatcaggatctgtttaacagcaaccgcctgaccttctcagaagcgctggcgaaactgtatcaacgtcttaacccgcagattgatatggggcagcgcacgccgcagaccatcggtgaagaactgctggattaccgcaactatctggaaatggaagttgaggttaaccgtggttccgatggctggttgcgtgcagagtctggtgcattgtcgaccggtgaggcgattggtaccggtatgtcgattctggtgatggtggtacaaagctgggaagatgaatctcgccgcctgcgcggtaaagatatctctccttgccgcctgctgttcctcgatgaagcagcgcgactggacgcccgttccatcgccacgctgtttgaattgtgtgaacgtttgcaaatgcagctcattatcgcagcgccggaaaatatcagcccggagaaaggcaccacctataaactggtgcgtaaagtcttccagaataccgaacacgttcacgtcgtcggcctgcgaggatttgcgcctcaactccctgaaacgcttccaggaagtgacgaagcgccttctcaggcgagttaa

SEQ ID NO: 886 - DNA, 1848 bp, Escherichia coli
atgttgcttaatatgatgtgtggtcgtcggctgtcggcaatcagtttgtgtctggccgtaacattcgctccactgttcaatgcgcaggccgatgagcctgaagtaatccctggcgacagcccggtggctgtcagtgaacagggcgaggcactgccgcaggcgcaagccacggcaataatggcggggatccagccattgcctgaaggtgcggctgaaaaagcccgcacgcaaatcgaatctcaattacccgcaggttataagccggtttatcttaaccagcttcaattgttgtatgccgcacgcgatatgcaacccatgtgggaaaaccgtgatgctgttaaagccttccagcaacagctggcagaggtggcgattgccggtttccagccgcagtttaataaatgggtagagttactgaccgatcctggtgttaacgggatgacacgcgacgtggtgctctctgatgcgatgatgggctatctccatttcattgcaaatattccggtcaaaggcactcgctggctatatagcagtaaaccttatgcgcttgcaacgccgccgctttcggtgattaaccaatggcagctggcgctggataaaggtcaattgccgacgtttgttgcaggactggcaccgcagcatccgcaatatgcggcgatgcatgaatcgttactggccttactcagtgacaccaaaccgtggccccaactgaccggcaaagcaacgttgcgcccaggacagtggagtaacgacgtaccggcgttgcgcgaaatattgcaacgtacaggcatgttggacgggggaccgaaaattacgctacctggcgatgacacgccaactgacgcggtagtcagcccatccgctgttactattgaaacagcagaaactaagccgatggacaagcaaactacgtctcgtagtaaacctgcgcctgtcgttcgtgccgcctacgataatgaactggtggaagccgttaaacgttttcagacatggcaaggattgggagcagatggcgctattggcccggcaacgcgtgactggttaaacgtaacgcccgcccagcgtgctggcgtgttggcactcaacatccagcgattgcgcttgctgccaacagagctttctaccgggatcatggttaacattccagcctattcgctggtctactatcagaacggcaatcaggtgctggattcgcgagtcattgtcggtcgccccgatcgcaaaacgccgatgatgagcagtgcacttaacaacgtagtggtaaacccgccgtggaacgtaccaccaactctggcacgcaaagatattctgccgaaagtgcgcaacgatccgggatatctcgaaagccatggctatacggtgatgcgcggctggaacagcagagaagcgattgacccatggcaggttgactggtctacaatcacggcctcgaatttaccgttccgcttccagcaggctccaggcccacggaactcgctggggcgctataaattcaatatgccgagttcagaggccatttatttgcatgacacgccgaaccacaatctgttcaagcgtgatacacgcgcattgagctcaggctgtgtacgagtgaataaagcttccgatctggcgaatatgctgttgcaggatgcaggctggaatgacaaacgtatttctgatgcgctgaagcagggcgatacgcgttacgtcaatattcggcagtcgattccggtgaatctctactatctgacggcctttgttggtgcagatggtcgtacccagtatcgtacagatatttacaattatgatctgcctgcgcgatccagctcgcaaatcgtatcgaaagcggaacaattaatcaggtaa

SEQ ID NO: 887 - DNA, 549 bp, Escherichia coli
atggacaaattcgacgctaatcgccgcaaactgctggcgcttggtggcgttgcactcggtgccgccatcctgccgaccccggcgtttgcaacactctctaccccacgcccgcgcattttgacactcaataatcttcataccggagagtcaatcaaagcggagtttttcgatggcagaggctatattcaggaagaattggcaaaacttaaccattttttccgcgattaccgcgcgaacaaaataaagtccatcgacccaggattattcgaccagttgtatcgcctgcaagggttgttaggcacccgcaaaccggtgcaactcatttccggttatcgttccattgataccaacaatgaactacgcgcccgcagccgtggagtagcgaagaaaagctatcacactaaaggccaggcgatggatttccacattgaaggtatcgcgttaagcaatattcgcaaagccgcgttatctatgcgcgcaggtggtgtaggatattacccacgtagtaactttgtgcatattgataccgggccagcacggcactggtag

SEQ ID NO: 888 - DNA, 648 bp, Escherichia coli
atgaactatcgtattattccggtcaccgcattctcccagaactgttcattgatctggtgtgaacaaacccgtctggccgcactggtcgatcctggcggcgatgcggaaaaaatcaaacaggaagttgatgccagcggcctgacactgatgcagatcctgctgactcatggtcatctggaccacgttggcgcagcggcggaactggcgcaacattacggcgtgccggtttttggcccggaaaaagaagatgagttctggctgcaaggcttgcctgcgcaaagtcgtatgtttggtctggaagagtgccagccgctgacgccagatcgttggctgaacgaaggcgataccatcagcatagggaatgtgactttacaggtgttacattgccctgggcatacgccgggtcatgtcgtgttttttgatgatcgggcaaagctgctgatttctggcgacgttattttcaaaggtggagtagggcgcagtgacttcccgcgtggcgatcataatcaactgatttcttcaatcaaagataaattgctgccactgggggatgacgtgacatttattccgggtcacggaccattatccacacttggttatgagcgcctgcataatcccttcctgcaagacgaaatgcccgtctggtaa

SEQ ID NO: 889 - DNA, 1191 bp, Escherichia coli
atgtttgagaacattaccgccgctcctgccgacccgattctgggcctggccgatctgtttcgtgccgatgaacgtcccggcaaaattaacctcgggattggtgtctataaagatgagacgggtaaaaccccggtactgaccagcgtgaaaaaggctgaacagtatctgctcgaaaatgaaaccaccaaaaattacctcggcattgacggcatccctgaatttggtcgctgcactcaggaactgctgtttggtaaaggtagcgccctgatcaatgacaaacgtgctcgcacggcacagactccgggtggcactggcgcactacgcgtggctgccgatttcctggcaaaaaataccagcgttaagcgtgtgtgggtgagcaacccaagctggccgaaccataagagcgtctttaactctgcaggtctggaagttcgtgaatacgcttattatgatgcggaaaatcacactcttgacttcgatgcactgattaacagcctgaacgaagcccaggctggcgacgtagtgctgttccatggctgctgccataacccaaccggcatcgaccctacgctggaacaatggcagacactggcacaactctccgttgagaaaggctggttaccgctgtttgacttcgcttaccagggttttgcccgtggtctggaagaagatgctgaaggactgcgcgctttcgcggctctgcataaggagctgattgttgccagttcctactctaaaaactttggcctgtacaacgagcgtgttggcgcttgtactctggttgctgctgacagtgaaactgttgaacgcgcattcagccaaatgaaagcggcgattcgtgctaactactctaacccaccagcacacggcgcttctgttgttgccaccatcctgagcaacgatgcgttacgtgcgatttgggaacaagaactgactgatatgcgccagcgtattcagcgtatgcgtcagttgttcgtcaatacgctgcaggaaaaaggcgcaaatcgcgacttcagctttatcatcaaacagaacggcatgttctccttcagtggcctgacaaaagaacaagtgctgcgtctgcgcgaagagtttggcgtatatgctgttgcttctggtcgcgtaaacgtggccgggatgacaccagataacatggcgccgctgtgcgaagcgattgtggcagtgctgtaa

SEQ ID NO: 890 - DNA, 1089 bp, Escherichia coli
atgatgaagcgcaatattctggcagtgatcgtccctgctctgttagtagcaggtactgcaaacgctgcagaaatctataacaaagatggcaacaaagtagatctgtacggtaaagctgtcggtctgcattatttctccaagggtaacggtgaaaacagttacggtggcaatggcgacatgacctatgcccgtcttggttttaaaggggaaactcaaatcaattccgatctgaccggttatggtcagtgggaatataacttccagggtaacaactctgaaggcgctgacgctcaaactggtaacaaaacgcgtctggcattcgcgggtcttaaatacgctgacgttggttctttcgattacggccgtaactacggtgtggtttatgatgcactgggttacaccgatatgctgccagaatttggtggtgatactgcatacagcgatgatttcttcgttggtcgtgttggcggcgttgctacctatcgtaactccaacttctttggtctggttgatggtctgaacttcgctgttcagtacctgggtaaaaacgagcgtgacactgcacgccgctctaacggcgacggtgttggcggttctatcagctacgaatacgaaggctttggtatcgttggtgcttatggtgccgctgaccgtaccaacctgcaggaagagtcttcccttggcaaaggcaaaaaagctgaacagtgggctactggcctgaagtatgacgcgaacaacatctacctggcagcgaactacggtgaaacccgtaacgctacgccgatcactaataaatttacaaacaccagcggcttcgccaacaaaacgcaagacgttctgttagttgcgcaataccagtttgatttcggtctgcgtccgtccatcgcttacaccaaatctaaagcgaaagacgtagaaggtatcggtgatgttgatctggtgaactactttgaagtgggcgcaacctactatttcaacaaaaacatgtccacctatgttgactacatcatcaaccagatcgattctgacaacaaactgggcgtaggttctgacgacaccgttgctgtgggtatcgtttaccagttctaa

SEQ ID NO: 891 - DNA, 1401 bp, Escherichia coli
atgagcgttgtgcctgtagccgacgtactccagggccgcgtagccgttgacagcgaagtcaccgtgcgcggatgggtacgtacccgccgagattcaaaagctggcatctccttcctcgccgtttatgacggttcctgctttgatcctgtacaggctgtcatcaataattctctgcccaattacaatgaagacgtcttgcgtctgaccaccggctgctcggtcattgtgacgggtaaagtcgtggcgtcgccgggccaggggcaacaatttgaaattcaggccagcaaggttgaagttgctggttgggttgaagatccagacacttacccgatggcggcaaaacgccacagcattgagtatctgcgtgaagtcgctcacctgcgtccgcgcacaaacctgattggtgccgtcgcgcgcgttcgccatacgctggcgcaggcgctgcatcgcttctttaacgagcagggattcttctgggtttcaacgccactgattaccgcatctgataccgaaggtgctggcgaaatgttccgtgtttcaacgctggatctggaaaacctgccgcgtaacgatcagggcaaagtggatttcgacaaagacttctttggtaaagagtctttcctgaccgtatcgggccagttgaacggcgaaacctacgcttgcgcattgtccaaaatttataccttcggcccgactttccgtgctgaaaactccaacaccagccgtcacctggcggaattctggatgctggagccggaagtggcgtttgctaacctgaacgatatcgcaggtctggctgaagccatgctgaaatatgtcttcaaagcggttctcgaagaacgcgctgacgacatgaaattcttcgctgaacgcgtagataaagatgccgtttcacgtctggaacgcttcattgaggccgatttcgcgcaggtggattacaccgacgcagtgaccattctcgaaaactgcggcaggaagtttgaaaacccggtttactggggcgtcgatctctcttctgagcatgagcgttatctggcggaagaacactttaaagcaccggtagtggttaaaaactatccgaaagatattaaagcgttctatatgcgccttaacgaagacggtaaaaccgttgcggctatggacgttctggctccgggcatcggtgagatcattggtggctcccagcgtgaagaacgtctggacgtgctggacgagcgtatgcttgaaatgggcctgaacaaagaagattactggtggtatcgcgatctgcgtcgctacggtactgttccgcattcaggtttcggtcttggttttgaacgcctgattgcttacgtaactggcgtgcaaaacgtacgtgatgttattccgttcccacgtactccgcgtaacgccagcttctaa

SEQ ID NO: 892 - DNA, 1203 bp, Escherichia coli
atgacacaattcgcttctcctgttctgcactcgttgctggatacagatgcttataagttgcatatgcagcaagccgtgtttcatcactattacgatgtgcatgtcgcggcggagtttcgttgccgaggtgacgatctgctgggtatttatgccgatgctattcgtgaacaggttcaggcgatgcagcacctgcgcctgcaggatgatgaatatcagtggctctctgccctgcctttctttaaggccgactatcttaactggctacgcgagttccgctttaacccggaacaagtcaccgtgtccaacgataatggcaagctggatattcgtttaagcggcccgtggcgtgaagtcatcctctgggaggttcctttgctggcggttatcagtgaaatggtacatcgctatcgctcaccgaaggccgacgttgcgcaagccctcgacacgctggaaaacaaattagtcgacttctcggcattaaccgccggtcttgatatgtcgcgcttccatctgatggattttggcacccgccgccgtttttctcgcgaagtacaagaaaccatcgtgaaacgtctgcaacaggaatcctggttcgtgggcaccagcaactacgatctggcgcgtcggctttccctcacgccgatgggaacacaggcacacgaatggttccaggcgcatcagcaaatcagcccggatctagccaacagccagcgagctgcacttgctgcctggctggaagagtatcccgaccaacttggcattgcattaaccgactgcatcactatggatgctttcctgcgtgatttcggtgtcgagttcgccagtcgctatcagggcctgcgccatgactctggtgacccggttgaatggggtgaaaaagccattgcacattatgaaaagctgggaattgatccacagagtaaaacgctggttttctctgacaatctggatttacgcaaagcggttgagctataccgccacttctcttcccgcgtgcaattaagttttggtattgggactcgcctgacctgcgatatcccccaggtaaaacctctgaatattgtcattaagttggtagagtgtaacggtaaaccggtggcgaaactttctgacagccctggaaaaactatctgccacgataaagcgtttgttcgggcgctgcgcaaagcgttcgaccttccgcatattaaaaaagccagttaa

SEQ ID NO: 893 - DNA, 2613 bp, Escherichia coli
atgactcaacagccacaagccaaataccgtcacgattatcgtgcgccggattaccagattactgatattgacttgacctttgacctggacgcgcaaaagacggtcgttaccgcggtcagccaggctgtccgtcatggtgcatcagatgttccgcttcgtctcaacggcgaagacctcaaactggtttctgtttatattaatgatgagccgtggaccgcctggaaagaagaagagggcgcactggtcatcagtaatttgccggagcgttttacgcttaagatcgttaatgaaattagcccggcggcgaatactgcgctggaagggctttatcagtcaggcgatgcgctttgcacccagtgtgaagccgaaggtttccgccatattacgtattatctcgaccgcccggatgtgctggcgcgttttaccaccaaaattattgccgataaaaccaaatatcccttcctgctttccaatggtaaccgcgttgcgcaaggtgaactggaaaatggacgtcattgggtacagtggcaggacccgttcccgaaaccgtgttacctgtttgcgttggtggcaggcgactttgatgtgctgcgcgacactttcaccacgcgttctggtcgcgaagtagcgctggagctgtacgtcgatcgtggcaaccttgatcgcgcgccgtgggcgatgacctcgctgaaaaactccatgaaatgggatgaagaacgcttcggcctggagtatgacctcgacatctatatgatcgtcgcggtggatttcttcaatatgggcgcaatggagaataaggggctgaatatctttaactccaaatatgtgctggcccgcaccgacaccgccaccgacaaagattacctcgatattgaacgcgttatcggccatgaatatttccataactggaccggcaaccgtgtcacctgccgcgactggttccagctcagtctgaaagaaggtttaaccgtcttccgcgatcaggaattcagctctgaccttggttcccgcgcggtaaaccgtatcaataatgtgcgcaccatgcgcggattgcagtttgcagaagacgccagcccgatggcgcacccaattcgcccggatatggtcattgaaatgaacaacttctacaccctgaccgtttacgagaagggcgcggaagtgattcgtatgatccacactctgcttggcgaagaaaatttccagaaagggatgcagctctatttcgagcgtcatgatggtagcgcagcgacctgtgacgattttgtgcaggcgatggaagatgcgtcgaatgtcgatctttcccatttccgccgttggtacagccagtccggcacgccggttgtgaccgtcaaagacgactacaatccggaaactgagcagtacaccctgaccatcagccagcgcacgccagctacaccggatcaggcagaaaaacaaccactgcatattccgtttgccatcgaactgtatgacaacgaaggcaaagtgatcccgttgcagaaaggcggtcatccggtgaattccgtgctgaacgtcacccaggcggaacagacctttgtttttgataatgtctacttccagccggtgcctgcgctgctgtgcgaattctctgcgccagtgaaactggaatataagtggagcgatcagcaactgaccttcctgatgcgtcatgcgcgtaatgatttctctcgctgggacgcggcgcaaagtttgctggcaacctacatcaagctgaacgtcgcccgtcatcagcaagggcagccgttgtctctgccggtgcatgtggctgacgctttccgcgcggtgctgctcgatgagaagattgatccggcgctggcggcagaaatcctgacgctgccttccgtcaatgaaatggcagaactgttcgatatcatcgacccgattgctattgccgaagtacgcgaagcactcactcgtactctggcgactgaactggcagatgagctgctggctatttacaacgcgaattaccagagcgagtaccgtgttgagcatgaagatattgcaaaacgcactctgcgtaatgcctgcctgcgcttcctcgcttttggtgaaacgcatctggctgatgtgctggtgagcaaacagttccacgaagcgaacaatatgaccgatgcgctggcggcgctttctgcggcggttgctgcacaactgccatgccgtgacgcgctgatgcaggagtacgacgacaagtggcatcaggatggtctggtgatggataaatggtttatcctgcaagccaccagcccggcggcgaatgtgctggagacggtacgtggtctgttgcagcatcgctcatttaccatgagcaacccgaaccgcattcgttcattgatcggcgcatttgcgggcagcaacccggcagcgttccatgccgaagatggcagcggttatcagttcctggtggaaatgcttaccgacctcaacagccgtaacccgcaggtggcttcacgcctgattgagccgctgattcgcctgaaacgttacgatgccaaacgtcaggagaaaatgcgcgcggcgctggaacagttgaaagggctggaaaatctctctggcgatctgtacgagaagatcaccaaagcactggcttga

SEQ ID NO: 894 - DNA, 768 bp, Escherichia coli
atgaatactgctcgtctgaaccagggcacaccattgttgctcaatgcagtaagcaaacattacgcggaaaatatcgtcctgaaccaactggatttacatattccggcaggtcagtttgtggcggtggtgggccgcagcggcggtggcaaaagtaccctgctgcgcctgctggcaggtctggaaacgccaaccgctggcgatgtgttagcgggcaccacaccgctggctgagattcaggatgatacgcgaatgatgtttcaggacgcgcgtctgctgccgtggaaatcggtgattgataacgttgggttaggccttaaaggccagtggcgcgatgcggcgcgtcaggctctggctgcggtagggctggagaatcgcgcgggggaatggcctgccgcactttctggcgggcagaaacaacgtgtggcgctggcaagggcgctgattcatcgaccgggtttattgttgcttgatgaaccactcggtgcgctggacgctttaacgcgactcgagatgcaggatttgattgtgtcactctggcaggagcacggctttaccgtcttgctggtgacgcatgatgtgagcgaagcggtggcgatggctgaccgggtgttgttaattgaagagggaaaaattggtctggatttgacggtggatatcccccgtccgcgccggttagggtcggtacgattagcagagctggaagcggaagtgttgcagcgggtgatgcagcgtggtgaatttgaaactcgcctgagaaaacaggggtaa

SEQ ID NO: 895 - DNA, 795 bp, Escherichia coli
atgatggcaacgccagtgaagaagtggttattgcgcgttgctccctggtttttaccggtgggcatcgtggcggtgtggcaactggcctcctcggttggctggctatcgacgcgtattttgccctcaccggaaggagtggtgatggcgttctggacgctctctgccagcggcgaactgtggcagcatctggcgatcagctcctggcgtgcgttgattggcttttcaattggcggatcactgggattaattctggggctgattagcgggctgtcacgctggggagaacggctgctggatacctcaattcagatgttgcgcaacgtgccgcatctggcgctgatcccgctggtgattttgtggttcggcattgatgaatccgctaaaatatttctggtggcgctcggtacgctattccccatttatatcaacacctggcacggcatccgtaatatcgaccgtgggctggtggagatggcacgtagctatggattatccggcataccgctgtttatccatgtgatcctgcctggtgccctgccctcaattatggtcggtgtgcgttttgctttgggcctgatgtggctgacgctgatcgttgccgaaactatttctgccaattccggcattggttatctggcgatgaatgcgcgggagtttctgcaaacggacgtggtggtagtcgccattattctttacgccctgctcggcaaacttgctgacgtcagcgcgcagctgttagagcgtctctggttgcgctggaacccggcttatcatttgaaggaggccacggtatga

SEQ ID NO: 896 - DNA, 1146 bp, Escherichia coli
atgagtctgaatatgttctggtttttaccgacccacggtgacgggcattatctgggaacggaagaaggttcacgtccggttgatcacggttatctgcaacaaattgcgcaagcggcggatcgtctgggctataccggtgtgctgatcccgacggggcgatcgtgtgaagatgcgtggctggtggcggcgtcgatgatcccggtgacacaacggctgaagtttcttgtcgccctgcgccccagcgtaacctcacctaccgttgccgcccgtcaggccgccacgcttgaccgtctctctaacggacgtgcgttgtttaacctggtcacaggcagcgatccacaagaactggcaggcgacggcgtgttccttgatcatagcgagcgttacgaagcctcggcagaatttacccaggtctggcggcggttgttgcttggcgagactgtggatttcaacggcaaacatattcatgtacgcggagccaaactgctcttcccgccgattcaacagccttatcctccgctttactttggcggatcgtcagatgtcgcccaggagctggcggcagaacaagttgatctctaccttacctggggcgaaccaccggaactggtaaaagagaaaatcgaacacgtgcgggcgaaagctgccgcgcatggacgcaaaattcgtttcggtattcgtctgcatgtgattgttcgtgaaaccaacgacgaagcgtggcaggccgccgagcggttaatctcgcatcttgatgatgaaactatcgccaaagcacaggccgcattcgcccgcacggattccgtaggacaacagcgaatggcggcgctacataacggcaagcgcgacaatctggagatcagccccaatttatgggcgggtgttggcttagtgcgaggcggtgccgggacggcgctggtgggcgatggtcctacggtcgccgcgcgaatcaacgaatacgctgcacttggcatcgacagttttgtgctttcgggctacccgcatctggaagaagcgtatcgggtcggcgagttactgttcccacatctggatgtcgccatcccggaaattccccagccacaaccgctgaatccacaaggcgaagcggtggcgaatgattttatcccccgtaacgtcgcgcaaagctaa

SEQ ID NO: 897 - DNA, 960 bp, Escherichia coli
atgcgtaagatcattaaactggcgctggcgggtttacttagcgtctctacacttgctgttgccgcggagtcttcgccagaggcgttacgtataggctatcaaaaaggcagtattggtatggtgctggcaaaaagccaccagttactggaaaaacgctatccgcaaacaaaaatctcctgggtggagttccccgctggcccacagatgctggaggcgttaaacgttggcagtatcgatctcggcagtaccggggatattccgccaatctttgcccaggctgccggggctgatttggtatacgtgggcgtcgagccaccgaaacccaaagccgaagtgattctggtggcagaaaacagcccgatcaaaaccgtagccgatcttaaaggtcacaaagttgcctttcagaaaggttccagttcgcacaatcttttactgcgagcccttcgccaggccgggcttaaattcacggatattcagcccacttacctgacgcctgccgatgcccgcgccgcgttccagcaaggtaacgttgacgcctgggctatctgggatccctactactccgctgcattattacagggcggcgtgcgggtgctgaaagacggcaccgatctcaatcaaactggatcgttttatctggcagctcgtccgtatgcagaaaaaaacggcgcttttattcagggtgtgctgacaacctttagtgaggccgatgcgttaacccgcagccagcgcgaacaaagcatcgctttactggcaaaaacgatgggcttaccggcaccggttattgcctcatatctggatcatcgtcctcccaccaccatcaaaccgttgagcgctgaagttgccgccttacagcagcaaacggcagatctgttttatgaaaaccgtctggtgccgaaaaaagtcgatattcgccagcgcatctggcagcccactcaactggaaggaaaacaattatga

SEQ ID NO: 898 - DNA, 576 bp, Escherichia coli
atgcgtgtcatcaccctggcgggtagtcctcgctttccttctcgctccagctccttgctggaatatgcgcgggaaaaactaaatggcctggatgtagaggtttatcactggaatttgcaaaacttcgtcccggaagatctgctttatgctcgtttcgatagtccggcactcaagaccttcaccgaacagctgcaacaggccgatgggctgattgtcgccacgcctgtgtataaagccgcctattccggtgcactgaaaaccctgctcgacctgctgccagaacgtgcgttgcaaggcaaagtggtgctgccgctggcgacaggcggcaccgtggcccatctgctggcggtcgattatgcccttaagccagttttaagtacgctgaaagcccaggaaatcctgcacggcgtgtttgccgatgactcgcaagtcattgattatcaacacaaaccccagttcacgccaaatctgcaaactcgtcttgataccgcgctagaaactttctggcaggcgttgcaccgccgcgatgttcaggttcctgaccttctgtctctgcgaggtaatgcccatgcgtaa

SEQ ID NO: 899 - DNA, 1011 bp, Escherichia coli
atgtactaccccttcgttcgtaaagcccttttccagctcgatccagagcgcgctcatgagtttacttttcagcaattacgccgtattacaggaacgccgtttgaagcactggtgcggcagaaagtgcctgcgaaacctgttaactgcatgggcctgacgtttaaaaatccgcttggtctggcagccggtcttgataaagacggggagtgcattgacgcgttaggcgcgatgggatttggatccatcgagatcggtaccgtcacgccacgtccccagccaggtaatgacaagccgcgtctctttcgtctggtagatgccgaaggtttgatcaaccgtatgggctttaataatcttggcgttgataacctcgtagagaacgtaaaaaaagcccattatgacggcgttctgggtattaacatcggcaaaaataaagatacgccggtggagcagggtaaagatgactatctgatttgtatggaaaaaatctatgcctatgcgggatatatcgccatcaatatttcatcgccaaataccccaggattacgcacactgcaatatggtgaagcgctggatgatctcttaactgcgattaaaaataaacaaaatgatttgcaagtgatgcaccataaatatgtgccgatcgcagtgaagatcgcgccggatctttctgaagaagaattgatccaggttgccgatagtttagttcgccataatattgatggcgttattgcaaccaataccacactcgatcgttctctggttcagggaatgaaaaattgtgatcaaaccggtggcttaagtggtcgtccgcttcagttaaaaagcaccgaaattattcgccgcttgtcacaggaattaaacggacgcttgccgattattggtgttggcggcattgactcggttatcgctgcgcgtgaaaagattgctgcgggtgcctcactggtgcaaatttattctggttttatttttaaaggcccgccgctgattaaagaaatcgttacccatatctaa

SEQ ID NO: 900 - DNA, 543 bp, Escherichia coli
atgcgaattaaaccagacgataactggcgttggtattacgatgaagagcacgatcgaatgatgctcgatttagccaatggtatgctatttcgctcacgttttgcgcgcaaaatgttgactccagatgccttttctcccgcaggtttttgcgttgatgacgccgcgctctatttctcttttgaagaaaagtgccgcgattttaatttatctaaagaacaaaaagccgaactggtgctgaatgcactggtagcaattcgttatctcaaaccgcaaatgccgaaaagctggcattttgtatctcatggtgaaatgtggatgcccatgccgggcgatgcggcctacgtttggttgagcgacactcatgagcaagtgaatttactggtcgttgaatctggcgagaatgccgcgctatgtctactggcacaaccctgcgttgttattgcgggtcgcgcgatgcagttgggcgacgccattaaaatcatgaacgacaggctgaaaccgcaggttaatgttgacagcttcagcctcgaacaggcagtctaa

SEQ ID NO: 901 - DNA, 1110 bp, Escherichia coli
gtggcgacattaacccggctttttattcatcctgttaaatcgatgcgcggcattggtcttacacataccctggcagatgtcagtggtctggccttcgatcgcatctttatgatcacggaacctgacggtacgtttattaccgctcgccagtttccgctaatggtacggtttactccttcacccgtgcatgatggcttgcatctcaccgcaccagatggcagtagtgcatatgttcgttttgctgatttcgccacacaagacgcaccaaccgaagtttggggcacacattttaccgcgcgaattgcgccagacgcgatcaacaaatggctaagtggatttttctcccgcgaagtgcaattacgctgggtggggccacaaatgacccggcgcgtgaaacgccacaacactgtacccctgtcatttgctgatggctatccttaccttcttgctaacgaggcctcgttacgtgatctccaacaacgttgtccggccagtgtaaaaatggagcaattccgccccaatctggtggtttccggtgcttcggcctgggaagaagatagctggaaagtgattcgcattggtgatgtcgtgtttgatgtggttaagccttgtagccgctgtattttcaccaccgtcagcccagaaaaagggcaaaaacatccggcaggcgaaccattaaaaacgctgcaatctttccgtactgcccaggataacggcgatgtcgattttggtcagaatttaattgcccgtaatagcggcgtgattcgcgttggcgacgaggtggaaattctggcaacggctccggctaaaatttacggcgcaggtgccgctgatgatactgccaacatcacgcaacaaccggacgcaaacgtagatattgactggcagggacaggcatttcgtggaaataaccaacaggtgctgctggagcaattagaaaatcagggaattcgtatcccttattcttgccgcgcgggcatttgtggaagttgccgtgttcagcttttagaaggcgaagtcacgccgctaaaaaaatcagcaataggcgatgatggcactattctttgctgtagttgtgtaccgaagactgcgcttaagctggcgcgttag

SEQ ID NO: 902 - DNA, 2109 bp, Escherichia coli
atgaattctctgtttgccagtacggcccgtgggctggaagagctgttaaaaactgaactggaaaacctgggggccgttgaatgccaggtggttcagggtggggtccatttcaagggcgacacacggcttgtttaccagagcctgatgtggagccgcctggcctcgcgtattatgttgccgctgggcgagtgtaaggtttacagcgatttagacctctatctcggtgttcaggcgatcaactggacagagatgtttaatcctggcgcgaccttcgctgtccacttcagtggtttgaatgacaccatacgcaacagtcagtacggtgcgatgaaagtgaaagacgcgatcgtcgatgctttcacgcggaaaaatctgccgcgtccaaatgttgatcgcgatgcgccggatatccgcgttaacgtctggctgcataaagaaaccgccagtatcgcccttgatctcagtggtgatggtttacatctgcgtggctatcgcgatcgtgctggcattgcgccgatcaaagaaaccctggcagccgctattgtgatgcgatccggctggcagccaggaacaccgctgctcgatccaatgtgtggttcaggtacgttgctgattgaagcggctatgttggcgaccgaccgcgcaccgggcttgcaccgtgggcgttggggctttagcggctggacgcagcatgatgaagctatctggcaggaagtgaaagcggaagcgcaaactcgtgcccgtaaaggcctggcggagtatagctcccatttctacggttcggacagtgacgcacgggtgattcaacgtgcgcgcactaacgcccgtcttgcggggattggtgaactgatcacctttgaggtgaacgatgtcgcgcaactggccaatccgctgccgaaagggccgtacggtacagtgttgagcaacccgccatacggtgaacgtctggacagcgaaccggcgctgattgcgctgcatagtctgctgggccgaatcatgaaaaaccagttcggtggctggaatctctctttgtttagtgcctcgccggatctgctaagctgcctgcagctgcgtgcagacaaacagtacaaggcgaaaaacggcccgctggactgcgtacagaaaaactaccatgttgccgaaagcacaccagacagcaaaccggtaatggcagcggaagactacgccaaccgtctgcgtaagaacctcaaaaaattcgagaagtgggctcgccaggaaggaattgaatgttaccgcctgtatgacgccgatctgccggaatataacgttgccgttgaccgttatgccgactgggtggtggtgcaggagtatgcgccgccaaaaactattgatgcgcacaaagcgcgtcagcgtctgttcgatattatcgctgcaaccattttggtactggggattgcgccaaacaaactggtgctgaaaacccgtgaacgccagaagggcaaaaatcaataccagaaactgggcgagaagggcgagtttctggaagttaccgaatataacgctcacttgtgggtgaacctgacggattacctcgataccggtctgttcctcgatcaccgtatcgcccgtcgtatgctcggtcagatgagcaaaggcaaagatttcctcaacctgttctcttataccggcagcgccaccgtgcatgcgggattaggcggtgcacgcagcaccaccaccgtggatatgtcgcgtacttatctggagtgggcagaacgcaacctgcgtctgaatggcctaaccgggcgtgcgcatcgcctgattcaggccgattgcctggcgtggctgcgtgaggcaaatgaacagtttgatctgatctttatcgatccgccaaccttctctaactcaaaacgaatggaagatgcgtttgatgttcagcgcgatcatctggcgctgatgaaagatttgaaacgtctgctgcgtgcaggtgggacgatcatgttctcgaacaacaaacgcggcttccgtatggatctcgacggcctggcgaaactgggactgaaagcacaagaaattacgcaaaaaacgctctcccaggatttcgcccgtaaccgccagatccacaactgctggctgattaccgcagcctga

SEQ ID NO: 903 - DNA, 1908 bp, Escherichia coli
atgtcattaatcagtatgcatggcgcatggctgtcgttcagcgacgcgccgcttctcgataacgcagaactgcatatcgaagataacgaacgtgtttgtctggtggggcgtaacggtgcaggcaaatcaacgttaatgaagatcctcaaccgtgaacaggggctggatgacggtcgcattatttatgagcaagatttgattgtagctcgtctgcaacaggatccgccgcgtaacgttgagggtagcgtttatgatttcgttgccgaaggcattgaagaacaagcgggatacctgaaacgctatcacgatatttcgcgcctggtgatgaacgacccgagcgagaaaaatctcaacgaactggcgaaggttcaggaacagctggatcaccacaacctgtggcagctggaaaaccgcatcaacgaagtgctggcgcaactgggattagatcctaatgttgcgctgtcgtcgctttccggcggctggttgcgtaaagcggcattaggacgcgcgctggtgagcaatccgcgcgtattgctgctcgacgaaccgactaaccacctggatattgaaaccatcgactggctggaagggttcctcaaaaccttcaatgggacaattattttcatttcccacgaccgttcgtttatccgcaatatggcgacgcgcattgttgatctcgatcgcggcaagctggtgacctatccagggaattacgaccagtacctgctggaaaaagaagaagccctgcgcgtggaagaattacaaaatgccgagttcgatcgcaaactggcgcaggaagaggtgtggatccgccaggggatcaaagcacgtcgtacccgtaatgaaggccgcgtacgcgccctgaaagcaatgcgtcgcgagcgtggtgaacgtcgcgaagtaatgggtaccgcaaagatgcaggtggaagaagccagccgctccggtaagatcgttttcgaaatggaggacgtttgctaccaggttgacggtaagcaactggtgaaagatttttctgcccaggttctacgcggcgacaaaattgccctgattggtccgaatgggtgcggcaaaaccacgctgctgaaactaatgctcggtcagcttcaagcagacagcgggcgtattcacgttggcaccaaactggaagtagcttatttcgatcagcaccgcgcggaactggatcccgataaaacggtgatggataaccttgccgaaggtaagcaagaggtgatggttaacggcaagccacgccacgtattgggctatttgcaggacttcctgttccatccgaaacgcgcgatgacgccagtacgtgcactttctggcggagagcggaaccgcttgctgttggcgcgtttgttcctcaaaccaagcaacttattgattcttgacgaaccgaccaacgatcttgatgtcgaaacgctggaactgctggaagaactgatcgacagctatcagggcacggtattgctggttagccacgatcgtcagtttgtcgataacaccgttacagaatgctggatcttcgaaggcggcggtaaaattggtcgttatgttggcggttatcatgatgcccgtggtcagcaagaacagtatgtggcgctcaaacagcctgcggtgaaaaaaagcgaagaagccgccgcgccaaaagcagaaactgtaaaacgcagcagtagcaaactaagctataaattgcagcgcgaactggagcagctaccgcaattgcttgaagatctggaggcgaagctggaagctttacagacgcaagtggcggatgcttccttcttcagtcagccgcatgagcagacgcaaaaagtgctcgctgatatggctgctgcagagcaggagctggagcaagcctttgaacgctgggaatatcttgaagcgttaaaaaatggtggctga

SEQ ID NO: 904 - DNA, 1254 bp, Escherichia coli
atgtgcgaacatcatcatgccgcgaagcacatcctgtgctcgcagtgtgacatgctggtggcgttaccgcgccttgagcatggtcagaaagcggcatgtccccggtgtggcacaacgttaaccgtggcgtgggatgcccctcggcagcgtcccaccgcctatgcgttggctgcactgttcatgctgttgctgtccaacttgtttccttttgtgaatatgaacgttgcaggagttaccagtgaaattacattactggaaattcccggcgtgcttttttctgaggactacgccagcctcggcacctttttcctgttgtttgtgcaactggttcccgcgttttgtctgataaccattctgttactggtgaatcgcgcggaattaccggtccgtttaaaagagcaactggcacgggtgctttttcaactcaaaacctggggaatggcggagattttcctcgcgggtgtgctggtcagtttcgttaaactgatggcttacggcagcattggggtaggcagcagctttctcccctggtgtttattttgtgtcctgcaactgcgcgcttttcagtgcgttgatcgtcgctggttatgggacgacatcgccccgatgccagaactgcgccagccgctaaaaccaggtgtcacggggatacgtcaggggctgcgttcgtgctcctgttgtacggcaatccttcctgctgatgaacccgtgtgcccgcgttgtagtaccaaagggtacgttcggcgtagaaacagcctgcagtggacactcgcgctgcttgtaacgtccatcatgctgtatcttccggctaatattttgcccatcatggtgacggatttattaggctcgaagatgccgtcgacgattctcgctggggtcattctgttatggagcgaaggctcttatcccgtcgctgcggtgatttttctggccagtattatggtgccaacgttaaagatgatcgccattgcgtggctgtgttgggatgccaaaggacacggcaagcgcgacagtgaaagaatgcatttgatttatgaagttgttgagtttgtaggccgctggtcgatgattgacgttttcgttatcgcggtgctctcggcgctggtgcgtatgggaggtttaatgagtatttatccggcaatgggtgcattaatgtttgctttagtcgtcataatgacaatgttttctgctatgacgtttgacccgcgtttgtcgtgggatcgtcaacctgaatcagagcatgaggagtcctga

SEQ ID NO: 905 - DNA, 1641 bp, Escherichia coli
atggaatctaataatggggaagccaaaatccagaaagtgaagaactggtctcccgtgtggatatttcctatcgtcacggcgctcattggggcctgggttcttttttatcattacagccatcagggaccggaagtgaccctgatcaccgcgaatgcggaaggaattgaaggtggcaaaaccaccattaaaagccgtagcgttgacgtcggcgtggttgaaagcgccacactggctgatgatttgacacacgttgaaatcaaagcgcggctgaattccggtatggaaaaattgctgcataaagataccgtcttttgggtggtgaaaccgcagattggtcgagaagggattagcggcctgggaacgctgctgtctggggtttatatcgaactgcagccaggcgcgaaaggcagcaaaatggataaatacgatttgctggactcgccaccgttggccccgcctgatgcgaaaggtatccgtgtgcttctcgatagcaaaaaagccgggcagctctcgccaggagatccggtgctgttccgtggctatcgggtaggttcggttgaaaccagcactttcgatacgcaaaaacgcaatatcagctatcaactgttcatcaatgcaccttatgaccgactggtgaccagcaatgttcgtttctggaaagatagtggcattgcggttgatctgacgtcagcgggaatgcgtgtggagatgggctcattgacaacgctgcttagtggcggtgtcagctttgatgtgccggaaggtctggatttagggcagccagtggcaccgaaaacagctttcgttttgtatgatgatcagaagagcattcaggattcgttgtacaccgatcacattgattatctgatgttctttaaagattcggtacgcggtctgcaaccgggagctccggtagaattccggggtattcgcctgggtaccgtaagcaaagtgccattctttgcgccgaatatgcgtcagacatttaacgatgattaccgtattccggtactgattcgtatcgagccagagcggctgaaaatgcagcttggcgaaaatgcggatgttgttgagcaccttggcgaattgttgaaacgtggtttacgcggatcgctgaaaaccggaaacctggtcactggcgcactgtatgttgatctcgatttctatccaaatacgcctgcaataaccggtattcgtgaatttaatggttatcagattatcccgaccgtcagcggcggcctggcgcaaatccagcaacgactgatggaagcgttggataagatcaacaaactgccactgaatccgatgattgaacaggcaaccagtacgctttctgaaagtcagcgcacaatgaaaaacctgcaaacgacgctggatagcatgaacaagatccttgccagccagtcgatgcagcagttaccgacggatatgcagtcaacgttgcgtgaattgaatcgcagcatgcagggcttccagcctggttccgcagcctacaacaagatggtggcggatatgcagcgccttgatcaggtgttgcgagaactgcaaccggtgctgaaaacgctcaacgagaagagtaacgcgctggtatttgaagcgaagggcaaaaaagatccagagccgaagagggcgaaacaatga

SEQ ID NO: 906 - DNA, 564 bp, Escherichia coli
atgaaaaagtggctagtgacgattgcggcactgtggctggccggatgcagctccggcgaaattaataaaaactattaccagttacctgtggtgcagagcggtacacaaagcaccgccagccagggtaatcgcctgttatgggttgagcaggtcgctgttcctgactatctggcggggaatggtgtggtttatcaaaccagtgatgtgaagtatgtgattgccaacaacaacctgtgggccagcccgttggatcaacagttgcgcaacaccctggttgccaacctgagtacgcaactgcccggctgggtggttgcctcccagcctctgggaagcgcccaggacacgctcaatgttaccgtcacggagtttaacggtcgctatgatggcaaggtcattgtcagtggtgagtggctgttgaaccaccagggacaactgatcaaacgtccgttccgtctggaaggagtgcaaactcaggatggttacgatgagatggttaaagtgctggccagtgtctggagtcaggaagccgcttctattgcgcaagagataaagcgtctaccttaa

SEQ ID NO: 907 - DNA, 168 bp, Escherichia coli
atgaagagacaaaaacgagatcgcctggaacgggcacatcaacgtggttatcaggccggcatcgccggacgctcaaaagaaatgtgtccctatcagacgctgaatcaaaggtcacaatggctgggaggctggcgagaagccatggcggacagggtagtaatggcctga

SEQ ID NO: 908 - DNA, 627 bp, Escherichia coli
atggccattacgttggctgaactggtttattccgaactgatcggacttgttcagcgtacacgtgttagctatcctgcgtgcttcaataaaataaggcttacagagaacatggtagataaacgcgaatcctatacaaaagaagaccttcttgcctctggtcgcggtgaactgtttggcgctaaaggcccgcaattgccagcaccaaacatgctgatgatggaccgtgtggtcaaaatgaccgaaacgggtggtaacttcgacaaagggtatgttgaagcagagctggatatcaatccggatctgtggttcttcggatgccactttatcggcgatccggttatgccgggatgcctgggcctggacgcaatgtggcagctggtagggttctacctcggctggctgggcggcgaaggtaaaggtcgcgcgctgggcgtaggtgaagtgaaattcacaggccaggtgctgccgacggcgaaaaaagtgacctatcgtattcactttaaacgcatagttaaccgtcgtctgattatgggcctggctgatggcgaagtgctggttgatggtcgtttgatctataccgccaacgacctgaaagtaggtctgttccaggatacgtctgcattctga

SEQ ID NO: 909 - DNA, 1761 bp, Escherichia coli
ttgaccattacgaaacttgcatggcgtgacctggttcctgataccgatagctatcaggaaatatttgctcagccacatttgattgacgaaaacgatcctttattcagtgatactcaaccgcgactgcaatttgcgctggagcagttgctgcatacgcgagcatcctcctcttttatgctggcgaaggccccggaagagtctgagtatctgaatcttattgctgatgccgcgcgtacgctacaaagcgatgcaggccaactggtgggcggtcactatgaggtttccggccacaccatccgcttacgtcacgcagtgagtgcagatgataattttgcgactttaacgcaagttgtcgctgccgactgggtagaagcagagcaactctttggctgcctgcgtcagtttaatggcgatattaccctgcagcctggtctggtgcatcaggcaaatggcggtattctcatcatctctttgcgtacactgctggcgcaacctctgctgtggatgcggctgaaaaatatcgttaaccgcgagcgttttgactgggttgcgtttgatgagtcgcgccctctccccgtctctgtgccttcgatgccattgaagctgaaagtcattctggtaggcgaacgcgaatcattggctgatttccaggagatggagccagagctttcagagcaggctatttatagcgaatttgaagatactctgcagattgtcgatgcggagtcagtaagccagtggtgtcgctgggtgacatttaccgccagacataatcacttaccagcaccgggagcggatgcctggccggtacttatccgcgaagcagcacgctacactggtgaacaagaaacacttccgcttagcccgcagtggatcctccgccagtgtcaagaagtcgcctccctgtgtgatggcgacaccttctccggcgagcagctaaacttaatgctacagcagcgtgaatggcgcgaaggtttcctcgctgaacgcatgcaggatgagatccttcaggagcaaatcctgattgaaaccgaaggcgaacgcatcgggcaaattaacgccctttcggtcattgaatttccgggtcatccacgcgcttttggcgaaccttctcgcattagctgcgttgtacatattggcgatggtgaattcaccgacatcgaacgcaaagcggagcttggcggcaatatccatgcgaaagggatgatgatcatgcaagcgttcctgatgtcggaactacagcttgagcaacagatccccttctcagcatcgctgacatttgagcagtcatacagtgaagtggatggcgatagtgcctcgatggctgaactctgcgccctgataagcgccctcgccgatgtgccggtgaatcagagtatcgctatcacaggttcagtcgatcagttcggtcgcgcccagccagtcggtggtttaaatgagaaaatcgaaggcttctttgctatttgccagcaacgtgagttaacggggaaacaaggtgtcattatccccacagctaacgttcgccatttaagtcttcacagtgaactggtgaaagcggtagaagaagacaaattcaccatctgggcagtagacgatgtgactgacgcactgccgttattattaaatctggtgtgggatggcgaaggccaaacgacgctgatgcaaaccatccaggaacgtatcgcacaagcatcgcaacaggaaggacgtcaccgttttccatggccattacgttggctgaactggtttattccgaactga

SEQ ID NO: 910 - DNA, 453 bp, Escherichia coli
atgaaatatcaacaacttgaaaatcttgaaagcggttggaaatggaagtatctggtgaagaagcaccgcgaaggggagttaatcacccgttacatagaagccagtgccgcccaggaagccgtcgatgagttgctctcgctggaaaatgaacccgtgctggtaaatggttggattgacaagcatatgaatccggaactggtcaatcgcatgaagcagaccattcgggccagacggaagcgccattttaatgcagaacaccagcatacgcgcaaaaaatcgatcgatctggaatttatcgtctggcaacgtctggctggccttgcgcagcgtcgcggtaaaacgctttctgaaacgattgttcagctgattgaagatgcggaaaacaaagagaaatacgcgaataaaatgtcttctttgaagcaggatctgcaggcattgctgggtaaggaataa

SEQ ID NO: 911 - DNA, 1041 bp, Escherichia coli
atgaaaaagacagctatcgcgattgcagtggcactggctggtttcgctaccgtagcgcaggccgctccgaaagataacacctggtacactggtgctaaactgggctggtcccagtaccatgacactggtttcatcaacaacaatggtccgacccatgaaaaccaactgggcgctggtgcttttggtggttaccaggttaacccgtatgttggctttgaaatgggttatgactggttaggtcgtatgccatacaaaggcagcgttgaaaacggtgcatataaagctcagggcgttcagctgaccgctaaactgggttacccaatcactgacgatctggacgtatacactcgtctgggtggtatggtatggcgtgcagacactaaatccaactttgatggtaaaaaccacgataccggcgtttctccggtcttcgctggcggtgttgagtatgcgatcactcctgaaatcgctacccgtctggaataccagtggaccaacaacatcggtgacgcacacaccatcggtactcgtccggacaacggcatgctgagcctgggtgtttcctaccgtttcggtcagggcgaagcagctccagtagttgctccggctccagctccggcaccggaagtacagaccaagcacttcactctgaagtctgacgttctgttcaccttcaacaaagcaaccctgaaaccggaaggtcaggctgctctggatcagctgtacagccagctgagcaacctggatccgaaagacggttccgtagttgttctgggttacactgaccgcatcggttctgacgcttataaccaggctctgtccgagcgtcgtgctcagtccgttgttgattacctgatctctaaaggtatcccggcagacaaaatctccgcacgtggtatgggcgaatccaacccggttactggcaacacctgtgacaacgtgaaacagcgtgctgcactgatcgattgcctggctccggatcgtcgcgtagagatcgaagttaaaggcatcaaagacgttgtaactcagccgcaggcttaa

SEQ ID NO: 912 - DNA, 510 bp, Escherichia coli
atgtacacttcaggctatgcacatcgttcttcgtcgttctcatccacagcaagtaaaattgcgcgtgtctctacggaaaacactacagccgggcttatcagtgaagttgtctatcgcgaagatcagcccatgatgacgcaacttctactgttgccattgttacagcaactcggtcagcaatcgcgctggcaactctggttaacaccgcaacaaaaactgagtcgcgaatgggttcaggcatctgggctacccttaacgaaagtaatgcagattagccagctctccccttgccacaccgtggagtcaatggttcgcgctttacgcacgggcaattacagcgtggtgatcggttggttggcagatgatttgactgaagaagagcatgctgaacttgttgatgcggcaaatgaaggtaacgctatggggtttattatgcgtccggtaagcgcatcctctcacgcaacgagacaactttccgggctaaaaattcactctaatttgtatcattaa

SEQ ID NO: 913 - DNA, 630 bp, Escherichia coli
atgaaaagcctctcctataagcggatctataaatcacaagaatacctggcaacgttgggcacaattgaataccgatcattgtttggtagttacagcctaaccgttgacgacacggtgtttgcgatggtttctgatggtgagttgtatcttcgggcttgtgagcaaagtgcaccgtactgtgtaaaacatccgcctgtctggctgacatataaaaagtgtggccgatccgttaccctcaattactatcgggttgatgaaagtctatggcgaaatcaactgaagctggtgcgtctgtcgaaatattctctcgatgcagcgctgaaagagaaaagcacgcgcaatattcgggaaagactgaaagatttgcccaatatgtcttttcatctggaagcgattctcggggaggtggggattaaggatgtacgggcgttacgtatacttggggcaaaaatgtgttggttgcgactgcggcagcaaaacagtctggtgacagaaaagattctgtttatgcttgaaggggccattatcggcattcatgaagctgcgctcccggtggcacgccgccaggagcttgcagaatgggctgactctcttacgccgaaacaggagtttcctgcggaacttgagtaa

SEQ ID NO: 914 - DNA, 2163 bp, Escherichia coli
atggcctttatgctaagtcctttgctcaaacgctatacctggaacagcgcctggctgtattacgcgcgtatttttattgcgctttgtggaaccacagcgtttccgtggtggctgggtgatgtaaaactgacgattccgctaacgctggggatggtggcagcggcgctgaccgatctcgatgaccgactggcgggacgtttgcgtaacctcatcattacgctgttctgcttttttatcgcctcggcctcagtagaattgctgtttccctggccctggctatttgcaattggtttaacgctctctaccagcggcttcattttgctcggcggtctgggtcaacgctatgcaacaattgccttcggtgcgttactgatcgccatttacactatgttggggacgtcactgtatgagcactggtatcagcagccgatgtatctgctggccggtgccgtctggtacaacgtcctgacacttattggtcatctgctgttcccggtccgcccgctgcaggacaatctggcgcgttgctatgaacaactggcgcgttatcttgagctcaagtcgcgcatgtttgatcctgatattgaagatgaaagccaggcaccgctgtacgatttggctctcgccaacggtcagctgatggcgacattgaatcagacgaaactctcgctgctgacccgcttacgtggcgatcgtggtcaacgaggaacgcgtcgcacactgcattattactttgtcgcgcaggatattcacgagcgtgccagctcttctcatattcaatatcaaacattgcgtgaacattttcgccacagcgacgtgctgttccgttttcagcggctgatgtcgatgcagggccaggcgtgccagcaactgtcacgctgtattttgctgcgtcagccttatcaacatgatccgcattttgagcgcgcttttacgcatattgatgctgcgctggagcggatgcgcgataacggcgctcctgctgatttactcaaaacactgggatttttactgaacaatttacgtgccattgatgcccaactggcaacaattgaatcagaacaggcccaggcactgccccataataatgacgaaaatgagctcgctgatgacagcccgcacggattgagtgatatctggctgcgtcttagccgtcacttcacgccggaatccgccctcttccgtcatgcggtaagaatgtcgctggtgttgtgcttcggctacgccatcattcagataaccggaatgcatcacgggtattggatcttgctgacaagtttgtttgtctgccagccaaactataacgccacgcgccaccgcctgaagttaaggattattggtacgctggtaggtatcgcgattggtattcctgtgctgtggtttgtgccatcactggaagggcagctggtgctgctggttattaccggcgtgctcttttttgccttccgtaacgtgcaatacgcccatgcaacgatgttcatcacacttttggtgctactgtgtttcaacttgctgggtgaaggttttgaagtggcgttacctcgcgtaatcgatacgctgattggttgtgccattgcgtgggcggcagtgagctacatctggcctgactggaagtttcgcaatctgccgcgaatgctcgaacgcgccaccgaggccaactgccggtatctcgatgccatactggagcaataccatcaggggcgtgataaccgtctggcgtatcgtattgcccgccgcgatgcacacaaccgtgatgctgaactggcgtcggtggtatcaaatatgtccagcgaaccgaacgttaccccgcaaattcgcgaagccgcgtttcggttgctgtgccttaaccatacgtttaccagctatatctcagccctcggtgctcaccgggagcagttaactaatcctgaaattctggcgtttcttgatgacgccgtttgctatgttgatgacgcgctacatcatcaacctgctgatgaagaacgcgtcaatcaggcattagctggcctgaaacagcggatgcagcaacttgaaccacgggcagacagcaaagaacctctggtcgtacaacaagttgggttattgattgcattactgccagagattggtcgtctgcaacgccagattactcaagttccgcaggaaactcctgtttcggcgtaa

SEQ ID NO: 915 - DNA, 447 bp, Escherichia coli
atgcgtaccgttttgaacattctgaactttgtgcttggcggatttgccaccactctgggctggctgttggcgactctggtcagtattgtgctgatttttaccttaccgctgacacgatcctgctgggagatcactaaactgtctctggtgccttatggcaatgaagctattcatgtcgatgaactgaacccggctggcaaaaatgtgctactaaatactggcggtacggtattgaatattttctggctgattttctttggctggtggttatgcctgatgcacattgcaacgggcatcgcacaatgtatttccatcattggcattcctgtcggcattgcgaactttaaaattgccgctattgcactatggccggtcggtcgtcgcgtggtatcggtagaaacagcgcaagctgcgcgtgaagccaatgcacgtcgtcgttttgaataa

SEQ ID NO: 916 - DNA, 2055 bp, Escherichia coli
atggaactgaaagcgacaacgcttggaaaacgtctggcacagcacccttacgatcgggcggtgatcctcaatgccgggattaaagtctccggcgatcgccacgaataccttattcctttcaatcaattactggcgattcactgtaagcgcggtctggtatggggcgagctggaatttgtactgccgggcgaaaaagtggtgcgtctgcacggtaccgaatggggcgagacgcagcgtttttaccatcatcttgatgctcactggcggcggtggagtagcgagatgagcgaaattgcatctggtgttttacagcagcaactggatttaattgccacgcgcaccggagaaaataaatggctgacgcgtgagcaaacctctggcgtgcagcaacaaatccgccaggctttgtcggcgttgccgttgccggttaaccgactggaagaattcgataactgccgtgaggcgtggcgtaaatgtcaggcctggttgaaagatattgaaagcgctcggttgcagcataatcaggcgtataccgaagccatgcttaccgagtatgcggattttttccgccaggtcgagtcttcaccgctgaatccggcgcaggcccgggcagtcgttaatggcgagcattctctgttagtgctggctggtgcaggaagcggaaaaacgtcggtgctggtggcccgtgcaggctggttgctggcgcgtggtgaagcgtcccctgagcaaattttattgctggcgtttggtcgcaaagccgctgaagagatggacgagcgtattcgagaacgactacataccgaagacattaccgcacgcacatttcatgcgctggcgctgcatattattcagcagggcagcaaaaaagttccgatagtcagcaaactggaaaatgataccgctgcccgtcatgaactttttattgctgagtggcgcaagcaatgcagcgaaaagaaagcgcaggcgaagggctggcggcaatggctgacggaagaaatgcagtggtcagtgccagaaggtaatttctgggatgatgaaaaattacagcgtcgtcttgcctctcgcctcgatcgctgggtaagtctgatgcggatgcacggtggtgcacaggcagaaatgattgccagtgcacccgaagtgattcgcgatctgttcagtaaacgtatcaagttgatggctccgttattaaaagcctggaaaggtgcgctgaaggcagaaaacgctgtcgatttttcgggccttattcaccaggcgattgtgattctggagaaaggtcgctttatcagcccgtggaagcatattctggttgatgaatttcaggatatctcgccgcagcgtgcagcgttgttagcggcattacgcaagcaaaacagtcagacgacgttgttcgccgttggtgatgactggcaggcgatttatcgcttcagcggtgcgcaaatgtcgctcaccaccgctttccatgaaaactttggtgaaggtgatcgctgcgatttagacacgacttaccgttttaacagtcgtatcggtgaggtggcaaaccggtttattcagcagaacccaggccagctgaaaaagccgctaaacagcttaaccaatggagacaaaaaagccgtcacgttattggatgagagccatcttgacgctttgctggataagctctctggttatgccaaaccggaagagcgcattctgatcctggcgcgttaccatcacatgaggcctgccagcctggaaaaagcggcaacacgctggccgaagttgcaaatcgactttatgaccattcatgccagcaaagggcaacaggcggattacgtcatcatcgttggcttgcaggagggaagtgatggttttccggctgcggcgcgggaatcgattatggaagaggcgctactgccatcggttgaggatttcccggacgctgaagaacggcggttaatgtacgtggcgctgacccgggcacgccatcgggtatgggcactgtttaacaaagagaatccctctccatttgtcgaaatactgaaaaatcttgatgtgccggtggcgagaaaaccgtaa

SEQ ID NO: 917 - DNA, 459 bp, Escherichia coli
atggaactgacgacacgcactttacctgcgcggaaacatattgcgctggtggcacacgatcactgcaaacaaatgctgatgagctgggtggaacggcatcaaccgttactggaacaacacgtactgtatgcaacaggcactaccggtaacttaatttcccgcgcgaccggcatgaacgtcaacgcgatgttgagtggcccaatggggggtgaccagcaggttggcgcattgatctcagaagggaaaattgatgtattgattttcttctgggacccactaaacgccgtgccgcacgatcctgacgtgaaagccttgctgcgtctggcaacggtatggaacattccggtcgccaccaacgtggcaacggcagacttcattatccagtcaccgcattttaacgacgcggtcgatattctgatccccgattatcagcgttatctcgcggaccgtctgaagtaa

SEQ ID NO: 918 - DNA, 663 bp, Escherichia coli
atgaaaaccggcatcgtgaccaccttgattgcattatgtttgccggtatccgtttttgccaccacgctgcggctttcaaccgatgtcgatcttctggtgctcgacggcaagaaggtttccagctctctgctgcgcggtgcggacagcattgaactggataacggaccgcatcagttagtgtttcgcgttgagaagacgattcatctttccaatagtgaagaacggctgtatatctccccaccgctggtggtcagttttaatacccagctcatcaaccaggtcaattttcgcctgcctcgtctggagaatgagcgggaagctaaccattttgatgccgcgccgcgccttgaattgttggatggcgatgcgacgccgattccggtaaagctggatattctcgccattacctcaacggcaaaaacgattgattatgaggtcgaggttgaacgctataacaaatccgcgaaacgcgcttcactaccgcaatttgccacgatgatggcagatgatagtacgctgctttcgggtgtttccgagctggatgctattccaccgcagtctcaggtgctcacagaacaacggctgaagtattggtttaaactggctgacccacaaacgcgaaatactttcctgcaatgggcggaaaaacaaccatcttcctga

SEQ ID NO: 919 - DNA, 414 bp, Escherichia coli
atgaaagaaaccgatattgcaggcattttaacgtccactcacaccattgcgctggtgggggcaagcgacaaacccgatcgtcccagctatcgcgtgatgaaatatctactcgaccaggggtatcacgtcattccggtttcgccaaaagttgccggcaaaacactgctgggccagcaggggtatggcacgctggcagaagttcctgaaaaagtcgatatggtcgatgttttccggaattcagaagcagcgtggggcgtagcgcaggaagcgatcgccatcggcgcgaaaaccctctggatgcaactgggggtgattaatgagcaagcggcagtactggctcgggatgccggattaaatgtagtgatggatcgctgcccggctattgagatccctcgcctgggcctggccaaataa

SEQ ID NO: 920 - DNA, 318 bp, Escherichia coli
atgattgccagcaaattcggtatcggccagcaggtccgccattccctgttaggttatctcggagtggtcgtggatatcgacccggtttattcgctctctgaaccatcgcctgatgagctggcggtgaatgacgagcttcgcgccgctccgtggtatcacgtggtgatggaggatgataacggcctaccggttcatacctacctggctgaagcccagctaagtagcgaattgcaggatgaacatcctgaacagccatccatggatgagctggcgcagaccatccgcaaacaactccaggccccgcgtctgcgtaactaa

SEQ ID NO: 921 - DNA, 1176 bp, Escherichia coli
gtgttagccaaagggcgcgaaaaatcattacttcgtcgccatccgtgggtcttttccggggccgttgcccgcatggaaggtaaagccagcctcggtgaaaccatcgatattgttgatcatcagggaaaatggttagcacgcggcgcttattcgccagcttcgcaaatccgggcgcgcgtctggacgtttgacccgtcagagtctatcaacattgctttttttacccgccgtttgcagcaagcacaaaaatggcgtgactggctggcgcaaaaagatggcctcgacagctatcgtttaatcgccggagaatctgatggcctgccgggtattactatcgatcgtttcggtaattttctggtgctgcaactgctgagtgctggcgcagagtatcagcgcgcggcattaattagcgccctgcaaacgctgtacccggaatgtgctatttacgatcgcagcgacgtcgcggtacgtaaaaaagaagggatggagctgactcagggccccatcaccggcgagttgccgcctgccctgctgccgattgaagaacacggcatgaaactgctggtggatattcagcacggacacaaaacgggctactacctggaccagcgtgacagccgcctggctacccgccgctacgtcgaaaataaacgcgtacttaactgtttctcctataccggtggtttcgccgtatcggcattgatgggcggttgcagccaggttgtcagcgttgatacctcccaggaagcgctggatattgcacggcagaacgttgagctgaacaaactggatctgagcaaggcagagtttgtccgtgatgatgtctttaaattgctgcgtacttatcgcgatcgcggtgaaaaatttgatgttatcgtgatggacccgccgaagtttgttgagaataaaagccagttgatgggcgcgtgtcgtggttataaagacatcaacatgctggcgattcagttgctgaatgaaggcggtattctcctgactttctcctgttccggtctgatgaccagcgatttatttcagaaaatcatcgcggatgccgcaattgatgccggtcgtgatgtacaatttatagagcagttccgtcaggcagccgatcatccggtgatcgctacctacccggaagggctatatctgaaagggtttgcctgtcgcgtcatgtaa

SEQ ID NO: 922 - DNA, 279 bp, Escherichia coli
atgtcgaaagtctgcataattgcctgggtttacgggcgagttcagggcgttggatttcgctataccacgcagtacgaagcgaaaaaactgggattagccgggtacgccaaaaatcttgacgatggcagcgtggaagtggttgcctgcggtgaagaagggcaggtggaaaaattaatgcagtggttaaagagtggcggcccgcgttctgcgcgtgtggaacgggtgctcagcgagccgcatcatccctcgggggaattaaccgattttcgtatccgttaa

SEQ ID NO: 923 - DNA, 387 bp, Escherichia coli
atgcggggctttgttttttgttacactgccgccagtctgattaaggtagtaataattatgctgatcttcgaaggtaaagagatagaaacggataccgaaggctatctcaaagaaagcagccagtggagtgagccgctggcagtggtgattgcagagaacgaagggattacgctgtcgccagaacactgggaagtggtgcgttttgtgcgtgatttctatctggaattcaatacttctccggcgattcgtatgctggtaaaagcgatggcgaataaatttggcgaagaaaaaggaaacagccgctatttataccgactgtttccgaaaggtccggctaagcaagccaccaaaattgctggcctgccaaaaccggtaaaatgtatttaa

SEQ ID NO: 924 - DNA, 660 bp, Escherichia coli
atggatcgtattgttagttcttcacatgaccgtacatcactgcttagcacccataaggtgctgcgtaatacctattttatgctgagcctgacgctggccttttcggcgattaccgcaactgccagtacggtgctgatgctgccatctccaggtctgattctgacgctggtgggtatgtatggtttgatgttcctgacctataaaacggcgaataagccgaccgggattatctccgcattcgcctttaccggttttctgggatatatcctcggaccaattctgaacacctacctgtctgccggaatgggtgacgtaatcgctatggcactgggcggaacggcgttggtgttcttctgctgctctgcgtatgtgctgaccacccgcaaagatatgtcgttccttggcggtatgctgatggcgggtattgtggtggtgctgattggcatggttgctaatatcttcctgcaactgcctgctctgcatctggcgatcagcgcggtcttcattctgatctcctctggcgctattttgtttgaaaccagcaacatcattcatggcggtgaaacgaactatattcgtgccacggttagcctgtatgtttcgctgtacaacatcttcgtcagcctgctgagcattctgggcttcgccagccgcgattaa

SEQ ID NO: 925 - DNA, 1119 bp, Escherichia coli
atgaataacgaggaaacattttaccaggccatgcggcgtcagggcgttacccggcgcagctttctcaaatattgtagtctggctgccacgtcgctgggattaggcgcgggaatggcaccaaagattgcctgggcgctggagaacaaaccgcgcattccggtggtatggatccacggtctggaatgcacctgctgtaccgaatcttttatccgctccgctcacccgctggcaaaggacgtcatcctttccctgatttccctcgattacgacgatactttgatggctgccgccggaacccaggcggaagaagtctttgaagacatcatcacgcaatacaatggcaaatatatcctcgccgttgaaggtaatccgccgctgggcgagctggggatgttctgtatcagcagcggtcgaccgtttattgagaaactcaaacgtgccgctgccggagccagtgcgattatcgcctggggaacctgcgcgtcctggggctgcgtgcaggccgcgcgacccaatccgacgcaggcaacgcctatcgacaaagtcatcaccgacaaacctattatcaaagtacctggctgcccgccgatcccggatgtgatgagcgccatcattacttacatggtgacctttgatcgcttgccagatgtcgacagaatgggccgtccgttgatgttctatggtcagcgaatccacgataaatgctatcgccgcgctcacttcgacgccggagagttcgtgcagagttgggatgatgacgctgcccgcaaaggttactgcctgtacaaaatgggctgcaaagggcctaccacctataacgcctgttcctccacacgctggaacgatggcgtttccttcccgatccagtcaggtcacggctgcctgggttgtgcggaaaatggtttctgggatcgcggttcgttctacagccgcgtggtcgatattccacaaatgggtacccattccaccgccgacaccgtcggtttaaccgcgcttggcgtggtggcagcggctgttggtgtgcacgcagtcgccagcgccgttgaccagcgcagacgtcataaccagcaacctacagaaaccgaacatcagccaggcaatgaggataaacaggcatga

SEQ ID NO: 926 - DNA, 1794 bp, Escherichia coli
atgagcactcagtacgaaactcagggatacaccatcaacaatgccggacgccgcctggtggtcgacccgattacgcgcattgaaggccacatgcgctgcgaagtgaatattaacgatcagaatgtgatcaccaatgccgtctcctgcggcaccatgtttcgcgggctggagatcatcctgcaagggcgtgacccgcgcgatgcgtgggcgttcgttgaacgtatctgcggcgtctgtactggcgtacacgccctggcttcggtttacgccatcgaagatgccatcggtattaaagtgccggataacgccaatatcatccgcaacattatgctggcaacgctctggtgccacgatcatctggtgcacttctatcagcttgccgggatggactggatcgatgtgttagatgcgctgaaagccgacccgcggaaaacctccgaactggcgcaaagcctctcctcatggccgaaatcatcccctggctatttcttcgacgtacaaaaccgcctgaagaaattcgttgaaggcgggcagttggggatcttccgcaatggctactgggggcacccgcagtacaaactgccgccagaagccaacctgatgggctttgcccactatctcgaagctctcgatttccagcgtgaaattgtcaaaatccacgcggtctttggtggtaaaaacccgcatccaaactggattgtcggcgggatgccttgcgccattaacattgacgaaagcggcgcagtcggggcggtcaatatggaacgcctgaacctggtgcagtcgatcattacccgtacggcggatttcattaacaacgtgatgatccccgacgccttagccatcggccagttcaacaaaccgtggagcgaaatcggcacgggtctttctgataaatgtgtcctcagctacggcgcattcccggatattgccaacgactttagtgagaaaagtctgctgatgcctggcggcgcggtgattaacggcgacttcaacaatgtgctgccagtggatttggttgatccgcagcaggtgcaggagtttgtcgaccacgcctggtatcgttatcccaacgatcaggtggggcgtcatccgttcgatggcattaccgacccgtggtacaaccccggcgatgtcaaaggcagcgataccaacattcagcagctgaatgaacaggaacgctactcgtggatcaaagcgccacgctggcgcggtaacgcgatggaagtggggccgctggcacgcacgttaatcgcttatcacaaaggcgatgctgcgaccgttgagtcggtcgatcgtatgatgtcggcgttgaaactgccgctttccggcatccagtcaacgttgggccgcattttgtgtcgcgcgcacgaagcgcagtgggccgcaggtaagttgcagtatttcttcgataaactgatgaccaacctgaaaaacggcaatcttgccaccgcttccacggaaaaatgggaaccagcaacctggccgacagagtgccgtggtgtcggttttaccgaagcgccgcgcggggcgttaggccactgggctgccattcgcgatggcaagattgatctctaccagtgcgtggtgccgaccacctggaacgccagcccgcgcgatcccaaagggcagattggcgcttatgaagcggcgctgatgaacaccaaaatggcgatccccgagcaaccgctggagatcctgcgtactctgcacagctttgacccgtgcctcgcctgttcaacacacgtgctgggcgacgacggtagcgagcttatctccgtgcaggtgcgttaa

SEQ ID NO: 927 - DNA, 708 bp, Escherichia coli
atgcaacagaaaagcgacaacgttgtcagtcactatgtctttgaagcacccgtgcggatatggcactggctgacagtgttatgcatggcggtgttgatggtcaccggttactttatcggcaagccgctaccttccgtcagcggcgaggcgacgtatctgttctatatgggctacatcaggttaattcacttcagcgccgggatgatttttaccgtggtcttgctgatgcggatctactgggcttttgttggcaatcgttactcccgcgagctgtttatcgtgccggtatggcgtaaaagctggtggcagggcgtgtggtatggaatccgctggtatctgtttctggcaaaacgtccgagtgccgatataggccataaccccatcgcccaggcggcgatgttcggctatttcctgatgtcagtttttatgatcatcaccggctttgcgctgtacagcgaacacagccagtacgctatttttgcgccgttccgttatgtggtggaatttttctactggacgggtggcaactcaatggacattcacagctggcatcggctggggatgtggctgattggcgcgtttgtgatcggtcatgtctacatggcgctgcgtgaagacatcatgtccgacgacacggtgatctccactatggtcaacggctaccgtagccacaaatttggcaaaataagtaacaaggagcgttcatga

SEQ ID NO: 928 - DNA, 588 bp, Escherichia coli
atgagcgagcaacgcgtggtggtaatggggctgggtaacctgctgtgggccgatgaaggcttcggcgtgcgggtggcggaacggctgtatgcccattaccactggcccgagtatgtggagattgtcgatggcggcacccaaggactgaacttgctggggtatgtcgaaagcgccagtcatctgttgattctcgatgccattgattacgggctggaacccggaacgctacgaacgtatgccggagaacgcattccagcttatctcagcgcgaagaaaatgagcctgcaccagaacagtttctccgaagtgctggcgctggcagatatccgcggacatctgccagcatatattgccctcgtcggtctgcaacccgcgatgctcgacgactacggcggcagcctgagcgaactggcgcgggagcaactgcccgctgcggaacaggcggcgctggtacagctggcggcctggggaattgtaccgcaaccgactgaggagttgcgctgtctcaattatgactgtctgtcgatggaaaattacgaaggcgttcgcttgcgtcagtacaggatgaggctggagaaacagggatga

SEQ ID NO: 929 - DNA, 399 bp, Escherichia coli
atgagcaacgacacaccatttaatgcgttgtggcaacgaatgctggcacgtggctggacgccggtcagtgaatgccgtcttgacgactggcttacgcaagcgccagacggcgtggtgttattaagtagtgacccgaaacgcacgccagaagtcagcgataacccggtaatgattggcgaattactgcgcgagtttcccgactatacatggcaggtagcgattgctgatcttgagcagagcgaagccatcggcgatcgctttggcgtctttcgctttcccgccacattagtgtttaccggcggaaactatcgcggcgtgctgaatggtattcacccgtgggcggaactgataaacctgatgcgcgggcttgtcgaaccgcaacaggagcgtgcttcatga

SEQ ID NO: 930 - DNA, 858 bp, Escherichia coli
atgagcgaaacttttttccatctgctggggccaggaacgcaaccgaacgatgacagtttcagcatgaatccactgccgatcacctgtcgggtgaatggtgaaccgagtatggcggccctggagcaatgtgctcacagcccgcaggtgattgcgctgttaaacgagttacaacatcaactaagcgaacgccaaccgccgttgggcgaggtgctggcagtcgatctgttaaatctcaacgccgacgatcgtcactttatcaatacgcttctcggggaaggggaagtgtcagtgcgcattcagcaggctgacgacagtgaaagtgaaattcaggaggcgatcttctgcggattatggcgggtgcgcagacgtcacggcgaacagttgctggaagacaaactggaggctggctgcgcaccgctggcgttgtggcaggcggcaacgcaaaacgtcttgccaacagactcgttgctaccgccgcccattgatggcctgatgaatggcctaccgttggcccatgaattactggcacatgtacgtaaccccgacgcgcagccgcacagcattaatctgacgcaattacccatcagcgaagctgaccggctttttctctcacgtctctgtgggccgggaaatattcagattcgtaccattggctatggcgagagctatatcaacgccacggggttacgccatgtctggcatttatgctgtacggacaccttaaaaggcccgttactggaaagttatgaaatctgcccaataccggaagtggtgctggcagcgccagaagatttggtcgactctgcgcagcggcttagcgaggtatgccagtggctggcggaaggtgcaccgacgtaa

SEQ ID NO: 931 - DNA, 1545 bp, Escherichia coli
atgtgggatgtcattgatttatcgcgctggcagtttgctctgaccgcgctgtatcactttttatttgtaccccttaccctggggctgatttttttgctggctatcatggaaaccatttacgtggtcaccggcaaaacaatctaccgcgatatgacgcgcttctggggtaagctcttcggtatcaactttgctcttggcgtggctaccggcctgaccatggagtttcagtttggtactaactggtcattctattccaactatgtgggcgatatttttggcgcaccgctggcgatggaagcattaatggccttcttcctcgaatccacctttgtcgggctgttcttcttcggctggcagcggctgaataaataccagcacctgctggtgacgtggctggtggcgttcggttcaaatctctctgcgttgtggatattgaatgccaacggttggatgcaatacccgaccggtgcgcattttgatatcgacaccctgcgtatggagatgaccagtttcagcgagctggtctttaacccggtcagccaggtgaaatttgtgcacaccgtaatggcgggatacgtgaccggggctatgtttattatggcgatcagcgcctggtatttactgcgcggacgggagcgcgatgtcgcattacgctcgtttgccaccggttccgtcttcggtactctggcgattatcggtacgctgcaactcggagacagttctgcgtatgaagtcgcgcaagtacaaccggtaaaactggcggcgatggaaggggagtggcaaacggaacctgcacctgcaccgttccatgtggttgcctggccggaacaggatcaagagcgtaacgcctttgctatcaaaattcccgcgctgctaggaatcctcgccactcattcattagataaacccgtgccgggtctgaagaatttgatggctgaaacctacccacgcttgcaacgcggacgtatggcgtggctgttaatgcaggaaatatcgcaaggcaatcgtgagccgcatgtgttgcaggcattccgggagctggaaggcgacctgggttacggcatgttgctctcccgctatgcgccggatatgaatcatgtcacagccgcacagtaccaggcggcgatgcgtggcgcgatacctcaggttgcgccggtattctggagtttccgcatcatggtgggctgtggttccctgctgctactggtgatgctgattgcgcttgtccagacgctgcgtggcaaaatcgaccagcatcgctgggtgctgaaaatggcgctctggagtttgccgctgccgtggattgcgattgaagccggatggtttatgaccgagtttggtcgtcagccgtgggcgatacaagacatcttaccgacatactccgcgcactccgccttaaccacaggacaactggctttctcactgatcatgatcgtagggctttacaccctgttcttaatcgccgaagtctacctgatgcagaaatatgcccgtctggggccgagcgcgatgcagagtgaacaaccgacgcagcaacaggggtaa

SEQ ID NO: 932 - DNA, 1137 bp, Escherichia coli
atgtttgattatgaaacattgcgcttcatctggtggctgctgattggcgtgatcctggtggtctttatgatctccgacggatttgacatggggatcggctgtctgctgccgctggtggcgcgtaatgatgatgaacgtcggatagtgataaacagcgttggcgcgcactgggaaggcaatcaggtctggttgatcctcgcaggtggggcattatttgccgcctggcccagagtgtatgcagcggcgttttccggcttttatgtggcgatgattctggtgctgtgctcgctgttcttccgcccgctggcctttgattatcgcggaaaaatcgccgatgcacgctggcgtaaaatgtgggatgccggactggtcatcggcagtctggtgccgccggtagtcttcggtattgcattcggcaacttgctgctcggcgtgccgtttgctttcacaccgcaattacgcgtggaatatctcggcagcttctggcaactgctgacgccattccctttattgtgtggattgctcagtcttgggatggtgattttgcaaggtggcgtctggttacaactgaaaactgttggtgtgattcatctgcgttcacagctggcgaccaaacgcgccgcactactggtgatgctgtgctttttgctggcgggttactggctgtgggttggtattgatggctttgtactgctcgcccaggatgctaacggtccttccaatccgctaatgaaactggtggcagtgctacctggtgcctggatgaataatttcgtcgaatcgcccgttttgtggatcttcccgctgctggggttcttctgcccattgctgacggtgatggcgatttatcgtggtcgcccgggttggggatttttgatggcgtcattgatgcaatttggcgtgattttcacggcaggcatcacgctgttcccctttgtcatgccgtcaagcgtgagtccgatctccagcctgacgttgtgggacagcacttccagtcagctgacgctgagcattatgttggtaatcgtgctgatatttttgcccattgtgttgctctacactctctggagctactacaaaatgtgggggcgcatgacgacagaaactctccgccgtaacgaaaacgagctgtactaa

SEQ ID NO: 933 - DNA, 1311 bp, Escherichia coli
atgaaagcgatcttaatcccatttttatctcttctgattccgttaaccccgcaatctgcattcgctcagagtgagccggagctgaagctggaaagtgtggtgattgtcagtcgtcatggtgtgcgtgcaccaaccaaggccacgcaactgatgcaggatgtcaccccagacgcatggccaacctggccggtaaaactgggttggctgacaccgcgcggtggtgagctgatcgcctatctcggacattaccaacgccagcgtctggtggctgacggattgctggcgaaaaagggctgcccgcagcctggtcaggtcgcgattattgctgatgtcgacgagcgtacccgtaaaacaggcgaagccttcgccgccgggctggcacctgactgtgcaataaccgtacatacccaggcagatacctccagtcccgatccgttatttaatcccctaaaaactggcgtttgccaactggataatgcgaacgtgactgacgcgatcctcagcagggcaggagggtcaattgctgactttaccgggcatcggcaaacggcgtttcgcgaactggaacgagtgcttaattttccgcaatcaaacttgtgccttaaccgtgagaaacaggacgaaagctgttcattaacgcaggcattaccatcggaactcaaggtgagcgccgacaatgtctcattaaccggtgcggtaagcctcgcatcaatgctgacggagatatttctcctgcaacaggcacaaggaatgccggagccggggtggggaaggatcactgattcacaccagtggaacaccttgctaagtttgcataacgcgcaattttatttactacaacgcacgccagaggttgcccgcagtcgcgccaccccgttattggatttgatcatggcagcgttgacgccccatccaccgcaaaaacaggcgtatggtgtgacattacccacttcagtgctgtttattgccggacacgatactaatctggcaaatctcggcggcgcactggagctcaactggacgcttccaggtcagccggataacacaccgccaggtggtgaactggtgtttgaacgctggcgtcggctaagcgataacagccagtggattcaggtttcgctggtcttccagactttacagcagatgcgtgataaaacgccgctgtcattaaatacgccgcccggagaggtgaaactgaccctggcaggatgtgaagagcgaaatgcgcagggcatgtgttcgttggcaggttttacgcaaatcgcgaatgaagcacgcataccagcgtgcgctctccatcaagacaaataa

SEQ ID NO: 934 - DNA, 213 bp, Escherichia coli
atgtctaataaaatgactggtttagtaaaatggtttaacgcagataaaggttttggctttatcactcctgatgatggcagcaaagacgttttcgtccatttcactgccatccagagcaatgaattccgcacgctgaacgaaaatcagaaagttgaattttctattgagcaggggcaacgtggtcccgcggcagcgaacgttgttacgctctaa

SEQ ID NO: 935 - DNA, 174 bp, Escherichia coli
gtgaatattgaagagttaaaaaaacaagccgaaacggaaatcgccgactttatcgcgcaaaaaatcgccgagctgaacaagaatacagggaaagaagtctctgaaattcgcttcaccgcacgagaaaaaatgaccgggcttgaaagttatgatgtcaaaatcaaaataatgtga

SEQ ID NO: 936 - DNA, 1074 bp, Escherichia coli
atggcagagaaaaaaagaacccgctggcagcggcggccaggcacgacgggcggcaaattaccgtggaatgactggcgcaatgccacgacctggcgtaaagcgacgcaattattactgttggcaattaatatttatattgccatcacgttctggtattgggtgcgctattacgaaacggcaggtagtacgacatttgtcgccagaccgggaggtatcgaaggctggctaccgattgccggtctgatgaatctgaaatatagccttgcaacaggtcagttaccgtccgtccacgccgccgcgatgctgttattggtcgcttttatcgtcatcagtctattactcaaaaaggccttttgttcatggttatgcccggttggtacgctttctgaattaatcggcgatctcggtaacaaactgtttggtcggcaatttgtccttccccgctggctggatattcctctgcgcggcgtgaagtatttgctgttgagtttttttctctatatcgcgttattgatgcccgctcaggcgattcactattttatgttgtcgccctacagcgtggtgatggacgttaaaatgctcgatttctttcgtcatatggggaccgcgacattaatcagcatgatcgttttgctgattgccagcctgtttattcgccatgcctggtgtcgttatctttgcccatatggcgcgctgatgggcgtggtttcgctattatcgccgtttaagattcgtcgcaatgccgaaagttgtatcgattgtggcaaatgcgcaaaaagttgcccatcacggatcccggtcgataaattaattcaggtacgaacagtggaatgtaccggctgtatgacttgcgtagagtcatgtccggtagcctcaacattgaccttttcactgcaaaaacctgcggcaaataaaaaagcctttgcgttgtctggatggttaatgacgctactggttatggggattatgtttgcggcgattggttacgcaatctatgcgggagtatggcaaagcccggtgccggaggaattgtaccaacgcttaattccgcaatcgccaatgattggtcactaa

SEQ ID NO: 937 - DNA, 2688 bp, Escherichia coli
atggcgctgttaaccctgaccagtaccctggtgggatggtacaacctgcgctttatcagcctggtggaaaaagacaacactcaggcattgattcctaccatgaatatggcgcgccagttgagcgaagccagcgcctgggaacttttcgccgcgcagaacctgaccagtgccgataacgaaaagatgtggcaggcgcaggggcgaatgctcaccgcacaaagcctgaagattaatgcgttgctgcaagcgttacgggaacaaggttttgacaccaccgctattgaacaacaggagcaggagatctcccgttcgttacgtcagcaaggggaactggtgggacagcgtttgcaactgcgccagcaacaacagcaactcagtcagcagatagtcgccgccgccgatgagatcgcacgcctggcgcaaggtcaggcgaataatgcggcaacctccgccggagcgacccaggccgggatttacgatttgatcgaacaacatcagcgtcaggccgcagaaagtgcactcgatcggctgattgatatcgatcttgagtatgttaaccagatgaatgaactgcgccttagcgccctacgggtgcagcaaatggtgatgaatctggggctggaacagatccagaaaaatgcgccaacgctggaaaagcagctcaataatgcggtgaaaattctgcaacgtcggcaaatacgcattgaagatccgggtgttcgtactcaggtagcaacaacgttaactaccgttagccaatatagcgatttgctggcgctgtatcagcaggacagtgaaatcagcaatcacctgcaaactctcgcccaaaataacatcgcccaattcgcgcagtttagtagcgaagtcagtcagctggtcgacaccattgagctgcgtaatcagcacgggctggcacatctggaaaaagccagtgcacgcgggcaatacagcctgttattgctgggattagtttctctttgcgcactgattctgatcctctggcgcgtggtttatcgctcagtcacgcgccctcttgcagaacaaacgcaggcgctgcaacgcttgctggatggtgatatcgactcccctttcccggaaaccgctggcgtacgggaactggataccatcgggcggctgatggatgcgtttcgcagcagtgttcatgcactgaatcgccaccgcgaacagctggcggcgcaggtcaaagcgcgtacagctgaattgcaggaactggtgatagaacaccgacaggcacgggcggaagcagaaaaagccagccaggcaaaatcggcgtttctggcggcgatgagccatgagatccgcacaccgctgtacggtattctcggcaccgcgcaactgctggcagataaccccgcacttaacgcccagcgcgatgatttgcgggcgattaccgactctggtgaatcgttgctgaccatcctcaacgatattctcgattattcggctatcgaagcaggtggcaagaatgtttcggtcagcgatgaaccctttgaaccgcgcccgctgctggaaagtaccctgcaattaatgagcggaagggtgaaaggtcgcccgattcgcctggcaacagaaattgccgacgatgtaccgactgcgttaatgggcgatccgcggcgtattcgtcaggtcatcaccaacctgttgagcaacgccctgcgtttcaccgacgaagggcacattatcctgcgtagtcgcactgatggcgaacaatggctggtcgaagtggaagacagcggctgcggtattgatcccgcgaaactggcagaaatcttccagccatttgttcaggttagcggcaaacgcggcggcaccgggctggggctgactatcagtagccgtctggcccaggcgatgggcggcgaactgagcgccaccagcacgccggaggttggaagctgtttttgtttacgcttgccgttacgtgttgccactgcacccgtgccaaaaacagtcaatcaggcggtgcgtctggacggtttacgtttgctgttaattgaagataacccgctaacccagcgaattaccgttgagatgctgaacatcagtggtgcgcaggttgttgctgttggcaatgccgtgcaggctttagaaacactgcaaaatagtgaaccgtttgctgccgcactggtggattttgatctgccggatatcgacggcattacgcttgcccgacaactggcacagcaatatccgtcgctggttttgattggctttagcgcccatgtcattgacgaaacactgcgacagcgtaccagttcgctatttcgcgggattatccctaaaccggtgccgcgtgaagtgctcggtcaattactggcgcactatctccaactgcaagtcaataacgatcaaccgctggatgtatcgcaactcaatgaagatgctcatttaatgggggcggagaagatccacgaatggctgatattatttaaacaacatgccctgccgcttctcgatgaaatcgacattgcccgcgccagtcaggataacgagaaaataaagcgtgccgcacatcagctaaaaagcagttgctcgagtctgggaatgcgtagcgccagccagcaatgcgcacaactggagcagcagccattatctgccccccttccacacgaagaaattacacgcagtgttgccgctctggaagcatggttaataagaaagacctga

SEQ ID NO: 938 - DNA, 1029 bp, Escherichia coli
atgcgcgtactgctatttttacttctttcccttttcatgttatcggcattttcggctgataacctgttgcgctggcatgatgcgcagcattacacggtgcaagcctctacgccgcttaaagccaaacgcgcatggaaactgtgcgcgctttatcccagcctgaaagattcatactggttatcgttgaactatggtatgcaggaggctgctcgccgctacggtgtggatttaaaagtgctggaggcaggcggctacagccagttggctacccagcaagcacaaatcgaccaatgtaaacagtggggcgcagaggccattttgctcggtagtagcacgacgtcatttcccgatctgcaaaagcaggtagcaaatctgccggtgatcgaactggtgaatgctattgatgctccccaggtgaaaagccgcgttggtgtgccttggtttcagatgggctatcaaccagggcgatatctggtgcaatgggcgcacggtaaaccactgaacgtgctgttgatgcccggccccgataacgccgggggcagtaaggagatggtagagggttttcgcgcagccattgccggaagcccggtacgtattgttgatattgcgctcggtgataacgatattgaaatccagcgtaacctgttgcaggagatgctggaacgccatccagaaatcgacgtcgttgccggaacggccattgcggcagaggcggcaatgggggaagggcgcaacctgaaaacgccgcttaccgtggtgtcgttttatctttcacatcaggtgtatcgcgggttgaagcggggaagagtgattatggcagccagcgatcaaatggtctggcagggggaactggcggttgagcaggctatcaggcaattacaggggcaatcggtgtctgataatgtcagcccaccgattttagtcatgacgccgaaaaatgccgaccgcgaacatatccgtcgctcgctgtcaccagggggatttcgtccggtctatttttatcagcacacatcagcggctaagaaataa

SEQ ID NO: 939 - DNA, 693 bp, Escherichia coli
atgccacatcacattgttattgttgaagatgagccggttacccaggcgcgattacaatcttacttcactcaggaggggtataccgtttccgttacggcgagcggtgccgggctgcgggaaattatgcagaatcagccggtggatttgattctgctggatatcaatttgcccgatgaaaatggcctgatgttaacccgcgccctgcgagaacgctcaacggtggggattattctggttaccggacgcagcgatcggattgaccgtattgttgggctggaaatgggcgcagacgattacgtcaccaaaccgctggagctgcgcgaactggtggtacgagtgaaaaatttgctctggcgaatcgacctcgcgcgacaggcgcaaccgcacactcaggacaactgctatcgctttgccggttattgcctgaatgtgtcgcgccatacgctggagcgggatggagagccgattaaactgacccgcgcagagtatgaaatgctggtggcgtttgtgaccaatcccggcgaaattctcagccgtgaacgtctgctgcgtatgctctctgcgcgtcgggtggaaaaccctgacctgcgcaccgtcgatgtgttaattcgtcgtttacgccataaactcagtgcagatttactggtgacacaacatggcgaaggttatttcttagccgctgatgtgtgctga

SEQ ID NO: 940 - DNA, 1173 bp, Escherichia coli
atgcggaaactctggaacgcgctacgccgacccagtgctcgttggtcggtactggcgctggtcgctactgggattgtgattggcattgcgctgattgtattgccacacgttgggatcaaagtcaccagcacaaccgaattttgtgtcagttgccacagtatgcaaccggtgtatgaagaatataaacagtcggtgcatttccagaacgcctccggcgtgcgagctgaatgccatgactgtcatatcccgccggatattccaggcatggtgaagcgcaaactggaagcgagcaacgacatttaccagacctttattgcccactccattgatacacctgagaaatttgaagccaaacgcgcggaacttgccgagcgtgaatgggcgcgaatgaaagaaaacaactcggcaacctgccgctcctgccataactacgatgcgatggatcatgcgaagcagcatcctgaagcggcgcgtcagatgaaggtggcagcgaaagataatcaatcctgcatcgactgtcataaaggtattgcccaccagttaccggatatgagtagtggcttccgtaagcagttcgatgagctgcgcgccagtgctaatgatagtggtgacacgctgtactccattgatattaagccgatttatgcggcgaaaggcgataaagaagcgtctggttctctgctgcctgcttcggaagtgaaagtccttaaacgtgacggcgactggctgcaaattgaaatcactggctggacggaaagtgcaggacgtcagcgtgtactcacccaattcccaggtaaacgcatctttgttgcctcgattcgtggtgatgtgcagcagcaggtgaaaacactggagaaaaccaccgttgccgacaccaataccgagtggagcaagttgcaggccactgcgtggatgaagaaaggcgacatggtgaacgatatcaaaccgatctgggcttatgcggattcgctgtacaacggcacctgtaaccagtgccacggcgcaccggaaatatcccactttgacgctaacggttggatcggcacgctcaacggcatgattggctttaccagcctcgataaacgtgaagaacgcaccttgttgaaatatctgcaaatgaatgcgtctgacaccgcaggtaaagctcacggcgataagaaggaagaaaaataa

SEQ ID NO: 941 - DNA, 2547 bp, Escherichia coli
atgaacaataacgatctctttcaggcatcacgtcggcgttttctggcacaactcggcggcttaaccgtcgccgggatgctggggccgtcattgttaacgccgcgccgtgcgactgcggcgcgagcggcgactgaggctgtcatctcgaaagagggcattcttaccgggtcgcactggggggctatccgcgcgacggtgaaggatggtcgctttgtggcagcaaaaccgttcgaactggataaatatccgtcgaaaatgatcgccggattgccggatcatgtacacaacgcggcgcgtattcgttacccgatggtacgcgtggactggctgcgtaagcgccatctgagcgacatctcccagcgcggtgataaccgttttgtgcgcgtgagctgggatgaagccctcgacatgttctatgaagaactggaacgcgtacagaaaactcacgggccgagtgccttgctgaccgccagtggttggcaatcgacggggatgttccataacgcttcggggatgctggcgaaagctattgccttgcatggtaatagcgttggtacgggcggagattactctaccggtgctgcgcaggtgatcttgccgcgcgtggttggctcaatggaagtgtatgaacagcaaacctcctggccgctggtattgcagaacagcaaaaccattgtgctgtggggctccgatttgctgaaaaaccagcaagcgaactggtggtgcccggatcacgatgtttatgaatattacgagcagctaaaagcgaaagtcgccgccggtgaaattgaggtcatcagcatcgatcctgttgtcacatccacccatgagtatctggggcgcgagcatgtgaagcacattgcggttaacccgcaaactgacgtgccgctgcaactggcgctggcgtatacgctgtacggtgaaaacctgtacgacaaaaacttcctcgctaactactgtgtaggttttgagcagttcctgccgtatctgctgggtgagaaagacggtcagccgaaagatgccgcatgggctgaaaaactgaccggcattgatgccgaaaccattcgtgggctggcgcggcagatggcggcgaacagaacgcagattattgctggttggtgcgtacagcgtatgcagcacggtgaacagtgggcgtggatgattgtggttctggcggcgatgctggggcaaattggcctgccgggtggtggcttcggttttggctggcactataacggcgcaggcacgccggggcgtaaaggcgttattctgagtggtttctccggttctacgtcgattccacctgttcacgacaacagcgactaccaaggctatagcagcactattccgattgcccgttttgtcgatgcgatcctcgaaccgggaaaagtgatcaactggaatggtaaatcggtaaaactgccaccgctgaaaatgtgtatttttgccggaactaacccgttccatcgtcatcagcagattaaccgtattatcgaaggctggcgcaagctggaaacggttatcgccatagataaccagtggacctcaacctgccgctttgccgatatcgtgctgcctgcgaccacgcagtttgagcgtaacgatctcgaccagtacggcaaccactccaatcgtggcatcatcgccatgaaacaggtcgtgccgccgcagttcgaggcgcgcaacgactttgatattttccgcgagctgtgccgccgctttaatcgcgaagaagcctttaccgaagggctggacgagatgggctggctgaaacgcatctggcaggaaggtgtacaacaaggcaaaggacgcggcgttcatctgccagcgtttgatgacttctggaataacaaagagtacgtcgagtttgaccatccgcagatgtttgttcgccaccaggcattccgcgaagatccggatctcgaaccgctgggcacgccgagtggcctgattgagatctactcgaaaaccatcgccgacatgaactacgacgattgtcaggggcatccgatgtggtttgagaaaatcgaacgctcccacggtgggcctggctcgcagaagtatccgttgcatctgcaatctgtgcatccggatttccgacttcactcgcagttatgtgagtcggaaactctgcgtcagcaatatacggtagcgggtaaagagccagtgttcattaacccgcaggatgccagcgcgcgcggtattcgtaacggtgatgtggtacgcgtctttaacgctcgcggtcaggtgttggcaggggcagtggtttctgaccgctatgcacccggcgtggcacgaattcacgaaggggcatggtacgatccagataaaggcggcgagcctggtgcgctgtgcaaatacggtaaccccaacgtgttgaccatcgacatcggtacttcgcagctggcgcaggcgaccagtgcgcacactacgctggtggaaattgagaagtacaacggaacagtggagcaggtgacggcgtttaacggccccgttgagatggtggcgcagtgcgaatatgttcccgcgtcgcaggtgaaatcatga

SEQ ID NO: 942 - DNA, 600 bp, Escherichia coli
atgaccacgctgacagcacaacagattgcctgtgtttacgcctggctggcgcagttgttctcccgtgaactggacgatgaacaactgacgcaaatcgccagtgcgcagttggctgaatggttttcgttgctgaaaagcgaaccgccgctcacagcggcggtgaatgatctggaaaacagtattgccacgctgacagtacgtgacgatgcccgtctggaactggccgctgacttttgcggcctgtttctgatgactgacaagcaggcggcgctgccgtatgcatcggcctacaaacaggacgagcaagagattaaacgcttgttagttgaggcagggatggaaaccagcggcaatttcaacgaaccggcagatcatctggcgatctatctcgaattgctcagccatctgcatttttcgctgggagaggggaccgtttctgcgcgaagaatcgacagtttgcggcaaaaaacactgacggcgctgtggcaatggttaccagagtttgctgcgcgttgtcgtcagtatgacagctttggtttttacgcggcactaagccagttattgctggtgttagtggagtgtgactaccaaaaaagataa

SEQ ID NO: 943 - DNA, 306 bp, Escherichia coli
atggctaatgttacggtgacttttactattaccgaattttgcctgcataccggcatctctgaagaggagttgaatgaaattgtcggtttgggggtggttgaaccgagtgagatccaggagacaacctgggtatttgacgaccatgccgccattgtggtgcaacgcgcggtacgcctgcgtcatgaactggctctggactggccggggatcgcggtggcgctgacgttaatggatgatattgcgcacctgaagcaggaaaaccgcctgctgcgccagcggctttcccggtttgtggctcacccgtga

SEQ ID NO: 944 - DNA, 921 bp, Escherichia coli
atggaattaaaggattattacgccatcatgggcgtgaaaccgacggacgatctcaagacaatcaagaccgcctatcgtcgactggcccgcaaataccatcctgatgtcagcaaagaacctgatgccgaagcccgcttcaaagaggtcgctgaagcctgggaagtgttaagtgatgaacaacgtcgcgctgagtatgatcagatgtggcaacatcgcaacgatccgcaatttaaccgtcagttccatcatggcgacggtcagagttttaacgccgaagattttgacgatatcttctcgtcaattttcggtcagcatgcccgccagagccgtcaacgccccgccacacgcggccacgatattgaaatcgaagtggcggtattcctcgaagaaacgcttactgagcataagcgtaccatcagctataacctgccggtttataacgcctttggcatgatcgaacaggaaatcccgaaaacgctgaatgtgaagatcccggcgggcgtcggcaatggtcaacgcatccgcctgaaaggccaggggacgccgggcgaaaacggcggtccaaatggcgacctgtggctggtgattcacattgcgccacatccgctgtttgatattgtcggccaggatctggaaatagtggtgccggttagcccgtgggaagcggcgctgggtactaaagtcaccgttccaacactgaaagaaagcattttgctgactatcccgcctggcagccaggccgggcaacgattgcgcgttaaaggcaaaggtctggtgagcaaaaaacagaccggcgatctgtatgcggtactgaaaatcgtgatgccgccgaaaccggatgaaaacactgccgcgctgtggcagcaactggcagacgcccagtcgtcttttgatccacgtaaagattgggggaaagcataa

SEQ ID NO: 945 - DNA, 1242 bp, Escherichia coli
atgaacaaaacgctaatcgccgcaactgtggcagggatagttttactcgcttcaaatgctcaggcacaaaccgtaccggaaggctatcagctacagcaagtgctcatgatgagccgccataacttacgtgcgccgctggcgaacaatggcagtgtgctggagcagtcgacgccgaataaatggcctgaatgggacgtccccggtgggcagctcaccactaaagggggcgtgctcgaagtgtatatgggccattatatgcgtgaatggctggcagaacaggggatggtgaaatcaggggaatgcccgccaccggacaccgtttatgcctatgccaatagtctgcaacgcaccgtcgcgaccgcgcagttctttattactggcgcattccctgggtgtgatattcctgttcatcaccaggaaaaaatgggcactatggaccccacctttaacccagtgatcaccgatgattccgccgcattcagtgaacaggcggtggcggcaatggagaaagagctcagcaaactccagcttaccgacagctacaagctactggaacaaatcgttaactataaagattctcctgcgtgtaaagagaagcaacaatgttcgcttgtagatggcaaaaatacctttagcgcgaagtatcaacaagaaccgggcgtttccgggccgctgaaagtcggcaactcgctggtagatgcgtttactttgcaatactacgaaggttttccgatggatcaggtggcctggggagaaatcaaatctgaccagcagtggaaggtgttgtcgaagctgaaaaacggttaccaggacagcctgtttacctcaccggaagtggcgcgcaatgttgcgaaaccgctggtcagttatatcgacaaagccctggtcaccgatcgcaccagtgcaccgaaaatcacggtattagttgggcacgactccaacattgcctctctgttaacggcgctggatttcaaaccgtatcagttgcatgaccagaacgaacgcacgccgattggcggcaaaatcgttttccagcgttggcatgacagcaaagccaatcgcgacctgatgaaaattgaatatgtgtaccagagtgcggaacagttacgtaatgccgatgcgttaaccctgcaggcacctgcgcagcgcgtgacgctggaattaagcggttgcccgatagatgccaacggtttttgcccaatggataagtttgatagcgtattgaatgaagcggtgaaataa

SEQ ID NO: 946 - DNA, 228 bp, Escherichia coli
atgccaactcaagaagcgaaagctcatcacgtcggtgaatgggcatctctgcgcaatacgtcgccggaaatagccgaggccattttcgaagtcgccgggtacgacgaaaaaatggcggaaaagatttgggaagaaggtagcgatgaagtgttagtcaaagcctttgctaagaccgataaagattcgcttttttggggcgaacagaccatcgaacgtaaaaacgtttaa

SEQ ID NO: 947 - DNA, 597 bp, Escherichia coli
atggctaaagttctggtgctttattattccatgtacggacatattgaaacgatggcacgcgcagttgctgagggtgcaagcaaagtggatggcgcagaagttgtcgttaagcgtgtaccggaaaccatgccgccgcaattatttgaaaaagcaggcggtaaaacgcaaactgcaccggttgcaaccccgcaagaactggccgattacgacgccattatttttggtacacctacccgctttggtaacatgtccggtcaaatgcgtaccttcctcgaccagacgggcggcctgtgggcttccggcgcactatacggaaaactggcgagcgtctttagttccaccggtactggcggcggtcaggaacaaaccatcacatccacctggacgacccttgcgcatcacggcatggtgattgtccccattggctacgcagcgcaggaattatttgacgtttcacaggttcgcggcggtacgccgtacggcgcaaccaccatcgcaggcggtgacggttcacgccagcccagccaggaagaactgtctattgctcgttatcaaggggaatatgtcgcaggtctggcagttaaacttaacggctaa

SEQ ID NO: 948 - DNA, 174 bp, Escherichia coli
atggcaaaccatcgaggcggttccggcaattttgcagaagaccgcgaaagagcatcagaagcaggtaaaaaaggtggacagcacagcgggggtaatttcaaaaatgacccgcagcgcgcatctgaagcaggtaaaaaaggtggcaagagcagtcacggtaaaagcgacaactag

SEQ ID NO: 949 - DNA, 1329 bp, Escherichia coli
atggcaatgttcggttttcctcactggcagttaaaatcgacctctacagagagcggcgtggtcgcgccggatgaacgattgccgtttgctcaaacggcagtaatgggcgttcaacacgcggtggcgatgtttggcgcgacggtgttaatgccaattctgatggggctggatcccaatctttccattttaatgtcggggatcggcacgttactgtttttctttattaccggcgggcgcgtgcccagttatctcggttccagcgcggcttttgtcggcgtggtgattgccgcgacgggctttaatggtcagggaattaatccgaatatcagcatcgcgctgggcgggattatcgcctgtgggctggtttataccgtcattggcctggtggtgatgaaaatcggtacgcgctggattgaacgactaatgccgccggttgtgacgggtgcggtagtgatggcgattggcctgaacttagcgcctatcgcagtgaaaaatgtatcggcttcggcctttgatagctggatggcggtaatgacggtgctgtgtattgggctggtggccgtatttacccgtggcatgatccagcgattattgattctcgtaggattaattgttgcctgtctgctgtatggcgtgatgaccaacgttttagggctgggaaaagccgtcgattttactctcgtcagccatgctgcctggttcggtctgccacatttttccactcctgcttttaatggtcaggcaatgatgctgattgcgcccgtggcggtgattctggtggcggagaacttaggtcatctcaaggcggtcgccgggatgaccggacgcaatatggacccgtatatggggcgggcattcgtaggcgatgggctggcgacgatgctttctggctctgtcggcggtagcggcgtaaccacctacgccgagaatattggtgtgatggccgtgacaaaagtctactcgacgctggtgtttgttgccgctgccgtcatcgccatgctgttgggcttttcgccgaaatttggcgcgctgatccatactattccggccgcggtgattggtggtgcatcaattgttgtgttcgggctgattgccgtcgcaggcgcacggatctgggtacaaaacagtgtggatttaagccagaacggtaatttgattatggtcgcagtaaccttagtgctgggtgcgggtgattttgctctcacactgggcggttttacgttgggagggatcggtacagccacctttggcgcgattttactcaatgcgttgttaagcagaaggttggttgacgttccaccgccagaagttgttcatcaggagccataa

SEQ ID NO: 950 - DNA, 495 bp, Escherichia coli
atgaacattgtcgatcaacaaacctttcgcgatgcgatgtcctgtatgggtgcggcggtcaatatcatcactacggacggtccagccgggcgcgccgggttcaccgccagcgccgtctgcagcgtgaccgacacgccgcccacattactggtgtgcctgaatcgtggggcgtccgtctggccggtattcaatgaaaatcgaacgctgtgtgtaaatacacttagcgccgggcaggagtcgctttcaaacctttttggcggcaaaacgcccatggaacaccgctttgccgccgcccgctggcagactggtgtgaccggatgcccgcaactggaagaggcactggtttcgtttgactgccgtatcagccaggtggtgagcgtcggcacccacgacattttgttttgcgccatcgaagcgattcatcgtcacgccacaccctacgggctggtgtggttcgatcgcagttatcacgcgctgatgcgccctgcttgttaa

SEQ ID NO: 951 - DNA, 591 bp, Escherichia coli
atgaacgaagccgttagcccaggtgcgcttagcaccctgttcaccgatgcccgcactcacaacggctggcgggagccccccgtcagcgatgagatgttacgggagatttatgccctgatgaaatgggggccgacatctgctaactgttctccggcacggatcgtgtttatccgcactgcagaaggaaaagaacgtctgcgcccggcgctttccagcggcaatctgcaaaaaaccctgaccgcgcccgtcaccgctatcgtcgcctgggacagtgaattttatgaacggttaccacagctgtttcctcacggcgatgcccgcagttggtttacctccagtccacaacttgccgaagaaacagcgtttcgcaacagttccatgcaggcggcctatctgatcgtcgcctgccgtgcgctggggctggataccggcccgatgtcgggctttgaccgtcaatacgttgacgatgccttttttgcgggcagcacgctgaagagcaatctgctgattaatatcggctatggcgattccagcaaactttttgcgcgcctgccacgtctgtcctttgaagaagcctgcgggctgttgtaa

SEQ ID NO: 952 - DNA, 801 bp, Escherichia coli
atgaaactttcactctcacctcccccttatgctgatgcgcccgtagtggtgttgatttcgggtcttggcggtagcggcagttactggttaccgcaactggcggtgctggttcaggagtatcaggtagtctgttacgaccagcgcggcaccggcaataatcccgacacgctggcagaagattacagtatcgcccagatggcagcggaactgcatcaggcgctggtagccgcagggattgagcgttacgcggtggtcggccatgcgctcggtgcgctggtgggaatgcagctggcgctggattatcccgcgtcggtaactgtgctggtcagcgttaacggctggctacgaataaacgcccatacgcgccgctgttttcaggttcgcgaacagttactacatagcggcggcgcgcaggcatgggtggaagcgcagccgttgttcctctatcccgccgactggatggcggcccgcgcacctcgccttgaggcagaagacgcgctggcactggcgcattttcagggcaaaaataatttactgcgtcgacttaacgccctcaaacgcgctgactttagtcgccatgcggatcgtatccgctgcccggtgcaaatcatctgcgccagtgatgatctgctggtgccatcagcatgttccagtgaacttcatgccgctctgcccgatagccagaaaatggtgatgcgctatggcggacacgcctgcaacgtgaccgatcccgaaacgtttaatgctctgttactcaacgggcttgccagcctgttacatcaccgtgaagccgctctgtaa

SEQ ID NO: 953 - DNA, 387 bp, Escherichia coli
atgccaaaatccgtaattattcctgctggcagcagcgcaccgctggcccccttcgttcccggcacgctggctgatggcgtggtgtatgtctccggtacgctggcttttgatcaacataacaacgtgctgtttgccgatgacccaaaggcgcaaacccgccacgttctggaaaccatccgcaaggtcatcgagacggcgggtggcacgatggcggatgtgaccttcaacagcatctttattaccgactggaaaaattacgccgcgattaacgaaatctacgccgagtttttcccgggtgacaaaccggcgcgattctgcattcagtgcggactggtaaaacctgacgcgctggtggaaatcgccacaattgcgcatatcgccaagtga

SEQ ID NO: 954 - DNA, 696 bp, Escherichia coli
atgatgacgaccttaaccgctcgaccggaagccattaccttcgatccgcagcaaagtgcgctgatcgtggtggatatgcaaaacgcttatgccacgccaggcggctacttagatctcgccgggtttgatgtctcaaccactcgcccggtcattgccaacattcaaaccgccgtgaccgcagcgcgaacggcagggatgctgatcatctggtttcaaaatggctgggatgaacagtatgtcgaggctggcggccccggctcaccaaattttcataaatcgaacgccctgaaaaccatgcgtaatcagccgcagctgcaggggaaattgctggcgaaaggctcctgggattatcaactggtggatgaactgatgccgcagcctggcgatattgtgctgccgaagccgcgctacagcggtttcttcaatacgccgctggacagcattttgcgcagccgtggaatacgccatctggttttcaccggtatcgctaccaacgtctgcgtcgaatcgacgctacgcgacggcttttttctggagtatttcggcgtggtgctggaagacgcaacacaccaggcggggccggaatttgcacagaaagccgcgttgttcaatatcgaaaccttttttggctgggtcagcgacgtcgaaacgttctgcgacgcgctttcttccacgtcctttgctcgtatcgcttaa

SEQ ID NO: 955 - DNA, 1092 bp, Escherichia coli
atgaaaattggcgtattcgtacctattggcaacaacggctggctcatttcgacccacgcgccgcagtacatgccgacatttgaactgaataaagccattgtgcaaaaagcggagcactaccatttcgatttcgccctgtcgatgatcaaactgcgtggctttggcggcaaaactgagttctgggatcacaaccttgagtcgttcaccttgatggcggggctggcagccgtcacctcacgcattcagatatacgcgacagctgccaccttaacgttacctccggcaatcgtcgcccgtatggccgcaaccatcgactccatctctggcgggcgttttggcgtcaacctcgtgactggctggcagaagcccgagtatgagcagatggggatctggcctggcgatgactatttctcccgtcgttacgactatctcaccgaatatgttcaggtgctgcgcgacctgtggggctcggggaaaagcgattttaaaggcgattttttcactatggatgattgtcgcgtcagtccgcaaccgagtgtccccatgaaagtgatctgcgccgggcaaagcgacgctggcatggcgttctccgcccggtatgccgattttaacttctgtttcggcaaaggcgtaaatacacccacggctttcgccccgaccgctgcgcggatgaaacaggccgcagagcaaaccggacgcgacgttggctcttatgtgttgtttatggtgattgccgacgaaaccgacgatgccgctcgcgccaaatgggaacactacaaagcgggcgcggatgaagaggcgttaagctggctaaccgaacaaagtcagaaagatacccgctccggtacagacaccaacgtccgtcagatggccgatcccacttcggcggtaaacatcaatatggggacgttagtcggttcttacgccagtgtcgcgcgcatgttagatgaagtcgcaagcgtgcctggtgccgaaggcgtgctgttgaccttcgatgattttctgtcgggaatcgaaaccttcggcgagcgcattcaaccactgatgcagtgccgcgcccatctccctgcgctgactcaggaggtggcatga

SEQ ID NO: 956 - DNA, 639 bp, Escherichia coli
atgacgcaaggcgcagtgaaaacaacgggtaagcgttcgcgcgcagtaagcgcgaagaaaaaagcgattcttagcgcagcactggacactttttcacaattcggttttcacggcacaaggctggagcagatcgcggagttggcgggtgtttcaaaaaccaatctgctgtattactttccgtcaaaagaggcgctgtatatagccgtactgcggcagattctcgatatctggctggcaccgttaaaagcgtttcgagaagatttcgccccgctggcggcgatcaaagaatacatccgtctgaagctggaagtttcccgcgattatccgcaggcttcgcgcctgttctgtatggagatgctggcaggtgcaccgctgttaatggatgaactgacgggcgatttgaaggcattaattgatgagaaatcggcgctcattgccggttgggttaaaagcggcaaactcgcgccgattgacccgcagcatttgatttttatgatttgggcttccactcaacattacgccgattttgcccctcaggtggaggcggtgacaggcgcgacgttgcgcgatgaggtgtttttcaatcaaacggttgaaaacgtgcagcggattattattgaggggattcgaccacgttaa

SEQ ID NO: 957 - DNA, 3963 bp, Escherichia coli
atgggaaccaccaccatgggggttaagctggacgacgcgacgcgtgagcgtattaagtctgccgcgacacgtatcgatcgcacaccacactggttaattaaacaggcgattttttcttatcttgaacaactggaaaacagcgatactctcccggagctaccagcgctgctttctggcgcggccaatgagagcgatgaagcaccgactccggcagaggaaccacaccagcctttcctcgactttgccgagcaaatattgccccagtcggtttcccgcgccgccatcaccgccgcctatcgccgcccggaaaccgaagcggtttctatgctgctggaacaagctcgcctgccgcagccagtagctgaacaggcgcacaaactggcgtatcaactggccgataaactgcgtaatcaaaaaaacgccagtggtcgcgcaggtatggttcaggggttattgcaggagttttcgttgtcatcgcaggaaggcgtggcgctgatgtgtctggcggaagcgttgttgcgtattcccgacaaagccacccgtgacgcgttaattcgcgacaaaatcagtaacggtaactggcagtcacacattggtcgtagcccgtccctgtttgttaatgccgctacctgggggctgctgtttaccggcaaactggtttccacccataacgaagccagcctctcccgctcgctgaaccgcattattggtaagagcggtgaaccgctgatccgcaaaggtgtggatatggcgatgcgcctgatgggcgagcagttcgtcacgggcgaaaccatcgcggaagcgttagccaatgcccgcaaactggaagagaaaggtttccgttactcttacgatatgctgggcgaagccgcactgactgccgcagatgcacaagcgtatatggtttcctatcagcaggcgattcacgccattggtaaagcgtctaacggtcgtggcatctatgaaggtccgggcatttcaatcaagctgtcggcgctacatccgcgttatagccgcgcccagtatgaccgggtaatggaagagctttacccgcgtctgaaatcactcaccctgctggcgcgtcagtacgatattggtattaacatcgatgccgaagaggccgatcgtctggagatctccctcgatctgctggaaaaactctgtttcgagcctgaactggcaggctggaacggcatcggttttgttattcaggcttatcaaaaacgctgcccgttggtgatcgattacctgattgatctcgccacccgcagccgtcgccgtctgatgattcgcctggtgaaaggcgcgtactgggatagtgaaatcaagcgtgcacagatggacggccttgaaggttatccggtttatacccgcaaggtgtataccgacgtttcttatcttgcctgtgcgaaaaaactgctggcggtgccaaatctaatctacccgcagttcgcgacgcacaacgcccatacgctggcggcaatttatcaactggcgggtcaaaactactacccgggtcagtacgagttccagtgcctgcatggtatgggcgagccactgtatgagcaggtcaccgggaaagttgccgacggcaaacttaaccgtccgtgtcgtatttatgctccggtcggtacacatgaaacgctgctggcatatctggtgcgccgcctgctggaaaacggtgctaacacctcgtttgttaaccgtattgccgacacctctttgccactggatgaactggtcgccgatccagtcactgctgtagaaaaactggcgcaacaggaagggcaaactggattaccgcatccgaaaattcccctgccgcgcgatctttacggtcacgggcgcgacaactcggcagggctggatctcgctaacgaacaccgtctggcctcgctctcctctgccctgctcaatagtgcactgcaaaaatggcaggccttgccaatgctggaacaatcggtcgcggctggtgagatgtcgcccgttattaaccctgcggaaccgaaagatattgtgggctatgtgcgtgaagccacgccgcgtgaagtagaacaggcgctggaaagtgcggttaataacgcgccaatctggtttgccactcctccggctgaacgcgcggcgattttgcatcgcgctgccgtgctaatggaaagccagatgcagcaactgattggtattctggtgcgtgaagccggaaaaaccttcagtaacgccattgccgaagtgcgcgaagcggtcgattttctccactactatgccggacaggtgcgggatgatttcgctaacgaaacccaccgtccattagggcctgtggtatgtatcagtccgtggaacttcccgctggctattttcaccgggcagatcgctgccgcactggcggcaggtaacagcgtgctggcaaaaccggcagaacaaacgccgctgattgccgcgcaagggatcgccattttgctggaagcgggtgtaccgccaggcgtggtgcaattgctgccaggtcggggtgaaaccgtgggcgcgcaactgacgggtgatgaacgcgtgcgcggggtgatgtttaccggttcaaccgaagtcgctacgttactgcaacgcaatatcgccagccgcctggacgctcagggtcgcccaattccgctcattgcggaaaccggcggcatgaacgcgatgattgtcgattcttcagcactgaccgaacaagtcgtaatagatgtgctggcctcggcgttcgacagtgcaggtcagcgttgttcggcactgcgcgtgctgtgcctgcaagatgagattgccgaccacacgctgaaaatgctgcgcggcgcaatggccgaatgccggatgggtaatccgggtcgcctgaccaccgatatcggtccggtgattgatagcgaagcgaaagccaatatcgagcgtcatattcagaccatgcgtagtaaaggccgtcaggtgttccaggcggtgcgggaaaacagcgaagatgcccgtgaatggcaaagcggcacctttgtcgctccgacgctgatcgaactggatgactttgccgaattacaaaaagaggtctttggtccggtgctgcatgtggtgcgttacaaccgtaaccagctcccagagctgatcgagcagattaacgcttccggctatggtctgacgcttggcgttcatacgcgtattgatgaaaccattgcccaggtcactggctcggcccaggtcggtaatctgtacgttaaccgtaatatggtgggcgcggtggttggggtgcaaccgttcggcggcgaagggttgtccggtaccgggccgaaagcaggcggtccgctctatctctaccgtctgctggcgaatcgcccggaaagtgcgctggcggtgacgctcgcgcgtcaggatgcggagtatccggtcgatgcgcagttgaaagccgcattgactcagccgctaaatgcactgcgggaatgggcggcaaaccgtccagaattgcaggcgttatgtacgcaatatggcgagttggcgcaggcaggaacacaacgattgttgccagggccgacgggtgaacgcaacacctggacgctgctgccgcgtgagcgcgtgttgtgtattgcggatgatgaacaggatgcgctgactcagctcgccgccgtgctggcggtgggtagccaggtgctgtggccggatgatgcgctgcatcgtcagttagtgaaggcattgccatcggcagtcagcgaacgtattcaactggcgaaagcggaaaatataaccgctcaaccatttgatgcggtgatcttccacggtgattcggatcagcttcgcgcattgtgtgaagccgttgccgcacgggatggtgcaattgtttcggtgcagggttttgcccgtggcgaaagcaatatccttctggaacggctgtatatcgagcgttcgctgagtgtgaataccgctgctgctggcggtaacgccagtttaatgacgatcggttaa

SEQ ID NO: 958 - DNA, 210 bp, Escherichia coli
atgatgttgcaactttgtgcaaccgtgttaaatgtgacctgcgtagcaagcttaaaaatgaatgaaatgttaataaacgaaatcgatatgacagggattaaaaaaataactcagactttttctctgcggcagttaacatttttgaaaggtgcaaccgcaaaaaatgtgagagagtgcaacctgatgaaaaatagtgtcgctgagcactaa

SEQ ID NO: 959 - DNA, 1509 bp, Escherichia coli
atggctattagcacaccgatgttggtgacattttgtgtctatatctttggcatgatattgattgggtttatcgcctggcgatcaacgaaaaacttcgacgactatattctgggcggtcgtagtcttgggccattcgtgacggcattatcggcgggtgcgtcggatatgagcggctggctgttaatggggttgccaggcgctgtttttctttccgggatttccgaaagctggatcgccattggtctgacattaggcgcgtggatcaactggaagctggtggccgggcggttgcgtgtgcataccgaatacaacaataacgccttaacattgccggattatttcaccgggcgctttgaagataaaagccgcattttgcgcattatctccgcgctggttattttgctgttcttcaccatttattgcgcttcgggcattgtggcaggcgcgcgtctgtttgaaagtacctttggcatgagctacgaaacggctctgtgggcgggggctgcggcgacgatcctttacacctttattggcggtttcctcgcggtgagctggactgacactgtacaggccagcctgatgatttttgccctgatcctgacgccggttatcgtgatcattagcgtcggtgggtttggcgactcgctggaagtaatcaaacaaaagagcatcgaaaacgtggatatgctcaaagggttgaattttgtcgccattatctcgctgatggggtgggggctgggttacttcgggcagccgcacatcctggcgcgttttatggcggcagattctcaccacagcattgtccatgcgcgtcgtatcagtatgacctggatgatcctctgcctggcaggggcggtggctgtcggcttctttggtatcgcttactttaacgagcacccggcggtagcaggtgcggtaaaccagaacgctgaacgcgtgtttattgaactggcgcaaattctgtttaacccgtggattgccgggattttgctgtcggcgattctggcggcggtaatgtcaacgttaagttgccagctgctggtatgttccagtgcgattaccgaagatttatacaaagcgtttctgcgtaaacaggccagccagaaagagctggtgtgggtagggcgagtgatggtgctggtggtggcgctggtggcgattgcgctggcggcaaacccggaaaaccgcgtgctgggcttagtgagctacgcgtgggcaggctttggcgcagcgtttggtccggtggtgctgttctcggtgatgtggtcacgcatgacgcgcaacggtgcgctggcggggatgatcatcggtgcgctgacggttatcgtctggaaacagttcggctggctgggtctgtacgaaattattccgggctttatcttcggcagtatcgggattgtagtgtttagtttgctgggtaaagcgccgtcagcggcgatgcaaaaacgctttgccgaggccgatgcgcactatcattcggctccgccgtcacggttgcaggaagggtaa

SEQ ID NO: 960 - DNA, 831 bp, Escherichia coli
atgtttgttccgtttctcattatgttgcgcgaaggacttgaagccgcgctgattgtcagtttgattgccagctatcttaagcgtacccagcgaggccgatggattggtgtaatgtggattggcgtgttgcttgccgctgcgttgtgcctgggcttgggtatcttcattaacgaaaccaccggcgaatttccgcaaaaagaacaggaactgtttgaaggtatcgtggcggtgatcgccgtggtgatccttacctggatggttttctggatgcgcaaagtgtcgcgcaacgtcaaagtacaactggagcaggcagtcgatagcgcattgcagcgtggaaatcatcatggctgggcgctggtgatgatggtcttttttgccgttgcaagggaggggctggagtcggtctttttcctgctggcggcgtttcaacaagatgtcgggatctggccgccgctgggtgcaatgctcggtcttgctacagccgtggtgctcggcttcctgctctactggggcggtattcgcctcaatcttggtgcattttttaaatggaccagcctgtttattctcttcgtcgccgcagggctggcagctggtgctattcgcgcatttcatgaagccggattgtggaaccactttcaggaaatcgccttcgatatgagcgcggtgctctcaactcactcgctgtttggcacactgatggaagggatttttggctatcaggaagcaccgagcgtcagcgaagtcgccgtctggtttatttatctcatcccggcgctggtggcatttgttctgccaccacgcgcaggggcgactgcgtcccgctccgtgtag

SEQ ID NO: 961 - DNA, 1128 bp, Escherichia coli
atgaccattaacttccgccgtaacgcattgcagttgagcgtggctgcgctgttctcttctgcttttatggctaacgccgctgatattccgcaagtcaaagtgaccgtgacggataagcagtgcgagccgatgaccattacggttaacgccgggaaaacacagttcattattcagaaccacagccagaaggcgctggagtgggagatcctcaaaggcgtgatggtggtggaagagcgggaaaatatcgcccctggttttagccagaaaatgacggcgaatttacagcctggcgaatacgatatgacctgcggtctgctgactaacccgaaagggaagttgatcgtcaaaggtgaagcaacggcggatgcggcgcaaagtgatgcgctgttaagtcttggtggtgcaattactgcatataaagcgtatgtcatggcggaaaccacgcaactggtgaccgacaccaaagcctttaccgacgctattaaagcaggcgatatcgaaaaagcgaaagcactgtatgcgccgacgcgccagcactatgagcgcatcgaaccgattgctgaactgttctccgatctggatggcagcattgacgcccgtgaagatgattacgagcaaaaatccgccgatccgaaattcaccggtttccaccgtctggaaaaagcattgtttggcgataacaccaccaaagggatggataagtatgctgaccagctttataccgatgtggtcgatttgcaaaaacgcatcagtgaactggctttccctccttcaaaagtggtcggcggtgcagccggactgattgaggaagtggcagccagcaaaatcagcggtgaagaagatcgctacagccacaccgatctgtgggatttccaggctaacgttgaaggctcgcagaaaattgtcgatctgctgcgtccacaactacaaaaagcgaatccggaactgttggcaaaagtcgatgccaacttcaaaaaggtcgataccattctggcgaaataccgtactaaagacggttttgaaaattacgacaaactgaccgatgctgaccggaatgcactgaaaggaccgattactgcgctggcggaagatctggcgcaacttcgcggtgtgctggggctggactaa

SEQ ID NO: 962 - DNA, 1272 bp, Escherichia coli
atgcagtatgaagatgaaaacggcgtgaatgaaccgtcacgccgacgtttactgaaagggattggtgcgctggcgctggcgggaagttgtccggtcgctcatgcacaaaaaacgcaaagtgcgccggggacgctttcaccggatgcacgcaatgagaaacagccgttttatggtgagcatcaggcagggatcctgacaccacaacaggctgcaatgatgctggtggcgtttgatgtgcttgccagcgataaagccgatcttgaacggttgtttcgcttgttgactcagcgttttgcttttctgactcagggcggagcggcaccagaaacgccaaatccgcgcctgccaccactcgattccggcattcttggcggctacattgcgcccgataatctcaccatcacgttatcggtgggtcactcattgtttgatgagcgctttggccttgcgccacagatgccaaaaaagttgcagaagatgacgcgtttccctaacgactcgctggatgcggcgttatgtcatggtgatgtgttgctacaaatttgcgccaacacccaggacacggtgatccatgcgctgcgcgatatcatcaaacacacgccggatttgctcagcgtgcgctggaagcgggaagggtttatttccgaccacgcagcgcgtagtaaaggcaaagagacgccgataaatttgctgggctttaaagacggcaccgccaatcccgatagccagaatgcgaagttgatgcaaaaagtggtgtgggtgacggcagatcagcaggagcctgcgtggacaatcggtggcagctatcaggcagtacgcttgattcagtttcgagtggaattttgggacagaacgccgctgaaagagcagcagacgatatttggtcgtgataagcaaaccggtgcgccgctgggcatgctgcatgagcatgatgttcccgattacgctagcgatccggaagggaaggtgattgcgctggacagccatatccggctggcgaatccccgcacggcggagagcgagtccagcctgatgctgcgtcgtggctacagttattcgttgggcgtcaccaattccgggcaactcgatatggggctactgtttgtctgctaccaacacgatctggaaaagggcttcctgacagtacaaaaaaggttgaatggcgaggcgctggaggaatatgtcaaacctatcggtggcggctatttctttgcgctgccgggtgtgaaggacgcgaacgattatctcggaagcgcattattgcgggtttaa

SEQ ID NO: 963 - DNA, 1065 bp, Escherichia coli
atggtaacgtcctgtactggacatgttttagataatcagcgcgccaccactcgcggagatttctcctccggtagtcatctcgtcactttgtattttcaacctcatcctttcttttcatgtgttaccgacgccgtaaacggtgcgcgtagccgtttttcggcattttatccaaaagcaaactatggcttacaaggaagccaaccctctgatgttcgtgcgcataatcgcgctgccaacggcgcgtgtgatgaatacaaacaactcaaggtgctctccatgggaagacaaaaagcagtgatcaaagctcgtcgcgaggcaaaacgtgtgctgagacgggattcgcgcagccataagcagcgtgaagaagaatcggtcacctcgcttgtgcagatgagcggcgtagaagccattggtatggcccgcgacagtcgcgatacctcgcccatcctcgcgcgaaatgaagcgcaattgcactatctgaaggctattgagagtaagcagctgatatttgccacgggcgaagccgggtgcggaaaaacctggatcagcgcagcaaaagcggcagaggccctgatacataaggatgtcgacaggattatcgttacccgtccagttctgcaagccgatgaagatcttggtttcttacctggtgatatcgcagaaaagtttgctccctattttcgcccggtctacgacgtgctggtccgtcgcttaggggcttcctttatgcagtactgcctgcgaccggaaatagggaaggtggaaattgcgccgttcgcctatatgcgtggacgtacctttgaaaatgcagtcgtcattcttgacgaggcgcagaatgtgactgccgcgcaaatgaaaatgtttttaacccgcctcggggagaacgtgacggttatcgtcaacggtgatatcacgcaatgcgatttgcctcgcggcgtgcgctccggattaagtgacgcgctggaacgtttcgaagaggatgaaatggtcgggatcgtccgattcggtaaagaggattgcgtacgttcggcactttgccaacgtacgctacatgcatacagttaa

SEQ ID NO: 964 - DNA, 414 bp, Escherichia coli
atgaacaatctaattattacgacccgacaatcgccagtacgtttactggttgattatgttgccacaaccatcttgtggacattatttgctttgttcatattcttattcgccattgatctgctgacgggttattactggcaaagcgaggccagaagccgacttcagttctattttttgctggcagtggcgaatgccgtcgtgttaatcgtctgggcattgtacaataagctgcgttttaaaaaacagcagcatcatgcagcataccaatatacgccgcaagaatatgcagagagcttagcaatacctgatgagctttatcagcaactacaaaaaagccacaggatgagcgtacacttcaccagtcagggacaaataaaaatggtggtttcagaaaaaacgctagtccgggtataa

SEQ ID NO: 965 - DNA, 1326 bp, Escherichia coli
atgattaatcgcatcgtatcgttttttatattatgtctggtgttatgcatacctctatgcgtagcgtactttcactctggtgaactgatgatgaggttcgttttcttctggccgttttttatgtccattatgtggattattggcggcgtctatttctgggtctatcgtgaacgccactggccgtggggagaaaacgcaccagccccccagttgaaagataatccatctatctccattatcattccctgttttaatgaggagaaaaacgttgaggaaactatacatgccgctttagcacagcgttatgagaacattgaagttattgccgtaaatgatggttcaacagacaaaacccgtgccatcctggatcacatggctgcacaaattccccgtctgcgggtcattcatctggcgcaaaaccaggggaaagccattgcgcttaaaaccggagctgccgcggcgaaaagtgaatatctggtgtgcattgatggcgacgcgttattagaccgcgatgcagcggcatatattgtggaaccgatgttgtacaacccacgtgtgggtgccgtaaccggtaatcctcgtattcgcacacgttctaccctggtgggtaaaattcaggttggcgagtattcctcaattattggtttgatcaagcggacccagcgtatctatggaaacgtatttaccgtttccggtgttattgccgcatttcgtcgcagcgccctggcagaagtgggttactggagtgacgatatgatcaccgaagatattgatattagctggaagctgcagttgaatcagtggacgattttttacgagccacgggcgctgtgctggatattaatgcctgaaacgttaaaagggctgtggaaacagcgcctgcgctgggctcagggcggtgcagaagtattcctcaaaaatatgacaaggttgtggcgaaaagaaaactttcgaatgtggccactgttttttgaatactgcctgacgacaatatgggcctttacctgcctggtcggtttcattatttacgcagtccaacttgcaggtgtaccgttaaatattgaattgacacatatcgcagcgacacatactgccggaatattattgtgcacgttatgtttactgcaatttattgtcagtctggtaattgagaatcgctatgagcacaatctggcttcatcgcttttctggattatttggtttccggttattttctggatgctaagcctggcaacgacattggtatcatttacacgtgtcatgttgatgcctaaaaaacaacgcgctcgttgggtaagtcccgatcgtgggattctgagaggttaa

SEQ ID NO: 966 - DNA, 2019 bp, Escherichia coli
atgttacgtaatggaaataaatatatcctgatgctggtgagtataattatgctcactgcgtgcattagccagtcaagaacatcatttataccgccacaggatcgcgaatctttactcgccgagcaaccgtggccgcataatggttttgtggcgatttcatggcataacgttgaagacgaagctgccgaccagcgttttatgtcagtgcggacatcagcactgcgtgaacaatttgcctggctgcgcgagaacggttatcaaccggtcagtattgctcaaattcgtgaagcacatcaaggaggaaaaccgctaccggaaaaagcagtagtgctgacttttgatgacggctaccagagtttttatacccgtgtcttcccaattcttcaggccttccagtggccggctgtatgggctcccgtcggcagttgggtcgatactccagcggataaacaagtgaaatttggtgatgagatggtcagtcgagaatattttgccacgtggcaacaagtgcgagaagttgcgcgttcccggctcgttgcggtcgcttctcatacatgggattctcactacggtattcaggctaatgccaccggcagcttattacctgcatatgtaaatcgtgcatattttactgaccatgcacggtatgaaaccgcagcagaataccgggaaagaattcgtctggatgctgtaaaaatgacggaatacctgcgtacaaaggctgaggtaaatccacacgtttttgtttggccttatggcgaagcgaatggcatagcaatcgcggaattaaaaaaactcggttatgacatgttcttcacccttgaatcaggtttggcaaatgcgtcgcaattagattccattccgcgagtattaatcgccaataatccctcattaaaagagtttgcccagcaaattattaccgtacaggaaaaaccactacaacgggtaatgcatatcgatcttgattacatttatgacgaaaaccgccagcaaatggatcgcaatattgatgtgctaattcagcgggtaaaagatatgcaaatatctaccgtgtatttacaagcatttgctgatcccgatggtgatgggctggttaaagaggtctggtttccaaatcgtttgctaccaatgaaagcagatatttttagtcgggttgcctggcaattgcgtacccgctcaggtgtaaacatctatgcgtggatgccggtattaagctgggatttagatcccacattaacgcgagtaaaatacttaccaactggggagaaaaaagcacaaattcatcctgaacaataccgccgtctctctcctttcgatgacagggtcagagcacaagttggcatgttatatgatgatcttgccggacatgctgcttttgatggcatattgttccacgatgatgctttgctttcagattatgaagatgccagtgcagcggctatcgcggcttatcagcaagctggctttagcgggagtctgagcgaaattcgacaaaacccggagcaatttaaacagtggacccgctttaaaagtcgtgcgttaactgacttcactttagaacttagtgcgcgcgtaaaagccattcgtggtccacatgttaaaactgcacgaaatatttttgcacttccggtaatacaacctgaaagtgaagcctggtttgcacagaattatgctgatttcctaaaaagctatgactggaccgctattatggctatgccttatatggaaggcgtcacagaaaaatcggctgatcaatggttaacacaattgaccaatcagatgaaaagcatcccgcaggctaaagacaaatcaattttagaattacaggcacaaaactggcagaaaaatggtcagcatcaggctatttcttcacaacaactcgctcactggatgagcctattacaactgaatggagtgaaaaattatggttattatcccgacaattttctgcataaccaacctgaaatagacgttattcgtcctgagttttcaacagcctggtatccgaaaaatgattaa

SEQ ID NO: 967 - DNA, 2424 bp, Escherichia coli
atgtattcaagtagcagaaaaaggtgcccgaaaaccaaatgggctttgaaacttcttactgccgcatttttagcagcgagtcccgcggcgaagagtgctgttaataacgcctatgatgcattgattattgaagctcgcaaaggaaatactcagccagctttgtcatggtttgcacaaaaatcaacactcagtaataaccaaattgctgactggttacaaattgccttatgggccgggcaagataaacaggttattaccgtttacagccgctaccgtcatcagcaattaccagcgcgtggttatgcagctgtcgccgtcgcttatcgtaacctgcaacaatggcaaaactcgcttacactgtggcaaaaggcgctctctctggagccgcaaaataaggattatcaacggggacaaattttaaccctggcagatgcgggtcactatgatactgcgctggttaaacttaagcagcttaaatctggagcgccggacaaagccaatttactcgcagaagcctatatctataaactgacggggcgtcatcaggatgaattacgggcgatgacagagtcattacctgaaaatgcatctaagcaacaatatcccacagaatacgtgcaggcattacgtaataatcaactagctgccgcgattgacgatgccaatttaacgccagatattcgcgctgatattcatgccgaactgatcagactgtcgtttatgcctacgcgcagtgaaagtgaacgttatgccattgccgatcgcgccctcgcccaatacgctgcattagaaattctgtggcacgataactcagaccgcactgcccagtaccagcgtattcaggttgatcatcttggcgcgttattaactcgcgatcgttataaagacgttatttctcactatcagcgtttaaaaaatacgaggcaaattattccgccctgggcgcaatattgggttgcgtcggcttatctcaaagaacagcagccaaaaaaagcacagtcaataatgacagagctcttttatcacaaggagaccattgccccggatttatccgatgaagaacttgcggatctcttttacagccacctggagagtgaaaattatcccggcgcgctaactgtcacccaacataccattaatacttcgccgcctttccttcggttaatgggcacgcctacgagcatcccgaatgatacctggttacaggggcattcgtttctctcaaccgtagcaaaatatagtaatgatcttcctcaggctgaaatgatagccagagagcttgcttataacgcaccaggaaatcagggactgcgcattgattacgcgagtgtgttacaagcccgcggttggcctcgtgcagcagaaaatgaattaaaaaaagcagaagtgatcgagccacgtaatattaatctggaggttgaacaagcatggacagcattaacgttacaagaatggcagcaggcagctgtcttaacgcacgatgttgtcgaacgtgaaccgcaagatcccggcgttgtacgtttaaaacgtgcggttgatgtacataatcttgcagagcttcgtatagctggttcaacaggaattgatgccgaaggcccggatagtggtaaacatgatgtcgacttaaccaccatcgtttattcaccaccgctgaaggataactggcgcggttttgctggattcggttatgccgatggacaatttagcgaaggaaaagggattgttcgcgactggctggcgggtgttgagtggcggtcacgtaatatctggctcgaggcggagtacgctgaacgcgttttcaatcatgagcataaacccggcgcgcgcctgtctggctggtatgattttaatgataactggcgtattggttcgcaactggaacgcctctctcaccgcgttccattacgggcaatgaaaaatggtgttacaggcaacagtgctcaggcttatgttcgctggtatcaaaatgagcggcgtaagtacggtgtctcctgggctttcactgatttttccgacagtaaccagcgtcaggaagtctcacttgagggtcaggaacgcatctggtcttcaccatatttgattgtcgatttcctacccaatctgtattacgaacaaaatacagaacacgacactccatactacaaccctataaaaacgttcgatattgttccggcatttgaggcaagtcatttgttatggcgaagctatgaaaatagctgggagcaaatcttcagcgcaggtgttggtgcctcctggcaaaaacattatggcacggatgtcgtcacccaactcggctacgggcaacgtattagctggaatgacgtgattgatgctggcgcaacgctacgctgggaaaaacgaccttatgacggtgacagagaacacaacttatacgttgaattcgatatgacattcagattttaa

SEQ ID NO: 968 - DNA, 1368 bp, Escherichia coli
atggaaaaagactatttgggaattagtagtactgtattagtgagtttattgtttgggcttgcgttggttttggtgaatagttggttcaatcagccaaccgttgaggaagttgttccacgatcaacctatctgatggttatgattgctttattttttatcgatactgttgcatttatttttatgcagttgtatttcatttatgaccgtaggcaattttcaaactgtatacttagtttggcttttttaagttgtttgatttactttattaaaaccgtcattatcattcagcaaattattgaggggcgtttgacaagcagtgttgttcaaaatgacattgcaatttattatttgtttcgtcagatgagtttgtgcgtattaatatttctggcattggtaaataaagttagtgaaaacacaaaacagcgaaatttgttttccaaaaaagtgactttgtgcataactttgttttttgttcttggggggccgatagttgctcacatattttctagccattatgagagctacgatttacacattgccgagttaaccaatgaaaatggtcaggtggtttggaaagcctcatatgttaccataatgattttcatgtggttaaccttgctttcggttaatctatactttaatggtttacgctgtgatatctggaacggtgtgtcggtgattgctttttgtgccgtgctgtacaatatctctctgttatttatgagcaggtatagcgtgtccatttggtatattagtcgcactattgaagtagtcagtaagttaaccgttttggtaatttttatgtgccatatattcagtgcgctacgagtaacaaaggacattgcacatcgcgatcccttaaccaatatatttaacagaaattatttttttaatgaactgacggttcaatcagcatcggccaaaaaaacaccttattgcgtcatgattatggatattgaccacttcaaaaaagtcaacgacacctggggacatccggttggcgatcaagtgataaagacagtggtgaatatcattgggaaaagcatacgaccagatgaccttttagcgcgcgttggcggcgaagagtttggcgtcttgctgacggagatcgatactgaatgtgcgaaagctttagcggaaaggattcgggaaaatgttgaacgtttaactggcgataatcctgaatacgccataccacaaaaagtgacgattagtattggcgctgttgtaacgcagaaaaatgagttaaaccctaaggagatctatcaactggctgataacgcactttacgaggcgaaagagaccgggcgtaataaggtggtagtaaaagaggcagaaattcttatcaaccgcaaggatgatgaatga

SEQ ID NO: 969 - DNA, 1203 bp, Escherichia coli
atggcagtattgacggatacgaaagcaagacatatcaaacctgatgacaaaccattgccccatgggggaattaccggactgacccttcatccttcttcagtaaaggggcgggggaaatgggtttttcgttatgtaagtccggtgacacaaaaaagacgtaatgctggattgggaacttacccagaggtcagtattgctgaagctgcacgtactgcccggataatgcgagagcaacttgctgcaggtgatgatcctctggagattaaaaaggctgaatctgagaaagtcgttatcccaacatttgccgatgcagccaggcgtgtacatgcagaactgtctcctggatgggaaaatccaaagcatgtaaggcagtggttatcgacgcttgagaattacgcgtttcctcaactgggagcaaaaacgctggattcgattacggctgcggacgtggcagaaacactgcgtccagtctggttaaccttgtcagaaacggcaagccgggttaaacagcgcattcatgttgttatgcagtggggatgggcgcacggtttttgtgtagcaaatcctgttgatgtggttgaccatttgcttcctcagcagacaagaggacgtgatgaacaccaacccgcaatgccctggaggcagttaccgctttttgtggcgaccagtgtgtataccgatgaaccttataatgttacccgcgcactgttattaatggtgatacttacagcaactcgctcgggcgaagccaggggaatgcgctgggctgaaattgattttcataagcgggtatggactatacctgcagaaagaatgaaagctaggctacagcatcgtgttcctttatcccggcaggctatttacattctggaaaatatacgtggcctgcatgatgaactggtgttcccttcacccagaaagcagcagatcctttccgatatggtgttgacaagttttctgcgtaaaaagaaagccgtcagtgacattccggggcgagttgccacggcacatggttttcgctcaacattcagggactggtgtagcgaacaggggtattcgcgggatctggcggaaagggcgctcgctcatacgctgaaaaataaggttgaggcggcatatcatcgtactgatctactggagcagcgtgtaccgatgatgcaggcatgggcggattatgtgatgtctcaaattgtgaataaataa

SEQ ID NO: 970 - DNA, 1818 bp, Escherichia coli
atgtataattttatcactataatgtatgatgttttttcatgttttggtgttctggctaaaaaccagaatacccgtgacatccgaaatattaaaaatttttcctcacatcaacattcactgggcgacatgtttgatgaattaataaacattattgataaagaacaagtattgagtacagaacaacgaaaagttatatttaggagatatgaagatctctatgttaagctaatgcactattctgtttttacagacaaaacacatcaaataataaaacaaaaatattttaatgacattgtaccaatgattctcgcactcgacatcaggaacacatatcgcccggataatgagatggcattttactatcatattcattcttttctcactcagataccggataatgaggatgatatatatcatgctgcaaggacatatctgcgaaattacgttaagttatgtttatctggatacacaccagcgaatgcgcatttcaaagatatctttgatggcgtatatgaattcattcgtaatattcgcaaaaacagtacaccaggaaaaacaaaacttatcgcaactatcaacacatgcaaagaaacctgtaaacatctgctttatttaagtaatgaagacaaggaaaaaataatttctgacttagataaaattcaggttgcatgttattatctcactatattactggctttcgaaagacgaacttcattaacaagcaccctggcaactttatataaaatgctgataagcgaaagagaagtttcagaatatgaatgccagttattatatttaaccaacccaatagatgtaatgaatatactgaacaaatacatatattactttcctaatgagaactcaccattttatacactgaaaattgacagtgcattatcgtgggatgccattgacgcaatacgagactatagtatttctgatatttatctttatcctgaacaaaaaacaataaattgtgtcgttgagattgaaaacattgtctttggcggttacatttatacattgaacaacggcgtcacattacaaaacatagaaaacactttaaaagattcttcatgccattatgtcttaaatggctatacagaatttgttaactgtttgagacaacttacttcaggaaagactgaaagtgttcatcgcaccatcaataaactgaactatgagaaattaccttttggatttatcattgccgcgtttgctatactaaagatagcatttaaaataaaattcagtaaaaatcatgtaaatatccgagcattattaaatgacatcaattattttatgacttatcagggcgagtccattaaccttatttcactggatcacgaatacccagagtcctgtcttcaaaatgacacaaacacatatttattaggaagagtaatatttctgtataactcaatgatttataagttcataaactgtcaggaacatgaaaccaataacattcactcagctatgataaataacctattacaggaagttgatatagcccttggtaaaataaatgacattatagacagcagaaacatatcagccccccatgaactggcaaatattcttacccgcgaaaaaatacttacaacacgggaaaaaaaaggaaacctgataagcctgtttgatggattcactttattccattgtgttggaatgataacctttcttatccattatctcagaacacctgaagaaaaagttgaaaatatatttatgttatatggtgcagataaaaacaataaactacgcagaagactgatttatgacgcactaggaataattcagtctcagcaggagtga

SEQ ID NO: 971 - DNA, 1434 bp, Escherichia coli
atgtgcttacttgcaccagaaaatccttatccgatatatgcactaccaccgctggtgagaaatgcaataattgaaactcaaaaaaatacacaggcacctttggctatggtggcaacatccgcattaacagcgacctcaattgcctgtcagaatcaggttgacgtgtgcagacctggaaatttacgtgggcctgttaatctttactctctgattctggctgattccggtgaaaggaaaacgaccgtggataaagtgtttatgaaagcattttatctcagggatgaagccctggcggaagaatacgcgaaactggttgagaattacagtacagaaaaggaaatatgggagcaaaagcaaaaagcactggagtcaaaattgcataaagaaattcgcgccggtaaaggttgtaaggcaacagagtcagagcttaaaagacatctgaataaatgtcctgttccgccgcagatacgccggacaattttcaatgagacaacgatagagggaatgttaaaatattattccgacagcaatcgctcttttgctcttgtatccagtgaaggaggaataatttttgatggccgggcaatgagtaaacttggaatacttaactctttgtgggatggtggttctcttttcatcgacaggaaatcatctcccggaattattttgaaggatccaagactgacggtatcggtgatgattcagcctgatgtttaccagaaaggtttttgtacgcgaaaaaaagaacttgtgaaaacgtcaggacatcatgcaaggtttttgatgtgtcaaccaacatcaacgcaggggacaaggataataaccggagataattattcatcacagtatcaggatttgtttgaacagaggatcaatgagcttattgatgaaagtctggcgatgagtggtgaacgacgttgccttcacttttctcctcaggctgccagaatctggacggattattacaacgatgtggaatcgaagctggggggattggggcctttaagacattgccgggaatatgctgctaaaaatgcagagtatatggcaagactggcaggacttattcaccattcgagcggtgaagagggggacatttccccttacactgcagaaatggcgagagaattagcaatatggtacggtaatgagtatgtgcggttatctaatccgttaacttttgacaaccctgccctgaccgtacctgtgcgactcattccagaggagcttgaacttttcaactggataaaaagctattgcattgagaaggggatcccctgtatgaaaaaaaatgacattttacagcgtggtccgaaccgtttccggaaaaaggataaaatcaactggttactggatttactgtatgaacaaaacagagttgtaccggttattgagggaaaaacgttgtgtgtcgcacctaactttgacctctga

SEQ ID NO: 972 - DNA, 594 bp, Escherichia coli
atgtataatgctaatcccaattacgaaatggacttcatgattctgaaagacgtgaatgaacacatggaaggtctgtttcaacgtttttctaaactgttacctttcagaattgattttgcctacaggaaagacacgcccagttttggtcattcctgtaggcacagtatgtgtattgaaatgcaccgcttacttagtgaaacccaaacgatgctggcgggatattactgggtaatggaatatacgtcaaacaagggacttcatattcattttatcggctacctggatgggcaacgtcacaagaaatcttatcggatatccaggcaactgggagatatctggaggcggatcacggaaggggagggttattttcacctgtgcagggctaaagacaaatacccggtgcgtatcgatcacgtgattcactatagtgataagtctgcggtagacggtttacgttacgcccttagctacctggctaaacaggatcagaaagaacacggtattattctgaggcgtagcaggctttccgaaaaaagcaaccggggccgaccacgactgaacagcatcctgccagggatatgttctcagctgtaa

SEQ ID NO: 973 - DNA, 207 bp, Escherichia coli
atggctccgctgaatgatgccctgtaccgttatgtgatgaacacccgcctgggaaccatccacggcatgtcggtcggcgaactgctggcgtggatcaaagaagatgaaaaccctagcaaaggcgagatggtgctgattattgaaggccataaagcccaggatgacgaactgcccgccgatgcgctgcgtacgctggcgctgttgtag

SEQ ID NO: 974 - DNA, 1890 bp, Escherichia coli
atgaagaaagtgctcactctctcactactggctctgtgtgtgtctcatagtgcagtagcagcaaactatacgttcaataacgataatattgccctctcgtttgatgatacaaactcgacgattgtgctgaaggaccgtagaactaaccatccgatcacaccacaggaattgttctttctgacactaccggatgagacaaaaatccacaccgcagatttcaaaatcaagcacatcaaaaaacaggacaatgcgattgtcatcgactttacgcgcccagattttaacgtaacagtgcagttgaaccttgtgaagggaaaatatgccagcatcgactacactattgccgccgttgggcaaccacgagacgtcgccaagattaccttcttcccgaccaaaaaacagtttcaggctccttacgtagacggcgcaatcactagctcaccgatcattgcggactcgttctttatcctgccgaataaaccgatcgtgaatacctacgcctatgaagcaacaaccaatctcaacgtagaactgaaaactccaattcagccagagacgccggttagctttaccacctggttcggtactttcccggaaaccagccagttgcgacgcagtgtgaaccagtttattaatgccgtacgtccacgtccgtacaagccttatttgcattacaacagttggatggatatcggctttttcactccgtacaccgaacaggatgttctgggacgcatggacgaatggaacaaggaattcattagcggccgcggagtggcgttagacgcttttctgctggacgatggctgggacgatcttaccggacgctggttatttggcccggcattcagcaacggttttagcaaagtacgagagaaagccgatagcctgcacagctccgttgggctatggctttcaccgtgggggggttacaataagccgcgcgacgttcgcgtttcgcatgcaaaagagtatgggttcgaaaccgtggacggcaagctggcgctttcgggagcgaactactttaaaaacttcaatgagcagatcattaatcttatcaaaaatgaacacattacctcgtttaaactcgacggaatggggaacgccagttcacatataaagggtagcccgttcgcctcggattttgatgcgtcaatagctctgctgcacaatatgcgcagagcaaacccgaatctatttatcaacctgaccaccggcaccaacgccagcccgtcctggttgttctatgctgattctatctggcgtcagggggatgatataaacctgtatggccccggcacgccggtgcagcagtggataacataccgtgatgccgagacataccgctctattgtacgtaaaggcccgctgttcccgctgaactcgctgatgtaccacgggatagtcagcgccgagaatgcctattacgggttagagaaggtgcaaacggacagcgactttgccgatcaggtctggagctacttcgcgaccggcacccagctgcaggagctgtatattaccccgtccatgctgaacaaggtgaagtgggatacgctggcgaaggctgcaaaatggtcgaaggaaaatgccagcgtgctggttgatacccactggattggcggcgacccaacggcgcttgccgtgtacggctgggcatcctggagcaaagacaaagccattctcggtttgcgcaacccatcggataagccacagacctactatctggatttggcgaaggatttcgaaataccggcaggaaacgcggcgcagtttagtctgaaagcggtatacggcagcaataaaacagtgcccgttgagtataaaaacgcgacggtgattacgttgcagccgctggaaacgctggtgtttgaggcggtgcccattaactaa

SEQ ID NO: 975 - DNA, 1164 bp, Escherichia coli
atgtttgatttcgacaaaatcattgagcgtcaaagtgataagtgccgtaaatgggaccatgcctttgtttgctcgcgtttcggtgacgtcccggagtcctttatccccctgtggatagccgatatggatttcacctcaccgcctgcggtgattgacggtttccggcgcatcgtggagcacggcacctttggttatacctggtgctttgacgaattctacgacgcagtcatcgccttccagcgcaaacgtcatcaggttgaggtggaaaaatcgtggatcacgttgacctacggcacggtatccacgctgcactacacgattcaggcgtactgcaaaccgggtgacagcgtgatgatgaacacgccggtctacgatccttttgcgatggcggcacagcgccagggcgtgcaggtactggctaacccgctgcgcgtggaggaaaaccgctatcagcttgattttaatctgatagaagaacagctcaaaacctaccgtccaacgctgtggttcttctgctcgccgcataacccgtccggcaggatctggcgcgaggaagaaatacgccaggtgtccgatctctgtcaacgctacagcacgattctggtggtcgatgaggttcacgctgaacacattctggatggcaaattcgtcagttgtctcacctctggctgtgccgcccaggacaacctgatcgtgctcacatcgcccaacaaagcgttaaagctgggcgggctgaaaacctcctactccatgattccagacgactcgctgcgccagcgcttccgccagcagcttgagaagaactccattacctcgcccaatttgttcggggtatggggaatcattctggcctatcaacacggtctgccctggctcgacgcgctgaacggttatctgcaaggcaacgcccggtatctggcggatgccctccagacctacttcccggcgtggaagatgatgaccccggaatcgtcgtatctggcgtggatagacgtaagcgcggatgagagtagcgcaacgcagctaacccaacatttcgcacggcaggcaggcgtggtcatagaagacggcagccactatgtacaaaacggtgaaaactacctacagattaattttggctctcagcgctactggctggagcgatccaccaaccgaatgcagtaa

SEQ ID NO: 976 - DNA, 267 bp, Escherichia coli
atgagcattatctcaacgaaatatcttctgcaggatgcgcaggccaacgcctacgccgtaccgacgtttaacatccacaacgccgaaacgatccaggcgatcctcgaagtatgcagcgaaatgcgctcgcccgtgatcctcgcggggcccccccggctcgttcaaacatattgccctggaagagatctacgccctgtgcagtgcgtattcgatcacttacgacatgccgctagcactgcatctcgatcatcacgaatcgttggatga

SEQ ID NO: 977 - DNA, 624 bp, Escherichia coli
gtgaaacatctgacagaaatggtgaggcagcacaaagcgggcaaaacaaatgggatttatgccgtttgttccgcacatccgctggtgctggaagctgcaatccgctacgccagtgcaaaccaaacgccgttactgattgaagcaacctccaatcaggtggaccagttcagcggttataccggaatgacgcccgccgattttcgcggctttgtttgtcagctcgccgactcgttgaatttcccgcaggatgcgctgattctgggtggtgatcatctgcgaccaaaatcgctggtcgatagcgaaacgcttatcgtggtgtacatctccagccacccttacacgcgccagtacgacctgggtctgctgacagaactgcgccgcgatcgtcaggcaatgcgcgtgatcgcaattgcggtggaaacggatgccatcatcgaagcgggcccgcatatcctgttgcctccttcccgttcgtttatcgacatggaacaggcgttctgcttcctgatgtacgcccaggtctttgcgctggctcagtcgattcatgttggcaatacgccagatctcccctctgccagcggcacgattaaccgtgtggtgcaaggtgtgattattcatccatag

SEQ ID NO: 978 - DNA, 252 bp, Escherichia coli
atgagtaataccgacgcttcaggtgagaagcgagtgacaggcaccagcgagcgacgagaacagatcattcagcgtctgcgacagcaagggagtgtgcaggttaacgatctgtcggcattgtatggcgtatctactgtgacgatccgcaacgatctggcgtttctggaaaagcaggggatcgctgtgcgtgcctatggtggcgcgttgatctgcgatagcacgacgccgtcagtcgcaatctttttacggtga

SEQ ID NO: 979 - DNA, 282 bp, Escherichia coli
atgctgtttcttggtgtagatgcgatcgatctggagtgcggcatcagcacgcataatgaagatgaagcccgtttaaaccgtcggatgtgcgaagttgcggaacggatcatcgtggtcaccgattccagtaagttcaatcgttccagtttacataagatcattgatactcaacgtatcgacatgatcattgttgatgaaggcattcctgcggatagtctggaaggcctgcgaaaggctggggttgaagtgattctggtcggggagctcgcgtcttcgctgtga

SEQ ID NO: 980 - DNA, 501 bp, Escherichia coli
atgggcaaaaccgaccgcagcgccaacccttcgctgggcaacaaaaagggcggcctcgccaacgtggtaaagaaggcactcggctccattgctaaatcgggtaaaaccgcaattgttgaagtgctgtcgcccggtcaacacccgactaaacgcggattaatttacgccgcgacgccagccagcgattttatctgtggcacgcaacaggtggcttcgggtatcaccgtgcaagtgtttacgaccggccgtggtacgccgtacggcctgatggcggtacccgtcattaaaatggcgacccgcaccgggcaggcgaaccgctggtttgatttaatggatattaacgcgggcactatcgctaccggcgaagagaccattgaagaggtgggctggaagttgttccactttattctcgacgtcgccagcgggaagaagaaaaccttctcggatcaatggggattgcgtaaccagctggcagtgtttaacccggcaccggtggtctga

SEQ ID NO: 981 - DNA, 198 bp, Escherichia coli
atgcactgcggtggcagcgacgcgttctccggcgttaccgctaaccccactgtcggctacgcctctgacctgctggtgcgctgcggcgcaacggtgatgttctccgaagtcactgatgtacacgacgccattcatctgttaacgccgcgcgccatcaatgaagaagtgggcaggtgtctgctcgaagagatggcctga

SEQ ID NO: 982 - DNA, 342 bp, Escherichia coli
gtgccggagccgctgccgccgctggaagattacacctttgaaggttaccgcaacgccgacggcagcgtgggcaccaaaaacctgttgggtattaccaccagcgtgcactgcatggcagacgttgtgaactacgtggttaaaattatcgaacgcaacctgctgccgaaatacccgagcatcgacggagtggtcgacttgaaccacctctacggctgtggcgtagcgattaatgcaccgaccgccgtggtgccaattcgcaccatccataatattgcgctgaacccaaacttcggtggcgaagtgatggtggtgggtctcggttgcgaaaagctacagccatag

SEQ ID NO: 983 - DNA, 513 bp, Escherichia coli
gtgcaaataaccgaagccttaatttcagagccgggagacatccggcgttttgttcagcaggcggtggaccactggccaaatctgttggcatttcacttcacgctctattcggcagaaggaaacatcaacgggcaacagattcatgcattctgtactgccttttaccgacaggtgcaagaacatattactgagcgtaatcacactgccagtccagcaccgccggtggtattacgctggttgcgggaacaacatggaggagcaacaatacgatgcctgttgctgctcagccaggcgagcatttgccatctgcgggtcagtgccacagttgatgaagaatgttcgcaagtggtggatttactgcagcaggcctggcgggggataaacgctggcggacaatgtcgggtggaaaggtgttttcgggttacccggcctgatacatcagagcaatacgttgcgttaaaaacagctgttcagtctctgatgccactggttattgcaacaattatccggtga

SEQ ID NO: 984 - DNA, 570 bp, Escherichia coli
gtggattacgtcaccagttttgaactgccttttcgtctgcttttaacccggacgtcacagctgattgttacacttcgggaagcatgggatatcagccagaaaaatgtggtgttcaacgataaacggtttggctgcgtgtacagcctgaaagccagtctttctggtgtgccggatatattccggtatcatctgtctcatcgtattcgccggatggttgggagtgaaaatacatcatcgccatggcagcaaattgcccgggaagtgaaagcgccccgtgaacgactgaagtatgcgctggaaacgggattgcaggtgatcgcactgaacggcctgttttggtcagacagtcagcgtctggtggtggatattctgaggctaagcgccaacagacgtgatacaggaaatcgtccgcatccccatttaccgtcttatatcactggcgctgacactgaaagcatggtcgtcagagactctgtctggcaaccaagggagcagaggccggaggtaattgacaggagccttgcgccgggatgcgtatgttctccccggacagacagtctcagttcgtag

SEQ ID NO: 985 - DNA, 222 bp, Escherichia coli
atgcagaatgaaataatgggttttctgagcagacataatggagggaaaaccgcagaaattgcggaggcgctggcggtaacggattatcaggcacgctattacctgttattactggaaaaagaaggtatggttcagcgctctccattaaggcgaggcatggcaacatactggtttctgaaaggagagatgcaggcgggacagagctgttcttccacaacttaa

SEQ ID NO: 986 - DNA, 330 bp, Escherichia coli
atggcacagcatgaagttattacccggggaggggatgcttttttactaaaattacgtgagagcgcgctgtcatccggctccatgtctgaagaacaattttttttactgataggtatttcttctattcacagtgacagagttattctcgctatgaaggattatctggtcagtggtcattcccgtaaagatgtctgcgagaaataccagatgaataatggatatttcagtacaacgcttgggcgccttaccaggttgaatgtcctcgttgccagacttgctccttattatactgatagtgtatcagctatagctgaaactgcttccctgtaa

SEQ ID NO: 987 - DNA, 546 bp, Escherichia coli
atgaagttaaaattcatctccatggctgtattttcagccctgaccctgggtgttgcgacaagtgcgtctgccgcacctgctactgtcaatggtggcactgttcattttaagggggaagtggttaatgctgcatgtgctgtaaatatgaactcagtagatcagacagttttgctcggtcaagttcgtacgaaaaagttagctaatcttgatgatgttagtggaccggttggatttaatattcaattagatgagtgtgattccacaacatctggatctgtgaagattcttttttctggcacacctgttgctggaaaaaataacgccttggctatacaaagctcggcatctggagctgcaacaaatgttgggattcagatacttgactcctcagggaatcctgtgacattaaattcggatcaaagcgcagtatatacattgacagacggaactaataatattccgttccaggctcgctatattgctactggtcaatcaacagctggtacagccaacgccgacgccacctttaaagttcagtaccagtaa

SEQ ID NO: 988 - DNA, 447 bp, Escherichia coli
atgcgcttccagggaaaaataattgctgaagcatgcagtcttgccctgtcagacaggcagatgactgtggatatggggcaactcagcagcaatcgatttcacgccgccggtgagtatggggaccctgtgggctttgatattcaccttcaggactgcagcactgtcgtcagtcagcgggtggggatttccttttatggcgtatcagatattcacgaaccggagttgctgtcggtggaagaggagaatgatgcctcagacggaatcgctatcgctttatttaatgaaagcggagagctggtaaaacttaatcagcctccggagaactgggtgcatcttacccgcggagatatgaaactgcatatgcaggcgaggtataaggccacacattatcccgtcaccgggggaaaggcaaatggacaggtatggttttctctgacctatctgtaa

SEQ ID NO: 989 - DNA, 696 bp, Escherichia coli
atgatgaagcacatgcgtatatgggccgttctggcatcatttttagtctttttttatattccgcagagctatgccggggttgctctgggtgccacccgtgtgatttaccctgaagggcaaaaacaggtacaactggcggtaacaaataatgatgataaaagtagttaccttattcaatcatggattgaaaatgttgaaggaaaaaaggatgccaggtttgtaattactcctccgttattttccatgcagggaaagaaagagaataccctgagaattattgatgccacaaacggacagatgccggaagacagggaaagtttgttctgggtgaatgtcaaggccatcccggccatggataaggcgaaaaccggcgagaattatctgcagtttgcaattgtcagcagaattaaactgctctaccgtccacagggactggttattccgccagaacaggcaccaggtaaattagagttcacccgtgaaaacggagggctgactctgtttaatccgacgccgtattatctgacagtgactgacttaaaggccggaaataaaagtcttgaaaacaccatggtacccccacagggaaaggtcactgttaatatccctggaggatacaccggaggagatattacttataaaacaattaacgattatggtgctctgactgaacaggtgaggggtgtggtgaagtaa

SEQ ID NO: 990 - DNA, 2631 bp, Escherichia coli
atgttttccggagatggcggacaactcctgtctgataaatcactgaccggctctgctggcgggggtaataacagaatgaaatttaatatactgccgctggcattttttatcgggataattgtttctccggcccgggctgagctctattttaacccgcgttttctgtctgatgacccggatgcggttgcggacctgtctgcatttacacaggggcaggagcttccgcccggtgtgtaccgggtggatatttatctgaatgatacgtatatctcaacccgtgacgtgcagtttcagatgagtcaggacgggaagcaacttgccccctgcctgagtccggagcatatgagtgcgatgggggtaaaccgttatgccgtgccgggtatggagagactgccggctgacacctgcacatcactgaattccatgattcagggtgccacattccggtttgatgtcgggcagcagcgattgtacctgaccgttcctcagttatatatgagtaatcaggcccgtggttatattgcgccggaatactgggataacggaattacagcggcattgctgaattatgacttcagtggtaatcgggtgcgcgacagctatggtggcaccagcgattatgcctatctgaatctgaaaacaggactgaatatcgggagctggcgtcttcgggacaacaccagctggagttacagtgccggaaaggggtacagccagaataactggcagcacattaacacctggctggagcgggatatagttcccctgcgctcccgtctgacgatgggggacagttatacccggggggatatttttgacggtgtaaatttcaggggtattcaactggcctctgatgacaatatggttccggacagccagagagggtatgcaccgacaattcacggtatttcccggggaacatcccggattagtatccgccagaacgggtatgaaatttaccagagtacgctacctccaggcccgttcgagataaacgatatttatccggccgggagtggaggtgacttacaggtaaccctgcaggaagctgatggcagtgtacagcgatttaatgtgccatggtcttcggtgcctgtactgcaacgtgaagggcatctgaaatatgctctcagtgccggagagtttcgcagtggcggacatcagcaggataatccccgttttgctgaaggaacgctgaagtatggtctgccggcaggctggacggtgtatggaggagcctggatagctgaacgctaccgtgccttcaatctggggatgggtaaaaacatgggctggctgggcgctgtttcactggatgccacccgtgcgaatgcccggttaccggatgaaagccggcatgacggtcagtcatatcgttttctgtataacaagtcactgacggaaacagggacaaatatccagttaatcggataccgctactccacacggggctatttcagctttgctgataccgcctggaagaaaatgagtggttacagtgttcttacccaggacggagtgatacagatacagccgaagtatacggattactacaatctggcttacaacaagcggggaagggtgcaggtgagtatcagccagcagacgggggaatcgtcaacgttgtatctgagtggcagccaccagagttactggggaacggacaggacggaccgtcagcttaatgctggctttaactcatctgtgaatgacatcagctggtccctgaactacagcctgtcccggaatgcatggcaacatgaaactgaccggatactgtcatttgatgtcagcattccgttcagccactggatgcgttcggacagcacatctgcatggagaaacgccagtgcccgttacagtcagaccctggaggctcacggacaggctgccagtacagcagggctgtatggcacatcgctgggggacaataatctgggatacagcatccagagtggttatacccggggagggtatgaggggagcagtaaaacaggatatgcctctctgaattacagagggggatacggtaatgccagtgcaggatacagtcacagtgggggttaccggcaactgtattatgggctgagtggcggtattctggcacatgccaatggtctgacactgagccagcctctgggagatacgctgattcttgtccgtgcaccaggtgcatctgatacgcgcattgaaaaccagacgggggtgtctacagactggagggggtatgctgtactgccttatgcaacagactatcgtgaaaaccgggtggcactggataccaacacccttgcagataatgttgatatagagaataccgtggtcagcgtcgtgcccacgcatggtgccgttgtgcgggctgactataaaacccgtgtgggtgtgaaagtgctgatgacgctgatgagaaacgggaaagcagttccttttggctctgtcgttacggccagaaatggggggagcagtatcgccggagagaatggtcaggtttatctgagcggaatgcctctgtcaggacaggttagtgtgaaatgggggagtcagaccacggaccagtgtactgcagattataaattaccgaaggaaagcgccggacagatattaagtcatgtcacggttagttgcaggtaa

SEQ ID NO: 991 - DNA, 528 bp, Escherichia coli
atggtgaaggatattattaaaacagtgacattctcctgcatgctggccggcagtatgttcgttacctgtcatgtctgtgcagcgggttctgtggtgaatattacaggcaatgttcaggataacacctgcgatgttgacattaactcccgaaactttgatgtcagtctgggaagttatgacagccgacagtttaccgcagctggtgataccacacctgcgtcggtatttcatgtcgggttaacctcctgcggcagtgctgtccgtgcagtgaagctgacatttacgggcacaccagataatcaggaggcggggcttattcagattaacagcataaatggagcacggggtgtggggattcagcttcttgataaggataaacatgagctgaaaattaatgtgccgacaacaattgcgttaatgccgggaacacagaccatagcgttttatgcccgtctgaaagccacttatcttccggtaaaggccggtaatgttgatgcggtggttaattttgtacttgactatcagtaa

SEQ ID NO: 992 - DNA, 492 bp, Escherichia coli
atgaaactgaaagctattatattggccaccggtcttattaactgtattgtattttcagcacaggcagtggatacgacgattactgtgacgggtaatgttttgcaaagaacatgtaatgtaccagggaatgtggatgtttctttgggtaatctgtatgtatcagactttcccaatgcaggaagtggatctccatgggttaattttgatctgtctctcaccggatgccagaatatgaatactgttcgggcaacatttagtggtactgcggatgggcagacatactatgcgaatacagggaatgctggcggtatcaagattgaaattcaggacagggatggaagtaatgcatcatatcacaatggtatgttcaagacgcttaatgtacaaaataataatgcaacctttaatcttaaagcccgtgcagtgagtaaaggccaggttactcctggaaatatcagttctgttataaccgtcacctatacctatgcgtaa

SEQ ID NO: 993 - DNA, 969 bp, Escherichia coli
atgcgtaaatattatcccctctttaagaaaagcaccgtccttaagggcggtgttttattcacacttataatggcatattcccagccatcgtttgcactgttgtgcagaaataaccagaccgggcaagtatttaactccggggatacatcctttcgggttaatgtcagtcctgttgtgcaatatgataaatccatatctgtattggacctttcccaactggtatcatgtcagaatgaggactcgacaggccaaaactatgattatctgaaaatattgaaaggcagtggtttttctcctgctctggataccaaaacatacggacgactcgattttacaagtcgtccaacggggtatgccaggcaattaccacttcagtttgatttgcaggtgacagaggcgttttatcaatatggtgtctggaaaccattccctgctaaattatatctgtaccctgcaccgggtgtatttgggaaggtaattaacaacggagatttactggcaacgttatatgtgaataagttttccacaaaggggcaggaggcaggggagagaaatttcacctggcgtttctatgcaacgaatgatgtctatatccagacaggtacatgcagggtctcatcgaacaatgtcaaagttgaccttccgtcctatcccggagggccggtaacagtccctcttactgtacgttgcgaccagacacagtcggtcagctataccctgtcaggtcctgtaacaggaagtggtaatactgtattcgcaaatacggcagcatcagggtctggcggtgtgggtatacagttgtcggataacgtggggccggttccggccggacaaccgaggtctctgggacaggtaggcagctctcctgtgagtctggggctgaaggcctcttatgctctgaccggtcaggcaagtccgacgcccggtgctgtccagtcagtgataaatgtgacttttagctacaactag

SEQ ID NO: 994 - DNA, 741 bp, Escherichia coli
atgtcaggggcagttaacagtatactggaggtgaaatcaggcagaacagaatatatcctctcaccggtttttgagcctgtatgggatcagaccgggaaaatatttgcttttgaaatgctctcggatatccgttcagcaaaagacgggaggaaaatctgcgcatctgtttttttcagaagtgcgtctccggatattcagtacaaaatactcatcagtcagttgaagactgcggaaacgcttcataaatggtgtctgcagaagaaaataatgctgagtgtcaatatttcccgggtggtagccctgtatctgagaaaacatggcatcccggggcggccgggaacacatatcaggcttgaggtcagtgaggactttccggcagtggcgttaaaacccggtgatgaccccctgttacgttttttgtcagaacgtttcaccctctggctggatgatttcggctcaggaaatgcaggcttaatgtggggactgtccgggatgtttgaacgggtaaaaataagtcatgagttttttcattatgccctgaaaaacaggtgtgcaatgccgcttctccatgctgtggcagacactgttgcctgttataaccggggcgtgatacttgaaggtgttgaaaatgaagcgttgttccgtattgccagagacatgaatgtccagggctgtcagggatggctctacaggcgtgtggaagctgatgaattatccgcgattattgagctgcatggataa

SEQ ID NO: 995 - DNA, 501 bp, Escherichia coli
atgaataacacagacacattagaaaaaataatcagacaccaaaaaaacaaagacccggtatatccctttcgggaacatttgttgatgcaactttgtattcgcgcaaataaaaggatgcaggataatatatctgaatttctgggggcgtatggaataaatcactcagtgtacatggttctcaccacattattcacagcggagagtcattgtctgtcaccttcagagataagccagaaactgcagtttaccagaactaatattacccgcattacagattttttagaaaaaaccggatatgtaaaaaggacggatagcagggaggatcgccgtgctaaaaaaatcagtctgacatctgaaggtatgttttttattcagaggctcactcttgcacaaagcatgtatctgaaagaaatctggggttatctgacccatgatgaacaggaactgtttgaagtcattaataaaaaattactggcgcatcttgatgatgtcagctcataa

SEQ ID NO: 996 - DNA, 2178 bp, Escherichia coli
atgagaattaacaaaatcctctggtcgctaactgtgctcctggttgggttgaatagccagatatcagtagccaaatactccgacgatgataatgacgagactctggtggtggaagccaccgctgagcaggtattaaaacagcagccgggcgtgtcggttattaccagcgaggatattaaaaagacccctccggtaaacgacctttcagatattattcgtaaaatgcctggtgtcaatcttaccggcaatagcgcctcgggcacacgcggtaataaccgccagatcgatattcgaggtatggggccggaaaacaccttaattttaattgatggtgtaccggtgacgtcacgtaactccgtgcgttatagctggcgtggggagcgtgatacccgcggtgacaccaactgggtgccaccggaacaggttgagcgtattgaagtgatccgcggccctgcggcggcgcgctacggttcgggggccgccgggggggtggtgaacatcattaccaaacgtcccaccaacgactggcacggttcgctgtcgttatacaccaaccagccggaaagtagcgaagagggcgctacgcgtcgcgccaatttcagccttagtgggcctctggctggtgatgctcttaccacgcgtttgtatggtaacctgaataaaacggatgctgacagttgggatattaattctccggtcggtacgaaaaacgcagccgggcatgaaggggtacgtaacaaagatattaacggcgttatctcgtggaaattaaatccgcagcagattctcgatttcgaagccggatatagccgccaggggaatatctatgcgggcgatacgcagaacagttcttccagtgcagttaccgaaagcctggcaaaatccggcaaagagacgaaccgcctgtaccgacagaattatggcattacgcataatggtatctgggactggggacaaagtcgctttggtgtttattacgagaaaaccaataatacccgcatgaatgaaggattatccggcggtggtgaaggacgtattttagcgggtgaaaagtttacgaccaatcgcctgagttcctggcgaaccagcggtgagcttaatattcctttgaatgtgatggttgatcaaacgctgaccgttggtgcagagtggaaccgcgataagctcgatgatccttcctctaccagcctgacggtgaatgacagagatatcagcggtatttctggttctgctgcggatcgcagcagtaaaaatcattctcaaatcagtgcgctgtatattgaagataacattgagccggttcctggcacgaatatcattcccggcctgcgctttgattatctcagcgactccggcgggaacttcagccccagtctgaatctttcgcaggaattgggcgattatttcaaagtcaaagcaggggttgcccgaacctttaaagccccaaacctgtatcaatccagtgaaggctatctgctctactcgaaaggcaatggctgtccaaaagatattacatcaggcgggtgctacctgatcggtaataaagatctcgatccggaaatcagcgtcaataaagaaattggactggagttcacctgggaagattaccacgcaagtgtgacctacttccgcaatgattaccagaataagatcgtggccggggataacgttatcgggcaaaccgcttcaggcgcatatatcctcaagtggcagaatggcgggaaagctctggtggacggtatcgaagccagtatgtctttcccgctggtgaaagatcgtctgaactggaataccaatgccacatggatgatcacttcggagcaaaaagacaccggtaatcctctgtcggtcatcccgaaatatactatcaataactcgcttaactggaccatcacccaggcgttttctgccagcgtcaactggacgttatatggcagacaaaaaccgcgtactcatgcggaaacccgcagtgaagatactggcggtctgtcaggtaaagagctgggcgcttattcactggtggggacgaacttcaattacgatattaataaaaatctgcgtcttaatgtcggcgtcagtaatatcctcaataaacagatcttccgatcttctgaaggggcgaatacctataacgagccaggccgggcttattatgccggagttaccgcatcattctga

SEQ ID NO: 997 - DNA, 957 bp, Escherichia coli
atgtatgcccgcgagtatcgctcaacacgcccgtataaagcgattttctttcatctttcttgcctcacccttatctgtagtgcgcaagtttatgcgaagccggatatgcggccactggggccgaatatagccgataaaggctccgtgttttaccatttcagcgccacctctttcgactctgtcgatggcacacgccattatcgggtatggacggccgtgccgaatacaaccgcaccggcatcgggttacccgattttatatatgcttgacggtaacgcagttatggaccgcctggatgacgaactgctcaaacaattatcagaaaaaacaccgccagtgatcgtggctgtcgggtatcagaccaacctccctttcgatctcaacagcagggcttacgactatacgccagcagcagaaagcagaaaaacagatctccactcagggcgttttagccgtaagagtggtggcagcaacaacttccgccagttactggaaacgcgtattgccccaaaagtggaacagggactgaatatcgatcggcaacgccgcggcttatgggggcactcctacggcggcctcttcgtgctggattcctggctgtcctcctcttacttccggtcgtactacagcgccagcccgtcgttgggcagaggttatgatgctttgctaagccgcgttacggcggttgagcctctgcaattctgcgccaaacacctggcgataatggaaggctcggcgacacagggtgataaccgggaaacgcatgctgtcggggtgctgtcgaaaattcataccaccctcactatactgaaagataaaggcgtcaatgccatattatgggatttccccaacctgggacacgggccgatgttcaatgcctcctttcgccaggcactgttagatatcagtggtgaaaacgcaaattacacagcaggttgtcatgagttaagccactaa

SEQ ID NO: 998 - DNA, 1230 bp, Escherichia coli
atgctgaacatgcaacaacatccctctgctatcgccagcctgcgcaaccaactggcagcgggccacattgctaaccttactgacttctggcgcgaagctgagtcgctgaatgttcctcttgtgacgccagtcgaaggagcggaagatgagcgagaagtgacctttctgtggcgcgcccgacatcctctgcagggcgtttatctgcgtctgaaccgggtgacggataaagagcacgtagaaaaaggaatgatgagcgcccttcccgaaacggatatctggacactgacactgcgtttacccgcaagttactgcggctcctattcgctgctggaaatcccccccggcactacggctgagacgattgcactgtccggaggccgttttgccaccctcgccggaaaggccgatccgctaaacaaaatgccggagatcaacgttcggggaaacgcaaaggaatcagtgctgacacttgataaagctcccgccctgtcggaatggaacggcggcttccacaccggacaactgcttacctccatgcgcattatcgccgggaaatctcgccaggttcggctctatattccggacattgatatttctcagcccctcgggctggtcgtgctgcccgatggtgaaacctggtttgatcaccttggcgtatgcgcggcaattgacgccgccataaataacaggcgcatcgtgcccgtggctgtactgggcattgacaacattaatgaacatgaacgcactgagatactcggcgggcgcagcaagctgataaaggatatcgcaggacatctgctgccgatgatccgcgctgaacaaccgcagcgtcagtgggcagaccgttcgcgcacagtgctggccgggcagagcctcggcgggatcagtgcgctaatgggggctcgttacgcaccggaaacgttcggtctggtgctcagccactctccttcaatgtggtggacgccagaaagaaccagtcgaccaggcttgttcagcgaaaccgatacctcatgggtgagtgagcatctgctttctgccccaccgcagggcgtgcgtatcagcctgtgcgtgggatcgctggaaggttcgacagtgcctcacgttcagcaacttcaccagcggctgattaccgctggcgtcgaaagccattgcgcaatctacaccggtggtcacgattacgcatggtggcgcggtgcactgattgacgggattggtttactacagggttga

SEQ ID NO: 999 - DNA, 3660 bp, Escherichia coli
atgcctgcgaatcacactcccacaccggctcagtcatggatagttcgcctggcgcgcgtgtgctgggaacgtaagaaacttagtgtcatcgtggtggtagcgtcagtatcgactattttgctggctgcgctgacgccactgctgacaagacaggctgtgaatgacgcgctggcgggcaatccggcccgcctgccgtggctggcctgcgggttactgttgatcgctttttttgatttcatcggtaactatgtgcgccgtggttatgccgggatgctctcactctgggtgcagcataccctcagaggacgggtattcgacagtattcagaaacttgacggcgcaggccaggatgcgctgcgcaccgggcaggtgatttcacggaccaacagcgatctgcagcaggtgcataccctgctgcagatgtgcccggtgccgctggcagtgttcacttattacattgccggcattgccgtgatgctgtggatgtcccctgccatgacgcttatcgtcgtgtgcgtactggtatgcctggcgatcaccgcgcttcgtgcgcgtcgtagggtcttcgcgcaaaccgggctggcctcagaccaactggcgaatctcaccgaacatatacgcgaggtgctggcacagatctcagtggtaaaatcctgtgtggcagagatgcgtgaaacgcactggctcgataggcagtcgcggcagattgtgcgtgtacgcatcggtgcggttatctcgcaggcgatgcctggggccaccatgctggcgctaccggtgctcgggcaaatcgtcctactgtgctacggcgggtggtcggtcatgcacgggcggatcgatctcggtaccttcgttgcattcgccagcttcctcgcgatgctgaccgggccaacccgcgtactggcatcgtttctggttatcgcacagcgcactcaggcgtccgtggagcgggtgtttgcactgatcgacacccgttcacagatggaggacgggacggagtcgattaacagtcaggttgtcggactggaactggagaatatgagctttgactaccaccatggcgacagacatatcctcagcgatatctccttttccctgcgcgccggtgaaaccgtggcggtggtgggcgcatcgggttcaggaaaatcgaccctgttgatgctgctggcgcgtttttatgatccctgctccggaaagatatggctcaacaccagcgaaggccgacaaaatcttcgcgatatcagactggaggcgcttcgtagccgggtaggcatcgtatttgaagatgcttttctgtttgccggtacggtggcggaaaatatcgcctatggccaccctcaggcaacggcggacgacattcgccgtgcggcagctgctgcaggagccagcgattttatcaacgccctgccgaaaggcttcgatagcctgttaaccgaacggggtacgaatctttccggcgggcagaggcagcgaatagcgctggcgcgggcgctcattactgcaccggacgtgttaatcctggatgataccacctcagcggttgatgctgttacggaagcggagattaataccgcgctgggtcgctatgctgacgaagggcatatgctgctggtgattgcccgacggcgttcaacgcttcagctagccagccgggttgtggtgctggataagggccgtatggtggataccggaaccccggcagaacttgaagcgcgctgtccggcgttccgcgcactgatgaccggcgacagcgattttctggccacgtcccacaatagccacaacgaattgtggccggctgaaccagcgacacaagacgatgtaacggatacgggggataaaggttttgtcgcccgtatgacccgcgtaccggaaaatgcagtacagcaggcgctggccggtaaaggtcgcaaagtcacgtcactactgaagcctgtggcatggatgttcgtcatcgccgctctgctgatcgcactcgattctgcggcaggcgtaggggtgctgatactgttgcagcacggcattgactccggtgtcgccgcaggcgatatgtcgaccatcggcctctgtgccctgctcgccctgtgcctggtcattgtgggctggtgcagttattctctgcagacggtcttcgccgccagagcggcggaatcagttcagcattcggtgcgcttgcgcagcttcggccatatgctgcgtcttggactcccctggcatgaaatgcatgccgattcgcgtctgacccgcatgaccgttgatgtggactctctcgcccgctttctgcaaaacggccttgccggtgcggccaccagtctggtgacgatgttcgcaatcgccgccaccatgttctggctcgacccgatcctggcgctgacggcattaagcgcagtgccagtggccgcactggcaaccatgatttatcgccgcctcagtacccctgcttatgcacaggcacggctggaaataggcaaagtcaacagcaccctgcaggaaaaagtctccggcctgcgtgtcgtgcaatcgcatggtcagcaggaactggagggcgcccggctgcgcgcgttatcggagcgtttccgcgcaacccgtgtgcgagcacaaaaataccttgcagtctattttccgttcctgacattctgcaccgaggcctcctatgccgccgttctgttagtgggagcttcgcaggtcgccgctggagaaatgactgccggggtactggcggctttcttcctgttgctggggcaattctatgggccagtgcagcagttatcagggattgtcgacgcctggcagcaggcgacagccagcggcaaacatattgatgaactactggcgacagaaggcactgagaacctcgggtcctcttcggtcctccctgtcaccggtgcactgcatcttgatgaggtcacgttcagttatcccgacagtcacgagccagctctgaacaaacttaccctgacgatccctgagggaatggttgtcgcggtcgtcggtcgcagcggtgcgggtaagtcgacgctgattaagctgattgccgggttgtatttccccacgcacggcaacatcagaatcggtgtgcaaatgctcgatgatgcctcgctcactgagtatcgtcgccagattgggcttgtcgatcaggatgtagcactgtttagtagtgatattgcagaaaacattcgttattcactgccatccgccaccaatgaagacgttgaaattgcctcacagcgggcagggctgtatgagatggtgtgcaatctgccgcagggattccggacaccagtgaataacggcggagccgatctgtccgcaggtcagtgccagttgattgcgctggcccgcgcgcaactggcgaatgctcacatcctgctgctcgacgaagccacgtcatgtctggatcgcacatccgaagaacgactgatgtcatcgttaacagatgtcgtgcatgccgggaagcactcggcgctgattgttgcacatcgtctgaccaccgcgcaacgctgcgatctgattgccgttattgataaggggttacttgcggaatacggaacccacgaacagctgttatctgcaggcggcctctatacccgcttatggcatgacagcgtcagcagtactgcgctccatcgccagcacaacatgaaggaggaaaccccgggatag

SEQ ID NO: 1000 - DNA, 1116 bp, Escherichia coli
atgcgtattttgtttgtaggcccgcctctctatgggctgttgtatcctgtgctgtccctggcgcaggcatttcgcgttaacggtcatgaagtactgatcgccagcggaggacaattcgcacaaaaagcggcagaggccgggttggtggtgtttgacgctgcccccggtctggattccgaagctggttaccgccaccatgaggcacagcggaaaaaaagtaacatcggaacccaaatgggcaacttctcattcttcagcgaagaaatggcagaccatctggtggagtttgccggacactggcggcctgacctcatcatctaccctccactcggagtcatcggaccgctgattgccgccaaatatgatataccggtcgtgatgcaaaccgtaggcttcggccataccccctggcatatcaggggtgtaacgcgttcgctcacggacgcctatcgtcgccacaatgtgggggccacaccacgtgatatggcctggatcgacgtaacaccgccgagtatgagcattctggaaaacgacggtgaacccattattccgatgcagtacgtcccgtataacggtggcgcggtgtgggaaccatggtgggagagaaggcccgagcgtaaacgtctgctggtgagtctcggcactgtcaaaccgatggttgacggccttgatctaatcgcctgggttatggattctgccagtgaggtcgatgccgagatcatcctgcatatttcagccaatgcgcggtccgatttgcgctcgctgccgtcaaatgttcgcctggttgactggatacccatgggtgtcttcctcaacggcgcagatggtttcattcatcatggcggagcaggcaataccctgacagcgctacacgctggtattccacaaatcgtcttcggccagggagccgatcgcccggtaaatgcccgcgttgttgccgaacgcggctgcgggattatccctggcgacgtcggcctgtcgagtaacatgatcaatgctttcctcaacaatcgctcacttcgcaaagcctctgaagaggtagcagcggaaatggcggcgcaaccctgcccaggtgaagtggcgaaaagcctgatcacgatggtacagaaagggtag

SEQ ID NO: 1001 - DNA, 318 bp, Escherichia coli
atgcaactgagcaggctgacgctgagaagtaaaaagccggagcttgtggagcaagagctgtggggtgtcttactggcttataatctggtgagatatcagatgattaaaatggcggaacatctgaaaggttactggccgaatcaactgagtttctcagaatcatgcggaatggtgatgagaatgctgatgacattgcagggcgcttcaccgggacgtataccggagctgatgcgcgatcttgcaagtatgggacaacttgtgaaattaccgacaagaagggaaagggccttcccgagagtggtaaaggagaggccctag

SEQ ID NO: 1002 - DNA, 435 bp, Escherichia coli
atgaaggatttgagttttatcagattttttctggcaatattgtggcttcttgttcctcctgctctggagtttccagtaattcatcggcacattacgccaggtgcactgactttatgcgtcattacagccttaataattacgctgcttgccagtttgggcggcaggcttgtctcagttaaatgtatttcggagatttcgtttattcgtcgtcatcggattgagtgcatgatggcgggatttatgatttatttctggacattctctcttattgctggttggtacaagccccagtttaagaaggaatatcagacactccactatgagaatgctgggtattacgttcttgcacgctatgacgggcgtttggttttatcacaatcgtacaggaacgggagtaggaagtttgttataatcaatggcggacatagactttga

SEQ ID NO: 1003 - DNA, 345 bp, Escherichia coli
atgcagacccgagataaccttgagcgcatggtggttatcaaggcgtttatcgcggtacgggtgctgggcctgcggcaggaaggtatcagtgaagaaacacaaaatgacagctgtaagaaaatactgacgccgacagagtggaaactgctgtgggttaagctggaaggaaaacagcttccgtcacagacgccgacactgaaatgggcctgtctgaaactggggcgatggcatgacagcaaacgcacaggccgccctggttgggtagttatgtgggatggctggttcagacttcaggatatggttgagggttacctggtgatgaagtctcttgatcaggagatctga

SEQ ID NO: 1004 - DNA, 1971 bp, Escherichia coli
atgtatatgaatgtaatcagaactgtcatttgtacattaattatacttccggtgggactacaggcagcgaccagtcattcttctatggttaaagatacaatcaccattgtcgcgacaggaaatcagaacacggtatttgaaacgccgtcgatggtcagtgtcgtcacgaatgacactccgtggagtcagaatgcggttacatcggccggcatgctgaaaggtgttgccggtctcagccagactggtgcaggacggaccaatgggcagacctttaatttacgcggctatgacaaaagcggggtacttgttcttgttgacggcgttcgccaactcagtgacatggcaaaaagcagtggcacttatctggatccggcactcgtcaaacgtatcgaagttgtccgcgggccaaactccagtctgtacggcagtggcgggctgggaggtgtagtggacttcagaactgccgatgcagcagattttcttccccccggagagacaaacggtttaagtctgtggggaaatatcgccagtggtgaccacagcacaggctcggggctcacctggtttggtaaaactggaaaaacagatgcgctcctttctgtcattatgcgtaaaagaggtaatatctatcaaagtgatggtgagcgcgcacctaacaaggaaaaacctgcagccctgtttgcgaaaggctctgtcggtataacagacagtaacaaagcaggtgccagcttgcgtctctaccggaataacaccactgaaccgggcaattccactcagacacatggtgacagcggcctgcgtgacagaaaaacagtacaaaatgacgtacagttctggtaccagtacgctcctgtggataacagcctcatcaatgtaaagtcaacgttatatctcagtgatatcactatcaagacaaacggtcacaacaaaacggcagaatggagaaacaacagaacctccggtgttaatgttgtcaacagaagtcatactctgatttttccgggagcccatcagttaagttatggcgctgaatattaccgtcagcagcagaagccagaaggctctgccacactatatccggaaggaaacattgactttacatcgttgtatttccaggatgaaatgacaatgaaaagctacccggttaacattatcgtcggttcccgctatgaccggtacaagagcttcaatccccgtgccggagaactgaaagccgaacgcctgtccccaagggcggcgatttcagtctcaccgacagactggctgatgatgtacggctccatatcctctgcattccgagcgcccacaatggcagaaatgtacagggatgatgtacatttttaccgcaagggtaaacccaattactgggttcctaaccttaatctgaaaccagaaaataacatcacccgtgagattggcgcaggtattcaactggatggcctgcttacagacaatgaccggctgcagttaaaaggcggatatttcggaacggatgccagaaactatattgccacacgcgtggatatgaaacggatgcgttcttattcttataatgtatcccgggcccgtatctggggatgggatatgcagggtaattaccagtctgattatgttgactggatgctttcttataaccggacggaaagtatggatgccagcagcagggaatggctgggctccggcaatcctgacacacttatcagtgacatcagcataccttttggtcatagaggcgtttatgccggatggcgtgctgaactttcagcatcagccacgcatgtgaaaaaaggcgatccccatcaggctggttataccatacattccttttcactgtcttataagcctgtaagtgttaaaggctttgaggcgtcagtaactctggataatgccttcaacaagcttgccatgaatggcaaaggtgtgccgctttcaggcagaactgtcagtctttatacccgttatcagtggtaa

SEQ ID NO: 1005 - DNA, 792 bp, Escherichia coli
atgatgaaaaatacaggctatatcttagctctttgtctgacagcatcggggcatgtcctggcccatgatgtctggattacaggtaaacagtcagagaacaacgttaccgcagagattggttatggtcataatttcccctcaaaggggacaattcctgacagaagggatttctttgaaaatccccggctttataacgggaaagagacaataacactgaagccagcgtccacggattatgtctataaaactgagtctgcaagcaaagataatggttacgttctgtcaacgtatatgaaaccaggatactggtcgagaacctcgtcaggatggaaaccggtcagccgggagggcagaaatgatgtggcttactgtgaatttgtcactaaatatgcaaaatcttttattcttggtgaacagcagatgccagcacaactctatcagtctccaacagggcatgagcttgaaatcattccgttatccgatataagtcgtttcagtgaaaatgtgaagctgaaagttctgtataaaacgtccccgctcgccggagctatcatggagcttgactcggtcagttatctgacatcatcccgtcatactcatgcagttgagcacaaacatcctgttcataaagcagaactcacctttgtaactaatgaggatggtatcgtcacagtaccttctcttcatatcggacagtggctggcgaaagtccaaaataagaaaagttttcaggacaaaagcctgtgtgatgaaactgtcgatgtggcaaccttaagcttctcccgaaattaa

SEQ ID NO: 1006 - DNA, 1263 bp, Escherichia coli
ttggcatggagtcagttccccgtcatcttaggtatcactttaactcacaggtgtccagtaaatatgaacaggatcccagtaatcattatcaatggtttccttggcgcaggaaaaaccactcttatgaaaaacctgctcacacaggcaaacaggaatcacttagctgtatctgtcattgtcaatgatatgagcgatctggatgttgatggtgtacttattgcaaatacagaaatcgttaatattgcgaacaataatttcgtgagtatcacatctgatagtatcagcagccagagtgggattaagacggtcgacaaggcaattaaaaatatgctcaggcattatttgcctgacgttatatttgtcgaaacatccggaggtagccacccactgccattaattaagtatctgcagactcatgagcgattacagctaaaatcacttttatcacttgtcgataccgttatgctcaatgatgactataacggagggaaagcactgatacctgcatttcaggagaatcttttccatggcaagcgcagaatagagaatttactggctgagcaaatcatgttttgtagcactttgctgttaaccaaaaaggatcgactgtcattcgacattgtcaccgatgtggcgaaagcaatccatcctctgaatccttacgtaaatgtgatagctgtgtcatgggggaaccttaaactagcagaattactaacccttccggattacgattttaaccgggtcggattacttatcagagaactggaagacacaatcacagtagaagaagcaaaaatttcagcccaaaatggcgaaataatttcgcgagtgattaaagatgacaggccattccacccacaaagattatgggaaacctatcattattttatgggaatgggtatttatcgtagcaaaggctttttctggctaccaggaagacctgacatggctctgctctggaaccaggccgcaggaagtatcaatctggagtttatcagctactggaattccggtgtattggcagaccctgataatcacctgacccacgaagagcgctctgttttgcagaaaaaagtcaataaaactatggggcggtttggagacaggagatgccatttaacgattatagggcgttctgatgaagtccatgattttacctccgccttaattaactgttttctttctgaagaagaaattgtctggtggcaatcaggtggcgttttcgcggatccctggcccgttaatatatcccggctgaactga

SEQ ID NO: 1007 - DNA, 183 bp, Escherichia coli
atgttcttcggcaacgatcacggtggagagcgtagtgcgctgctgtacgggctgatcggcgcctgccgactgaacggtatcgatccggaagcgtatctgcgccatatcctcaacgtcctgccggaatggccttctaaccgtgttgatgaactcctgccatggaacgtcgtactcacccaataa

SEQ ID NO: 1008 - DNA, 1137 bp, Escherichia coli
atgggaaaaataaaatattggctaatagtaggatttattatactttttgcgattttttacattgctattagtgacagggattctacgctttctaggttgaaatcagcaggtgaaaacggagatgtagaagctcagtatgctttggggctcatgtatttgtatggagaaattctggatgttgattatcagcaggcaaagatttggtatgaaaaagccgctgaccaaaatgatccgcgtgcgcaggccaaactcggtgtgatgtatgcaaatggtctcggggtaaatcaggattatcagcaatcaaaattatggtatgaaaaggcggctgcgcaaaatgatgttgatgcgcaatttttgcttggggagatgtatgacgatggtctcggggtaagccaagactaccagcatgcaaagatgtggtatgaaaaagcggctgctcaaaatgatgagcgtgctcaggtcaatctcgctgttctatacgcaaagggtaatggtgttgaacaggattatcgacaggccaaaagctggtatgaaaaggctgcagctcaaaatagtcctgatgcgcagttcgctcttggaattctgtatgccaatgctaatggtgtagagcaggactatcagcaggcaaaagactggtatgagaaggcagcagaacaaaatttcgccaatgctcagtttaatcttggtatgctctattacaaaggtgagggtgttaaacaaaactttcggcaagccagagaatggtttgaaaaagccgcatctcaaaatcagctgaatgcccaatataatttaggtcagatttattactacggtcagggtgtgactcagagctatcgacaggcgaaatactggtttgaaaaagcggcagagaaaggtcatgtcgatgctcaatataatctcggtgtaatatacgaaaatggtgaaggtgtgagtcagaactatcaacaggcaaaggcttggtatgaaaaggcagcctcacaaaatgatgcgcaggcgcagttcgaacttggcgttatgaatgagctgggtcagggtgaaagcatagacctgaaacaagcaagacattactatgagcggtcatgtaataatgggcttaagaaaggttgtgaacggttaaaagagttattagacaaatag

SEQ ID NO: 1009 - DNA, 426 bp, Escherichia coli
atggcaatccctgaacgtatgagccccgtaaaagtcagcagcaaaaaaataagagaattagcacagaaagctaaagagatacttgcagctattgatagtggagcaagtgaagaagatgcttttttaaaggacatgatcgatgactggaacagtcaggtagtatgtccatgtgagttttcagattttagagattattcctcttggacaaatgcaaatgaatttacacgaatagcttttaatttggaaaagttctacgaggattttacttgggaggaactggttcaaacgataagctgtgtatgtgatccaaagtcaaacgaatcggaaaaaattttgctcttttgttgcttgaaaagaattttcatggaaatccatctgatcttatattctggcccgatgaatggtttcaggatccagatatgttag

SEQ ID NO: 1010 - DNA, 234 bp, Escherichia coli
atgtctcaaatgcccctctattttcttaatacccaaaagaaactcactgctcactatgaatggcttcaaatcaacctgactgatacctacgaactagttaaaaggttaatgccgattccttcactggacgtggtggttaaagtagggaaacttgtcctcccggagaaagggcatcttggtttttaccctgaagctggagttgtctatagaacagtagctccagaaaatccataa

SEQ ID NO: 1011 - DNA, 759 bp, Escherichia coli
atgagccaaattttactgcaacctgctaacgcgatgattacgctggaaaacgtcaataaatggtatggacaattccatgttttgaaaaatataaatttaaccgtgcaaccgggcgaacggatcgttctatgtggcccttcaggttccggtaaatcgacaaccattcgttgtattaatcatctggaagaacatcaacagggacggatcgtggtagatggcatcgaacttaatgaagatatccgcaatattgagcgcgtcaggcaggaagtgggaatggtctttcagcatttcaatctcttccctcatctgaccgtgttacagaactgtaccctggcaccgatttgggtacgcaagatgccaaagaaagaggctgaagctctggcgatgcattaccttgagcgggtgagaattgccgaacatgcccagaagtttcccggacagatttctggtggtcagcagcaacgtgttgccatagcacgttcgctgtgtatgaagccgaaaattatgttgtttgatgagccaacgtcggcgctcgatcctgagatggtgaaagaggtgctggatacgatgattgggctggcgcagtcgggtatgacaatgttgtgtgtaacacatgagatggggtttgcacgaaccgtcgctgaccgggtgatttttatggatcgtggggaaatagtggagcaagctgcacctgatgacttttttgcgcatcctaaatcagagcgtacgagggcatttttatcgcaggtaatccattaa

SEQ ID NO: 1012 - DNA, 1104 bp, Escherichia coli
atgacaaaagtattgctgtctcatcccccgcgcccggcgagccataactcaagccgcgcgatggtgtgggtgcgaaaaaatctgttctccagctggagcaatagcctgctgactattggctgcatatggttgatgtgggaactgatcccaccgttgctgaactgggtatttttgcaggctaactgggttggctcaacgcgtgccgactgcacaaaatccggtgcctgttgggtcttcatccacgaacgatttggtcagtttatgtatggactttacccacacgaccaacgctggcgaattaacctagcattactgattggccttgtttctatcgcaccaatgttctggaaaatacttccgcatcgcagtcgctatattgcggtctgggcggtgatttacccactggttgtctggtggctgatgtatggtgggtttcttggtcttgatcgggttgaaacccggcaatggggcgggttgacgctaactttaattattgcatcagttgggattgcgggggcgctaccgtgggggatcttactggcgttaggtcgccgctcccatatgccgattgtgcgtatcttatcggtcatttttatcgagttctggcgcggcgtaccgctgattaccgtattgtttatgtcttcggtcatgctgccgttgtttatggcagaaggcaccagtatcgacaaactgatccgcgcgctggttggcgtgatcctgtttcagtcagcatatgttgcggaagtcgtgcgaggcggattgcaggcgctgcctaaagggcaatatgaagcggcagagtcgctggcattgggttactggaaaactcaggggctggttattctgccacaggcgttgaagctggtaattcctgggctggtaaataccatcatcgcactcttcaaagataccagtctggtgatcatcatcgggttgttcgatcttttcagtagcgttcagcaggcaaccgttgatcccgcctggttgggtatgtcgacggaagggtatgttttcgccgcgctgatctactggatcttctgtttcagcatgtcacgttatagccaacatctggaaaaacgttttaacaccgggcgtacaccgcattga

SEQ ID NO: 1013 - DNA, 1182 bp, Escherichia coli
atgtctcatcgccgctcaaccgttaaaggctcactctcttttgccaaccctacggttcgcgcctggttattccagatccttgccgttgttgctgttgtcggcattattggttggttatttcacaacactgtaacgaatctcagtaatcgcggcataacatcaggatttgcttttcttgaccgcggggccggttttggcatcgttcagcatttgattgattatcagcaaggcgacacttacggacgcgtttttattgtcggcctgctcaatacgctactggtttctgcattgtgtattgtattcgcttctgttctgggcttctttatcggtctggcgcgactttcggataactggctgctacgaaagctttccacaatttatattgagatcttccgtaatattccgccattgctgcaaatcttcttctggtactttgccgtattgcgcaatttgcccggaccacgacaggcagtgagcgcgtttgatctcgcctttttgagcaatcgtgggctttatattccgtcgccgcagctgggagacggatttattgcgtttatcctcgctgttgttatggctatagtcctttcagttgggctattccgctttaataaaacataccagataaagaccggacaactgcgccgcacctggccattcgccgctgtgttgatcattggtttgcctttactggcgcaatggctttttggcgcagcactactctgggatgtcccagcccttcgaggctttaatttccgcggcgggatggttttaattcctgaactggcagccttaacgctggcgctttcggtttatacttctgcatttatcgccgaaattatccgcgcagggatccaggcagtgccttatggtcaacatgaagcagctcggtcactgggattacccaacccggtcacgctacgccaggtcattattccccaggcattgcgggtgattattccaccgttaaccagccagtatctcaacatcgtcaagaactcctctcttgccgccgctattggctatcccgatatggtttcgctgtttgctggcaccgtgctgaaccaaacggggcaagccatcgagacgatagccatgaccatgtcggtctatctgattatcagcctgactatctcgctgctgatgaatatctataaccgccgcatcgcgatcgttgaacgctaa

SEQ ID NO: 1014 - DNA, 1026 bp, Escherichia coli
atgaaaaagatgatgatagccacactggctgccgccagcgtgctgcttgccgttgcaaatcaggcgcatgctggcgcgacgcttgatgccgttcagaaaaaaggttttgtgcaatgcgggatcagtgatggattacctgggttctcttatgccgatgctgacggtaagttttcaggtattgatgtagatgtttgtcgtggtgttgccgctgctgtattcggtgacgatacgaaagtgaaatataccccgctcactgcaaaagaacgcttcaccgctttacagtcaggggaggtggatttgctctcccgtaatacgacctggacttcatctcgcgatgccgggatgggaatggcatttactggcgtcacttattacgacggcattggcttcctgacgcacgataaagcggggctaaaaagcgcgaaagaactggatggcgctaccgtctgtattcaggcggggactgataccgaactcaacgtcgccgattacttcaaggcaaataatatgaagtacacgccagtaaccttcgatcgctcagacgaatcagcgaaagctctggaatctggccgctgtgatactctggcctcggatcaatcacaactgtatgccctacgcatcaaattaagcaacccagctgaatggattgtcttaccggaagttatctctaaagaaccacttgggccggtagttcgtcgtggcgatgatgaatggttctcgattgtacgctggacgcttttcgccatgctgaatgctgaagagatgggcatcaattcccagaacgtcgatgaaaaagcggctaatccagcaacgcctgatatggcacatctgctgggtaaagaaggcgattacggcaaggatctgaagctggataataaatgggcctttaacatcatcaaacaggtgggtaactactcggaaattttcgagcgtaacgtaggttcagaaagcccgctgaaaattaaacgtgggcaaaataatctctggaataacggcggtattcagtacgcgccgcccgtgcgttaa

SEQ ID NO: 1015 - DNA, 222 bp, Escherichia coli
atgaaaagattaattcctgtgacattgctcaccgcattgctggcgggctgtgctcacgattcgccctgcgttccggtttatgacgatcaggggcgtctggttcacaccaatacctgtatgaaaggcacgactcaggataactgggaaacggctggggctattgccggcggggcagcagctgttgctggcctgacgatggggatcatcgctctgtcgaaataa

SEQ ID NO: 1016 - DNA, 126 bp, Escherichia coli
atgacaatttatgtgaattgtaaaaatagtgaagggagcgggaactatagaaagtttttaaagagtgagaagaagaatatcttattaatttttatggggttcactgaaaataaaaaaggcgcctga

SEQ ID NO: 1017 - DNA, 1386 bp, Escherichia coli
atgattcagttacccgctggcgcgacgcaagagcggacgcaaaaagtgttggatcaagtgacggattactatctgaagaacgagaaagcgaacgttgaaagtgtctttacagttaacggctttagcttcagcggccaggcacaaaacgccggtatggccttcgtcagtctgaaaccgtgggaagagcgtagtggtgacgaaaacagtgcggaagcagtaatccatcgtgccaaaatggaattgggcaagatccgcgacggttttgtcattccatttaatatgccagccattgttgaactaggcacggcaacgggtttcgactttgagttaattgatcaggctgggctgggtcacgatgccctgacccaggcccgtaaccagttgcttggcatggcggcgcaacatcctgccagcttagtcagcgtgcgccctaatggcctggaagacaccgcgcagtttaaactggaagttgaccaggaaaaggcgcaggcattaggtgtttcactttctgacatcaatcagaccatttcaacggcgttgggtgggacttacgttaacgacttcatcgaccgtggtcgcgtgaaaaaggtgtatgttcaggcggatgccaaattccgtatgctgccagaagatgtcgataaactttatgtccgcagcgccaacggcgaaatggtgccattctctgcctttaccacttcacattgggtgtatggctctccgcgactggaacgctacaacggtctgccgtcaatggagattcaaggggaagccgcgccaggaaccagttccggcgatgctatggcgttgatggaaaaccttgcgtcaaaattaccggcgggcattggttatgactggacgggtatgtcatatcaggaacgtttatcgggaaaccaggctcccgctctggtagcaatttcctttgtggttgttttcctgtgccttgctgcactctatgaaagctggtcaattcctgtctcggttatgttggtcgtgccgttagggattgtcggcgtgctactggcggcaacactctttaatcaaaaaaatgacgtctactttatggtgggcttgctaacgacaattggcttgtcggccaaaaacgctattttgattgttgagttcgctaaagatctcatggagaaagagggtaaaggtgttgttgaagcgacactaatggcagtacgtatgcgtctgcgtcctatcctgatgacctctctcgcctttattctcggcgtattaccgctggctatcagtaacggggccggcagtggcgcgcaaaacgcagtcggtatcggggtaatgggcggaatggtctctgcaacgttgctggcaatcttcttcgtgccagtgttctttgtggtgatccgtcgatgctttaaaggataa

SEQ ID NO: 1018 - DNA, 1710 bp, Escherichia coli
atggcaaacttttttattcgacgaccgatatttgcatgggtgctggccattattctgatgatggcgggcgcactggcgatcctacaattgcccgtcgcccagtatccaaccattgcgccgcctgcggtttctgtttcggcaaactatccgggtgctgatgcgcagaccgtgcaggatacagtgacgcaggttatcgaacagaatatgaacggtatcgataacctgatgtatatgtcctccaccagcgattccgccggtagcgtgacaattacccttaccttccagtccgggaccgatcctgatatcgcgcaagtacaggtgcagaacaaactccagctcgccacgccgttgctgccgcaggaggttcagcagcaggggatcagtgttgaaaagtccagtagcagctatttgatggtggcgggctttgtctctgataaccctggcaccacacaggacgatatctcggactatgtggcctctaacgttaaagatacgcttagccgtctgaatggcgtcggtgacgtacagcttttcggcgcacagtatgcgatgcgtatctggctggacgccgatctgctaaacaaatataaactgacaccggttgatgtgattaaccagttgaaggtacagaacgatcagatcgctgccggacagttgggcggaacgccagcgttaccagggcaacagttgaacgcctcgattattgctcagacgcggttaaaaaatccggaagaattcggcaaagtgaccctgcgcgtaaacagtgacggctcggtggtacgcctgaaagatgtcgcacgggttgaacttggcggtgaaaactataacgttatcgctcgtatcaacggaaaaccggcggcgggcctggggattaagctggcaaccggcgcgaatgctctcgataccgcgaaagccattaaggcaaaactggcggaattacagccattcttcccgcagggaatgaaggttctctacccttatgacaccacgcctttcgtccagctttctatccaggaagtggtgaaaacgctgttcgaagccattatcctggtattcctggtgatgtatctgttcttgcagaacatgcgggcaacattgatacccaccattgctgtacctgtcgtgttgttagggacatttgccatactcgccgcttttggttactccatcaatacgctaacgatgtttgggatggtacttgccatcggacttcttgttgatgatgcgatagtcgttgtggagaacgtcgagcgcgtaatgatggaggataaactcccccccagagaagcgacggaaaaatcgatgtcgcaaatccagggcgcgctggtaggtatcgcgatggtactgtcggcggtatttattccgatggcattcttcggtggctcaacaggggcaatttatcgccagttctctatcactattgtttcagcaatggcgctttcagtactggttgcgctgattctcacccccgcgttatgtgcaacattgctgaaaccagtctctgccgagcatcacgaaaataagggaggattcttcggctggtttaacaccactttcgatcatagcgttaatcactacaccaatagcgttggcaaaatcctcggttccacagggcgatatttactgatctatgcgctgattgttgcaggaatggtggtgttgtttttacgtcttccgtcttacctgaagaggatcagggtgtctttctga

SEQ ID NO: 1019 - DNA, 1158 bp, Escherichia coli
atgacgaaacatgccaggtttttcctcctgccctcctttattctgatctccgcggctttaatcgccggttgtaacgataagggagaagagaaagctcacgtcggtgaaccgcaggttaccgttcatattgtgaaaacggccccgttagaagttaagactgaattaccaggccgcaccaatgcttaccgtatagccgaagttcgcccacaggttagcgggatcgtactgaatcgcaatttcactgaaggcagcgatgtgcaagcaggccagtccctgtaccagatcgatcccgcgacctatcaggcaagttatgacagcgcgaaaggcgaactggcgaaaagtgaagccgccgccgccatcgcgcatttgacggtaaaacgttacgttccgctcgtgggtacgaaatacatcagtcagcaggagtacgaccaggccattgctgatgctcgccaggccgatgccgccgtgattgccgcaaaagccacagtcgaaagcgctcgcatcaatctcgcttataccaaagtgactgcgccaattagcggacgtatcggcaaatcgaccgtgaccgaaggcgctcttgtcactaatgggcaaacgactgaactggcgactgtccagcagctcgatcctatctacgttgatgtgacccaatccagcaacgattttatgaggctgaagcaatccgtagagcaaggaaatttgcataaggaaaacgccaccagcaacgtagagttggtcatggagaacggtcaaacctatcccctgaaaggtacgctgcaattctccgatgtgaccgttgatgaaagcaccggctccataaccctacgtgctgtcttccctaacccgcaacatacgcttttgccgggtatgtttgtgcgcgcacggattgatgaaggcgtccaacctgacgccattcttatcccgcaacaaggcgttagccgcacaccacgtggtgatgcaaccgtgctgattgttaacaataaaagtcaggttgaagcgcgccctgtcgttgccagtcaggcgattggcgataaatggttgattagcgaaggtctgaaatctggcgatcaagtcattgtcagcggcctgcaaaaagcgcgtccgggagagcaggttaaagccactaccgatacccccgcagatactgcatcgaagtaa

SEQ ID NO: 1020 - DNA, 663 bp, Escherichia coli
atggcaaaaagaaccaaagctgaagccctgaagacccggcaagaactgattgaaactgccatcgcccagtttgcgcagcatggcgtaagcaagacgacgctcaacgacattgccgacgctgctaacgttacgcgtggcgctatctactggcacttcgaaaacaagactcaactgtttaatgagatgtggttgcaacagccttcattgcgggagttaatccaggatcacttgaccgctgggttagagcatgacccgtttcagcaattgcgtgaaaaattgattgtcggtttgcaatatattgccaaaattccccgccagcaggcgttgctgaaaatcttatatcacaaatgtgaatttaatgatgagatgctggccgagggagtgatacgcgaaaagatgggctttaatccgcagactctccgcgaagtattgcaggcgtgtcagcaacaaggttgtgtagtaaataatctcgatttagatgttgtgatgattattattgatggtgccttcagcggaattgttcaaaactggttaatgaatatggcgggttatgatctttataaacaagcccccgctctggtcgataacgtattaagaatgttcatgccagatgaaaacataacgaaattaattcataaaacgaatgaattaagtgtcatataa

SEQ ID NO: 1021 - DNA, 180 bp, Escherichia coli
atgattcgcaagtattggtggctcgtcgttttcgctgtcttcgtttttctgtttgatactttactgatgcagtggattgaactgctggcaacagaaacagacaaatgccgcaatatgaactcagttaatccactaaaactggttaactgtgacgaactgaattttcaggacagaatgtga

SEQ ID NO: 1022 - DNA, 885 bp, Escherichia coli
atgagaacaggatgtgaaccgacccgatttggtaatgaagcaaagaccatcatccagggtgatgcattaaccgaacttaaaaagctccccgccgaaagtgtcgatctgatctttgccgacccaccgtataacatcggtaaaaattttgatggtctgatcgaagcctggaaagaagatctgtttatcgactggctgtttgaagtgattgcagagtgccatcgcgttctgaaaaagcagggcagcatgtacatcatgaatagcacggaaaacatgccctttatcgatctccagtgccgcaagctttttaccatcaaaagtcgcatcgtctggtcatatgacagttctggagtgcaggcgaaaaaacactacggctccatgtacgaacccatcctgatgatggtgaaagacgcaaagaactacacgttcaacggtgatgctattctggtagaagccaaaaccggatcgcagcgcgcgttgatcaattatcgcaaaaatcctccacagccttacaatcatcaaaaagtaccgggtaacgtctgggattttccgcgcgtgcgttatttgatggatgaatatgaaaaccacccgacgcaaaaaccggaagccttgctgaaacgcattattctcgcctcttccaacccaggcgatatcgttctcgacccgtttgccggtagctttactaccggtgccgtagccgtcgccagcgggcgaaaattcattggtattgagatcaacagcgagtacatcaaaatggggcttcgacggctggatgtcgcgtcgcattactctgcggaagaactggcgaaagtgaaaaaaagaaagaccggcaacctgtcaaaacgaagccggttaagcgaagttgcccccgatctcattgcaaagtaa

SEQ ID NO: 1023 - DNA, 297 bp, Escherichia coli
atgttcgaacaacgcgtaaattctgacgtactgaccgtttctaccgttaactctcaggatcaggtaacccaaaaacccctgcgtgactcggttaaacaggcactgaagaactattttgctcaactgaatggtcaggatgtgaatgacctctatgagctggtactggctgaagtagaacagcccctgttggacatggtgatgcaatacacccgtggtaaccagacccgtgctgctctgatgatgggcatcaaccgtggtacgctgcgtaaaaaattgaaaaaatacggcatgaactaa

SEQ ID NO: 1024 - DNA, 873 bp, Escherichia coli
atgggagccggattgacagtatccgagatgatgtcttctaacccacaggtttgggaaagcgacaaatctcgtttacggatggtgcacattgatgaacctggtattcgcaccgtgcaaattgctggtagcgatccgaaagaaatggcagatgcagcacgtattaacgtggaaagcggtgcccagattattgatatcaatatgggttgcccggctaaaaaagtgaatcgcaagctcgcaggttcagccctcttgcagtacccggatgtcgttaaatcgatccttaccgaggtcgtcaatgcagtggacgttcctgttaccctgaaaattcgcactggctgggcaccggaacaccgtaactgcgaagagattgcccaactggctgaagactgtggcattcaggctctgaccattcatggccgtacacgcgcctgtttgttcaatggagaagctgagtacgacagtattcgggcagttaagcagaaagtttccattccggttatcgcgaatggtgacattactgacccgcttaaagccagagctgtgctcgactatacaggggcggatgccctgatgataggccgcgcagctcagggaagaccctggatctttcgggaaatccagcattatctggacactggggagttgctgcccccgctgcctttggcagaggttaagcgcttgctttgcgcgcacgttcgggaactgcatgacttttatggtccggcaaaagggtaccgaattgcacgtaaacacgtttcctggtatctccaggaacacgctccaaatgaccagtttcggcgcacattcaacgccattgaggatgccagcgaacagctggaggcgttggaggcatacttcgaaaattttgcgtaa

SEQ ID NO: 1025 - DNA, 882 bp, Escherichia coli
atgccttggatccaactgaaactgaacactaccggcgcgaacgcggaagatcttagcgatgcgctgatggaagcgggtgccgtttctatcacttttcaggatacccacgatacgccagtatttgagccgctgccgggcgaaacgcgcctgtggggcgacaccgatgtgattggtctgttcgacgctgaaaccgatatgaacgacgtggtggcgattctggaaaaccatccgctgctcggcgcgggcttcgcgcataaaatcgaacaactggaagataaagactgggagcgcgaatggatggataatttccacccgatgcgctttggtgaacggctgtggatctgcccaagctggcgtgatgtgccggacgaaaacgccgtcaacgtgatgttagacccagggctggcgtttggtacgggtacccatccaactacctctctgtgcctgcaatggctcgacagcctcgatttaaccggtaaaacagtcatcgactttggctgcggttccggcattctggctatcgcggcgctgaaactgggtgcagcaaaagccattggtattgatattgatccgcaggcgattcaggccagccgcgacaacgctgaacgtaatggcgtttctgatcgtctggaactctacttaccgaaagatcagccagaagaaatgaaagccgacgtggtggtcgctaacatccttgcaggtccattacgtgaactggcaccgttaatcagcgtcctgccagtttcaggcggtttgctgggcctttccggtattctggcaagccaggcagagagcgtttgcgaagcttatgccgacagcttcgctctggacccggtcgtggaaaaagaagagtggtgccgcattaccggtcgtaagaattaa

SEQ ID NO: 1026 - DNA, 1452 bp, Escherichia coli
atgcagcttgaagtaattctaccgctggtcgcctatctggtggtggtgttcggtatctctgtttatgcgatgcgtaaacggagcactggcaccttccttaatgagtatttcctcggcagccgctctatgggcggtattgtgctggcgatgacgctcaccgcgacctatatcagtgccagttcgtttatcggcgggcctggagctgcttataaatacggcctgggctgggtattgctggcgatgattcagcttcctgcagtctggctttcgctcggtattctcggcaagaagttcgcaattcttgcgcgccgctacaatgcggtgacgctgaacgatatgctgtttgcccgctaccagagtcgtcttctggtatggctggcgagtttgagtttgctggttgcgttcgttggtgcgatgaccgtgcagtttatcggcggtgcgcgcctgctggaaaccgcggcgggtattccttatgaaaccgggctgctgattttcggtatcagcattgcgttgtataccgcctttggcggctttcgcgccagcgtgctgaacgacaccatgcaagggctggtgatgctgattggcaccgttgtgctgcttattggcgtggtacatgccgcaggtggtttaagtaatgcggtagacacgctgcaaaccatcgatccgcaactggttacgccacaaggcgctgacgatattctgtcgcctgcctttatgacgtcgttctgggtactggtgtgctttggcgttataggcctgccgcatactgcggtgcgctgtatctcttataaagacagcaaagccgtacatcgggggatcattatcggtacgattgtagtcgcaatcctgatgttcggtatgcatctggccggagcgttaggtcgggcggtgatccccgatctcaccgtaccggatctggtgatcccgacgttaatggtaaaagtgctgccaccgtttgccgccgggatcttcctggctgcaccgatggctgcgatcatgtcgacaattaacgcccaactgctgcaaagttccgctacgatcattaaagatctctatctgaatatccgtccggatcaaatgcaaaacgagacgcgtctgaagcggatgtcggcggtgatcacgttggttctcggtgcgttgctgctgcttgccgcctggaagccgccagaaatgatcatctggctgaatttgctggccttcggtgggctggaagccgttttcctgtggccgctggtgctgggtctttactgggaacgtgccaacgccaaaggcgcgctaagtgcgatgatcgttggcggcgtgctgtatgccgtactcgcgaagctgaatattcagtacctgggcttccaccctatcgtgccctcgttactactaagtttgctggctttcctggtcggaaaccgtttcggtacatccgtcccgcaagctaccgttttgactactgataaataa

SEQ ID NO: 1027 - DNA, 243 bp, Escherichia coli
gtggacactcgttttgttcaggcccataaagaggcgcgctgggcgctggggctgacccttttgtatctggcggtatggttagtagccgcttacttacctggcgttgcccccggttttaccggctttccgcgctggtttgagatggcctgcatcctgacgccgctgctgtttattggactgtgctgggcgatggtgaaatttatctatcgcgatatcccactggaggatgacgatgcagcttga

SEQ ID NO: 1028 - DNA, 957 bp, Escherichia coli
gtgacaacaactatctgcgctatgggcgaattgctggccgagtttttgtcccgcaacccacatcaaaaattcactcagcctggggagtttatcgggccatttcccagcggtgcgccagcaatttttgctgctcaggtggcaaaactgtcccatcgggccatcttctttggatgtgttggtaatgatgattttgcccgactcattatagagcgtctccgtcatgaaggtgtcattaccgatgggatccatgttatgaacaatgccgtcacaggtacggcgttcgtgagttatcaaaatccccagcagcgggatttcgtctttaatatccctaacagcgcctgcggtttgtttactgccgagcacattgataaggatctgcttaaacagtgtaaccatctgcatattgtgggctcatcgttgttctcatttcgcatgatcgatgtcatgcgtaaagcaataacgacgatcaaatcggctggcggcaccgtttctttcgatcccaatattcgcaaagagatgctgagcattcctgaaatggcgcaggcactcgattatttgattgaatatacggatatttttatccccagcgaaagcgaactccctttcttcgcgcgtcacaaaaatctgtcagaggaacagattgttagcgatcttctccacggcggcgtaaaacatgtggcgataaaacgcgcccagcgtggggccagctattacaagcttaaaaacggtacattacacgcccagcatgttgcaggtcacgatatcgaaattatcgatccaacgggtgcaggcgactgctttggcgcaacgtttatcactcttttcttatccggtttcccggcacacaaggcgctgcaatatgcaaatgccagcggcgcgctcgccgtaatgcggcaaggtccgatggaagggatatcctcactggcagacattgaagactttttgcagcagtactga

SEQ ID NO: 1029 - DNA, 816 bp, Escherichia coli
gtgccgagaaaatcgtctaacctactgaaacgcagattaaaaattgcagaaattgttgccgcccagggtgaaatcaaagttgatgacttatctgcgcaacttggtgtctctggcgtgacgatccgcggcgatctcagttatctggagcaacagggatatttaaagcgatcatttggcggtgctattgcgacaccactctcctctgaaccagaagcgatacaaccgatcgcgccattgtctctggcacaacaaatggaaatagcacgacattgcgcacgattaattcgcgatcgtgacacgctatttcttggacatgggacaatctgccgtaagatcattccattgctcagcgaagtgaaaaaactgcgtctgatcaccaacgatcccgaacatgcgctgctggcaaatcagtttattgatggcgaaataatactggctggcagtgaaatgctgcgccccgacaccgcactggccggaaaaccgcttgaacaggcacttcagcatttcaccattacacatagcattctggaaatcagccatctggatgctgatggtactttaaatatcaacgttcccagactcgccgctgcctggcagctctgtttcgatcatgcccagaataagacggttatcgttgccgccgatcctgcgccatcaacggctgctatcgggcatttgcatcaggcagaaaatgtgatcgtcagccgcagcattaacgaacaatatcagcaacaattgcagtcggctgatttcgttatcctttataccagtaatgagtgctttacctggtccaatcgcgaaaggcttcaggaatga

SEQ ID NO: 1030 - DNA, 855 bp, Escherichia coli
atgtatattatttcaagcaaaaacatgctgaaaaaagcccagtcagagggatatgccgtccctgctttcaacattcataaccttgaaactttacaggtagttgttgagagcgctgcacaacttcgctctcccgttatgctggcgggaacacccggtacatatcgttatggtggcgtgggaagtttaatttcgttagtacaatcgctggctcgcgagtacaacctgccgttagtcctgcatctcgaccatcatgaagagagtgatgacatttttaacaaggttcgcgcagggatccgttctgtcatgattgatggctcccatttgccatttgaagacaacattgcgcgagtgcaagaagttaccaccttttgccatcgctttgatgttagcgttgaggccgagctagggcgtcttggcggccaggaggacgatctgcgggtggatgaaaaagattccgcttatacctcgccagccgcagctgcagagtttgttcaacgtacccaaattgactccctggcggtagcaatcggcacagcacatggtttatatgcgcatgaaccacgactggattttgtgcggctggaacagattcgtcagcgagtggagattccgctggtgttgcatggtgcttcgggcttatcggaacaggacgttcagcactgtattcgtcgcggtatttgtaaagtgaatgtcgcgacagaattgaaaattgcgtttgccgatgcgttaaaaggatatttctacaacaatcctgcggcaaatgatccacgtcactatatgcagcccgcaaaggccgccatgaaagaagtcgtaactcgtattattggcgtctgtggtagtgaaggaaaaatttaa

SEQ ID NO: 1031 - DNA, 891 bp, Escherichia coli
atgaaaaatattaaattacttggttcagctatgttggtgagcctggcattgttctcgcaaagttcgttggcaaaagagtataaaattggtgcgtcattattaacacaacaacatcctttctatattgatcttgcgaatgccatgaaagaagaggcaaaaaaagacaatgtcaatttaagtgtctctattgccaatcaggatttaaacaaacaactttctgatgttgaggattttattactaaaaaagtggatgccattattatctctccggtcgattcgaaaggcgtccaggcagcgataattaaagccgataaggccggtattcccgttatcaccgtcgacgtcgctgcggaaggcgttccggtcgtatcgcatgttgcgaccgataactatgcgggaggcgttgaagcaggcaagttaatgggtaaacttttgcatggtaaaggtactgtagcaattatttcttatccggcactacaatcggtggttgcgcgcgttgatggttttaagaaagggttaagcgatacaccggatattaaaattgttgctgaacagcctggtattacgcgggctgaagcgttaacgactgcgcaaaacattatgcaggcaaatgccaacctgaatggtctgtttggctttggtgatgatgcggcgctggcagcggttatcgcagcaaaatctgcgcataacgacaacatcaaaatcattggttttgacggcatgaaagaagcgcgtgatgctgttgacagtgaaaaaacgtttgcggccgtgattcggcaatatcccgatcaaatgggggctaaagccattgatgccgctgttgatcacctcaatggtaaaccggtagaaaaaatgattccggtacaacccggcgtttatacaggtaaatag

SEQ ID NO: 1032 - DNA, 1500 bp, Escherichia coli
atgacggatgttattcttgatgtttcgcatattgcgaagacatttggtcatgttcaggcattaaaagatattacactctctttacgtaaagggcgggtgcatactttattaggcgagaatggtgccggtaaatcgacattaatgaaaatactggccggtgtttatccgccaacccagggaacgataacactacgtggtgaaaccatcaccattaataatccgcagcattctcgccagttaggaattgcgattatttttcaggaactgagcctgagtaataatatgaccgtggcggaaaatatttatgccaataatgaaccgcgacgttttggtataattaacgataaaaaaatgctcgcagattgccagaacctcctcgcggaactgggcatcccactagaccctctggaaatggtcggcaatatgtcgatggcacataggcaactggtagaaattgctaaagccttaagctatgcagcggatgtcgtgattatggatgaaccgacatcttcgctaagtgataatgaagcggagatcctgtttaacattattgaaaaattaaagcagcgaggctgtgcggttatttatatctctcatcgcatggatgaaattatgcggatttcagatgatatttcggtgatccgcgacggtgagtatatcgctacgcatgaaaagaaaaacagtgatatccagcacttgattgcccaaatggttggtcgggaaatgaaaaatatttggccagcacgtcttggggaaaaaccggatgaaaatgttcctgcaaaactggaagtaaaaaatctttcccatccttcgctttttaaagaggtcagtttcgctgtgcgtccgggggaagtcctcggattttttggcctggtgggggccgggcgttccgatgtgatgaaggcgctatttggcctcgtttcgtatcacgggactgtgttgattgatggtaaggaagtcaggatcgctaatcccaaacaggctattgatcatggcattgcttttgtgaccgaaaaccgcaaggaagaagggttagtgctgatgcacgacgtcaatatgaacacgcaccatgtggcgtttcaatataacgcttcgcggatgggactcatcaatcaccgacaagaagaggcgaagacgctgcaatcaattgccagaatgaacactaaagtgagttctgtgcatcaggcagtgggagcactgagcggcggtaatcaacagaaaatcgtgttatcgaagtggctggagaaaactccgcgtattttattgctcgatgagccaacgcgcggagtggatgtcggcgcaaaatttgaaatctataacgtgatacgtcaactggctgcggcagggacagcaattattctggtgtcctctgaactgccagaagtcatggcacttagcgatcgtctggtggtaatgcgtaataaaacgattgccgatatttattcatgtgaaaatttaacgcagacacaggtaatgaccgctgcaacaggagtacgttaa

SEQ ID NO: 1033 - DNA, 990 bp, Escherichia coli
atgacagagaaaactcttgccagtccgaaaccttcggaaattcccattgcaaataattttaaaaaagtcttcaggcaatatggtggtatcctcagtggaatggtggtgttaatcattctgttcagttttattaatgacagtttttttaccgccaataacattactaatattattcttcaggtttcgataattgcaattaccgcctatggaatgacttatgtgcttttgcttggcgatattgatttatcggtcggttcaaccattgcattgattggcacatttgctgcgcttggggcttcatggggaattccatttgttttattggtcccattatccattattgcagcactggctttggggatgataaatggtggcttgacggctatagcggggatcccttcgtttattgtcaccgttgctactatggggatcttccgtggtattgcttatatagtgaccgatggtatgcccatcatgattaaagatgatgcttttctggcgctggggaatggagaatttctctatatacctattcctatatggatattaatcatcttattgctgataaaccacttcattcttactaaaacaacctttggacgaaaaatttatatcactggtggtaataaagaagcggcaatttattcagggataaatgtcacccgcttgaaaattaaagtctttatgattacagccgtgctggcaggtatcagcgggatgatccttgcctcacgcctctattccgggcaaccgaattccgcgttgagctacgaactggatgctattgccgcggctgtactgggaggcaccagcctgaatggcggctatggaaccgtggtggggacggtgatcggcgcattaaccatcggcgttattaataatggcatgaacttaatgaatgttccttatttttaccagatggtggttaaaggattagtcattcttgtagccgtttattttgacgtaagaaataaaagaaaacgcagctaa

SEQ ID NO: 1034 - DNA, 963 bp, Escherichia coli
atgagtaaggtcttcacaattggagaaattctggttgaaattatggcgagtaaaatcggccagccatttgatcaaccaggtatctggaacggcccttatcccagtggtgcgcccgctatttttatcgaccaggtgacacgtcttggcgttccgtgcggcatcattagctgcgtggggaatgatggctttggtgatattaatatacatcgtctggctgctgacggtgtggacatcagggggatttcagtcttacctctggaagccaccggtagtgcctttgttacttatcataactctggcgatcgcgattttatttttaatatcaagaatgctgcttgcggtaaattatcggcacagcatgttgatgaaaatattctgaaggattgtacccattttcatattatgggttcatccctgttttcattccatatggtagacgcagttaaaaaagcagtaaccatcgttaaagcaaatggtggcgttatttctttcgacccgaatattcgtaaagagatgctcgatattccagaaatgcgtgatgccctccactttgttcttgagttaacggatatctacatgcccagcgagggcgaagtgttgctcttgtcgccacactcgacaccggagcgtgcaatcgctggttttcttgaagaaggtgttaaagaggtgattgtgaagcgcggcaatcaaggagccagttactactccgcgaatgagcagtttcatgttgagagctatccggtggaagaagttgacccgaccggtgcgggagactgttttggtggcgcatggattgcctgccgccagctagggtttgacgcccatcgggcattacaatatgccaacgcctgcggtgcactggcggtaacccgacgtggcccaatggagggaacgtctcgccttgcggaaatcgaagcgttcatccagcgccatgacatgtccattcgggaagcagcacaatga

SEQ ID NO: 1035 - DNA, 1047 bp, Escherichia coli
atgaaaaacgaaatttggtcgtggattggcgatctctcgcaggttgccggaattaaacactatgagttacgtagtggcagagcaaaggggacagaagcgtttgatgtccgtactggtgcgggactggcatttacggtggtaaaagatcgcgcgctggatattgcatgggccagctacaaggacactgcgctctcttttatcacccccaacggtgttgtcgcccccgctttttttgagtctcagggcaacgggtttttacgtagcttttacgcggggttactgactacctgcggacttagctacattggcacgccctgtgaggatgaaggagaaacgctggggttacacgggcgtttggctgcgactccagcagaagaggtggggtatcgcacagaacggaccgacgacagcattgaatttgtcatcaatggcaaagtacgggaaacacgattgttcggtgaaaatctgacgctggaaaggaccattcgctgccgttatggcgaaaatgtgctgcgcattgaagacaaggtgactaatcatggtttcacccgccagccgctgcaaattctttatcactttaattacggatggcctttattatcgccacaggcagaaatcttgctgtcggctaaaagcgtaacgccacgaaccccgcatgcggcggaagggttaaccagtcatctggagatttgtaccccacagcccggttttgacgagcaggtttactatctcacgttgaatagcgacagtcaggggatgagtaaagttgcgctggtgaacgccgaactggggtggggaatttacgagaaattcgacaccatgcagctacccaactttatccagtggaaaaatttaggcgcgggtgaatatgttatgggactggaggtcagcaatagttttcctgacggtcgtgataaagaacgagcgcaggggcgtctgccctttatagagccaggggaaacaaagacatactgctttgagctgggaattgttgatggcgatgctgaaattagcgcgttgaaagcggaaattgcaagctaccgttag

SEQ ID NO: 1036 - DNA, 1350 bp, Escherichia coli
atgctggataaaattgttattgccaaccgcggcgagattgcattgcgtattcttcgtgcctgtaaagaactgggcatcaagactgtcgctgtgcactccagtgcggatcgcgatctaaaacacgtattactggcagatgaaacggtctgtatcggccctgctccgtcagtaaaaagttatctgaacatcccggcaatcatcagcgccgctgaaatcaccggcgcagtagcaatccatccgggttacggcttcctctccgagaacgccaattttgccgagcaggttgaacgctccggctttatcttcatcggcccgaaagcagaaaccattcgcctgatgggcgacaaagtatccgcaatcgcggcgatgaaaaaagcaggcgttccttgcgtaccgggttctgacggcccgctgggcgacgatatggataaaaaccgcgccattgctaaacgcattggttatccggtgattatcaaagcctccggcggcggcggtggtcgcggtatgcgcgtagtgcgcagcgacgctgaactggcacaatccatctccatgacccgtgcggaagcgaaagcagctttcagcaacgatatggtttacatggagaaatacctggaaaatcctcgccacgtcgagattcaggtactggctgacggtcagggcaacgctatctatctggcggaacgtgactgctccatgcagcgccgccaccagaaagtggtcgaagaagcaccggctccgggcattaccccggaactgcgtcgctacatcggcgaacgttgcgctaaagcgtgtgttgatatcggctatcgcggtgcaggtactttcgagttcctgttcgaaaacggcgagttctatttcatcgaaatgaacacccgtattcaggtagaacacccggttactgaaatgatcaccggcgttgacctgatcaaagaacaactgcgtatcgctgccggtcaaccgctgtcgatcaagcaagaagaagttcacgttcgcggccatgcggtggaatgccgtatcaacgccgaagatccgaacaccttcctgccaagtccgggcaaaatcacccgtttccacgcacctggtggttttggcgtacgttgggagtctcatatctacgcgggctacaccgtaccgccgtactatgactcaatgatcggtaagctgatttgttacggtgaaaaccgtgacgtggcgattgctcgcatgaagaatgcgctgcaggagctgatcatcgacggtatcaaaaccaacgttgatctgcagatccgcatcatgaatgacgaaaacttccagcatggtggcactaatatccactatctggagaaaaaactcggtcttcaggaaaaataa

SEQ ID NO: 1037 - DNA, 471 bp, Escherichia coli
atggatattcgtaagattaaaaaactgatcgagctggttgaagaatcaggcatctccgaactggaaatttctgaaggcgaagagtcagtacgcattagccgtgcagctcctgccgcaagtttccctgtgatgcaacaagcttacgctgcaccaatgatgcagcagccagctcaatctaacgcagccgctccggcgaccgttccttccatggaagcgccagcagcagcggaaatcagtggtcacatcgtacgttccccgatggttggtactttctaccgcaccccaagcccggacgcaaaagcgttcatcgaagtgggtcagaaagtcaacgtgggcgataccctgtgcatcgttgaagccatgaaaatgatgaaccagatcgaagcggacaaatccggtaccgtgaaagcaattctggtcgaaagtggacaaccggtagaatttgacgagccgctggtcgtcatcgagtaa

SEQ ID NO: 1038 - DNA, 975 bp, Escherichia coli
atgcaggcgttacttttagaacagcaggacggcaaaactctcgcatcagtacagactctggacgaaagtcgcctgccggaaggcgatgtcacggttgatgttcactggtcgagcctgaactacaaagatgcgctggcgattaccggtaagggaaaaatcatccgtaattttccgatgattcctgggatcgattttgccggaactgtacgcaccagcgaagatccgcgttttcatgccggtcaggaggtgttactcactggctggggcgttggtgaaaaccactggggtgggctggcggaacaggcgcgagtgaaaggtggctggctggttgccatgccgcaagggctggacgcgcgtaaagcaatgattatcggtactgccggttttaccgccatgctgtgtgtgatggcgctggaagatgccgctgttcgcccgcaggatggggagattgtcgtgacgggtgccagtggtggcgtcggcagtaccgccgtggcgctgctgcataagttgggttatcaggtcgttgccgtttccggtcgcgaaagtacccatgaatatctgaaaagtttaggtgccagccgtattcttcctcgcgatgagtttgccgaatcccgtcctctggaaaaacaagtctgggctggggcaattgacaccgttggcgacaaagtgctggcaaaagtgctggcgcaaatgaattacggcggctgcgtggcggcctgtggtctggcgggtggttttactctgccaaccacggtcatgccatttattctgcgtaatgtccgtttgcaaggggtggattcagtaatgacgccaccagcacgccgcgcacaagcctggcagcgactggtcgccgatttaccggaatcattctatacccaggcggcaaaagagatatctctggcagaggcaccgaagtttgccgaggccatcattaataaccagatccagggtcgcacgctggtgaaggttaactaa

SEQ ID NO: 1039 - DNA, 1941 bp, Escherichia coli
atgagattaacgacgaaattttcggcctttgtcacgctgctcaccgggttaacaatttttgtgactttgctgggctgttcgctaagtttctacaacgccattcagtataagtttagtcatcgtgttcaggcggtggcgacggcgattgatacctaccttgtgtcgaatgacttcagcacattaaggccacaaattaccgaattaatgatgtcggcagatatcgttcgtgtagacctgctccatggtgataagcaggtttataccctggccagaaatggtagttatcgtccggttggcaccaacgatctgtttcgtgaactgagcgttccgttgataaagcatccggggatgtcgctgcgtctggtttatcaggatccgatgggcaactatttccattctttaatgactaccgcgccgctcacgggggcgattggctttatcattcttatgctcttcctggcggtacgctggttacaacggcaacttgccgggcaagaattgctggaaacccgggctactcgtatcttaaacggtgagcgtggctctaatgtgttgggaaccatctatgaatggccgcccagaaccagcagtgcgctggatacgctgctttgtgaaattcagaacgcacgcgaacaacacagccgtcttgatacgctgatccgctcttatgccgcccaggacatgaaaaccggcctcaataaccgactctttttcgataatcagttagcaacgttactggaagatcaagagaaagtaggtacccacgggatcgtgatgatgattcgtctgccggatttcaatatgttgagtgatacctgggggcacagccaggttgaagaacagttcttctctctgacgaatctgctatcgacatttatgatgcgctaccctggcgcactgctggcgcgttaccaccgcagtgattttgctgcgctgttaccgcaccggacgttaaaagaggcagagagcatcgccagtcagttaatcaaagccgtcgataccttgccgaacaataaaatgctcgatcgcgacgatatgatccacattggtatctgtgcctggcgtagtggtcaggataccgagcaggtaatggaacatgcagagtctgccacgcgtaatgcgggattgcagggcggcaatagctgggctatttacgatgactcgttgcctgaaaaaggacgcggtaatgttcgctggcgtacgcttatcgagcaaatgctcagtcgcggcggcccgcgcctttatcaaaaaccggcggttactcgcgaaggccgggttcatcatcgtgaactcatgtgccgcatcttcgatggtaatgaagaggttagctcggcagagtatatgccgatggtcttgcagtttggtttatcggaagagtatgaccgcctgctaatcagccgtcttattccactattgcgttactggccagaggaaaatctggcgattcaggttaccgttgagtcgctgattcgcccgcgttttcagcgttggctgcgcgatacgttaatgcaatgtgaaaaatcgcaacgaagacgcataattattgaacttgcagaggccgatgttggtcaacatatcagtcgcttacaacctgttattcgtttagtgaatgctttaggggtacgggtagccgtcaaccaggctggtttgacgctggtaagcaccagttggatcaaagaacttaatgttgagttactcaagctccatccggggctggtcagaaacattgagaagcgaacggagaaccaactgctggttcaaagcctggtggaagcctgctccgggaccagcacccaggtttacgccaccggcgtgcgttcgcgaagcgagtggcagaccctgattcagcgtggtgttacaggtgggcaaggggattttttcgcgtcctcacagccacttgatactaacgtgaaaaaatattcacaaagatactcggtttaa

SEQ ID NO: 1040 - DNA, 1044 bp, Escherichia coli
atgttgaaaaaatttcgtggcatgttttccaatgacttgtccattgacctgggtactgcgaataccctcatttatgtaaaaggacaaggcatcgtattgaatgagccttccgtggtggccattcgtcaggatcgtgccggttcaccgaaaagcgtagctgcagtaggtcatgacgcgaagcagatgctgggccgtacgccgggcaatattgctgccattcgcccaatgaaagacggcgttatcgccgacttcttcgtgactgaaaaaatgctccagcacttcatcaaacaagtgcacagcaacagctttatgcgtccaagcccgcgcgttctggtttgtgtgccggttggcgcgacccaggttgaacgccgcgcaattcgtgaatccgcgcagggcgctggtgcccgtgaagtcttcctgattgaagaaccgatggctgccgcaattggtgctggcctgccggtttctgaagcgaccggttctatggtggttgatatcggtggtggtaccactgaagttgctgttatctccttgaacggcgtggtttactcctcttccgtgcgcattggtggtgaccgtttcgacgaagctatcatcaactatgtacgtcgtaattacggttctctgatcggtgaagccaccgcagaacgtatcaagcacgaaatcggttcggcttacccgggcgatgaagtacgtgaaatcgaagttcgtggccgtaaccttgcagaaggtgttccacgcggttttaccctgaactccaacgaaatcctcgaagcactgcaggaaccgctgaccggtattgtgagcgcggtaatggttgcactggaacagtgcccgccggaactggcttccgatatctccgagcgcggcatggtgctcaccggtggtggcgcactgctgcgtaaccttgaccgtttgttaatggaagaaaccggcattccagtcgttgttgctgaagacccgctgacctgtgtggcgcgcggtggcggcaaagcgctggaaatgatcgacatgcacggcggcgacctgttcagcgaagagtaa

SEQ ID NO: 1041 - DNA, 1104 bp, Escherichia coli
atgaagccaatttttagccgtggcccgtcgctacagattcgccttattctggcggtgctggtggcgctcggcattattattgccgacagccgcctggggacgttcagtcaaatccgtacttatatggataccgccgtcagtcctttctactttgtttccaatgctcctcgtgaattgctggatggcgtatcgcagacgctggcctcgcgtgaccaactagaacttgaaaaccgggcgttacgtcaggaactgttgctgaaaaacagtgaactgctgatgcttggacaatacaaacaggagaacgcgcgtctgcgcgagctactgggttccccgctgcgtcaggatgagcagaaaatggtgactcaggttatctccacggttaacgatccttatagcgatcaagttgttatcgataaaggtagcgttaatggcgtttatgaaggccagccggttatcagcgacaaaggtgttgttggtcaggtggtggccgtcgctaaactgaccagccgcgtgctgctgatttgtgatgcgacccacgcgctgccaatccaggtgctgcgcaacgatatccgcgtaattgcagccggtaacggttgtacggatgatttgcagcttgagcatctgccagcgaatacggatattcgtgttggtgatgtgctggtgacttccggtctgggcggtcgtttcccggaaggctatccggtcgcggttgtctcttccgtaaaactcgatacccagcgcgcttatactgtgattcaggcgcgtccgactgcaggactgcaacgtttgcgttatctgctgctgctgtggggcgcggatcgtaacggcgctaacccgatgacgccggaagaggtgcatcgtgttgctaatgaacgtttgatgcagatgatgccgcaggtattgccttcgccagacgcgatggggccaaagttacctgaaccggcaacggggatcactcagccgactccgcagcaaccggcgacaggaaatgcagttactgcgcctgctgcgcccacacagcccgctgctaatcgctctccacaaagggctacgccgccgcaaagtggtgctcaaccgcctgcgcgtgcgccgggaggacaatag

SEQ ID NO: 1042 - DNA, 489 bp, Escherichia coli
gtggcgagctatcgtagccagggacgctgggtaatctggctctctttcctcattgcgctgttgctgcaaatcatgccctggccggataacctgattgttttccggccaaactgggtgttactcatcttgttgtattggatcctggccttgccccatcgcgtaaatgtgggcacaggttttgtgatgggtgccatactggatctgatcagcggctcgacgcttggcgtacgcgtattggcgatgagcatcattgcttacctggtggcgctgaaataccagcttttccgcaacctcgcattatggcagcaggcgctggtcgtcatgttgctttcgctggtggtggatattattgttttctgggcagagtttttagtgattaacgtctctttcagaccggaagtgttctggagtagtgtagtcaatggggtgctctggccgtggattttcttgctgatgcgtaaagtccgtcagcagtttgcagtgcaataa

SEQ ID NO: 1043 - DNA, 594 bp, Escherichia coli
atgacttctctgtatttagcttccggttctccgcgtcgtcaggagttacttgcgcaacttggcgtgacctttgaacgtattgttacgggcattgaggagcagcgtcagccgcaggagagcgcgcagcagtatgttgtgcgtctggcgcgcgagaaagcacaggcgggtgtcgcgcaaacggagcaggatctcccggtgctgggtgcggatactatcgttatcctgaacggagaagtgctcgagaaaccgcgcgacgcagagcatgcggcgcagatgttgcgcaaattatcgggtcagacccatcaggtgatgacggcagtggcgttggctgacagccagcacattctcgattgcctggtggtcaccgatgtgactttcagaacgttaacagacgaagacatcgcgggctatgtcgccagcggcgaaccgttagataaagcaggtgcatacggtattcaggggctgggtggctgttttgtcaggaagataaatggcagctttcacgccgtagtcggcttaccgctggttgaaacgtatgaattattaagtaattttaacgcactgcgtgagaaaagggataaacatgacggctga

SEQ ID NO: 1044 - DNA, 1470 bp, Escherichia coli
atgacggctgaattgttggtaaacgtaacgccttcggaaactcgagttgcgtatattgatggcggtattctgcaggaaattcatattgaacgtgaggcgcgacgcggaatagtaggcaatatctacaagggtcgtgtaagtcgtgtacttccgggtatgcaggcggcttttgtagatattgggctggataaagccgcgtttcttcatgcatctgacatcatgccgcacactgaatgtgtggcgggtgaagaacaaaagcaattcacggtgcgcgacatctcggaactggtccgtcaggggcaagatctgatggtgcaggtggtgaaagatccgcttggcactaaaggtgcgcgcctgaccaccgatatcacgctgccttctcgctatctggtgtttatgccaggggcttctcacgttggggtatcccaacgaattgaaagcgaatcagaacgtgaacgcctgaaaaaagtggtcgcagagtattgcgacgagcagggcgggtttatcatccgtactgcagcggaaggggttggcgaggctgaactggcctccgatgccgcttatctgaaacgcgtctggaccaaagtgatggagcgtaaaaaacgcccgcagacccgttatcagctgtacggagaactggcgctggcgcagcgtgttctgcgtgatttcgccgacgccgaactcgaccgcattcgcgttgactcacgcctgacttacgaagcattgctggagtttacctcggagtacattcccgagatgaccagcaagctggagcattacaccggacgccagccgattttcgatctctttgatgtcgaaaacgaaattcagcgagcgctggaacgcaaagtagaactgaaatccggtggttatctgattatcgaccagaccgaagcgatgaccaccgtggacatcaataccggagcgtttgtcggtcatcgcaatctggacgacaccattttcaataccaatattgaagcgacgcaggctatcgctcgccagttacggttgcgcaatctgggcgggattatcattattgatttcatcgatatgaataatgaagatcaccgtcgccgcgtgctgcactcgctggagcaggcgctgagcaaagatcgggtgaaaaccagcgttaatggtttttcggcgctggggctggtggagatgacgcgtaaacgcacccgcgaaagcattgagcacgtactgtgtaacgaatgcccaacctgccacggtcgcggaacggtgaaaaccgtggaaacggtatgctatgaaatcatgcgcgagattgttcgtgtccaccatgcttacgactccgaccgtttcctggtctatgcttctccggcagtagccgaagccttgaaaggcgaagagtcacactcgctggcggaagtggaaattttcgttggcaaacaggttaaagtacaaattgaaccgctctataaccaggagcagtttgacgtcgtaatgatgtaa

SEQ ID NO: 1045 - DNA, 3801 bp, Escherichia coli
gtgaggcgattgccggggattttactgcttactggagccgcgctcgttgtgatcgctgccctgctggttagcggcctgcgtattgctttaccgcatcttgacgcctggcgtccggaaatcctcaacaaaatagaatccgcgactggcatgccggtagaagccagtcagctctcagccagctggcagaattttggtccgacgcttgaagcgcacgacatccgtgcagaactaaaagatggcggcgaattttcggttaaacgcgttactcttgcgctggatgtctggcagagcctgttacatatgcgctggcagtttcgcgacctcactttctggcagctgcgctttcgcaccaacactcctatcaccagcggcggtggtaatgatagcctagaagccagtcacatcagcgatctgtttcttcgtcaatttgaccatttcgatctccgcgacagtgaagtcagtttcctgacgccatccggtcagcgcgccgagctggcgatcccacagctcacctggctgaacgatccacgtcgacaccgtgcggaaggcctggtaagcctctccagccttaccggacagcacggcgtgatgcaggtgcgtatggatttgcgcgatgatgaggggttgttaagcaatggtcgcgtctggctccaggcggatgacatcgacctgaagccgtggctcggtaaatggatgcaggacaatattgcgctggaaacggcacagttctcccttgaaggctggatgacgatcgacaaaggcgatgtaaccggcggtgacgtctggctgaaacagggcggtgccagctggttgggcgagaaggaaacacatacgctgtcggtggataatctgactgcgcatattacgcgtgaaaatccgggatggcagttctctattcccgatacacggatcacgatggacggcaaaccctggccgagcggagcattgacgctggcctggataccggaacaggacgttggcggcaaagacaataaacgcagtgacgaactccggattcgcgccagtaatctggagctggcaggcctggagggcgtacgcccgctggtcgcgaaactttcacctgcactgggtgatgtttggcgctccacacaaccgagcggcaagattaacactctggcgctggatatcccgcttcaggcggcagacaagacccgttttcaggcatcgtggagcgatctggcctggaagcaatggaaattattaccgggtgcggaacacttctccgggacgctttccggcagcgtagaaaatggtttgcttactgcgtcgatgaagcaggcaaagatgccttacgaaacggtattccgtgcgccactggaaatcgccgacggccaggcaacgataagctggctgaacaatgacaaaggtttccagctggatgggcgtaatattgacgttaaagccaaagccgtccatgcgcgcggcggttttcgttacctgcaacctgctaacgatgaaccctggctgggtattctggctggcatcagtaccgatgatggttcacaagcctggcgctatttcccggaaaacttgatgggtaaagacctggttgattacttaagtggcgcgattcagggcggtgaagcggataacgcgacgctggtttatggtggcaatccgcaactcttcccctataaacacaacgaaggtcagtttgaagtgctggtgccgctgcgcaacgcgaagtttgccttccagccggactggcctgcattaactaaccttgatattgaactggactttattaacgacggtttatggatgaaaaccgatggcgttaatctgggcggcgtgcgcgcgagtaatctcaccgcagtgatccctgactactcaaaagaaaaactgctgattgacgctgacattaaaggtccgggtaaagccgttggcccttactttgatgagacaccgctgaaagattccctgggtgcgaccctgcaagaactccagctcgacggcgatgtgaatgctcgcttacatcttgatatcccgctgaacggcgagttggtaaccgcgaaaggtgaagtgacgctgcgtaataacagtctgtttatcaaaccactcgacagcaccctgaaaaatttgagcggtaaattcagctttatcaatggcgatctgcaaagtgaaccactgacagcaagctggtttaatcagccgttgaacgtggatttttccaccaaggaaggggcaaaagcctaccaggtagcggtaaacctcaacggtaactggcaaccggcgaaaaccggcgttctgcctgtagcggtgaacgaagcattgagtggcagcgtggcgtgggatggtaaagtgggcattgatctgccttatcatgctggcgcgacctataacgtagagctgaacggcgatttgaagaatgtgagcagtcacttaccttcaccgttagccaaacctgcgggtgaaccactagcggtaaacgttaaggttgatggcaatctcaacagctttgaattaaccggacaggctggtgcggataaccatttcaatagccgctggttgctcggtcaaaagctgacgctcgatcgtgctatttgggcggcagacagtaaaacgctcccgccgttgccggaacaaagtggcgttgaactcaatatgccgccgatgaatggtgccgagtggctggccctgttccagaaaggcgcggcggagagtgtcggtggtgcagcgagtttcccacaacacataacgttacgtacgcctatgttgtcgctgggaaatcagcaatggaataacctgagtattgtttcgcaaccgacggcaaatggcaccctggttgaggcgcaagggcgtgaaatcaacgccacgctggcgatgcgtaataacgcaccgtggctggcgaatatcaaatatctttattacaacccaagcgtggcgaaaactcgtggtgattcaacacagtcatcacctttcccgacaacggaacgcattaacttccgtggctggccagacgcacaaatacgatgcgcagagtgctggttctgggggcaaaaattcggtcgtattgacagtgatatcaccatttctggcgatacgttaacgctgactaatggactgattgatactggtttttcgcggctcactgccgatggtgaatgggttaacaatccggggaatgaacgtacctcgctgaaaggaaaactgcgcgggcagaaaattgatgccgccgcagaattttttggtgtcacgacgcccatacgccagtcgtcatttaatgtggattacgatttacactggcgcaaagcaccctggcagccagatgaggcgacgttgaatggcatcattcatactcaactgggtaaaggcgaaattaccgaaatcaataccggacatgccgggcaattgctgcgcttattgagcgtagatgccctgatgcgtaagctgcgttttgatttcagagacacttttggcgaagggttctattttgactccattcgcagcaccgcgtggattaaagacggcgttatgcacaccgacgacacgctggtggatggcctggaagcggacatcgctatgaaagggtcggtaaatctggtacgtcgcgacctgaatatggaagcggttgtcgcaccagagatttctgcgacggtcggcgtggctgcggcctttgcggttaaccccattgttggcgcggcagtgtttgccgccagtaaagtgctgggaccgctgtggagcaaagtctccattttgcgctatcacatttcgggtccgctggacgatccgcaaatcaacgaagtgttgcgacaaccgcgcaaagaaaaagcgcaatga

SEQ ID NO: 1046 - DNA, 1446 bp, Escherichia coli
atgagtcttaacctggtaagtgaacaattgctagcggcgaacggcctgaaacatcaggacttgttcgcgatcctcggtcaactggccgaacgtcgccttgattatggcgatctctattttcagtcgagctatcacgaatcctgggttttagaagaccgcattattaaagatggttcttacaacatcgatcagggcgttggtgtgcgtgcaatcagcggtgaaaaaaccggatttgcttacgctgaccaaatcagcctgctggcgctggaacaaagtgcgcaagcggcgcgcaccatcgtccgtgatagtggtgatggcaaagtacagacgctgggcgcggtagagcatagcccgttgtatacctcggtagatccgctgcaaagcatgagccgtgaagagaagctggatatcctgcgtcgcgtcgataaggttgcccgcgaagcggacaagcgcgtacaagaagtgactgccagcctcagcggcgtttatgaattaattctggttgcggccaccgacggcacgctggcggcggatgttcgtccgctggtgcgtctttccgtgagcgttctggtcgaagaagatggcaaacgcgaacgcggtgccagtggcggcggcggtcgttttggttatgagttcttccttgctgatctcgacggcgaagtccgtgcggatgcgtgggcaaaagaagcagtgcgtatggcgctggtcaatctttctgccgttgctgcaccagcgggcaccatgccggtagtacttggcgcaggttggccgggcgtgctgttgcatgaagcggtgggtcacggtctggaaggcgacttcaaccgccgtggcacttcagtatttagtggacaggtcggggagttggtggcttcagaactgtgtaccgtggttgatgatggcacgatggtcgatcgccgtggttcggtggcgattgatgacgaaggtacgccaggccagtacaacgtgctgattgagaacggcattctgaaaggctacatgcaggataaactcaacgcgcgtttgatggggatgacgccgactggcaacggtcgccgtgaatcctacgctcatctgcccatgccgcgtatgaccaacacctatatgctgccgggtaaatcgaccccgcaggaaattattgaatccgttgagtacggtatctatgcaccgaactttggtggcggccaggtggatatcacctccggcaaattcgttttctccacctcagaagcgtatcttattgaaaacggtaaagtaactaagccggtgaaaggcgcaacgttgattggttccggtatcgaaaccatgcagcagatttcgatggttggcaacgacctgaaactggataacggcgtgggtgtctgcggtaaagaagggcaaagtttgccggttggcgtgggccagccaacgctgaaagttgataacctgacagttggcggtaccgcgtaa

SEQ ID NO: 1047 - DNA, 930 bp, Escherichia coli
atggaacgactaaaacgcatgtcggtgtttgccaaagtagttgaatttggctcttttaccgccgccgccagacagctacagatgagcgtttcgtccatcagtcagacggtgtcaaaactggaagatgagttgcaggtaaagctgttaaaccgtagcacacgcagcattggcctgaccgaagccggcagaatttactaccagggctgccgtcggatgctccatgaagtgcaggatgttcatgagcaactgtatgccttcaataacacccccatcgggacgctgcgcattggctgttcttcaactatggcacaaaatgttctcgccgggctgacagcaaaaatgctgaaagaatacccaggtttgagcgtcaatctggttaccggaattcctgcccccgacctgattgccgacggtctggatgtggtgatccgcgtcggcgcgttgcaagattccagcctgttttcccgccgtctgggcgcgatgccaatggtggtgtgcgccgcaaaaagttatctcacacaatacggcataccggaaaaacccgccgatttaagtagtcactcatggcttgaatacagcgtgcgacccgacaatgaatttgaactgatcgcaccggaagggatctcgactcgcctgatcccgcaagggagatttgtgactaatgatccgatgacgctggtgcgctggctgacggcgggtgccgggatcgcctacgtgccgttgatgtgggtgatcaacgagatcaatcgcggggaactggagatcctgctgccacgttaccagtcagacccacgcccggtttatgcgttatataccgaaaaagataagctgccgctgaaggtacaagtcgtgatcaactcgctaacggattattttgttgaggtcggtaaattgtttcaggagatgcacgggcgcgggaaagagaagtaa

SEQ ID NO: 1048 - DNA, 204 bp, Escherichia coli
atgagtctgtttcccgttatcgtggtgtttgggctgtccttcccaccgatatttttcgaattgcttttatcactggcgattttctggctggtgcgccgggtacttgtgccaacaggtatctacgactttgtctggcatccggcgttgttcaacaccgcgctctattgctgcttgttttatttgatatcgcgactgttcgtttga

SEQ ID NO: 1049 - DNA, 933 bp, Escherichia coli
gtgaaaacactaataagaaaattctcccgtacggccatcacggtcgtattagtcattctggccttcatcgcaatttttaatgcctgggtctattacaccgaatccccgtggacgcgtgacgcgcgctttagcgctgacgtcgttgcgatcgcgccggacgtttctggactcattacccaggtgaatgttcatgataaccagctggtgaaaaaaggacaggtactgttcaccatcgaccagccgcgttatcaaaaggcgcttgaggaagcgcaagccgatgttgcttattatcaggtactggcgcaggagaaacgccaggaggccggacgtcgtaaccgtctcggtgtgcaggcgatgtctcgcgaagagatcgaccaggccaacaacgtactacaaacagttctgcatcagttagcgaaagcgcaggcgacccgcgatctggcaaaactggatcttgaacgtacagtcatccgcgcgccagcagatggctgggtgaccaacctcaacgtctataccggtgagtttattactcgaggatcaacggcggttgcgctggtgaaacagaactccttctatgtactggcctatatggaagaaactaagctggaaggggtgcgccctgggtatcgtgcggagatcacgccgcttggcagtaacaaagtgctgaaagggactgttgatagtgttgccgcaggggtcaccaatgccagcagcacgcgtgacgacaaagggatggcgaccatcgactctaaccttgaatgggtacgtttggcgcaacgtgttccggtacgtattcgtctcgacaaccagcaagagaacatctggcctgcgggcaccactgctacggtggtagtcactggcaaacaagatcgcgacgaaagtcaggattcgttcttccgtaaaatggctcatcgcctgcgtgagtttggttaa

SEQ ID NO: 1050 - DNA, 1968 bp, Escherichia coli
atgggtattttttccattgctaatcaacatattcgatttgcggtaaaactggcgaccgccattgtactggcgctgtttgttggctttcacttccagctggaaacgccacgctgggcggtactgacagcggcgattgttgccgccggtccggcctttgctgcgggaggtgaaccgtattctggcgctattcgctatcgtggctttttgcgcatcatcggcacatttattggctgtattgccggactggtaatcatcattgcgatgatccgagcaccattattgatgattctggtgtgctgtatctgggccggtttttgtacctggatatcctcgctggtacgaatagaaaactcgtatgcgtgggggctggccggttataccgcgctgatcattgtgatcaccattcagccggaaccattgcttacgccgcagtttgccgtcgaacgttgtagcgagatcgttatcggtattgtgtgtgcaattatggcggatttgctcttttctccgcgatcgatcaaacaagaagtggatcgagagctggaaagtttgctggttgcgcaatatcaattaatgcaactctgtatcaagcatggcgatggtgaagttgtcgataaagcctggggcgatctggtgcgacgtactacggcgttacaaggtatgcgcagcaacctgaatatggaatcttcccgctgggcgcgggccaatcgacgtttaaaagcgatcaatacgctatcgctgacgctgattacccaatcctgcgaaacttatcttattcagaatacgcgcccggaattgatcactgatactttccgcgaattttttgacacgccggtagaaactgcgcaggacgtccacaagcagctcaaacgcctgcggagagtgatcgcctggaccggggaacgggaaacgcctgtcaccatttatagctgggtcgcggcggcaacgcgttatcagcttctcaagcgcggcgttatcagtaacacaaaaatcaacgccaccgaagaagagatcctgcaaggcgaaccggaagtaaaagtagagtcagccgaacgtcatcatgcaatggttaacttctggcgaaccacactttcttgcattctgggcacgcttttctggctgtggacgggctggacttccggcagtggtgcaatggtgatgattgcggtagtgacgtcactggcaatgcgtttgccgaatccacgcatggtggcgatcgactttatctacgggacgctggcagcgctaccgttagggctgctctactttttggtgattatccctaatacccaacagagcatgttgctgctgtgtattagcctggcagtgctgggatttttcctcggtatagaagtacagaaacggagattgggctcgatgggggcgttggccagcaccataaacattatcgtgctggataacccgatgactttccatttcagtcaatttctcgacagcgcattagggcaaatcgtcggctgtgtgctcgcgttcaccgttattttgctggtgcgggataaatcgcgcgacaggactggacgtgtactgcttaatcagtttgtttctgccgctgtttccgcgatgactaccaatgtggcacgtcgtaaagagaatcaccttccggcactttatcagcagctgtttttgctgatgaataagttcccaggggatttgccgaaatttcgtctggcgctgacgatgattatcgcgcaccagcgcctgcgtgatgcgccgattccggttaacgaggatttatcggcgtttcaccggcaaatgcgccgcacagcagaccatgtgatatctgcccgtagcgatgataaacgtcgtcggtactttggccagttgctggaagaactggaaatctaccaggaaaagctacgcatctggcaagcgccaccgcaggtgacggaaccagtacatcggcttacgggtatgctccataagtatcaacatgcgttgaccgatagttaa

SEQ ID NO: 1051 - DNA, 273 bp, Escherichia coli
atgaatatttatacctttgattttgatgagattgagagtcaggaggatttttatcgtgactttagccaaacctttggtctggcgaaagataaggtacgcgatctcgactcactatgggatgtgttaatgaacgatgtcctgccgctaccacttgagattgaatttgttcatctgggagagaaaacgcgtcgccgttttggcgcgttaatattgctgtttgatgaggcagaggaagagctggaagggcatttgcgttttaatgttcgtcattag

SEQ ID NO: 1052 - DNA, 264 bp, Escherichia coli
atgaaaatcaaaaccactgttgctgcattaagcgtactttctgttctctctttcggtgcattcgctgccgactccattgatgctgcacaagcacaaaatcgtgaagcaatcgggaccgtatccgtaagtggtgtggcgtcttcgccaatggatatgcgtgaaatgctgaacaaaaaagcggaagagaaaggcgcaacggcctaccagattactgaagctcgtagtggtgacacctggcacgctacggctgaactgtacaaataa

SEQ ID NO: 1053 - DNA, 471 bp, Escherichia coli
atgcgaagctcggctaagcaagaagaactagttaaagcatttaaagcattacttaaagaagagaaatttagctcccagggcgaaatcgtcgccgcgttgcaggagcaaggctttgacaatattaatcagtctaaagtctcgcggatgttgaccaagtttggtgctgtacgtacacgcaatgccaaaatggaaatggtttactgcctgccagctgaactgggtgtaccaaccacctccagtccattgaagaatctggtactggatatcgactacaacgatgcagttgtcgtgattcataccagccctggtgcggcgcagttaattgctcgcctgctggactcactgggcaaaacagaaggtattctgggcaccatcgctggcgatgacaccatctttactacccctgctaacggtttcaccgtcaaagagctgtacgaagcgattttagagctgttcgaccaggagctttaa

SEQ ID NO: 1054 - DNA, 939 bp, Escherichia coli
atgaaagtcgcagtcctcggcgctgctggcggtattggccaggcgcttgcactactgttaaaaacccaactgccttcaggttcagaactctctctgtatgatatcgctccagtgactcccggtgtggctgtcgatctgagccatatccctactgctgtgaaaatcaaaggtttttcaggtgaagatgcgactccggcgctggaaggtgcagatgtcgttcttatctctgcaggcgtagcgcgtaaaccgggtatggatcgttccgacctgtttaacgttaacgccggcatcgtgaaaaacttggtacagcaagttgcgaaaacctgcccgaaagcgtgcattggcattatcactaacccggttaacactacagttgcgattgctgctgaagtgctgaaaaaagccggtgtttatgacaaaaacaaactgttcggcgttaccacgctggatatcattcgttccaacacctttgttgcggaactgaaaggcaaacagccaggcgaagttgaagtgccggttattggtggtcactctggtgttaccattctgccgctgctgtcacaggttcctggcgttagttttaccgagcaggaagtggctgatctgaccaaacgtatccagaacgcgggtactgaggtggttgaagcgaaagccggtggcgggtctgcaaccctgtctatgggccaggcagctgcacgttttggtctgtctctggttcgcgcactgcagggcgaacaaggcgttgtcgaatgtgcctacgttgaaggcgacggtcagtacgctcgtttcttctctcaaccgctgctgctgggtaaaaacggcgtggaagagcgtaaatctatcggtactctgagcgcatttgaacagaacgcgctggaaggtatgctggatacgctgaagaaagatatcgccctgggcgaagagttcgttaataagtaa

SEQ ID NO: 1055 - DNA, 1068 bp, Escherichia coli
atgtttgtgaagctcttacgttccgttgcgattggattaattgtcggcgctattctgctggttgccatgccttcgctgcgcagccttaacccgctttccactccgcaatttgacagtaccgatgagacgcctgccagctataatctggcggttcgccgcgccgcgccagcggtggttaacgtttataaccgcggtttgaacaccaactctcacaaccagcttgagatccgcaccctgggatctggtgtaatcatggatcaacgcgggtatatcatcaccaataaacacgtgatcaacgacgccgatcagatcatcgtcgccttacaggatggacgtgtttttgaagcgttactggttggctctgactctctaaccgatctggcggtgctgaaaattaacgccacaggcggtttaccaacgattccgatcaatccacgccgcgtaccgcacattggcgatgtggttctggcgatcggtaacccgtacaacctcgggcagaccattacccaagggattatcagtgccacgggtagaatcggtctgaacccgaccgggcggcaaaacttcctgcaaaccgatgcttccattaaccacggtaactctggcggcgcgctggtgaactcgctgggcgaactgatgggcattaacacgctgtcgtttgataagagtaacgatggcgaaacgccggaaggtatcggctttgcgattcctttccagttagcgaccaaaattatggataaactgatccgtgatggccgtgtgatccgtggctacattggcattggtggacgtgagatcgccccattacatgcgcagagtggcggcatggatcaactgcaagggatcgtagttaacgaagtgtcgcctgatggcccagcggcaaatgcaggcatccaggtcaacgatctgattatctctgtgaataacaaaccggccatctctgctctggagacgatggatcaggtggcagaaattcgccctggttcggtgatcccggttgtcgtgatgcgtgacgataaacagttaacattgcaggtcaccattcaggaatatccggcgaccaactaa

SEQ ID NO: 1056 - DNA, 1368 bp, Escherichia coli
atgaaaaaacaaacccagctgttgagtgcattagcgttaagtgtcgggttaactctctcggcgtcatttcaggccgtcgcgtcgattccaggccaggttgccgatcaggcccccctccccagtctggctccaatgctggaaaaagtgcttccggcagtggtgagcgtacgggtggaaggaacggccagtcagggacagaaaatcccggaagaattcaaaaagttttttggtgatgatttaccggatcaacctgcacaacccttcgaaggtttaggctccggtgtcatcatcaacgccaataaaggctatgtgctgaccaacaaccatgtgattaatcaggcacagaaaatcagtattcagctcaatgatgggcgcgagtttgatgcaaaactgattggtagcgatgaccagagcgatatcgccctgttgcaaattcaaaacccgagcaaattaacgcaaatcgctattgccgactccgataaattgcgcgtcggtgattttgccgtggcggtcggtaacccatttggccttgggcaaaccgccacctctggcattatatccgcattaggccgcagcgggttgaatcttgaaggtctggaaaactttatccagacagatgcttccattaaccgcggtaactccggcggtgcactgttaaaccttaacggtgagttaattggcatcaacactgcaatccttgcgcctggcggcggtagcgtcgggattggatttgccattcccagtaatatggcgcgaacactggcgcagcagcttatcgactttggagaaatcaaacgcggcctgttaggcatcaaaggcaccgagatgagtgccgatatcgccaaggccttcaaccttgacgtgcagcgtggcgcgtttgtcagcgaagtgttgccaggttctggctcggcgaaagcgggcgtcaaagcgggcgatattattaccagcctcaacggcaaaccgctgaatagctttgctgagttgcgctctcgtatcgcgaccaccgagccgggcacgaaagtgaagcttggcctgctgcgtaacggcaaaccactggaagtagaagtgacgctcgataccagcacctcttcgtcggccagcgctgaaatgatcacgccagcgctggaaggtgcaacgttgagcgatggtcaactaaaagatggtggcaaaggtattaagatcgatgaggttgtcaaaggaagcccagctgctcaggctggcttgcaaaaagacgatgtgatcattggcgtcaaccgcgatcgggtgaactcgattgctgaaatgcgtaaagtgctggcggcaaaaccggccatcattgccctgcaaattgtacgcggcaatgaaagcctctacctactaatgcgttaa

SEQ ID NO: 1057 - DNA, 399 bp, Escherichia coli
atgacctgggaatatgcgctaattgggttagtcgtcggcatcattattggtgctgtggccatgcgttttggtaatcgtaaactacgccagcaacaggcgttgcagtacgaactggaaaagaataaagctgaactggacgagtatcgcgaagagctggttagccactttgcccgcagcgcggaattactggataccatggcgcacgactatcgccagctgtatcagcacatggcgaaaagctccagtagcctgctgccggaactgtctgcggaagcaaacccgttccgtaatcgtctggcagagtctgaagccagcaacgatcaggcaccggtgcagatgcctcgcgactattctgaaggcgcatccggcctgctgcgtactggcgcgaagcgcgactaa

SEQ ID NO: 1058 - DNA, 1128 bp, Escherichia coli
atgcaaagcattaccccaacatcgcaatacctgaaggcgctcaatgaaggcagccatcaacccgacgacgttcaaaaagaggccgtcagccgcctggaaattatttatcaggaactcatcaatagcacgcctccagcccccaggacgagtgggctaatggcgcgggtcggtaagctgtggggtaaacgcgaagacacaaagcatacgccagtgcgtggcttatatatgtggggcggtgtaggacgcgggaaaacctggctgatggaccttttctatcaaagcctgccgggagagcggaaacagcgtctgcactttcaccgttttatgctgcgggtacatgaagagctaactgctttgcaggggcagaccgatccgctggaaattattgccgatcgctttaaagcagaaactgacgtgctctgttttgacgaattttttgtttctgatattaccgatgccatgctacttggcggcctgatgaaagccctgttcgctcgcggaataacgctggtagcgacgtcaaatattccgccggacgaactttatcgaaatggcctgcaacgtgcgcgttttttgcctgcaatcgatgctattaaacagcattgtgatgtaatgaacgtggacgctggtgttgattatcgactgcgtacactcactcaggcgcatctgtggctttcgcccctcaacgatgaaacccgggcgcaaatggataaactatggttggcgctggcgggggcgaaacgagaaaattcaccgacgttagaaatcaaccatcggccattggcgacaatgggcgtcgagaaccagacgctggcggtttcttttactacgctgtgcgtcgacgcccgcagtcagcatgactatattgcgctctcacgcctctttcacacggtcatgttgtttgatgtaccagttatgacgcggttgatggagagcgaagcgcgacgctttattgcgctggtggatgagttttacgagcgccatgtcaaattagtggtgagtgcagaagtgccgctgtatgaaatttatcagggcgagcggctgaagtttgagttccagcgttgcctgtcacgtctgcaagagatgcaaagcgaagagtatttgaagcgcgagcatttggcggggtaa

SEQ ID NO: 1059 - DNA, 429 bp, Escherichia coli
atgaaaacttttacagctaaaccagaaaccgtaaaacgcgactggtatgttgttgacgcgaccggtaaaactctgggccgtctggctactgaactggctcgtcgcctgcgcggtaagcacaaagcggaatacactccgcacgtagataccggtgattacatcatcgttctgaacgctgacaaagttgctgtaaccggcaacaagcgtactgacaaagtgtactatcaccacaccggccacatcggtggtatcaaacaagcgacctttgaagagatgattgctcgccgtcctgagcgtgtgattgaaatcgcggttaaaggcatgttgccaaaaggcccgctgggtcgtgctatgttccgtaaactgaaagtttacgcgggtaacgagcacaaccacgcggcacagcaaccgcaagttcttgacatctaa

SEQ ID NO: 1060 - DNA, 393 bp, Escherichia coli
atggctgaaaatcaatactacggcactggtcgccgcaaaagttccgcagctcgcgttttcatcaaaccgggcaacggtaaaatcgtaatcaaccaacgttctctggaacagtacttcggtcgtgaaactgcccgcatggtagttcgtcagccgctggaactggtcgacatggttgagaaactggacctgtacatcaccgttaaaggtggtggtatctctggtcaggctggtgcgatccgtcacggtatcacccgcgctctgatggaatacgacgagtccctgcgttctgaactgcgtaaagctggcttcgttactcgtgacgctcgtcaggttgaacgtaagaaagtcggtctgcgtaaagcacgtcgtcgtccgcagttctccaaacgttaa

SEQ ID NO: 1061 - DNA, 639 bp, Escherichia coli
atggctgtcgctgccaacaaacgttcggtaatgacgctgttttccggtcctactgacatctatagccatcaggtccgcattgtgctggctgagaaaggtgtaagtttcgagatcgaacacgtggaaaaggacaatccgcctcaggatctgattgacctcaacccgaatcagagcgttccgaccctggtggatcgtgagctgaccctgtgggaatctcgcatcattatggaatatctggatgagcgtttcccgcatccgccactgatgcctgtttacccggtagctcgcggtgaaagccgtctgtacatgcatcgcatcgaaaaagactggtacacgctgatgaacaccatcatcaacggttcagcttctgaagccgatgccgcacgtaagcaactgcgcgaagaactgctggcgattgcgccggtcttcggtcagaagccgtacttcctgagcgatgagttcagcctggtcgattgctaccttgctcctctgctgtggcgtctgccgcaactgggcatcgagttcagcggcccgggtgcgaaagagctgaaaggctatatgacccgcgtctttgaacgtgactctttccttgcttctttaactgaagcagaacgtgaaatgcgtctgggccggagttaa

SEQ ID NO: 1062 - DNA, 498 bp, Escherichia coli
atggatttgtcacagctaacaccacgtcgtccctatctgctgcgtgcattctatgagtggttgctggataaccagctcacgccgcacctggtggtggatgtgacgctcccaggcgtgcaggttcctatggaatatgcgcgtgacgggcaaatcgtactcaacattgcgccgcgtgctgtcggcaatctggaactggcgaatgatgaggtgcgctttaacgcgcgctttggtggcattccgcgtcaggtttctgtgccgctggctgccgtgctggctatctacgcccgtgaaaatggcgcaggcacgatgtttgagcctgaagctgcctacgatgaagatgccagcatcatgaatgatgaagaggcatcggcagacaacgaaaccgttatgtcggttatcgatggcgacaagccagatcacgatgatgaaactcatcctgacgatgaacctccgcagccaccacgcggtggtcgaccggcattacgcgttgtgaagtaa

SEQ ID NO: 1063 - DNA, 783 bp, Escherichia coli
atgaacgcatttgatccgcaagctgaagattctactaccactatcgggcgcaacttgcgcagccgcccgctggcgcgtaaaaaactctccgaaatggtggaagaagagctggaacagatgatccgccgtcgtgaatttggcgaaggtgaacaattaccgtctgaacgcgaactgatggcgttctttaacgtcgggcgtccttcggtgcgcgaagcgctggcagcgttaaaacgcaaaggtctggtgcaaataaacaacggcgaacgtgcccgcgtctcacgtccttctgcggacaccatcatcggcgagctttccggcatggcgaaagatttcctttctcatcctggtgggattgcccatttcgaacaattacgtctgttctttgaatccagcctggtgcgctatgcggctgaacacgccaccgatgagcaaatcgatttgctggcaaaagcactggaaatcaacagtcagtcgctggataacaacgcggcattcattcgctcagacgttgatttccaccgcgttctggcggagatccctggtaacccaatcttcatggcgatccacgttgccctgctcgactggctaatcgccgcacgtccaaccgtggctgatcaggctctgcatgagcataacaacgttagctatcaacagcatattgcgatcgttgacgcgatccgccgtcatgatcctgacgaagccgatcgcgcgttgcaatcgcatctcaacagcgtctctgctacctggcacgccttcggtcagaccaccaacaaaaagaaataa

SEQ ID NO: 1064 - DNA, 894 bp, Escherichia coli
atggcaacgaatttacgtggcgtaatggctgcactcctgactccttttgaccaacaacaagcactggataaagcgagtctgcgccgcctggttcagttcaatattcagcagggtatcgacggtttgtacgtgggtggttcgacaggcgaagcctttgtacagagcctttcagagcgtgaacaggtactggaaatcgtcgctgaagaggcgaaaggtaagattaaactcatcgcccacgtcggttgcgtcagcaccgccgaaagccaacaacttgcggcatcggctaaacgttatggcttcgatgccgtctccgccgtcacgccgttctactatcctttcagctttgaagaacactgcgatcactatcgggcaattattgattcggcggatgggttgccgatggtggtgtacaacattccagccctgagcggggtaaaactgaccctggatcagattaacactctggttacgctgcctggtgtaggtgcgctgaaacagacctctggcgatctctatcagatggaacagatccgtcgtgaacatcctgatctggtgctctataacggttacgacgaaatcttcgcctctggtcttctggcgggcgctgatggtggtatcggtagtacctacaacatcatgggctggcgttatcagggcattgttaaggcgctgaaagaaggcgatatccagaccgcgcagaaactgcaaactgagtgcaataaagtcattgatttactgatcaaaacgggagtattccgcggcctgaaaactgtcctccattatatggatgtcgtttctgtgccgctgtgccgcaaaccgtttggaccggtagatgaaaaatatctgccagaactgaaggcgctggcccagcagttgatgcaagagcgcgggtga

SEQ ID NO: 1065 - DNA, 1491 bp, Escherichia coli
atgagtactacaacccagaatatcccgtggtatcgccatcttaaccgcgcacaatggcgggcattttccgctgcctggttgggatatctgcttgacggttttgatttcgttttaatcgccctggtactcaccgaagtacagggtgaattcgggctgacgacggtgcaggcggcaagtctgatctccgcagcctttatctctcgctggttcggcggcctgatgctcggcgctatgggtgaccgctacgggcgtcgtctggcaatggtcaccagcatcgttctcttctcggccgggacgctggcctgcggctttgcgccaggctacatcaccatgtttatcgctcgtctggtcatcggtatggggatggcgggtgaatacggttccagcgccacctatgtcattgaaagctggccaaagcatctgcgtaacaaagccagtggttttctgatttcaggcttctcagtgggggccgtcgttgccgctcaggtctatagtctggtggttccggtctggggctggagagcgctgttctttatcggcattttgccaatcatctttgctctctggctgcgtaaaaacatcccggaagcggaagactggaaagagaaacacgggggtaaagcaccagtacgcacgatggtagacattctctaccgtggtgaacatcgcattgccaatatcgtaatgacactggcggcggctactgcgctgtggttctgcttcgccggtaacctgcaaaatgccgcgatcgtcgctgtactcgggctgttatgcgccgcaatctttatcagctttatggtgcaaagtacgggcaaacgctggccaacgggcgtaatgctgatggtggtcgtgttgtttgctttcctctactcatggccgattcaggcgctgctgccaacgtatctgaaaaccgatctggcttatgacccgcatactgtcgccaatgtgctgttctttagtggctttggcgcggcggtggggtgctgcgtcggtggcttcctcggtgactggctgggaacccgcaaagcgtacgtttgtagtctgctggcctcgcagctgctgattattccggtatttgcgattggcggcgcaaacgtctgggtgctcggtctgttactgttcttccagcaaatgcttggtcagggcatctcagggattttaccgaaactgatcggcggttatttcgataccgaccagcgtgcggcggggctgggctttacctacaacgttggcgcactgggcggtgcactagctccaatcctcggcgcgttgatcgctcaacgtctggatctgggaacggcacttggctcgctctcgtttagtttaacgtttgtggtgatcctgctgattggtctggatatgccttctcgtgttcagcgttggctgcgcccggaagcattgcgtactcatgacgctatcgacggcaaaccatttagcggtgccgtgccgtttggcagcgccaaaaacgatttagtcaaaaccaaaagttaa

SEQ ID NO: 1066 - DNA, 690 bp, Escherichia coli
atgtcgttacttgcacaactggatcaaaaaatcgctgctaacggtggcctgattgtctcctgccagccggttccggacagcccgctcgataaacccgaaatcgtcgccgccatggcattagcggcagagcaggcgggcgcggtcgccattcgtattgaaggtgtggcaaatctgcaagccacgcgtgcggtggtgagcgtgccgattatcgggattgtgaagcgcgatctggaggattctccggtacgcatcacggcctatattgaagatgttgatgcgctggcgcaggcgggcgcggacattatcgccattgacggcaccgaccgaccgcgtccggtgcctgttgaaacgctgctggcacgtattcaccatcacggtttactggcgatgaccgactgctcaacgccggaagacggcctggcatgccaaaagctgggagccgaaattattggcactacgctttctggctataccacgcctgaaacgccagaagagccggatctggcgctggtgaaaacgttgagcgacgccggatgtcgggtgattgccgaagggcgttacaacacgcctgctcaggcggcggatgcgatgcgccacggcgcgtgggcggtgacggtcggttctgccattacgcgtcttgaacacatttgtcagtggtacaacacagcgatgaaaaaggcggtgctatga

SEQ ID NO: 1067 - DNA, 876 bp, Escherichia coli
atgaccacactggcgattgatatcggcggtactaaacttgccgccgcgctgattggcgctgacgggcagatccgcgatcgccgagaacttcctacgcctgccagccagactccgcaggcgctgcgtgatgccttatccgcattagtctctccgttgcaagcacatgcgcagcgggttgccatcgcttcaaccggaattattcgcgacggcagcttgctggcgctgaatccgcataatctcggtggattgttacactttccgttagtcaaaacgctggagcaacttaccaatttgccgaccattgccattaatgatgcgcaggccgcagcatgggcggagtatcaggcgctggatggcgatataaccgatatggtgtttatcactgtttccaccggcgttggcggcggtgtagtgagcggcggtaaactgcgtaccggccctggcggtctggcggggcatatcgggcatacgcttgccgatccgcatggtccagtctgcggctgtggacgcacaggttgcgtggaagcgattgcttctggtcgcggcattgcagcggcagcgcagggggagttggctggcgcgaatgcgaaaactattttcacgcgcgccgggcagggcgatgagcaggcgcagcaactgattcaccgctccgcacgtacgcttgcaaggctgatcgctgatattaaagccacaactgattgccagtgcgtggtggtcggtggcagcgttggtctggcagaagggtatctggcgctggtggaaacgtatctggcgcaggagccagcggcatttcatgttgatttactggcggcgcactaccgccacgatacaggtttacttggggctgcgctgttggcccagggagaaatattatga

SEQ ID NO: 1068 - DNA, 465 bp, Escherichia coli
atgatgatgggtgaagtacagtcattaccgtctgccggattacatcctgcgttacagggcgcgttaacgctggcattagctgccagaccgcaagaaaaagcgcctggccgttacgaattacagggcgacaatatttttatgaatgtcatgacgtttaacactcaatcgcccgttgagaaaaaagccgaattgcacgaacaatacattgatattcagctgttattaaacggtgaggaacggattctgtttggcatggctggcactgcgcgtcagtgtgaagagttccaccatgaagatgattatcagctttgcagcgccattgaaaacgagcaagccatcatcctgaaaccgggaatgttcgccgtgtttatgccaggagaaccgcataaaccgggatgcgttgttggcgaacctggtgagattaaaaaggtggtagtgaaggttaaggctgatttaatggcttaa

SEQ ID NO: 1069 - DNA, 1419 bp, Escherichia coli
atgagtcagaatgtttatcaatttatcgacctgcagcgcgttgatccgccaaagaaaccgctgaagatccgcaaaattgagtttgttgaaatttacgagccgttttccgaaggccaggccaaagcgcaggccgaccgctgcctgtcgtgcggcaacccatactgcgagtggaaatgcccggtacacaactacatcccaaactggctgaagctcgccaatgaggggcgtatttttgaagcggcggaactgtcgcaccagacaaacaccctgccggaagtttgcggacgtgtctgcccgcaagaccgtctgtgcgaaggttcctgcaccctgaacgatgagttcggtgcggtgaccatcggcaacattgagcgttatatcaacgataaagcgttcgagatgggctggcgtccggatatgtccggcgtgaaacagaccggtaaaaaagtagcgattatcggcgcaggtccggcgggtctggcgtgcgcggatgtcctgacgcgcaacggcgtaaaagcgatcgtcttcgaccgtcacccggaaattggcggcttgctgaccttcggtattccggctttcaagctggaaaaagaggtaatgacgcgccgccgtgaaatcttcaccggcatgggtattgaattcaaactcaataccgaagtgggccgcgacgtgcagttggacgatctgctgagtgattacgatgccgtgttccttggcgtcgggacttatcagtcaatgcgcggcgggctggaaaacgaagacgccgatggcgtgtacgcagcgctgccgttccttatcgccaacaccaaacagttaatgggctttggtaaaacccacgacgaaccgttcgtcagcatggaaggcaaacgcgtggtggtccttggcggtggcgacactgcgatggactgcgtgcgcacgtctgtacgccagggggcaaagcacgttacctgtgcctatcgtcgtgatgaagagaacatgccgggttcccgccgcgaagtgaaaaacgcgcgggaagaaggcgtagagttcaaattcaacgtccagccgctgggtatagaagtgaatggcaacggcaaagtcagcggcgtaaaaatggtgcgtaccgaaatgggcgaaccggatgccaaaggccgtcgccgcgcggagattgtggcaggttccgaacatatcgttccggcagatgcggtgatcatggcgtttggtttccgtccacacaacatggaatggctggcaaaacacagcgtcgagctggattcgcaggggcgcattatcgccccggaagacaacgacaacgctttccagaccagcaacccgaaaatctttgctggcggcgatatcgtccgtggttccgatctggtcgttaccgccattgccgaaggtcgcaaagcggcggacggcattatgaactggctggaagtttaa

SEQ ID NO: 1070 - DNA, 4554 bp, Escherichia coli
atgacacgcaaaccccgtcgccacgctcttactgtgcccgtgcgcagcggttcggaagtggggttcccgcagagcctgggggaggttcacgatatgttgtacgataaatcccttgagagggataactgtggtttcggcctgatcgcccacatagaaggcgaacctagccacaaggtagtgcgtactgcaatacacgcactggcccgcatgcagcaccgtggcgcgattctcgccgatggtaaaaccggtgacggttgcggcttgctgttacaaaaaccggatcgtttttttcgcatcgttgcgcaggagcgcggctggcgtttagcaaaaaactacgccgtcgggatgctcttcctgaataaagatcctgaactcgccgctgccgcacgccgcatcgttgaagaagagctgcaacgcgaaacgttgtcgattgtgggctggcgtgatgtccccactaacgaaggcgtgctgggtgaaatcgccctctcctctctgccacgcattgagcaaatttttgtgaacgccccggcaggctggcgtccgcgcgatatggagcgccgtctgtttatcgcccgccgccgcattgaaaagcgtctcgaagccgacaaagacttctacgtctgtagcctgtcgaatctggtcaatatttataaaggtctgtgtatgccggcggatctgccgcgcttctacctggacctcgctgacctgcgtctggaatcggccatctgcctgtttcaccagcgcttttccactaacaccgtaccgcgctggccgctggcgcagccgttccgctacctcgcgcataacggtgaaatcaacaccatcaccggtaaccgccaatgggcgcgtgcgcgtacctataaattccagacgccgctgatccctgacctgcacgacgccgcgccgttcgtcaacgaaaccggctctgactccagttcgatggataacatgctggaactcctgctggcaggcgggatggatatcatccgtgccatgcgtctgttagtgccacctgcctggcagaacaacccggatatggacccggaactgcgtgccttctttgactttaactccatgcatatggagccgtgggatggcccggcaggcatcgtgatgtctgacggtcgttttgccgcctgtaacctcgaccgtaacggtctgcgtccggcgcgctacgtcatcaccaaagataagctcattacctgcgcctctgaagtcggtatctgggattatcagcctgacgaagtggtcgaaaaaggccgcgtggggccaggcgaactgatggttatcgacacccgcagtgggcgtattctgcactcggcagaaaccgatgacgatctgaaaagccgccacccttataaagagtggatggagaaaaacgtccgccgtctggtaccgtttgaagatctgcccgatgaagaagtgggtagccgcgaactggacgacgacacgcttgccagctaccagaaacaatttaactacagcgcggaagagctggattcggtgatccgcgtactgggtgaaaacggtcaggaagcggtcggttcgatgggcgacgacaccccattcgccgtgctctccagccagccgcgcattatttacgactacttccgccagcagtttgctcaggtaaccaacccgccaatcgacccgctgcgcgaagcgcatgttatgtcgctcgccaccagtatcggtcgtgaaatgaacgtcttctgtgaagcagaaggccaggcgcaccgtttaagctttaaatcgccgattctgctctattccgatttcaaacagctcacgacgatgaaagaggatcactaccgcgcagatacgctggatatcacctttgacgtcactaaaaccacgctcgcagcgacggtcaaagagctgtgcgacaaagccgaaaaaatggtacgtagcggcaccgtgctgctggtgctctccgaccggaatatcgcgaaagatcgcctgccggttccggctccgatggcggttggcgcgatccagacccgtctggtcgatcaaagcctgcgttgcgatgccaacatcatcgtcgaaaccgccagcgcccgtgatccgcaccacttcgccgtgttgctgggtttcggcgcgacggctatttatccgtaccttgcctatgaaacgctgggccgtctggtagacacccacgcgattgccaaagattatcgtaccgtgatgctcaactatcgtaacggcatcaacaaaggcttgtacaaaatcatgtccaaaatgggcatctccaccatcgcctcttaccgctgctcgaaactgtttgaagcggtcggtctgcacgatgatgtcgtgggcctgtgcttccagggggcggttagccgcattgggggggctagctttgaagacttccagcaggatctgctgaatctgtcgaaacgtgcctggctggcgcgtaagcccatcagccagggcggcctgctgaaatacgtgcacggcggcgaataccacgcctacaacccggacgtggtgcgcacgctgcaacaggcggtacagagcggcgagtatagcgactatcaggaatacgcgaagctggttaatgagcgtccggcaaccacgctgcgcgatctgctggcaattacgccgggtgaaaacgcggtcaacattgctgatgttgaaccggcaagcgaactgtttaaacgcttcgataccgccgcgatgtctatcggcgcgttaagcccggaagcccacgaggcgctggcggaagcgatgaacagcatcggcggtaactcaaactccggcgaaggcggtgaagacccggcgcgctatggcactaacaaagtgtcgcgcatcaagcaggtggcttccggtcgctttggcgttactccggcgtatctggtcaatgccgacgtcattcagattaaagtcgcccagggcgcgaagccgggagaaggcggtcagttaccgggcgataaagtcacgccttacattgccaaactgcgctattcggtgccgggcgtgacgctgatctccccgccgccgcaccatgatatctactctatcgaggacttagcgcagctcattttcgacctcaagcaggttaacccgaaagcgatgatctccgtgaagctggtgtccgaaccgggcgtcggcaccatcgcgaccggcgtggcgaaagcttatgcggacttgatcaccatcgcaggctatgacggcggcaccggcgcaagtccgctttcatcggtgaaatacgcaggctgtccgtgggaactcggcctggtggaaacccaacaggcgctggttgccaacggtttacgtcataaaattcgtttgcaggttgatggcggcctgaaaacgggtgtcgatatcatcaaagcggcgattctcggcgcagaaagcttcggcttcggcactggcccgatggtggcgctcggctgtaaatatctgcgtatttgccacctgaacaactgcgcgacgggtgtagcaactcaggatgacaaactgcgtaagaatcactatcacggcctgccgttcaaggtgactaattactttgagtttatcgcccgtgaaacccgcgagctgatggcacagctgggggtaacgcgtctggtggatctgattggtcgcaccgacctgctgaaagagctggacggtttcaccgccaaacagcagaaactggcgctgtcgaagctgctggaaactgccgagccacatgcaggtaaggcactctactgcaccgaaaacaacccgccgtttgataacggcctgctgaacgcgcagttgctgcaacaggcaaaaccgtttgtcgatgaacgccagagcaaaaccttctggttcgatatccgcaacaccgatcgttctgtcggcgcatcgctttcaggctatatcgcccagacgcacggcgatcaggggctggctgccgaccctatcaaagcgtacttcaacggcaccgcaggccagagcttcggcgtgtggaacgcgggcggcgtggaactgtacctgaccggtgatgccaacgactatgtcggtaaaggcatggcgggcggcttaatcgccattcgtcctccggttggctcagccttccgcagccatgaagcgagcattatcggcaacacctgcctgtatggcgcgaccggtggtcgtctgtatgccgcaggccgcgcgggtgaacgtttcggcgtgcgtaactccggtgctatcaccgtggtagaaggcattggcgacaacggctgtgaatatatgacgggtggtatcgtctgtattctgggtaaaaccggcgttaacttcggcgcgggcatgactggcggcttcgcttacgttctcgatgaaagcggcgatttccgcaaacgcgttaacccggaactggtcgaggtcttaagcgttgacgatctggcgatccatgaagagcatctgcgtggtcttatcaccgagcatgttcagcataccggttcccaacgtggtgaagagattctggcgaactggtcaaccttcgccactaaatttgcgctggttaaaccgaagtccagtgatgtaaaagcactgctgggtcaccgtagtcgtagcgcagcagagttgcgcgtgcaggcgcagtaa

SEQ ID NO: 1071 - DNA, 930 bp, Escherichia coli
atgcagttacagaaattagtcaatatgtttggtggtgatctcacccgtcgttatgggcaaaaggtgcataagctgacgctgcacggcggttttagctgccctaaccgtgacggtaccatcgggcgtggtggctgcacattctgtaatgtggcctcgtttgccgatgaagcgcagcagcatcgttccattgccgagcaactggcgcaccaggcgaatttagttaaccgcgctaaacgctatctggcctactttcaggcgtataccagcacctttgcggaagttcaggtgctgcgttctatgtatcagcaggcggtgagccaggccaatattgtcggtttgtgtgttggtacccgcccggactgcgtgccggatgcggtgctggatctgctttgcgaatataaggaccagggttacgaagtgtggctggagctggggctacaaaccgcccacgacaaaacgctgcatcgcatcaatcgcggtcatgattttgcctgttatcagcgcacgacgcagctggcgcgtgagcgtgggctgaaggtgtgttctcacttaattgtcggcctgcctggcgaagggcaggctgaatgtttgcaaacgctggagcgagtggttgaaactggcgtggacggcataaagctgcatccgctgcatattgtgaaaggcagcattatggcgaaagcttgggaagcggggcgtttgaacggaattgaactggaggattacacgctcactgccggagaaatgattcgccatacgccaccggaagtgatctaccaccgcatttccgccagcgcccgtcgcccgacgctgcttgctccgctgtggtgcgaaaatcgatggacgggaatggtcgagctggatcgttatctgaatgaacatggcgtacagggatcggcgctgggacgtccgtggctaccttcaacggcgtag

SEQ ID NO: 1072 - DNA, 2337 bp, Escherichia coli
atgaagcaaattcgtctgctggcgcagtattatgttgacctgatgatgaagttaggtctggtgcgcttctcaatgttgctggcgctggccctcgtcgttcttgccattgtggtacaaatggcggtaaccatggtgctgcatggtcaggtcgaaagcattgatgttattcgttctatcttctttggtttgctgattacgccgtgggcggtctactttctatcggtggtcgtcgagcaactggaggagtcacgacaacgtctgtcacgactggtgcaaaaactggaggagatgcgtgagcgcgatttgagcctcaacgttcagttaaaagataatattgcccagctaaatcaggaaatcgccgttcgtgaaaaagcggaagcagaactgcaggaaaccttcggccaactgaaaattgaaatcaaagagcgcgaagagacacaaattcagctcgagcagcaatcctcattcttacgttccttccttgacgcttcacccgacctggttttttatcgtaacgaagataaagagttttccggctgtaaccgcgcgatggagctgctgaccggaaaaagcgaaaaacaactggttcacctgaaacctgctgatgtttactcaccggaagccgccgcaaaagtcattgaaaccgatgaaaaagtgttccgtcataatgtgtcactgacctatgaacagtggctggattacccggacgggcgcaaagcctgctttgaaatccgtaaagtgccgtactacgaccgcgtgggtaaacgtcacggtttgatgggctttggtcgcgacattaccgagcgtaagcggtatcaggatgcgcttgaacgcgccagccgcgacaaaacgacgtttatttccaccatcagtcacgaattgcgtacaccgctgaacggtatcgtcggcctgagccgcattctgctggataccgaactcaccgccgagcaggaaaaatatctcaaaaccatccatgtttcggccgtcacgctcgggaatatcttcaacgatattatcgacatggataagatggagcggcgtaaggtccagcttgataatcagccggttgatttcaccagcttccttgccgatctggaaaatctctccgcattgcaggcgcaacaaaaaggattgcgctttaatctggagcctacgctgccattaccgcatcaggtcattaccgacgggacgcgtttacggcagatcctgtggaacctcatcagtaacgctgtcaaattcacccagcaaggccaggttaccgtgcgcgtgcgctacgatgaaggcgatatgctgcattttgaagtggaagactctggtatcggcattccgcaggatgagctggataaaatcttcgccatgtattaccaggtgaaagacagtcatggcggtaaacctgccaccggcaccggtattggtctggccgtttctcgtcgtctggcgaaaaatatgggcggcgatattacggttaccagcgaacagggcaaaggttcaacctttacgttgacgatccacgcaccgtcggtagcagaagaggttgatgatgcgtttgatgaagacgatatgcctttaccggcgctgaatgtgctgctggtggaagacattgaactgaacgtgattgtcgcgcgctctgtgctggaaaagttaggtaacagcgttgatgtcgccatgaccggcaaggcggcgctggagatgtttaaaccgggcgaatacgacctggtgttgctggatattcagttgccagatatgaccgggttggatatctctcgtgcactgacgaagcgttatccgcgcgaggatttaccgccgctggtggccttaaccgctaacgtgctgaaagacaaacaagagtacctcaatgctggaatggatgatgtgctgagtaagccgctttctgttccggcgctaaccgcgatgatcaagaaattctgggatacccaggatgatgaggagagtacggtgacgacagaagagaacagtaaatcagaagcattgctcgatattcccatgctggaacagtatctcgaacttgtaggaccgaagctgatcaccgacgggttagcggtgtttgagagaatgatgccgggctatgtcagcgtgctggagtcgaatctgacggcgcaggataaaaaaggcattgttgaggaagggcataaaattaaaggtgcagcggggtcagtggggttacgccatctgcaacagctggggcagcaaattcagtctcctgaccttcccgcctgggaagataacgtcggtgaatggattgaagagatgaaagaagagtggcgtcacgacgtagaagtactgaaagcgtgggtggcaaaagccactaaaaaatga

SEQ ID NO: 1073 - DNA, 654 bp, Escherichia coli
atgaagaaaattggcgtaattctgagcggatgcggcgtctatgacggttctgaaattcatgaagcggtgttgacgttgttagctatttcacgcagcggtgcgcaggcggtctgctttgcaccggataagcagcaggttgatattatcaaccatttaactggtgaagcgatgacggaaacgcgcaatgtgctgattgaagcggcacgaataacgcgcggtgaaattcgtcctctggcccaggccgatgccgctgaactggatgcgttgattgtgccggggggttttggcgcggcgaagaatttaagcaattttgccagtcttggtagcgaatgcaccgttgaccgtgaattaaaggcgctggcacaagcgatgcatcaggccggaaaaccgcttggttttatgtgtattgcaccggcgatactgccgaaaattttcgatttcccgctacgtttgaccatcggtactgatatcgataccgcagaagtgctggaagagatgggcgcggagcatgtgccgtgtcctgtcgatgatatcgtggttgatgaagacaataagattgtcaccaccccggcatatatgctggcgcagaacattgcagaagcggcgagcggcattgataagctggtttcccgcgtgctggttctggctgaatga

SEQ ID NO: 1074 - DNA, 729 bp, Escherichia coli
atgagtaaaagccgcttaacggtgtttagtttcgttcgccgttttcttctgcggttaatggttgtcctcgccattttctggggcgggggcatcgcgttgtttagcgttgcgcctgttcctttctcagcggtaatggtcgagcggcaagtcagcgcctggctgcatggcaattttcgttacgtggcacattccgactgggtcagtatggatcaaatctcgccgtggatgggactggcggtgattgccgcagaagatcagaaatttcctgagcactggggcttcgatgtcgcttccattgagcaagccctggcgcacaacgagcgcaatgaaaaccgtattcgcggtgcttcaacgatttctcagcagacagccaaaaacctctttttatgggatgggcgtagctgggttcgaaaagggctggaagccggattaacgctggggatagaaacagtctggagcaaaaagcgtatcctgacggtttacctgaatatcgccgaatttggcgacggtgtgtttggcgtcgaagctgcggcacaacgttatttccacaaacccgcgagcaaacttacccggtcggaagctgcattgctggcagctgtattacctaatccacttcgtttcaaagtctccgcgccatcgggctacgtgcgtagccgtcaggcgtggattttacggcagatgtatcagttaggcggtgagccgtttatgcaacaacaccagcttgattaa

SEQ ID NO: 1075 - DNA, 633 bp, Escherichia coli
atgattcgcttatctgaacaaagtcccctgggcaccggaagacatcggaaatgttatgcgcatccggaagatgcccaacgctgtatcaagattgtctaccatcgtggcgatggtggcgataaagagatccgccgtgagttaaagtactacgcgcatcttggtcgccggttaaaagactggagtggaataccgcgctatcacggtaccgttgagacggattgcggaaccggttatgtctacgatgtgattgccgatttcgacggcaagccttccattacgctgaccgaatttgcagaacaatgccgttacgaagaagacattgcacaactgcgccagttactgaaacagctgaagcgttatttgcaggataaccgtatcgtgacgatgtcgctgaagccgcagaatatcctctgtcaccgcatcagtgagtcagaggttacccccgtcgtctgcgacaacattggtgaaagcacattgattccactggcgacctggtcgaagtggtgttgtctgcgtaagcaagagcggttatggaaacgatttatcgcccaaccggcgctggctattgccctgcagaaagatctgcaacctcgtgagagcaaaacgctggccctcacttcgcgcgaagcttaa

SEQ ID NO: 1076 - DNA, 273 bp, Escherichia coli
atgaccgtcaagcaaactgttgaaatcacaaacaagctgggcatgcatgcccggcctgcaatgaagctgtttgaattaatgcagggttttgacgctgaagtgctgttacgtaatgacgaaggcaccgaggctgaagccaacagcgttattgcgctgctgatgttggattctgccaaaggacggcagattgaagttgaagcgaccggtccacaggaagaggaagcactggccgccgttatcgccctctttaactctggttttgatgaagattaa

SEQ ID NO: 1077 - DNA, 855 bp, Escherichia coli
atggtactgatgatcgtcagcggacgttcaggttcaggtaaatctgtcgccctgcgtgcgctggaagatatgggtttttactgcgtggataaccttcccgtagtgttgttacccgatctggctcgaactctggccgatcgagagatttctgccgccgtcagcattgatgttcgtaatatgccggagtcaccagaaatattcgaacaggcgatgagtaacctgcctgacgctttctcaccgcaactactgttcctggatgccgaccgtaataccttaattcgtcgttacagtgacacgcgccgactgcatccgctttccagcaaaaacctgtcgctggaaagtgctatcgacaaagaaagcgatttgctggagcctctgcgttcgcgagcggatctgattgtcgatacctcagaaatgtccgttcacgagctggcagaaatgctgcgtacccgtctgctgggtaaacgtgaacgtgaactgaccatggtctttgagtctttcggcttcaaacacggtatccctatcgatgcagattacgtctttgacgtgcgcttcttgccgaacccgcactgggatccgaaactgcgcccaatgacaggtcttgataaacctgtcgccgcgttcctcgaccgccacacagaagtacacaattttatctaccagacgcgaagctatcttgagctatggttacctatgctggaaaccaacaaccgtagctacctgacggtcgccattggttgtaccggcgggaagcaccgttcggtgtatattgcagagcaactggcagactacttccgctcgcgcggtaaaaacgtccagtcacgccatcggacgctggaaaaacgtaaaccatga

SEQ ID NO: 1078 - DNA, 492 bp, Escherichia coli
atgacaaataatgatacaactctacagcttagcagtgttcttaacagggaatgtacgcgaagccgcgtccactgtcagagcaaaaaacgcgccctggaaatcatcagcgagctggcagcgaaacaacttagcctggcgccccaggtggtttttgaagctatcctgacgcgggaaaaaatgggcagtaccggtatcggcaatggtattgccattccgcatggcaaactggaagaagatactctgcgtgccgttggcgttttcgttcagctcgaaacacctatagctttcgatgccatcgacaaccaaccggtggacttactttttgccctgctggtgccggcagaccaaactaaaacgcacctgcatactctgtcgctggtggcgaaacgtctggcggacaaaaccatctgccgccgtttacgcgcagctcagagcgatgaagagctgtatcaaatcattacggataccgaaggtactccggatgaagcgtag

SEQ ID NO: 1079 - DNA, 288 bp, Escherichia coli
atgcagctcaacattaccggaaataacgtcgagatcaccgaggcactgcgcgaatttgttacagccaaatttgccaaacttgagcaatattttgaccgaatcaaccaggtctatgttgttctgaaagtggagaaggtcacccacacctcagatgcaacactgcatgtaaacggtggtgaaattcatgccagcgcggaaggtcaggacatgtacgctgccattgatggcttaattgataagctggcacgccagttgaccaaacataaagataaactgaaacaacactaa

SEQ ID NO: 1080 - DNA, 1434 bp, Escherichia coli
atgaagcaaggtttgcaactcaggcttagccaacaactggcgatgacgccacagctccaacaggcaattcgtctgttgcagttgtcgacgctggaacttcagcaggagctacagcaggcgctggagagcaatccgctgcttgagcaaatcgacactcatgaagaaatcgacacccgcgaaacgcaagacagtgaaacactggacaccgccgacgcgctcgaacaaaaagagatgccggaagagctgccgctcgatgccagttgggacaccatttacaccgctggtacaccatccggcaccagcggtgactacattgacgacgagctgccggtctatcagggcgaaacgacacagaccttacaggattacctgatgtggcaggtcgagttgacaccattttccgacactgaccgcgcgattgctacctctatcgtcgatgccgttgatgacaccggttatctgactgtcccgctggaagatattctcgaaagtatgggcgatgaagagattgacatcgacgaagttgaagccgtccttaagcggatccaacggtttgatccggtcggtgtggcggcaaaagatctgcgtgactgcctgctgatccaactctcccaattcgataagaccacgccatggctggaagaggccagactgatcattagcgatcatctcgatctattagccaatcacgacttccgcactttaatgcgcgtcacgcgtctgaaagaagatgtgctgaaagaagccgtcaatctgatccagtcgctcgatccgcgccccgggcagtcgatccagactggcgaacctgagtatgtcattccagatgtgctggtgcgtaagcataacggtcactggacggtagaactcaacagtgacagcattccgcgtttgcaaatcaaccagcactacgcctcgatgtgcaataacgcgcgcaacgatggtgatagccagtttatccgcagcaatctgcaggatgccaaatggttgatcaagagtctggaaagccgtaacgatacgctactgcgcgtgagtcgctgtatcgttgaacagcagcaagccttctttgagcaaggcgaagaatatatgaaaccgatggtactggctgatatcgcccaggccgtcgagatgcatgaatcgacgatatctcgcgtgaccacgcaaaaatacctgcatagtccacgaggcatttttgaactgaagtatttcttttccagtcacgtcaatactgaaggcgggggtgaagcctcttccacagcgattcgcgcactggtgaagaaattaatcgcggcggaaaacccagcgaaaccgttgagcgacagcaagttaacctctttgctgtcggaacaaggtatcatggtggcacgccgcactgttgcgaagtaccgagagtctttatccattccgccgtcaaaccagcgtaaacagctcgtttga

SEQ ID NO: 1081 - DNA, 726 bp, Escherichia coli
atggcaacattaactgcaaagaaccttgcaaaagcctataaaggccgtcgcgtggtagaagacgtcagcctgaccgtcaactccggggaaattgtcggtctgctggggccaaacggtgccggtaagaccaccactttctacatggttgttggcattgtgccgcgcgatgcgggcaacatcattattgatgatgacgatatcagtctgctgcctctgcatgcacgcgcgcgccgcggtatcggctatctgccgcaggaagcctccattttccgtcgcctcagcgtttacgataacctgatggcggtactgcaaattcgtgacgacttgtctgctgaacaacgtgaagaccgcgcgaacgagctgatggaagagtttcacattgagcacctgcgtgacagcatggggcagtcactctccgggggtgaacgtcgccgtgtagaaattgcccgcgcactggctgcgaatccgaaatttattctgctcgacgaaccgtttgccggggttgacccgatctcggttatcgacattaaacgcatcattgagcacctgcgcgacagcggcctgggcgtgctgatcactgaccacaacgtgcgtgaaacactggcggtttgtgaacgcgcttatatcgtcagtcaggggcatttgatcgcccacggcacgcctacagaaatcttacaagacgaacacgttaagcgtgtataccttggggaagacttcagactctga

SEQ ID NO: 1082 - DNA, 558 bp, Escherichia coli
atgaaattcaaaacaaacaaactcagccttaatcttgtgcttgccagctcacttctggccgccagcattccggcatttgccgtaaccggagacactgatcagccgatccacattgaatcggaccagcaatctcttgatatgcaaggcaacgtggttacctttaccggcaatgtcatcgtcacccagggcaccatcaaaattaatgccgacaaagtggtcgttacccgtccgggcggcgaacaaggtaaagaagtgattgacggctacggtaaaccggcaacgttctaccagatgcaggacaacggtaaacccgttgaaggtcacgcttcacagatgcactacgaactggcaaaagattttgtcgttctgacgggtaatgcttatctgcagcaggtcgatagcaacattaagggcgataagatcacttacctggtgaaagagcagaaaatgcaggctttcagcgacaaaggcaagcgcgtaaccaccgttctggtgccgtcgcagctgcaggacaaaaacaataaaggccagaccccggcacagaagaagggtaattaa

SEQ ID NO: 1083 - DNA, 576 bp, Escherichia coli
atgagtaaagccagacgttgggttatcattgtgctatcactggcggttctggtgatgatcggcattaatatggccgaaaaagacgataccgcccaggtggtcgtcaacaacaatgatcccacctataaaagcgagcatacggacacgctcgtctataacccagaaggggcactaagctatcgattgattgctcaacacgttgaatattattccgatcaggccgtttcgtggtttacgcagccggtacttaccacgtttgataaggataaaatcccgacatggtccgtaaaagcagataaagccaagctgaccaatgaccggatgctctatttatatggacacgttgaagtcaatgcactcgtgccggactctcaacttcgcagaatcacgacggataacgcgcagatcaatctggtgacgcaggatgttacctctgaagacctcgtcacgttatacggaacaacatttaactccagcggtctgaaaatgcgcggcaacttacgcagcaagaacgccgagctgattgaaaaggttagaacatcctatgaaattcaaaacaaacaaactcagccttaa

SEQ ID NO: 1084 - DNA, 567 bp, Escherichia coli
atgagcaaagcaggtgcgtcgcttgcgacctgttacggccctgtcagcgccgacgttatggcaaaagcagagaacattcgtctgctgatcctcgacgttgatggcgtactgtcagatggcctgatttatatgggcaataacggcgaagagctgaaagcgttcaatgttcgtgacggttatggcattcgttgtgcgctcacctctgatattgaagtcgctatcattaccgggcgaaaggctaaactggtagaagatcgttgtgccacattggggatcactcacttgtatcaggggcagtcaaacaaactgatcgcctttagcgatctgctggaaaaactggcgattgccccggaaaatgtggcttatgtcggcgatgatctcatcgactggccggtaatggaaaaagtgggtttaagcgtcgccgtggccgatgcgcatccactgttgatcccgcgcgccgattacgtaacgcacattgctggcggtcgtggcgcagtgcgagaagtttgcgacttattactcctggcgcagggcaaactggatgaagccaaagggcaatcgatatga

SEQ ID NO: 1085 - DNA, 987 bp, Escherichia coli
atgtcgcacgtagagttacaaccgggttttgactttcagcaagcaggtaaagaagtcctggcgattgaacgtgaatgcctggcggagcttgatcaatacatcaatcagaatttcacgcttgcctgtgaaaagatgttctggtgtaaagggaaagttgtcgtcatggggatgggcaaatcggggcacatcgggcgcaaaatggcagcaacatttgccagcaccggtacaccttcatttttcgtccatcctggcgaagccgcgcatggtgatttaggcatggtcaccccacaggatgtggtgattgctatctctaactcaggtgaatccagcgaaatcacggccttaattccagtgcttaagcgtcttcacgtaccgttaatctgcatcaccggtcgcccggagagcagcatggcgcgcgccgcagatgtgcatctgtgtgttaaagtggcgaaagaagcctgtccgttagggctggcaccgaccagcagcacaaccgccacgctggttatgggcgatgccctcgctgtcgcgctgttaaaagcacgcggctttactgctgaagattttgcgctctcacacccaggcggcgcactgggtcgtaaacttctgctgcgcgtaaacgatattatgcatacgggcgatgagatcccgcatgttaagaaaacggccagtctgcgtgacgcattgctggaagttacccgcaaaaatcttggtatgactgtcatttgcgatgacaatatgatgattgaaggcatctttaccgacggtgatttacgccgtgtcttcgatatgggcgtggatgttcgtcagttaagtattgccgatgtgatgacgccggggggaatacgcgtgcgcccaggcattctggccgttgaggcactgaacttaatgcagtcccgccatatcacctccgtgatggttgccgatggcgaccatttactcggtgtgttacatatgcatgatttactgcgtgcaggcgtagtgtaa

SEQ ID NO: 1086 - DNA, 978 bp, Escherichia coli
atgcttttagctacggcactgttaattgttggtttacttttggtcgtttacagtgccgaccgcctggtttttgccgcgtctattctttgccgaacctttggcatcccgccgttgatcatcggcatgacggtggtcagtattggtacatcgttaccagaaatcatcgtctcgcttgccgcgtctttgcacgaacaacgcgatttagccgttggtacagccctcggctcaaacattatcaatatattgctgatcctcggtctggctgcgctggttcgtccttttaccgtccattctgatgttctacgccgtgaattacccttaatgttgttggtcagcgtggtggccggttccgtactctatgacggacaacttagtcgcagcgatggtatctttctcctctttctggctgtgctatggctgctgttcattgttaaacttgcacgtcaggctgaacgtcaggggactgacagcctgaccagagagcagcttgcagagctgccgcgtgaaggtggattgcccgtcgcatttttatggctcggcatcgcactgatcattatgccagtggccacgcggatggtagttgataacgccacggtgctggcgaattactttgccatcagcgagttgacgatgggtctgacggcaattgctatcggaaccagcctgccggaactggcaaccgcaatagcgggggttcgcaaaggtgaaaacgacattgcggtcggaaatatcattggcgcaaacatttttaatattgtcatcgtgttgggtttacccgcgctgataacgccaggagagattgatccactggcgtacagtcgtgactacagcgtgatgttgctggtgagcattatttttgcgttgctgtgctggcggcgctccccgcaaccgggccgtggtgtaggggtattattaactggcggatttatcgtatggctggcgatgttgtactggttatcgccaatactcgttgaataa

SEQ ID NO: 1087 - DNA, 810 bp, Escherichia coli
atggagcagtctgtggcgaatttagtcgatatgcgcgatgtcagttttacgcgtggcaatcgctgcatcttcgataatatttccctgaccgtgccgcgagggaagatcacggcgatcatggggccatcgggcatcggtaaaacgacgctactccgtctgattggcgggcaaatcgcaccagatcatggtgagatccttttcgatggtgagaatattccggcgatgtctcgttcgcgcctgtatacagtgcgcaaacggatgagcatgttatttcagtccggggcgttgttcactgatatgaacgtatttgacaacgtcgcctatccactgcgggaacatacccaacttcccgcgccattgttgcatagtacggtgatgatgaagctggaggccgtggggctgcgtggagcggctaaacttatgccttctgaactttccggtgggatggcgcggcgtgcagcgctggctcgtgcgattgcgctggagccggatctcatcatgtttgatgagccctttgttgggcaagatcccattaccatgggcgtgctggtgaagctgatttctgagctgaacagcgcgctgggcgtgacttgtgtggtggtttctcacgatgtgccggaagtgttaagtattgcggatcacgcctggatcctggcggacaaaaaaattgtcgctcatggcagtgcccaggcgttgcaggcgaatcctgatccgcgcgtacgtcagtttctggacgggatagctgacgggcctgttccgttccgctatcctgccggcgattatcacgctgatcttttaccagggagttaa

SEQ ID NO: 1088 - DNA, 783 bp, Escherichia coli
atgctgttaaatgcgctggcgtcgctcggacataaagggattaaaaccctgagaacgttcgggcgggccgggttaatgttattcaatgcgctggtcggcaaaccggaatttcgcaaacatgcaccgctgctggtgcgccagctctataatgtcggcgtcctgtcgatgctgattattgtggtttctggcgtgttcatcggaatggtgttggggctgcaaggttatctggttctgaccacttatagtgcggaaaccagtctgggtatgctggtggcgttatcgctactgcgtgaactggggccggtggttgccgcgttgttgtttgccgggcgtgctggttcggcgctaaccgcagaaatcggcctgatgcgcgctacagagcaactctccagtatggagatgatggctgtggatccgctgcgtcgggttatttctccccgtttctgggctggagttatttcattaccactgttgacggttatcttcgtcgccgtggggatctggggcggatcgctggtcggcgtcagttggaaaggcattgatagtgggttcttctggtcggcaatgcaaaatgccgtcgactggcgtatggatctcgtcaactgtctgattaagagcgtggtgttcgccatcacggtgacgtggatttcgttgtttaacggctacgacgccatcccgacgtctgccgggattagccgggcaaccactcgcaccgttgtccactcgtctctggctgttctggggctggattttgtgctgaccgcattgatgtttgggaattga

SEQ ID NO: 1089 - DNA, 552 bp, Escherichia coli
atgcaaacgaaaaaaaatgaaatttgggtgggtatctttttattagcagcactgcttgcggcgctgtttgtttgcctgaaggcagcgaacgtgacgtctatacgtactgaaccgacctatacgctttatgcgacgttcgataacattggcggcctgaaagcccgctctccggtcagcattggtggcgttgttgtgggccgggtggcggatattacgctggacccgaaaacctatctgccgcgcgtaacgctggaaattgaacaacgttataaccacattcctgataccagttcgctgagcattcgtacttccggcctgctgggggaacaatatctggcattaaacgtcggttttgaagacccggaactggggactgctatcctgaaggatggcgatacaattcaggacaccaagtctgcgatggtgctggaagatctcattggtcagttcctttacggtagtaaaggcgatgacaataagaatagtggcgatgcgccagctgctgcgccaggtaataatgaaaccactgaacctgtgggtacaacgaaataa

SEQ ID NO: 1090 - DNA, 636 bp, Escherichia coli
atgtttaaacgtttaatgatggtcgctttgctggtgattgcaccgctgagtgcggcaaccgcggcagaccagaccaatccgtataagctgatggacgaggcggcgcagaaaacgttcgatcgcctgaagaatgagcaaccgcaaattcgggccaacccggattatctgcgtaccattgttgatcaggaactgttgccatacgtacaggtgaaatacgccggtgcgctggtgctgggccagtattacaagagtgcgaccccagctcaacgtgatgcttactttgccgctttccgtgagtacctgaagcaggcttacggtcaggcgctggcgatgtatcacggtcaaacctatcagattgcgccagaacagccgctgggtgataaaaccattgtgccgattcgcgttaccattattgacccgaatggccgcccgccggtgcgtctggacttccagtggcgtaaaaactcccagacgggcaactggcaggcttacgacatgattgctgaaggcgtcagtatgatcaccaccaaacaaaacgagtggggaacgctgctgcgtaccaaaggtatcgacggcctgactgcgcaactgaaatcgatttctcaacagaaaatcactctggaagagaaaaaataa

SEQ ID NO: 1091 - DNA, 294 bp, Escherichia coli
atgagcgagtcactgagctggatgcagacgggtgacacgctggcgttatccggagagctggatcaggacgttctgctaccgctttgggaaatacgtgaggaagcggtgaaggggattaccagcatcgatcttagccgtgtgtctcgcgtggatacgggtggactggcactgctgctccatcttatcgatctggcgaaaaagcagggcaacaatgtgacgcttcagggggtaaacgacaaagtgtataccctggcgaaattgtataatttgcctgctgatgttctgcctcgttaa

SEQ ID NO: 1092 - DNA, 270 bp, Escherichia coli
atgattgaagatcccatggaaaataatgaaattcagagcgtgttgatgaacgctctctccctccaggaagtccacgtttccggcgatggcagccactttcaggttattgccgtgggtgagttgtttgacggcatgagtcgggttaaaaaacagcagacggtctatggcccgctgatggaatatattgcggataaccgcattcatgctgtgtcgatcaaagcgtatacccctgcggagtgggcgcgcgatcgcaaactgaacggcttttga

SEQ ID NO: 1093 - DNA, 1260 bp, Escherichia coli
atggataaatttcgtgttcaggggccaacgaagctccagggcgaagtcacaatttccggcgctaaaaatgctgctctgcctatcctttttgccgcactactggcggaagaaccggtagagatccagaacgtcccgaaactaaaagacgtcgatacatcaatgaagctactaagccagctgggtgcgaaagtagaacgtaatggttctgtgcatattgatgcccgcgacgttaatgtattctgcgcaccttacgatctggttaaaaccatgcgtgcttctatctgggcgctggggccgctggtagcgcgctttggtcaggggcaagtttcactgcctggcggttgtacgatcggcgcacgtccggttgatctacacatttctggcctcgaacaattaggcgcgaccatcaaactggaagaaggttacgttaaagcttccgtcgatggtcgtttgaaaggcgcacatatcgtgatggataaagtcagcgttggcgcaacggtgaccatcatgtgtgctgcaacccttgcggaaggcaccacgattattgaaaacgcagcgcgtgaaccggaaatcgtcgataccgcgaacttcctgattacgctgggtgcgaaaattagcggtcagggcaccgatcgtatcgtcatcgaaggtgtggaacgtttaggcggcggtgtctatcgtgtgctgccggatcgtatcgaaaccggtactttcctggtggcggcggcgatctctcgcggcaaaattatctgccgtaacgcgcagccagatactctggacgccgtgctggcgaaactgcgtgacgctggagcggacatcgaagtcggcgaagactggattagcctggatatgcatggcaaacgtccgaaggctgttaacgtacgtaccgcgccgcatccggcattcccgaccgatatgcaggcccagttcacgctgttgaacctggtggcagaagggaccggattcatcaccgaaacggtctttgaaaaccgctttatgcatgtgccagagctgagccgtatgggcgcgcacgccgaaatcgaaagcaataccgttatttgtcacggtgttgaaaaactttctggcgcacaggttatggcaaccgatctgcgtgcatcagcaagcctggtgctggctggctgtattgcggaagggacgacggtggttgatcgtatttatcacatcgatcgtggctacgaacgcattgaagacaaactacgcgctttaggtgcaaatattgagcgtgtgaaaggcgagtaa

SEQ ID NO: 1094 - DNA, 279 bp, Escherichia coli
atggaaagtaatttcattgactggcatcccgctgacatcattgcaggtttgcgcaagaagggaacgtcaatggcggcggagtctcgcagaaatggtttgagttcctcaacgctggcgaacgcattatcacgcccatggccgaaaggagagatgattattgcgaaagccctgggaactgacccctgggttatctggccatcacgctaccatgatccgcagacccatgagtttatcgacagaacgcagttgatgcgtagctacactaaaccgaaaaaatga

SEQ ID NO: 1095 - DNA, 972 bp, Escherichia coli
atgaatttagaaaaaatcaatgagttaaccgcgcaagatatggcgggtgttaatgcggcaatccttgagcagcttaattccgacgtccaactgatcaatcagttaggctattacatcgtcagcggcggcggtaaacgtattcgtccgatgattgctgtactggctgcacgagctgttggctatgagggaaatgcgcatgtcaccattgctgccctgatcgagtttatccacacggcgactctgctacacgacgacgttgtggatgaatcagatatgcgcaggggtaaagctaccgccaacgccgcatttggcaatgccgccagcgtgctggtaggcgattttatttatacccgcgcgttccagatgatgaccagcctcggttcactcaaagtgctggaagtcatgtcagaagccgtaaacgtcatcgcagaaggtgaagttctgcaactgatgaacgttaacgatccggacatcactgaagaaaactacatgcgcgttatctacagcaagactgcgcgtctgtttgaggctgccgcgcagtgttccgggattctggctggctgtacgccggaggaggagaaaggcctacaagattatgggcgctatctcggcactgctttccagttgatcgacgatttactcgattacaatgccgatggcgaacagttaggtaaaaacgtcggcgacgatctgaacgaaggtaaaccgacgctgccgctgctgcatgcgatgcatcatggcacaccagaacaggcacagatgattcgtaccgccatcgaacagggtaacggtcgccatcttctggaaccggttctggaagcaatgaacgcttgtggatctcttgaatggacgcgtcagcgtgccgaggaagaagcagacaaagccatcgcagcgttacaggtgctcccggacaccccgtggagagaagcactcgtcggcctcgcgcacatcgctgttcaacgcgatcgttaa

SEQ ID NO: 1096 - DNA, 312 bp, Escherichia coli
atgtacgcggttttccaaagtggtggtaaacaacaccgagtaagcgaaggtcagaccgttcgcctggaaaagctggacatcgcaactggcgaaactgttgagttcgctgaagtgctgatgatcgcaaacggtgaagaagtcaaaatcggcgttcctttcgttgatggcggcgtaatcaaagctgaagttgttgctcacggtcgtggcgagaaagttaaaatcgttaagtttcgtcgtcgtaaacactatcgtaagcagcagggccatcgtcagtggttcactgatgtgaaaattactggcatcagcgcctaa

SEQ ID NO: 1097 - DNA, 258 bp, Escherichia coli
atggcacataaaaaggctggcggctccacacgtaacggtcgcgattcagaagctaaacgcctgggcgttaagcgtttcggtggcgaatccgttctggcgggtagcatcatcgttcgtcaacgtggtaccaaattccacgctggcgctaacgtaggttgcggtcgtgaccacactctgtttgctaaagcagacggtaaagtgaaattcgaagttaaaggcccgaaaaaccgtaaatttatcagcatcgaagctgaataa

SEQ ID NO: 1098 - DNA, 966 bp, Escherichia coli
atgaagcagcaggcaggcattggcattcttttggcgctcaccacagcaatttgctggggggcgttgccaatcgcaatgaagcaggtgctggaggtgatggaacctccgacaatcgtgttttaccgtttcttgatggcgagtattggccttggtgccattcttgcggtgaagaagcggttgccgccattacgcgtgtttcgtaagccacgctggttgattttgttggcagtggcgaccgccgggctgtttgggaacttcatcctgttcagctcatccttgcaatacttgagtccgaccgcttcgcaggtgattgggcaactctcgccagttggcatgatggttgccagcgtatttatcctgaaagagaaaatgcgcagtactcaggttgtaggggcattgatgctcctgagcggtctggtgatgttttttaacaccagtctggtcgagatatttacaaagctcaccgattacacctggggagttatctttggggtcggtgcggcgacggtttgggtgagttatggcgtggcgcaaaaggttttattgcgtcggctggcctcaccgcagatcctgtttttactgtacactttatgtacaattgcgctcttccctctggcagatcctggagtgatagcgcagcttagccactggcagctcgcatgtttaattttttgcggactgaatacattggtaggatatggcgccctggcggaagcgatggctcgctggcaggcagcgcaggtgagcgcgatcatcacgctcaccccactgtttacgctgtttttttcagatcttttatcactggcctggcccgatttcttcgccagaccgatgttaaaccttttaggttatctcggtgcgtttgtcgtggttgcgggcgcgatgtattccgccattggtcatcgtatttggggcggattacgtaagcatacaacggtggtatcgcaaccccgcgcaggcgaatga

SEQ ID NO: 1099 - DNA, 1173 bp, Escherichia coli
atgaagtttgttgatgaagcatcgattctggtcgttgcaggtgatggcggtaatggttgcgtgagcttccgccgcgaaaagtatattccgaaaggcggcccggatggcggcgacggcggtgatggtggtgacgtatggatggaagccgacgagaacctgaacacgcttatcgattatcgttttgaaaaatctttccgtgcagagcgcggtcagaacggtgcaagccgagactgtaccggtaagcgcggtaaagacgtcacgattaaagtaccggtaggtacgcgtgtaatcgaccagggtaccggtgaaaccatgggcgatatgaccaaacacggtcagcgtctgctggttgctaagggcggctggcacggtctgggcaatacccgtttcaagtcgtcagttaaccgtacaccacggcagaaaactaacggtacgccgggcgataagcgtgagctgctgctggagctgatgctgctggctgacgtcggtatgttggggatgccaaacgcgggtaaatcgacctttattcgtgcggtatcggcggctaaaccgaaagtggcggattatccgtttaccactctggtaccaagcctgggcgtggtgcgtatggacaacgaaaagagcttcgttgttgccgatattccaggactgattgaaggcgctgcagaaggcgcaggtctgggcattcgcttcctgaagcacctggaacgttgccgcgtcctgttgcacctcatcgatatcgatccgattgacggcaccgatccggttgaaaacgcgcgtattattatcagtgagctggaaaaatacagccaggatctggcggcgaaaccgcgttggttagtcttcaacaagatcgatctgctggataaggtagaagccgaagagaaagcgaaagcgatcgctgaagcgctgggctgggaagataaatattatctgatctctgcggcgagcggactgggcgtgaaagatctctgctgggatgtgatgacctttatcattgaaaacccggtcgtgcaggctgaagaagcgaaacagccagagaaagtcgaattcatgtgggatgattatcaccgtcagcagcttgaagagattgctgaagaggatgatgaggactgggatgacgactgggacgaagacgacgaagaaggcgttgagttcatttacaagcgttaa

SEQ ID NO: 1100 - DNA, 1434 bp, Escherichia coli
atgcgattttccagatttatcatcggattgaccagctgtatagcgttcagtgttcaggccgcaaatgttgatgagtacattactcaactccccgcaggtgccaaccttgccctgatggtgcaaaaagtcggcgcgtcggcccccgctattgattaccacagtcagcagatggcgctacccgccagtacgcagaaagtgattactgcgctggcggcgttgattcaactcggccccgattttcgttttaccacgacgcttgaaaccaaaggcaatgtggaaaacggcatacttaagggtgacttagtagcgcgatttggtgccgatccgacgttaaaacgtcaggatattcgcaatatggtcacgactttgaaaaaatctggcgtcaaccaaatcgatggcaatgtgttgatagatacctccattttcgccagccacgataaagcccccggctggccatggaatgacatgacacaatgctttagcgctccgcctgccgccgccatagttgaccgcaactgtttctccgtctcgctctacagtgccccaaaacctggtgatatggcttttatacgcgtggcatcttattaccccgttacgatgttcagccaggtacgcaccctcccccgtggttctgccgaagcgcaatactgcgaactggatgtcgtaccaggtgacctgaaccgctttacgctaacgggatgcctgccacaacgttctgagccgctcccgttggcttttgccgtgcaggatggtgccagctatgccggggcaattctgaaagatgagttaaaacaggcgggtatcacctggagcggaacactgctgcgccagactcaggttaacgaacctggaacggtagttgccagtaaacagtcggccccgctgcacgatctgcttaagattatgctgaaaaagtcggacaacatgattgccgatacggttttccgcatgatcggccatgcgcgcttcaatgtgcctggaacatggcgggccggatcggacgccgtgcgtcagatcctgcgccagcaagccggtgtcgatatcggaaacaccattattgccgatggttcagggctttcgcggcataacctgattgcccccgccaccatgatgcaggtgctgcaatatattgcccaacacgacaatgaacttaactttatctccatgctgccgctggcgggctatgacggctctttgcagtaccgtgcaggtctgcatcaggcgggcgtggatggaaaagtctcagcgaaaaccggttcgttgcagggggtatataacctggcgggattcattaccacagcgagcgggcaacgaatggcgtttgtgcaatatctttctggctatgcagtagaaccggcggatcagcgtaatcgccgtattccgttagtgcgttttgaaagccgtttgtataaagatatttatcagaataattag

SEQ ID NO: 1101 - DNA, 477 bp, Escherichia coli
atgcaagctattccgatgaccttacgcggcgctgaaaaattacgcgaagagctggattttctgaaatctgtgcgccgtcctgaaatcattgctgctatcgcggaagcgcgtgagcatggcgacctgaaagaaaacgccgaataccacgcagctcgtgagcagcagggtttttgcgaaggccgtatcaaagatatcgaagccaagctgtcgaacgcgcaggtaattgatgtcaccaaaatgccaaacaatggtcgcgtgatttttggcgctaccgtgacggttttgaatctggattctgatgaagaacagacctatcgcatcgtaggcgatgacgaagctgactttaaacaaaacctgatttctgtaaactcgcctattgctcgtggcctgatcggcaaagaagaagatgatgttgtggtcatcaaaacgccgggcggcgaagtagaatttgaagtaattaaggtggaatacctgtaa

SEQ ID NO: 1102 - DNA, 294 bp, Escherichia coli
atgaatctgagtactaaacaaaaacagcacctgaaaggtctggcacatccgctcaagccagttgttctgcttggcagtaatggtttgaccgaaggggtgctggccgagattgaacaagcgttagagcaccatgaactcatcaaggtgaaaatcgccaccgaagatcgcgaaactaaaaccttgatcgtggaagctatcgtgcgcgaaaccggcgcctgtaatgtacaggtcatcggtaaaacgctggtgctttatcgcccaactaaagaacgtaaaatctcgctgccacgctaa

SEQ ID NO: 1103 - DNA, 630 bp, Escherichia coli
atgacaggtaagaagcgttctgccagctccagccgctggcttcaggaacactttagcgataaatatgttcaacaggcacagaaaaaggggttacgttcccgtgcctggtttaaacttgatgaaatacagcaaagtgacaaactctttaaaccgggaatgacggttgtcgaccttggtgcagctccgggtggttggtcacaatatgtggtcacccaaattggcggcaaaggtcgcatcatcgcttgcgatcttttacctatggatcctatcgttggtgtggactttcttcagggcgattttcgtgatgaactggtgatgaaagcactgctggagcgcgttggcgacagcaaagtccaggttgtcatgtccgatatggcaccaaacatgagcggaacaccggcggtggatatcccccgtgccatgtatctggtggaactggcgctagaaatgtgtcgtgatgtattagcgccaggtggcagttttgtagtgaaggtgttccagggcgaaggtttcgatgagtatctaagggaaattcgctccctgtttacgaaggtcaaagttcgtaagccggactcttctcgtgcacgttcgcgggaagtgtatattgtagcgaccgggcgtaaaccctaa

SEQ ID NO: 1104 - DNA, 1944 bp, Escherichia coli
ttgagtgacatggcgaaaaacctaatactctggctggtcattgccgttgtgctgatgtcagtattccagagctttgggcccagcgagtctaatggccgtaaggtggattactctaccttcctacaagaggtcaataacgaccaggttcgtgaagcgcgtatcaacggacgtgaaatcaacgttaccaagaaagatagtaaccgttataccacttacattccggttcaggatccgaaattactggataacctgttgaccaagaacgtcaaggttgtcggtgaaccgcctgaagaaccaagcctgctggcttctatcttcatctcctggttcccgatgttgttgctgattggtgtctggatcttcttcatgcgtcaaatgcagggcggcggtggcaaaggtgccatgtcgtttggtaagagcaaagcgcgcatgctgactgaagatcagatcaaaacgacctttgctgacgttgcgggctgcgacgaagcaaaagaagaagttgctgaactggttgagtatctgcgcgagccgagccgcttccagaaactcggcggtaagatcccgaaaggcgtcctgatggtcggtcctccgggtaccggtaaaacgctgctggcgaaagcgattgcaggcgaagcgaaagttccgttctttactatctccggttctgacttcgtagaaatgttcgtcggtgtgggtgcatcccgtgttcgtgacatgttcgaacaggcgaagaaagcggcaccgtgcatcatctttatcgatgaaatcgacgccgtaggccgccagcgtggcgcaggtctgggcggtggtcacgatgaacgtgaacagactctgaaccagatgctggttgagatggatggcttcgaaggtaacgaaggtatcatcgttatcgccgcgactaaccgtccggacgttctcgacccagcgctgctgcgtcctggccgtttcgaccgtcaggttgtggttggcttgccagatgttcgcggtcgtgagcagatcctgaaggttcacatgcgtcgcgtaccattggcacccgatatcgacgcggcaatcattgcccgtggtactcctggtttctccggtgctgacctggcgaacctggtgaacgaagcggcactgttcgctgctcgtggcaacaaacgcgttgtgtcgatggttgagttcgagaaagcgaaagacaaaatcatgatgggtgcggaacgtcgctccatggtgatgacggaagcgcagaaagaatcgacggcttaccacgaagcgggtcacgcaattatcggtcgcctggtgccggaacacgatccggtgcacaaagtgacgattatcccacgcggtcgtgcgctgggtgtgactttcttcttgcctgagggcgacgcaatcagcgccagccgtcagaaactggaaagccagatttctacgctgtacggtggtcgtctggcggaagagatcatctacgggccggaacatgtttctaccggtgcgtccaacgatattaaagttgcgaccaacctggcacgtaacatggtgactcagtggggcttctctgagaaattgggtccactgctgtacgcggaagaagaaggtgaagtgttcctcggccgtagcgtagcgaaagcgaaacatatgtccgatgaaactgcacgtatcatcgaccaggaagtgaaagcactgattgagcgtaactataatcgtgcgcgtcagcttctgaccgacaatatggatattctgcatgcgatgaaagatgctctcatgaaatatgagactatcgacgcaccgcagattgatgacctgatggcacgtcgcgatgtacgtccgccagcgggctgggaagaaccaggcgcttctaacaattctggcgataatggtagtccaaaggctcctcgtccggttgatgaaccgcgtacgccgaacccgggtaacaccatgtcagagcagttaggcgacaaataa

SEQ ID NO: 1105 - DNA, 849 bp, Escherichia coli
atgaaactctttgcccagggcacttcactggaccttagccatcctcacgtaatggggatcctcaacgtcacgcctgattccttttcggatggcggtacgcataactcgctgatagatgcggtgaaacatgcgaatctgatgatcaacgctggcgcgacgatcattgacgttggtggcgagtccacgcgcccaggagcggcggaagttagcgttgaagaagagttgcaacgtgttattcctgtggttgaggcaattgctcaacgcttcgaagtctggatctcggtcgatacatccaaaccagaagtcatccgtgagtcagcgaaagttggcgctcacattattaacgatatccgctccctttccgaaccaggggctctggaggcagctgcagaaaccggtttaccggtttgtctgatgcatatgcagggaaatccaaagaccatgcaggaagccccgaagtatgacgatgtctttgcagaagtgaatcgctattttattgagcaaatagcacgttgcgagcaggcgggtatcgcaaaagagaaattgttgctcgaccccggattcggtttcggtaaaaatctctcccataactattcattactggcgcgcctggctgaatttcaccatttcaacctgccgctgttggtgggtatgtcacgaaaatcgatgattgggcagctgctgaacgtggggccgtccgagcgtctgagcggtagtctggcttgtgcggtcattgccgctatgcaaggcgcgcatatcattcgtgttcatgacgtcaaagaaaccgtagaagcgatgcgggtggtggaagccactctgtctgcaaaggaaaacaaacgctatgagtaa

SEQ ID NO: 1106 - DNA, 1338 bp, Escherichia coli
atgagtaatcgtaaatatttcggtaccgatgggattcgtggtcgtgtaggggatgcgccgatcacccctgattttgtgcttaagctgggttgggccgcgggtaaagtgctggcgcgccacggctcccgtaagatcatcattggtaaagacacgcgtatttctggctacatgctggagtcagcactggaagcgggtctggcggctgcgggcctttccgcactcttcactggtccgatgccaacaccggccgtggcttatctgacgcgtaccttccgcgcagaggccggaattgtgatatctgcatcgcataacccgttctacgataatggcattaaatttttctctatcgacggcaccaaactaccggatgcagtagaagaggccatcgaagcggaaatggaaaaagagatcagctgtgttgattcggcagaactgggtaaagccagccgtatcgttgatgctgcgggtcgctatatcgagttttgcaaagccacgttcccaaacgaacttagcctcagtgaactgaagattgtggtggattgtgcaaacggtgcgacttatcacatcgcgccgaacgtgctgcgtgaactgggagcgaacgttatcgctatcggttgtgagccgaacggtgtaaacatcaatgccgaagtgggggctaccgacgttcgcgcgctccaggctcgtgtgctggctgaaaaagcggatctcggtattgccttcgacggcgacggcgatcgcgtgattatggttgaccatgaaggcaataaagtcgatggcgatcagatcatgtatatcatcgcgcgtgaaggtcttcgtcagggccagctgcgtggtggcgctgtgggtacattgatgagcaacatggggcttgaactggcgctgaaacagttaggaattccatttgcgcgcgcgaaagtgggtgaccgctacgtactggaaaaaatgcaggagaaaggctggcgtatcggtgcagagaattccggtcatgtgatcctgctggataaaaccactaccggtgacggcatcgttgctggtttgcaggtgctggcggcgatggcgcgtaatcatatgagcctgcacgacctttgcagcggcatgaaaatgttcccgcaaatcctggtaaacgtgcgttacaccgcaggtagcggcgatccgctggagcatgaatcagtcaaagctgtgaccgcagaagttgaagcggcgctgggtagccgtggacgtgtgctgttgcgtaaatccggcaccgaaccgttaattcgcgtgatggtggaaggcgaagacgaagcgcaggtgactgaatttgcacaccgcatcgccgatgcagtaaaagccgtttaa

SEQ ID NO: 1107 - DNA, 333 bp, Escherichia coli
atgtacgaagctcttttagtagttttccttattgtggcaattggccttgttggtctgatcatgctgcagcaaggtaaaggcgctgatatgggagcctccttcggagcaggcgcttccgctacgctgtttggttcaagtggttctggtaacttcatgacccgcatgacagcgctgctggcaacgttattcttcatcatcagtctggtgctgggtaacatcaatagcaacaaaaccaataaaggtagcgaatgggaaaacctgagtgcgccggcgaaaaccgaacaaactcagccagctgctccggctaagccgaccagcgatatcccgaactaa

SEQ ID NO: 1108 - DNA, 1518 bp, Escherichia coli
atggttcagcgattgctgttcttcgttctgaccatcctggttgttaaacgtatatcatcccttccgcttcgcctgcttattgccgtaccatttgtgttactgattgcggcagatatgagtattagcctctattcatggtgtatctttggtacaactttcaatgatggatttgcgattagtgtgctgcagagtgatccggatgaagttgtcaaaatgctgggaatgtatatcccttatctatgtgcttttgcctttttatcccttcttttttttgcagtaataataaaatatgatgtttccttgccgacaaaaaaagtgacaggaatattattgctgattgtcatttcgggcagtttattttccgcttgtcaatttgcttataaagatgcaaaaaataaagaggcgttcagtccatatatactagcgtcgcgatttgctacctatacgccgtttttcaatctcaattattttgctttagcagcgaaagagcatcaaagattactctcaattgcaaacacggtgccgtattttcaactatcagtcagggatacaggtattgatacctacgtgttgattgtgggggagtctgtacgtgtcgacaatatgtctttgtatggatatacacgctctacgacaccgcaagtcgaagcacaaagaaagcagatcaaactgtttaatcaagcaataagcggtgcaccttacactgcgctgtcggttcccctttctttaactgctgattctgttttgagtcatgacattcataattacccggacaacattattaatatggctaatcaagcaggatttcagactttctggctaagctcgcaatccgcttttcggcagaatggtacagcagttaccagtatcgccatgcgcgccatggaaacagtctatgtcagaggatttgatgaattgttgttgccgcatttatcgcaagcgttacagcaaaagacgcagcaaaagaaactgattgttcttcatttaaatggaagccatgaaccggcttgtagcgcctatccgcaatccagcgctgtgtttcaaccgcaggacgatcaggatgcctgctatgacaactccattcattacacagatagtttgctaggtcaggtttttgaattattaaaagatcgccgcgcctcggtcatgtattttgccgaccacggcctggaacgcgaccctacgaagaagaacgtctattttcatggaggcagggaggctagccagcaggcgtatcatgtcccgatgtttatctggtatagccccgttctaggggatggcgtggatcgcacaacggaaaacaacatcttttcgacagcttacaataattaccttattaatgcgtggatgggggtaacaaagccggaacagccgcaaacgcttgaggaagtgattgcacactataaaggagactcacgggttgtggatgcaaaccatgatgttttcgattatgtgatgctcagaaaggagtttacagaggataatcaaggtaaccccacccctgaagggcagggttga

SEQ ID NO: 1109 - DNA, 1344 bp, Escherichia coli
atgacgacgattctcaagcatctcccggtaggtcaacgtattggtatcgctttttccggcggtctggacaccagtgccgcactgctgtggatgcgacaaaagggagcggttccttatgcatatactgcaaacctgggccagccagacgaagaggattatgatgcgatccctcgtcgtgccatggaatacggcgcggagaacgcacgtctgatcgactgccgcaaacaactggtggccgaaggtattgccgctattcagtgtggcgcatttcataacaccactggtggactgacctatttcaacacgacgccgctgggccgcgccgtgaccggcaccatgctggttgctgctatgaaagaagatggcgtgaatatctggggtgacggcagcacctataaaggaaacgatatcgaacgtttctaccgttacggtctgctgaccaatgctgaactgcagatttacaaaccgtggcttgatactgactttattgatgaactgggtggccgtcatgagatgtctgaatttatgattgcctgcggtttcgactacaaaatgtctgtcgaaaaagcttactccacggactccaacatgcttggtgcaacgcatgaagcgaaggatctggaatacctcaactccagcgtcaaaatcgtcaacccaattatgggcgtgaagttttgggatgagagcgtgaaaatcccggcagaagaagtcacagtacgctttgagcaaggtcatccggtggcgctgaacggtaaaacctttagcgacgacgtagaaatgatgctggaagctaaccgcatcggcggtcgtcacggcctgggcatgagcgaccagattgaaaaccgtatcatcgaagcaaaaagccgcggcatttatgaagcccctgggatggcactgctgcacattgcgtatgaacgtttgttgaccggtattcacaacgaagacaccattgagcagtatcacgcgcatggtcgtcagttgggccgtctgctgtaccagggacgttggtttgattcccaggcgctgatgctgcgtgactctctgcaacgctgggttgccagccagatcactggtgaagttactctggagctgcgccgcgggaacgattattcaatcctgaataccgtctcagagaacctgacctacaaaccagagcgtctgacgatggaaaaaggcgactcggtgttctcgccagatgatcgtatcggtcaactgaccatgcgtaacctggatatcaccgatacccgcgagaaacttttcggttatgccaaaactggcctgctctcctcctctgccgcttcaggggtgccgcaggtggagaatctggaaaataaaggccagtaa

SEQ ID NO: 1110 - DNA, 453 bp, Escherichia coli
ttgtccacattagagcaaaaattaacagagatgattactgcgccagttgaggccctgggttttgaactggttggcatcgaatttattcgcggtcgcacatccacactgcgcatctatattgatagtgaagatggcatcaatgttgatgattgtgctgatgtgagccaccaggtaagtgctgtgctggatgttgaagaccccatcaccgttgcttataacctggaagtctcctcaccgggtctcgatcgcccactgttcacggctgaacactacgcccgttttgtcggagaagaggtgactctggttctccgtatggcggtacaaaaccgtcgtaaatggcagggcgttatcaaagcggtagacggtgaaatgatcacagttaccgtcgaaggtaaagatgaagtgttcgcgctgagtaatatccagaaggcgaacctggttccccacttttaa

SEQ ID NO: 1111 - DNA, 1488 bp, Escherichia coli
atgaacaaagaaattttggctgtagttgaagccgtatccaatgaaaaggcgctacctcgcgagaagattttcgaagcattggaaagcgcgctggcgacagcaacaaagaaaaaatatgaacaagaaatcgacgttcgcgtacagatcgatcgcaaaagcggtgattttgacaccttccgtcgctggttagttgttgatgaagtcacccagccgaccaaggaaatcacccttgaagccgcacgttatgaagatgaaagcctgaacctgggcgattacgttgaagatcagattgagtctgttacctttgaccgtatcactacccagacggcaaaacaggttatcgtgcagaaagtgcgtgaagccgaacgtgcgatggtggttgatcagttccgtgaacacgaaggtgaaatcatcaccggcgtggtgaaaaaagtaaaccgcgacaacatctctctggatttgggcaacaacgctgaagccgtgatcctgcgcgaagatatgctgccgcgtgaaaacttccgccctggcgaccgcgttcgtggcgtgctctattccgttcgcccggaagctcgtggcgcgcagctgttcgtcacccgctccaagccggaaatgctgatcgaactgttccgtattgaagtgccggaaatcggcgaagaagtgattgaaattaaagcagcggctcgcgacccgggatctcgtgcgaaaattgcggtgaaaaccaacgataaacgtatcgatccggtaggtgcttgcgtaggtatgcgtggcgcgcgtgttcaggcggtttctactgaactgggcggcgagcgtatcgatattgtcctgtgggatgataacccggcgcagtttgtgattaacgcaatggcaccggcagacgttgcttctatcgtggtggatgaagataaacacaccatggatatcgccgttgaagccggtaacctggcgcaggcgattggccgtaacggtcagaacgtgcgtctggcttcgcagctgagcggttgggaactcaacgtgatgaccgttgacgacctgcaggctaagcatcaggcggaagcgcacgcagcgatcgacaccttcaccaaatatctcgatatcgatgaagacttcgcgactgttctggtagaagaaggcttctcgacgctggaagaactggcctatgtgccgatgaaagagctgttggaaatcgaaggccttgatgagccgaccgttgaagcactgcgcgagcgtgctaaaaatgcactggccaccattgcacaggcccaggaagaaagcctcggtgataacaaaccggctgacgatctgctgaaccttgaaggggtagatcgtgatttggcattcaaactggccgcccgtggcgtttgtacgctggaagatctcgccgaacagggcattgatgatctggctgatatcgaagggttgaccgacgaaaaagccggagcactgattatggctgcccgtaatatttgctggttcggtgacgaagcgtaa

SEQ ID NO: 1112 - DNA, 2673 bp, Escherichia coli
atgacagatgtaacgattaaaacgctggccgcagagcgacagacctccgtggaacgcctggtacagcaatttgctgatgcaggtatccggaagtctgctgacgactctgtgtctgcacaagagaaacagactttgattgaccacctgaatcagaaaaattcaggcccggacaaattgacgctgcaacgtaaaacacgcagcacccttaacattcctggtaccggtggaaaaagcaaatcggtacaaatcgaagtccgcaagaaacgcacctttgtgaaacgcgatccgcaagaggctgagcgccttgcagcggaagagcaagcgcagcgtgaagcggaagagcaagcccgtcgtgaggcagaagaatcggctaaacgcgaggcgcaacaaaaagctgaacgtgaggccgcagaacaagctaagcgtgaagctgctgaacaagcgaaacgtgaagctgcggaaaaagacaaagtgagcaatcaacaagacgatatgactaaaaacgcccaggctgaaaaagcccgccgtgagcaggaagctgcagagctcaagcgtaaagccgaagaagaagcgcgtcgtaaactcgaagaagaagcacgtcgcgttgctgaagaagcacgtcgtatggcggaagaaaacaaatggactgataacgcggaaccgactgaagattccagcgattatcacgtcactacttctcaacatgctcgccaggcagaagacgaaagcgatcgtgaagtcgaaggcggccgtggccgtggtcgtaacgcgaaagcagcgcgtccgaagaaaggcaacaaacacgctgaatcaaaagctgatcgtgaagaagctcgcgcagcagtacgtggcggtaagggcggaaaacgtaaaggttcttcgctgcagcaaggcttccagaagccagctcaggccgttaaccgtgacgttgtgatcggcgaaaccatcaccgttggcgaactggcgaacaagatggcggttaaaggctctcaggtcatcaaagcgatgatgaaactgggcgcaatggcaaccatcaaccaggttatcgatcaggaaaccgcacagctggttgctgaagagatgggccacaaagttatcctgcgtcgtgaaaacgagctggaagaggcggtaatgagcgaccgtgacacgggtgctgcggctgaaccgcgcgcgccggttgtgaccatcatgggtcacgttgaccacggtaaaacctctctgctggactacattcgttcaacgaaagtggcctctggcgaagcgggcggcattacccagcacattggtgcataccacgttgaaactgaaaacggcatgatcaccttcctggacaccccggggcacgccgcgtttacttcaatgcgtgcacgtggtgcgcaggcaacggacatcgtagtcctggttgttgctgcagacgacggtgtaatgccgcagaccatcgaagctatccagcacgcgaaagcggcgggtgttccggtggtggttgctgtgaacaaaatcgataaaccagaagccgatccggatcgcgttaagaacgaactctcccagtacggcatcctgccagaagagtggggcggcgaaagccagttcgtacacgtatctgcaaaagcgggtaccggtattgatgaactgctggatgctatcctgctgcaggcggaagttctggagctgaaagcggtacgtaaaggtatggcgagcggtgcggttatcgaatccttcctcgataaaggtcgtggtccggttgctaccgttctggtacgtgaaggtactctgcacaagggcgatatcgttctgtgtggcttcgaatacggtcgtgttcgtgcaatgcgtaacgaactgggtcaggaagtgctggaagcgggtccgtccattccggtggaaatcctcggcctgtccggcgtaccggctgcgggtgatgaagttaccgttgtacgtgacgagaagaaagcgcgtgaagttgcactttatcgtcagggtaaattccgcgaagttaaactggcgcgtcagcagaaatctaaactcgagaacatgttcgccaacatgaccgaaggcgaagttcacgaagtgaatatcgtcctgaaggcagacgtacagggttctgtggaagcaatttccgactccttgctgaaactgtctactgacgaagttaaagtgaagatcatcggttctggcgtaggtggtatcaccgaaaccgacgctaccctggctgcggcgtccaacgccatcctggttggcttcaacgtacgtgctgatgcctctgcacgtaaagtgattgaagcggaaagcctggatctgcgttactactccgtcatctataacctgatcgacgaagtgaaagcggcgatgagcggtatgctgtctccggaactgaaacagcagattatcggtctggcggaagttcgtgacgtgttcaaatcaccgaaatttggtgctatcgcaggttgtatggttaccgaaggtgtggttaaacgtcacaacccgatccgcgttctgcgcgacaacgtggttatctacgaaggcgagctggagtccctgcgacgcttcaaagatgacgttaacgaagtccgtaacggtatggaatgtggtatcggcgttaagaactacaacgatgtccgcactggcgatgtgatcgaagtattcgaaatcatcgagatccaacgtactatcgcttaa

SEQ ID NO: 1113 - DNA, 402 bp, Escherichia coli
atggcgaaagaatttggtcgcccgcagcgcgtagcgcaggaaatgcaaaaagagatcgctctcatcctgcagcgtgaaattaaagatcctcgtctgggcatgatgaccaccgtttccggtgtcgaaatgtctcgcgacctggcgtatgccaaagtatatgtgacgttcctcaacgacaaagatgaagacgcggttaaagcgggcatcaaagcgttgcaggaagcttctggtttcatccgcagcctgctggggaaagcgatgcgcctgcgtatcgtgccggaactgaccttcttctacgacaactctctggttgaagggatgcgcatgtcaaacctggtgaccagcgtggtcaaacatgacgaagaacgtcgtgttaacccggacgacagcaaggaggactaa

SEQ ID NO: 1114 - DNA, 945 bp, Escherichia coli
atgagtcgtcctcgtcgtcgcggtcgcgacattaacggcgttttgttgctggataaaccgcaggggatgtccagcaacgatgcgctgcaaaaggtgaaacggatttataacgccaaccgtgccgggcataccggtgcgctggacccgctggcgaccggcatgttgccaatttgcctcggggaagcgacgaagttttcccagtatctgctggactccgacaaacgctatcgggtcattgcgcgtcttggacagcgtaccgatacttctgatgccgacggacaaatcgttgaagaacgtccggtaacctttagtgcagagcaactggcggcggcgctggataccttccgtggcgatatcgaacagatcccttcgatgtattcagcactgaaatatcagggcaaaaaactgtacgaatacgcgcgtcagggcattgaagttccgcgtgaagcgcgcccgattaccgtttatgaattgctgtttattcgccatgaaggcaatgagctggagctggaaattcactgctcaaaaggcacttatatccgcactatcattgacgatctcggcgaaaaactcggttgtggcgcgcatgttatttacttgcgtcgtctggcggtaagtaaatatccggttgaacggatggtgaccctggaacatctgcgtgaactggttgagcaagccgaacagcaggatattccggctgcggagttacttgatccattactgatgccaatggacagtccagcttcggactacccagtggtgaatcttccgttaacgtcttctgtttacttcaaaaatggtaacccagttcgtacatccggtgcgccgctggaaggactggttcgcgttacagagggtgagaacggcaagtttatcggtatgggcgaaattgacgatgaaggccgcgttgcgcctcgtcgcctggtggttgaatacccggcgtaa

SEQ ID NO: 1115 - DNA, 270 bp, Escherichia coli
atgtctctaagtactgaagcaacagctaaaatcgtttctgagtttggtcgtgacgcaaacgacaccggttctaccgaagttcaggtagcactgctgactgcacagatcaaccacctgcagggccactttgcagagcacaaaaaagatcaccacagccgtcgtggtctgctgcgcatggtttctcagcgtcgtaaactgctcgactacctgaaacgtaaagacgtagcacgttacacccagctcatcgagcgcctgggtctgcgtcgctaa

SEQ ID NO: 1116 - DNA, 2136 bp, Escherichia coli
ttgcttaatccgatcgttcgtaaattccagtacggccaacacaccgtgactctggaaaccggcatgatggctcgtcaggctactgccgctgttatggttagcatggatgacaccgcggtatttgttaccgttgttggtcagaaaaaagccaaaccaggtcaggacttcttcccgctgaccgttaactatcaggagcgtacctacgctgctggtcgtatcccgggtagcttcttccgtcgtgaaggccgcccaagcgaaggcgaaaccctgatcgcgcgtctgattgaccgcccgattcgcccgctgttcccggaaggcttcgtcaacgaagttcaggttatcgccaccgtggtttctgttaacccgcaggttaacccggatatcgtcgcgatgattggtgcttccgcagcactgtctctgtctggtattccgttcaatggcccgattggtgctgcccgtgtaggttacatcaatgaccagtacgtactgaacccgactcaggacgaactgaaagagagcaaactggacctggttgttgccggtacagaagctgccgtgctgatggttgaatctgaagctgaactgctgagcgaagaccaaatgctgggcgcagtggtgttcggtcatgaacaacagcaggttgttattcagaacatcaatgaactggtgaaagaagccggtaaaccgcgttgggattggcagccggagccggtaaacgaagcgctgaacgcgcgcgttactgcgctggctgaagctcgtctgagcgatgcttaccgcatcaccgacaaacaagagcgttatgcgcaggttgatgtcatcaaatctgaaaccatcgcgacactgcttgctgaagacgaaaccctggacgaaaacgaactgggtgaaattctgcacgctatcgagaaaaatgttgttcgtagccgcgtactggcaggcgaaccgcgtatcgacggtcgtgaaaaagatatgatccgtggtctggatgtgcgtactggtgtgctgccgcgtactcacggttctgcgctgttcacccgtggtgaaacgcaggcgctggttaccgcaacgctgggtactgctcgtgacgcgcaggttcttgatgaactgatgggcgaacgtaccgataccttcctgttccactacaacttccctccgtactccgtaggcgaaaccggcatggtcggttctccgaagcgtcgtgaaattggtcacggtcgtctggcgaagcgcggcgtgctggcagtaatgccggatatggacaaattcccgtacaccgtacgtgttgtgtctgaaattaccgaatccaacggttcctcttctatggcttccgtgtgcggcgcgtctctggcgctgatggacgcaggtgtgccgatcaaagctgccgttgcgggtatcgcaatgggtctggtgaaagaaggcgacaactacgttgtactgtctgacattttgggcgacgaagatcacctgggcgatatggacttcaaagttgcgggttcccgtgacggtatctctgcattgcagatggatatcaaaattgaaggtatcaccaaagagatcatgcaggttgcgctgaaccaggctaaaggtgcgcgtctgcatatcctgggggtaatggaacaggcgatcaacgcgccgcgtggcgatatctctgagttcgcaccgcgtatccataccatcaagatcaacccggacaagatcaaagatgttatcggtaaaggcggttctgtaatccgtgctctgaccgaagaaaccggcaccaccatcgaaattgaagatgacggtactgtgaagatcgcagcgaccgacggtgagaaagcgaaacacgcgattcgtcgtatcgaagagatcactgcagaaatcgaagtgggccgcgtctacaatggtaaagtgacccgtatcgttgactttggcgcatttgttgccattggtggcggtaaagaaggtctggtccacatctctcaaatcgctgataaacgcgttgagaaagtgaccgattacctgcagatgggtcaggaagtaccggtgaaagttctggaagttgatcgccagggccgtatccgtctgagcattaaagaagcgactgagcagtctcaacctgctgcagcaccggaagctccggctgctgaacagggcgagtaa

SEQ ID NO: 1117 - DNA, 885 bp, Escherichia coli
atgaagccttttttgcgctggtgtttcgttgcgacagcacttacgcttgcaggatgcagtaatacttcctggcgtaaaagtgaagtcctcgcggtaccattgcaaccgactttacagcaggaagtgattctggcacgtatggaacagatccttgccagtcgggctttaaccgatgacgaacgcgcacagcttttatatgagcgcggagtgttgtatgatagtctcggtctgagggcattagcgcgtaacgatttttcgcaagcgctggcaatccgaccggatatgcctgaagtattcaattacttaggcatatatttaacgcaggcaggcaattttgatgctgcctatgaagcgtttgattctgtacttgagcttgatccaacttacaactacgcgcacttgaatcgcgggatcgcattatattacggcggtcgtgacaagttagcgcaagatgatctgctggcgttttatcaagacgatcccaatgatcctttccgtagtctgtggctttatctcgccgagcagaagctcgatgagaagcaggctaaagaagtgttgaaacagcacttcgaaaaatcggataaggaacagtggggatggaacattgtcgagttctacctgggcaacattagcgaacaaacgttaatggaaaggctcaaggcggacgcaacggataacacctcgctcgctgagcatctcagtgaaaccaacttctatttaggtaagtactacctaagtctgggggatttggacagcgccacggcactgttcaaactggcggttgccaacaacgttcataactttgttgagcaccgatacgcattgttggaattatcgctcctgggccaggaccaagatgacctggcagaatcggaccagcaatag

SEQ ID NO: 1118 - DNA, 1890 bp, Escherichia coli
atggctgaattcgaaaccacttttgcagatctgggcctgaaggctcctatccttgaagcccttaacgatctgggttacgaaaaaccatctccaattcaggcagagtgtattccacatctgctgaatggccgcgacgttctgggtatggcccagacggggagcggaaaaactgcagcattctctttacctctgctgcagaatcttgatcctgagctgaaagcaccacagattctggtgttggcaccgacccgcgaactggcggtacaggttgctgaggcaatgacggatttctctaaacacatgcgcggcgtaaacgtggttgccctgtacggcggccagcgttatgacgtgcaattacgcgccctgcgtcaggggccgcagattgttgtcggtactccgggccgtctgctggaccacctgaaacgtggcactctggacctctctaaattgagcggtctggttctggatgaagctgacgaaatgctgcgcatgggcttcatcgaagacgttgaaaccattatggcgcagatcccggaaggtcatcagaccgctctgttctctgcaaccatgccggaagcgattcgtcgcattacccgccgctttatgaaagagccgcaggaagtgcgcattcagtccagcgtgactacccgtcctgacatcagccagagctactggactgtctggggtatgcgtaaaaacgaagcactggtacgtttcctggaagcggaagattttgatgcggcgattatcttcgttcgtaccaaaaacgcgactctggaagtggcagaagctcttgagcgtaacggctacaacagcgccgcgctgaacggtgacatgaaccaggcgctgcgtgagcagacactggaacgcctgaaagatggtcgtctggacatcctgattgcgaccgacgttgcagcccgtggcctggacgttgagcgtatcagcctggtggttaactacgatatcccgatggattctgagtcttacgttcaccgtatcggtcgtaccggtcgtgcaggtcgtgctggtcgtgcactgctgttcgttgagaaccgtgagcgtcgtctgctgcgcaacatcgaacgcaccatgaagctgaccattccggaagtagaactgccgaacgcagaactgctgggcaaacgtcgtctggaaaaatttgccgctaaagtacagcagcagctggaaagcagcgatctggatcaataccgtgcactgctgagcaaaattcagccgactgccgaaggtgaagagctggatctcgaaactctggcagccgcactactgaaaatggcacagggtgaacgtactctgattgttccgccagatgcgccgatgcgtccgaaacgtgaattccgtgaccgtgatgaccgtggtccgcgcgatcgtaacgaccgtggcccgcgtggcgaccgtgaagatcgtccgcgtcgcgaacgtcgtgatgttggcgatatgcagttgtaccgtattgaagtgggccgcgatgatggtgttgaagttcgtcatatcgttggtgcgattgctaacgaaggcgacatcagcagccgttacatcggtaacatcaagctgtttgcttctcactccaccatcgaactgccgaaaggtatgccgggtgaagtgctgcaacactttacgcgtactcgcattctcaacaagccgatgaacatgcagttactgggcgatgcacagccgcatactggcggtgagcgtcgtggcggtggtcgtggtttcggtggcgaacgtcgtgaaggcggtcgtaacttcagcggtgaacgccgtgaagggggtcgtggtgatgggcgtcgttttagcggcgaacgtcgtgaaggccgcgcaccgcgtcgtgatgactctaccggtcgtcgtcgtttcggtggtgatgcgtaa

SEQ ID NO: 1119 - DNA, 1245 bp, Escherichia coli
atggcaacactaaccaccacccaaacgtcaccgtcgctgcttggcggcgtggtgattatcggcggcaccattattggcgcagggatgttttctctgcctgtggtcatgtccggggcgtggttcttctggtcaatggcggcgctgatctttacctggttctgtatgctgcattccggcttgatgattctggaagctaacctgaattatcgaatcggttctagctttgacaccatcaccaaagatttgctgggcaaaggctggaacgtagtcaacggcatttccattgcctttgtgctctatatcctgacttacgcctatatttctgccagcggttcgattctgcatcacaccttcgcggagatgtcgctgaacgtccctgcacgggcagctggatttggttttgcactgctggtagcgttcgtggtgtggttgagtacgaaagctgtcagccggatgacagcaattgtgctgggggcgaaagtcattactttcttcctcaccttcggcagcctgctggggcatgtgcagcctgcgacattgttcaacgtcgccgaaagcaatgcgtcttatgcaccgtatctgttgatgacgctgccgttctgtctggcatcgtttggttatcacggtaacgtaccgagcctgatgaagtattacggcaaagatccgaaaaccatcgtgaaatgcctggtgtacggtacgctgatggcgctggcgctgtataccatctggttgctggcgacgatgggtaacatcccgcgtccggagtttatcggtatcgccgagaagggcggtaatattgatgtgctggtacaggcgttaagcggcgtactgaacagccgtagtctggatcttctactggtcgtgttctcaaactttgcggtagcgagttcgttccttggcgtaacgctgggtttgtttgactatctggcagatctgtttggttttgacgactcggctatgggccgtttgaaaacagcgttgctgacctttgccccgcctgttgtgggtggcctgctgtttcctaacggattcctgtacgccattggttatgctggcttagcggctaccatctgggcggcaattgttccggcgctgttggcccgcgcatcgcgtaaacgctttggtagcccgaaattccgtgtatggggcggcaagccgatgattatgctgattctggtatttggcgttggcaacgcactggtccatatcttatcgagctttaatgtgctgccggtgtatcagtaa

SEQ ID NO: 1120 - DNA, 1008 bp, Escherichia coli
atgactgataaaaccattgcgttttcgctactcgatctggcccccatccccgaaggttcttcagcgcgggaagcgttctcccactctctcgacctcgcccgtctggctgaaaagcgcggctatcatcgctactggctggcggaacaccacaatatgaccggcattgccagtgctgcaacgtcggtgttaattggctatctggcggcgaataccaccacgctgcatctggggtctggcggcgtgatgttgcctaaccactcaccgttggtgatcgccgaacaattcggcacgctcaatacgctctatccggggcgaatcgatttggggctgggccgcgcgccgggtagcgatcagcgaaccatgatggcgctgcgtcgtcatatgagcggcgatattgataatttcccccgcgatgtcgcggaactggtggactggtttgacgcccgcgatcccaatccgcatgtgcgcccggtaccaggctatggcgagaaaatccccgtgtggttgttaggatccagcctttacagcgcgcaactggcggcgcagcttggtctgccgtttgcgtttgcctcacacttcgcgccggatatgttgttccaggcgctgcatctttatcgcagcaacttcaaaccgtcggcacggttggagaaaccgtatgcgatggtgtgcatcaatattatcgccgccgacagcaaccgcgatgccgaattcctgtttacctcaatgcagcaagcctttgtgaagctgcgccgcggcgaaaccgggcaactgccgccaccgattcaaaatatggatcagttctggtcgccgtccgaacagtatggtgtgcagcaggcgctgagtatgtcgctggtgggcgataaagcgaaagtgcgtcatggcttgcagtcgatcctgcgcgaaaccgacgccgatgaaattatggttaacgggcagattttcgaccaccaggcacgcctgcattcgtttgagctggcgatggatgtgaaggaagagttgttggggtag

SEQ ID NO: 1121 - DNA, 879 bp, Escherichia coli
atgaaatattccttagggccggtgctatggtactggccaaaagagacgctggaagacttttatcagcaggccgccgccagcagcgcagacgtgatttatcttggtgaagcggtatgcagcaagcgccgggcaaccaaagttggcgactggctggagatggcaaaatcgctcgccggaagtggcaagcagattgtgctctccacgctggcgctggtgcaggcatcctccgaactgggcgaactgaaacgctatgttgagaacggtgagtttctgattgaagccagcgatctcggcgtggtgaatatgtgcgctgaacgcaaactgccgttcgtcgccggacacgcgctaaactgctacaacgcggtgacgctgaaaatattgctcaaacagggcatgatgcgctggtgtatgccggtggagctttcccgcgactggctggtgaatctgcttaatcagtgcgatgagttgggcattcgcaaccagtttgaagtggaagtcctgagctacggtcatctacctctggcctactccgcccgctgctttaccgcgcgttcggaagaccgcccgaaagatgagtgtgaaacctgctgcattaaatatccgaacgggcgcaacgtactgtcgcaggaaaaccaacaagtgtttgtactcaacggcattcagaccatgagcggctacgtttacaacctcggtaacgagctggcatccatgcaggggctggtcgatgtggtccgcctgtcaccgcagggtaccgacactttcgcgatgctcgacgccttccgcgctaatgaaaatggcgctgcgccactaccgttgacggcaaacagcgactgtaacggctactggcggcggctggccgggctggagctgcaagcgtaa

SEQ ID NO: 1122 - DNA, 996 bp, Escherichia coli
atggagctgctctgccctgccggaaatctcccggcgcttaaggcggccatcgaaaacggcgcagatgctgtttatatcgggctaaaagatgataccaatgcccgtcacttcgccggccttaactttaccgagaaaaaattgcaggaagcggtgagttttgtccatcaacatcgccgcaaacttcacatcgcgattaacacttttgcgcatccggacggttacgcccgttggcagcgcgccgtggatatggcggcgcaactgggtgccgacgcgctgatcctcgccgacctcgccatgctggagtacgccgccgagcgttatccgcatattgagcgccacgtatcggtgcaggcttcggcgaccaatgaagaggcgattaacttttatcatcgccattttgacgttgcccgcgtggtgctgccgcgcgtgttgtcgattcatcaggtgaaacaactggcacgggtcacacctgtaccactggaagtctttgctttcggcagcctgtgcattatgtcggaaggtcgttgctatctgtcgtcgtatttgacgggtgagtcgcccaacaccgtgggcgcgtgttctccggcccgtttcgtgcgctggcaacaaacgccgcaggggctggaatcccgcctgaacgaagtgctgatcgaccgttatcaggacggcgaaaacgcaggttatccgacgctatgtaaagggcgttatctggtgaacggcgagcgctatcacgcgctggaagaacccaccagtctcaataccctggaactgctgccggagttaatggcggcgaatattgcttcggtgaaaattgaaggccgccagcgtagcccggcgtatgtcagccaggtggcgaaagtctggcgtcaggctatcgaccgttgtaaggccgatccgcaaaacttcgtaccgcaaagcgcgtggatggagacgctcgggtcgatgtccgaaggcacgcaaactacccttggcgcgtatcaccgtaaatggcagtga

SEQ ID NO: 1123 - DNA, 525 bp, Escherichia coli
gtgttggataaactgcgttcccgtattgtgcatttggggccatctctgttgagtgtaccggtaaaactgacgccatttgcgctaaaacgccaggttcttgagcaggtcttaagctggcaattccgtcaggcgctggatgatggcgagctggagtttcttgaaggtcgctggttaagtattcatgtgcgtgatattgacctgcaatggtttacctcggtggtgaatggcaaactggtcgttagccagaacgcgcaagctgatgtgagttttagtgccgacgccagcgatctgctgatgattgcggcgcgtaaacaagatccggatacgctcttcttccagcgtcggctggtgattgaaggcgatacggagctggggctgtatgtgaaaaacctgatggacgccattgaactggagcaaatgccgaaagccttacgcatgatgctgctgcaactggcggattttgttgaggcgggaatgaaaaccgcgcctgaaaccaaacagacatcggtaggtgaaccatgctaa

SEQ ID NO: 1124 - DNA, 504 bp, Escherichia coli
atgctaattcgagtagaaattcccattgatgcgccgggtattgatgccctgctgcgtcgttcattcgaaagtgatgcggaagcgaagctggttcacgatctgcgtgaagatggctttctgacgctggggctggtggcgacagatgacgaaggtcaggtcattggctatgtggcatttagtccggttgatgtgcagggcgaagacctgcaatgggtcggcatggcaccgttggcggtagatgaaaaataccgtggacaggggctggcacgccaactggtctatgaaggactcgattcgcttaatgagttcggctatgccgcagtggtgacgctgggcgatccggcgctgtacagccgtttcggctttgaactggcggcacatcacgatctgcgttgccgctggccgggcactgaaagtgccttccaggtacatcgtttagcggatgacgcgctgaacggtgtaactggtctggttgagtatcacgagcacttcaatcgcttttaa

SEQ ID NO: 1125 - DNA, 303 bp, Escherichia coli
atgacaccctggtttctttacttgatccgtaccgccgacaataagctttataccgggatcaccacagatgtcgaacgccgctatcagcagcaccaaagcggcaaaggggcgaaagcactgcgcgggaagggagaactaacgctggcgttttccgcaccagtgggcgatcgttcgctggcgttacgggcagaatatcgcgttaagcaactgaccaaacggcaaaaagagcgtctggtagcggaaggtgcagtgtttgcagaactgttgagcagcctgcaaaccccggagattaaaagcgattga

SEQ ID NO: 1126 - DNA, 423 bp, Escherichia coli
atggaaacactcaccgccatcagccgttggctggcaaaacaacatgttgtcacctggtgtgtgcagcaggaaggggaactgtggtgcgccaatgccttttatctttttgatgcgcagaaagtcgccttctacattttgacggaagaaaaaacgcgtcatgcgcagatgagcgggccgcaggcggcaattgccggaacggtaaacggtcagccgaaaacggtagcgttaattcgcggcgtgcagtttaaaggtgagatccgcagactggaaggcgaggaaagcgacctcgcacgcaaggcgtacaatcgtcgctttccggttgccagaatgctgtcggccccggtatgggaaatccggctcgatgaaatcaaattcaccgacaacacgctgggctttggtaaaaaactggtctggcaacggtaa

SEQ ID NO: 1127 - DNA, 636 bp, Escherichia coli
atgagccaggttttaattacaggcgcaacggggctggtgggcggtcacctgctgcggatgttgattaatgaaccgaaagttaacgccattgctgcgccgacgcgacgtccgttgggcgatatgcccggggtgtttaatccccatgatccgcaactgactgacgcgctggcgcaggtcaccgatcccatcgacattgtgttttgttgtctcggcaccacgcggcgagaagcggggagcaaagaggcgtttattcatgccgattacacgttggtggtggataccgcattaaccgggcggcggctcggtgcgcagcatatgctggtggtcagtgctatgggtgctaatgcccactcgccgtttttctataaccgcgtcaaaggggagatggaagaagcattaatcgcccagaactggccgaaattgaccattgctcgcccgtcgatgttactgggcgatcgtagcaaacagcggatgaacgaaacgctttttgcgccgctgttccgtttgttacccggtaactggaaatccattgatgcgagagacgtggcgcgggtcatgctggcagaggcgatgcggcctgagcatgaaggtgtgacgattttaagctcttcagaattacgcaaaagagctgaataa

SEQ ID NO: 1128 - DNA, 1041 bp, Escherichia coli
atgactggtcagtcttcatctcaggcggcaacgcccattcagtggtggaaacccgcgcttttctttctcgttgtcattgccggtctctggtatgtgaaatggcaaccttactacggcaaagcgtttactgctgccgaaacccacagtatcggtaaatctatccttgcgcaggcagatgctaatccgtggcaggcggcgttggattacgcgatgatctattttctcgcggtatggaaagcggcggtgctgggggtgatcctcggttcgttgattcaggtgctgatcccgcgtgactggttgttgcgtacgcttgggcaatcgcgctttcgcggcacgttgctgggaacgctgttttctctgccgggcatgatgtgtacctgctgtgcggctccggtcgcggcgggaatgcgtcgccaacaggtgtcgatgggcggtgcgctggcattctggatggggaatccgttgttaaacccggcgacgctggtgtttatggggttcgtcctcggctggggttttgcggcgattcgtctggtggcggggctggtgatggtgttgctgattgcgacgctggtgcaaaaatgggtgcgtgaaacaccgcaaacgcaggcaccggtcgaaattgacataccggaatcacagggcggtttttttagccgctggggcagggcgctatggacgcttttctggagtacgatcccggtttacatccttgcagtactggtgttgggtgccgctcgcgtctggttattcccccatgccgatggtgctgtcgataacagcctgatgtgggtggtggcgatggcggtagcgggatgcttgtttgtcattcccacggcagcagaaattccgattgtacaaacgatgatgctggcaggtatgggaaccgctccggcgctggcattgttgatgacgctcccggcggtgagtttgccgtcgctgataatgttgcgtaaagcgtttccggcgaaagccttatggctgacgggggcgatggtggcagtgtctggtgtgattgtcggcgggctggcgctgttggtttga

SEQ ID NO: 1129 - DNA, 576 bp, Escherichia coli
atgaaggcattatcgccaatcgcagtccttatttccgcgctgctgttgcaaggttgtgttgccgctgccgtagtgggtactgctgctgtgggtaccaaagccgcaactgacccacgcagtgtcggcacccaggtagacgatggtaccctggaagtgcgcgtgaacagcgcattgtcgaaagacgaacaaattaagaaagaagcgcgcattaatgtaacggcctatcagggcaaagtgctgctggttgggcagtcaccaaacgctgaactttcggctcgcgccaaacagattgctatgggcgtagacggtgccaacgaagtgtataacgagattcgtcagggccagccgattggtctgggcgaagcgtctaacgatacgtggatcaccaccaaagtacgttcgcagctgttaaccagcgacctggtgaaatcgtccaacgtgaaagtgaccaccgaaaacggtgaagtgttcctgatggggctggtgactgaacgtgaagcgaaagcggcggcagatattgccagccgggtaagcggcgtgaagcgggtaactacggcgtttacgtttattaaatag

SEQ ID NO: 1130 - DNA, 591 bp, Escherichia coli
gtgcaagaaagaattaaagcttgcttcactgaaagcattcaaactcaaattgcggcggcagaggcgcttccggatgccatctcccgtgcagccatgacgctggttcagtctctgctcaatggcaacaaaatcctctgttgtggtaatggaacttccgctgccaatgcacagcattttgctgccagcatgatcaaccgtttcgaaacggagcggcccagcttacctgccattgcactaaatactgataatgttgtcttaacggcaattgccaacgatcgcttacatgatgaagtgtatgcaaaacaggtgcgggcgctgggtcatgcgggagatgtattgttagccatttccacccgtggcaacagccgcgatattgtaaaagcggtagaagctgccgttacgcgtgatatgaccattgtggcattaaccggctatgacggcggtgaacttgcaggtttgttagggccacaggatgtggagatccgcattccttcgcatcgtagtgctcgcattcaggaaatgcatatgctgacggtaaattgcctgtgcgatctgatcgataacacgcttttccctcaccaggatgtttaa

SEQ ID NO: 1131 - DNA, 396 bp, Escherichia coli
atggctacagtaccaacaaggtcaggtagtccccgccagttaaccaccaaacagaccggcgatgcgtgggaagcacaagcgcgtcgctggctggaaggcaaaggactacggtttatcgccgctaacgtgaacgagcgtggcggcgagatcgatctgataatgcgtgaaggccggaccaccatttttatcgaggtgcgttaccgccgctctgcgctttatggcggcgcggcagccagtgtgacccgcagcaaacaacacaaattattacagactgcccgcttgtggctcgcgcgtcataatgggagttttgatactgtggattgccggttcgatgtggtagccttcaccgggaatgaggttgagtggattaaggatgcctttaatgaccactcataa

SEQ ID NO: 1132 - DNA, 2037 bp, Escherichia coli
atggtaccctcaacattttctcgtttgaaagccgcgcgttgtctgcctgttgttctggcagccctgattttcgccggttgtggcacccatactcccgatcagtccactgcttatatgcagggcacggcgcaggctgattctgccttttacctgcaacagatgcagcaaagttctgatgataccaggatcaactggcaattactcgccattcgtgcactggtgaaagaaggtaaaaccggacaggcggtggagttgtttaaccaactaccgcaagaactgaacgattctcagcgtcgcgagaaaacactgctggcggcagagattaaactagcgcagaaagattttgctggcgcgcaaaacttgctggcgaaaatcacacctgcagatttagaacaaaaccagcaagcgcgttactggcaggcaaaaatcgatgccagccaggggcgtccttccattgatttactgcgcgcgttaattgctcaggaaccgctgctcggtgcgaaagaaaagcagcagaatattgacgccacatggcaggcgctctcctccatgactcaggagcaggcgaatacgctggtgatcaacgccgacgaaaatattctgcaaggctggctggatttgcagcgcgtctggtttgataaccgtaacgatcctgacatgatgaaagctgggatcgccgactggcagaaacgttatccgaacaacccgggcgcgaaaatgctgccaacgcagttggttaacgtaaaagcgtttaaaccagcatcgaccaacaaaatcgccctgctgttgccgctgaatggccaggcagcggtatttggtcgcactattcagcaaggctttgaagcggcgaaaaatatcggcactcagccagtggcggcccaggtagctgccgcacctgccgcagacgtagcagaacaacctcagccgcaaaccgtggatggcgttgccagcccggcacaagcctcggttagcgatctgaccggtgaacaacctgcggcccagccggtgcctgtaagcgccccggcgacaagcaccgcagcggtaagcgcacccgcaaatccatccgcagagctgaaaatctacgatacctcatcacaaccacttagccagatcttaagccaggttcagcaggatggtgcgagtattgtggtcggtccgttgctgaaaaataacgttgaagagttgctgaagagcaacaccccgctgaacgtgctggcactgaaccagccggagaacatcgaaaaccgcgtcaatatttgttacttcgcgctttcaccggaagacgaagcgcgcgatgcagcgcgtcatattcgtgaccagggtaaacaagcgccgctggtgctgatcccacgcagttcattgggcgatcgcgtagccaatgcgtttgcgcaagagtggcagaaactgggcggcggcaccgttctgcaacaaaaatttggttccaccagcgaattacgcgcgggtgttaacggcggttcgggtatcgctttaacgggtagcccaattactcccagagaaacaaccgactccggcatgacgaccaacaatccaacgctgcaaaccacgccaaccgatgatcagttcaccaataatggcggtcgtgtcgatgcggtgtacattgtggcaacgccgggtgaaatcgcttttatcaaaccaatgatcgccatgcgtaacggtagccagagcggtgcaacgctgtacgccagctcccgcagtgcgcaagggaccgctggcccggatttccgcctggagatggaaggcttgcagtacagcgaaatcccgatgctggcaggcggtaatctgccgttaatgcagcaggcgctcagcgcggtgaacaacgattattcgctggctcgcatgtatgcgatgggcgtcgatgcctggtcgttggcaaatcatttctcacaaatgcgccaggttcagggttttgaaatcaacggtaataccggaagcctgacggcaaacccggattgcgtgattaacaggaagttatcatggctacagtaccaacaaggtcaggtagtccccgccagttaa

SEQ ID NO: 1133 - DNA, 864 bp, Escherichia coli
atgaaacaacaccaatcggcggataattctcagggccagctttacattgtaccgacgccaatcggcaatctggcggatatcacccagcgtgcgttggaggtattacaggccgttgatctgattgccgccgaggatacgcgtcacaccggtttattgctgcaacattttgggattaatgcccggttgtttgcgctgcacgaccataacgaacaacaaaaagccgaaacgctgctggcgaagctgcaagaggggcaaaacattgcgctggtttccgatgccggaacgccgctaattaacgatcctggctaccatctggtgcgtacctgccgtgaagcggggattcgcgtggtgccgctacccgggccgtgtgctgctatcactgcgttaagcgccgcgggtttaccatccgatcgtttttgttatgaaggctttttacctgccaaatcaaaaggccgccgtgatgcgctaaaagccattgaagcggagccgcgcacgctgattttttatgaatctacccaccgtctgttagatagcctggaagatatcgttgcggtattaggcgaatcccgctacgtcgttctggcgcgtgagctgaccaaaacctgggaaaccattcacggcgcgcccgttggcgagctgctggcgtgggtcaaagaagatgaaaaccgtcgcaaaggcgaaatggtactgattgtcgaaggccataaagcacaggaagaagacttacccgccgatgccctgcgcacgctggcgctgttgcaggcagaactgccactgaaaaaagcggcggcgctggcagcagaaattcacggcgtgaagaaaaatgcgctgtataagtatgcactggagcagcagggagagtga

SEQ ID NO: 1134 - DNA, 714 bp, Escherichia coli
gtgcaaacccttcaacaagttgaaaactatacggcgttaagtgaacgtgccagcgaatatttattggccgtgatccgtcgcaaaccggatgccgtgatttgcctggcgaccggagccacgccattactgacgtatcattatctggtagaacaaatccaccaacagcaggttaatgtcagccagctcaccttcgtgaagctcgacgaatgggtggatctgccattaacgatgcctggcacctgcgaaactttcctacaacagcatatcgtgcagccgctggggctgcgtgaagaccagctcatcagctttcgctctgaagagataaatgagacagagtgcgaacgggtaacgaacctgattgcgcgcaaaggcggtctggatttatgcgttctcggattggggaaaaacggtcatcttgggctgaacgaaccgggagaaagcctgcaaccggcctgccatatcagtcaacttgatgccggaacacagcaacatgagatgttaaaaaccgcgggccgtcccgtgactcgtgggatcaccttaggcctgaaggatattctcaatacccgcgaagttttgctactggtgactggcgaaggaaagcaggatgcgacagaacgttttctcacggctaaagtctctaccgctatcccggcttcgtttttatggctgcataaccatttcacatgcgtgattgatgaaatgtgtcgtcgttaa

SEQ ID NO: 1135 - DNA, 792 bp, Escherichia coli
atgggatctgaaatcagtaaaaaagatatcacccgtctgggctttcgttcgtcactgctacaagcaagctttaactacgaaaggatgcaggcgggcggttttacctgggcgatgttgccgatcctgaaaaagatttataaggacgacaaaccgggcctaagcgcggcgatgaaagataacctcgaatttattaatacccaccctaatctggtcggattcctgatggggttattaatttcgatggaagaaaaaggagaaaaccgcgacaccattaaaggcctcaaagtggcgctgtttggcccaatcgccgggattggcgatgcgattttctggtttaccttgttgccaattatggcggggatttgctcatcgtttgccagtcaggggaacctgttgggaccgattttgtttttcgccgtttacctgcttatctttttcctgcgcgtcggctggacccacgtcggttattcagtcggcgtgaaggctatcgataaagtgcgagagaactcgcagatgattgctcgttcggcaaccatcctcgggatcacagtaatcggcgggctgatcgcttcgtatgtgcatattaacgtggtgacgtcgtttgccatcgacagtacccacagcgtcgcactgcaacaggatttcttcgataaagtcttcccgaatattttaccgatggcctacaccctgctgatgtattacttcctgcgggtgaaaaaagcgcatccggtgctgttaatcggcgtgacgtttgttctttctattgtttgttctgcattcggcattttgtaa

SEQ ID NO: 1136 - DNA, 804 bp, Escherichia coli
atgcatgaaataaccctactccagggattatccctggcggcgttagttttctttctggggattgatttttggctggaagccttatttttattccgcccgataatcgtttgtacccttacaggtgctattctcggtgatattcagactggcttaattaccggtggcctgacagagttggctttcgccggattaacccctgcaggtggtgttcagccgcccaaccctattatggcgggtctgatgaccactgtcattgcatggtctacgggcgttgatgccaaaacggcaattggtcttggcctgccgtttagtttgttaatgcagtacgtcattctgttcttctattccgctttctcattatttatgaccaaagccgataaatgcgcaaaagaggcggatacggcagcgttttcccgacttaactggacaacgatgctcatcgtcgcttcagcgtatgcggtgattgctttcctctgtacttacctggcacaaggggcgatgcaggcgctggtgaaagcgatgcccgcctggctgacccacggctttgaagtggctggcggtattctgcctgctgttggttttggcttgctgctgcgcgtgatgttcaaagcacaatatatcccttacctgatcgccggtttcctgtttgtttgctacatccaggtcagcaacctgttgccggttgccgtgctgggcgcaggctttgcggtgtatgagtttttcaatgcgaaatcccggcagcaagcgcaaccgcagcccgttgccagtaaaaatgaagaagaggactacagcaatgggatctga

SEQ ID NO: 1137 - DNA, 477 bp, Escherichia coli
atgagcagtccaaatattctcttaacccgtattgataaccgtctggttcacggtcaggttggcgtgacctggacatccaccatcggtgcgaatctgttagtagtcgtggatgatgttgtcgctaacgatgatattcaacagaaattaatgggtattaccgcagaaacctacggctttggcattcgtttctttactatcgaaaaaaccattaacgtcatcggcaaagctgcaccacatcagaagatcttcctgatttgccgtacgccacaaacggtacgtaaattggtagaaggtggtattgacctgaaagatgtcaacgtcggcaatatgcatttctcggaagggaaaaagcaaatcagcagtaaagtttatgtcgatgaccaggatctcacggatttacgttttattaaacaacgtggcgtaaatgttttcattcaggacgtccctggcgatcaaaaagaacaaatccctgactaa

SEQ ID NO: 1138 - DNA, 861 bp, Escherichia coli
atgagcattatctccaccaaatatctgttacaggacgcccaggccaatggctacgcggtgcctgcctttaacattcataacgccgagacgatccaggcgatcctcgaagtgtgcagtgaaatgcgatcgccggtgatcctcgccggaacgccggggacctttaaacatatcgcgctggaagagatctacgccctgtgtagtgcctattccacaacctacaacatgccactggcgctgcatctcgaccaccacgaatcgctggatgatattcgccgtaaagtccacgcaggcgtgcgcagcgcgatgatcgacggcagtcatttcccgtttgccgagaacgtgaagctggtgaaatcggttgtcgacttctgccactcccaggattgcagcgtggaagcagaactgggccgcctcggcggtgttgaagatgacatgagcgttgacgccgaaagtgcattcctgactgatccacaagaagctaaacgctttgtcgaactgactggcgtcgacagcctggcggtagcgattggtacggcgcacggcttatacagcaaaacgccgaagattgatttccagcggctggcggaaattcgtgaagtggtggatgttcctctggtgctgcatggtgccagcgatgtcccggatgaatttgtccgtcgcactattgaacttggcgtaacaaaagtgaacgttgccacagaattaaaaatagccttcgctggcgcggttaaagcctggtttgcggaaaatccgcagggtaatgatcctcgttattatatgcgcgtcggaatggatgcgatgaaagaagttgtcagaaataaaattaatgtctgtggttcagcgaatcgaatttcagcataa

SEQ ID NO: 1139 - DNA, 1155 bp, Escherichia coli
atgccagaaaattacacccctgctgctgccgcaaccggtacatggactgaagaagagatccgccatcagcctcgcgcatggatccgttcactcaccaacattgacgcgctacgttccgcgctcaataacttccttgaaccgttactgcgcaaagagaatctgcaaatcatcctgaccggagccggaacatcggcatttatcggtgacatcatcgcgccgtggctcgccagccataccggtaaaaacttcagcgccgtaccgaccaccgatctggtcaccaatccaatggactacctgaacccagctcatccgctactattgatctccttcggtcgatccggcaacagcccggaaagcgtcgccgccgtgaaactggcaaatcaatttgtaccagaatgctatcacctgccgatcacctgcaacgaagcgggcgctctttaccaaaacgcgatcaacagcgacaacgcgtttgccctgctgatgcccgcagaaacgcacgatcgcggcttcgcgatgaccagcagcattaccaccatgatggccagctgcctcgcggttttcgcacctgagatgatcaacagccaaaccttccgcgacgtggcggatcgttgccaggcgatcctgacctcactgggcgatttcagcgaaggtgtgtttggttacgcaccgtggaaacggatcgtttatctcggcagcggtggcttacagggcgcagcacgcgagtcggcgctgaaagtgctggaactgacagcgggtaaactggcggccttctatgattccccgaccggattccgtcatggcccgaaatcgctggtcgataacgaaacgctggtggtggtgtttgtctccagccacccttacacccgtcagtatgatcttgatctgctggcagaactccgccgcgataaccaggcaatgcgcgtaatcgccatcgccgcggaaagcaacgacgttattgccgccggtccacatatcatcctgccgccgtcccgtcactttatcgacgttgagcaggcattttgcttcctgatgtacgcccagacatttgcactgatgcagtcgctgcacatgggtaatacgccggataccccatcagccagtggcaccgttaaccgcgtggtgcaaggcgtaatcattcatccgtggcaggcataa

SEQ ID NO: 1140 - DNA, 1134 bp, Escherichia coli
atgacacacgttctgcgcgccagaaggctgctgactgaagagggatggctcgatgaccatcagttgcgtattgctgacggtgtaatcgcagcaatcgaaccgattccagtgggcgtgactgaacgcgatgtggaactgctctgccccgcttacatcgacacccatgtacacggtggtgcgggcgttgatgtaatggatgacgcgccggatgcgctcgacaagctggcaatgcacaaggcacgcgaaggtgtcggcagttggttaccgaccaccgtaaccgcgccgcttaataccattcatgcggcgctgaaacgtattgctctacgctgccagcgtggcggacctggtgcgcaagtgctggggagttatctcgaaggaccgtacttcacgccgcagaataaaggcgcgcatccgccggagctgtttcgcgagcttgaaattgccgagctggatcaattgattgccgtttctcagcataccttgcgcgtgatagcgctggcaccagaaaaagaaggggcattgcaggccatccgccatcttaaacagcaaaacgtacgggtgatgctggggcatagcgcggcgacctggcaacaaacccgtgccgcgtttgatgctggtgccgacggcctggtgcattgctataacgggatgacaggtttacatcaccgcgaaccgggaatggttggcgcgggattaacagacaagcgcgcctggctggaactgatagccgatggtcatcatgtacatccggcggcaatgtcgctctgttgttgctgtgcgaaagagaggatcgtactgatcaccgacgcgatgcaggcagccgggatgccggatggtcactatacgttatgtggtgaagaagtgcagatgcgcggtggcgttgtccgtaccgcgtccggtgggctggcgggcagtacgctgtctgtcgatgcggcagtgcgcaacatggtcgagttgacgggcgtaacgcctgcggaagccatccatatggcgtcgctgcatccggcgcgaatgctgggtgttgatggtgttctgggatcgcttaaaccgggcaaacgcgccagcgtcgttgcgctggatagcgggctgcatgtgcaacaaatctggattcagggtcaattagcttcgttttga

SEQ ID NO: 1141 - DNA, 435 bp, Escherichia coli
atgttaagtattattttgacagggcatggcggatttgccagcggcatggaaaaagcaatgaagcaaattctcggtgagcaatcgcagtttatcgccatcgattttccggaaacctcaagcaccgcgctgcttacatcgcagcttgaagaggccatcgcccaactggattgtgaagacggcattgtttttctgacggatttgctgggcggcacgccgtttcgcgtagcttcaacgctggcgatgcaaaaaccgggctgtgaagtgatcaccggcaccaatttgcaactgctactggaaatggtgctggagcgcgaagggttaagcggtgaagagttccgtgtgcaggcgctggagtgtggacaccgtgggctgaccagtctggtggacgagttaggccgctgccatgaagaatgtccggtcgaggaaggaatatga

SEQ ID NO: 1142 - DNA, 879 bp, Escherichia coli
atggcatctaatcaaaccaccctgccgaacgtcagcgaaaatgaagaaacactgctgactggcgtcaatgaaaacgtgtatgaagatcagagcattggcgcggagctgacgaaaaaagatatcaaccgcgtcgcctggcgttccatgctgttacaggcttctttcaactacgaacgtatgcaggcttccggctggctgtacggcctgctgccagcactgaaaaagatccacactaataaacgcgacctggcgcgcgccatgaaggggcatatgggtttcttcaatacccatccgtttctggtgacgtttgttatcggcattatccttgcgatggagcgttctaagcaggacgttaacagtattcagagcaccaaaattgccgtcggtgcgccgctcggcgggattggcgatgcgatgttctggctaacgctactgccgatttgtggcgggataggtgcaagcctcgcgctacaaggctctattcttggcgctgtcgtctttattgtgctgttcaacgtggtgcacctggggctgcgttttggtctggcgcattatgcttaccgcatgggcgtggcggcgattccactcattaaagcaaataccaaaaaagtcggccatgctgcatctatcgttgggatgacggtaatcggcgcgctggtggcaacctatgttcgtttaagcaccacgctggaaatcaccgcgggcgacgcagtggttaagttacaggctgatgttatcgacaaactgatgccagccttcttaccgctggtctacaccctgaccatgttctggctggtacgccgcggctggagtccgctgcgcctgattgcgattaccgtggttctcggcatcgtcggtaaattctgccatttcctttaa

SEQ ID NO: 1143 - DNA, 780 bp, Escherichia coli
atggaaatcagtctgttgcaggcatttgcgttgggcattatcgcctttatcgctggcctggatatgtttaacggcttaacccatatgcaccgcccggtggttctcggcccgttggtcgggctggtacttggcgatctgcataccggtattttaaccggcggtacgctggaactggtgtggatggggctggcccctctggcgggcgcacagccgcctaacgtgattatcggtactatcgtcggcacggcgtttgccattactactggcgtgaaacccgatgtcgcggtcggtgtcgccgtacctttcgctgtcgcagtacagatggggattaccttcctgttctcggtgatgtccggcgtgatgtcccgatgcgaccggatggcggagaacgccgatacacgcggcattgaacgcgtgaactatctggcattgctggcactcggcacgttctattttctctgcgctttcctgcctatctacttcggcgcggaacatgcaaaaaccatcattgatgtcctgccgcaacgattaattgatggcctcggcgtcgcgggcggcatcatgccagcaatcggttttgccgtgctgctgaaaatcatgatgaaaaacgtctacatcccctacttcatcctgggctttgttgccgcggcctggctcaagttaccggtgctggctattgctgccgctgcgctggcgatggcgctgatcgacctgctgcgtaaatctcctgaaccgactcaacctgcggcacagaaagaggaatttgaagatggcatctaa

SEQ ID NO: 1144 - DNA, 474 bp, Escherichia coli
atgccaaatattgttttaagtcggattgatgaacgcttgattcacggtcaggtcggcgttcagtgggtcggatttgcgggggcaaatctggtgctggtagccaacgacgaggttgccgaagatctggtacaacaaaacctgatggaaatggtactggcagaagggatcgccgtacgtttctggacgctgcaaaaagtcatcgacaacattcatcgcgccgccgatcgacagaaaatcctgctggtttgtaaaacaccggccgatttcctgacgctggtgaaaggtggcgttccggtgaatcgcattaacgttggcaatatgcactacgccaatggcaagcaacaaatcgccaaaacggtttctgtggatgcgggtgatatcgcagcatttaacgacctgaaagccgctggggtggaatgcttcgttcagggcgtcccaacagagcctgctgtggacctctttaaattactttga

SEQ ID NO: 1145 - DNA, 1281 bp, Escherichia coli
gtgaaacatctgacagaaatggtgagacagcacaaagcgggcaaaacaaatgggatttacgccgtttgttccgcgcatccgctggtgctggaagctgcaatccgctacgccagtgcaaaccaaacgccgttactgattgaagcaacctccaatcaggtggaccagttcggcggttataccggaatgacgcccgccgattttcgcggctttgtttgtcagctcgccgactcgttgaatttcccgcaggatgcgctgattctgggtggtgaccatctggggccaaaccgctggcaaaacctgcctgccgctcaggcaatggccaatgccgatgatttgattaaaagctacgtggcggcaggattcaaaaaaattcaccttgattgcagcatgtcctgtcaggacgatccgattcccttaactgatgacatcgtggctgaacgcgccgcccgtctggcgaaagtggcggaagaaacctgtcgtgaacactttggcgaagccgatctggagtatgtcattggtaccgaagtgccggtacctggcggcgcgcatgaaaccttaagcgagctggcggtcaccacgccggatgccgcccgcgccacgctggaagcccatcgtcacgcctttgaaaagcaaggtctgaatgccatctggccacgcatcattgccctggtggttcaacccggcgtcgaattcgatcacaccaacgttattgattatcagccagccaaagccgctgccttaagccagatggtcgaaaactacgaaacgctgattttcgaagcgcactctaccgattatcaaacgccgcaatcgctgcgccagctggtgattgaccactttgccattctgaaagttggcccggcgctgaccttcgccctgcgtgaagctctgttctctctggcggcgattgaagaagaactggtgccagcgaaagcctgttccggtctgcgtcaggtactggaaaacgtgatgctcgaccgcccggagtactggcaaagccactaccacggtgacggcaacgcgcgtcgtctggcgcgtggttatagctactcggatcgcgtgcgctattactggccggacagccagattgatgacgctttcgctcatctgattcgtaatctggcggattcaccaattccgctgccgctgatcagtcagtatctgccgctgcagtacgtgaaagttcgctccggcgagctgcagccaacgccacgggaactcattatcaaccatattcaggacatcctggcgcagtaccacacagcctgtgaaggccaataa

SEQ ID NO: 1146 - DNA, 810 bp, Escherichia coli
atgagtaataccgacgcttcaggtgagaagcgagtgacaggcaccagtgagcgacgagagcagatcattcaacgcctgcgccagcaaggaagtgtgcaagttaatgatctatcggcgttgtatggtgtatctactgtgacgatccgcaacgatctggcgtttctggaaaagcaggggatcgctgtgcgtgcctatggtggcgcgttgatctgcgatagcacaacgccgtcagtcgagccatcagtggaagataaaagcgcgctgaacaccgcgatgaaacgcagcgttgcgaaagctgccgttgagttgattcagcctggtcatcgggtgatcctcgactccgggaccaccacttttgagattgctcgtctgatgcgcaagcacaccgacgtaattgcgatgaccaacggtatgaacgtggctaatgcgttgctggaagcggaaggcgttgagctgctgatgaccggggggcatttgcgccgtcagtcgcaatctttttacggtgatcaggctgagcaatcgctgcaaaattaccacttcgatatgctgtttcttggtgtagatgcgatcgatctggagcgcggcgtcagcacgcataatgaagatgaagcccgtttaaaccgtcggatgtgcgaagttgcggaacggatcatcgtggtcaccgattccagtaagttcaatcgttctagtttacataagatcattgatactcaacgtatcgacatgatcattgttgatgaaggcattcctgcggatagtctggaaggactgagaaaggctggggttgaagtgattctggtcggggaatga

SEQ ID NO: 1147 - DNA, 465 bp, Escherichia coli
atggattttccacaaagggttaatggttgggcgctatatgctcatccctgttttcaggaaacctacgatgctttcgttgccgaagtcgaggcattaaagggaaaagatcctgaaaattatcagagaaaagctgccacaaagttattggcggtggtccataaagtgattgaggagcatatcacggtcaatccatcatcaccggcattccgtcatggcaagtcgttaggctctgggaaaaataaagactggtcacgggtaaaatttggtgctggtcgctatcgtctcttctttcgttacagtgaaaaagagaaagtcatcattctgggatggatgaacgatgaaaacacgctgcgcacctacggtaaaaaaacagatgcctataccgtattcagtaaaatgttaaaaagaggacatcctcctgccgactgggaaagcctcacccaagagacagaagaaaaccattga

SEQ ID NO: 1148 - DNA, 336 bp, Escherichia coli
atgcccgctaatgctcgctctaacgctgtactgaccactgaatcaaaggtcactatacgcggacaaacaactatccccgcgccagtgcgtgaggccttaaaactgaagccaggcctggacagcattcattacgaaattctgcctggtgggcaagtatttctgtgccgactgggagatgaacaggaggatcatactatgaatgcatttttgcgttttctggatgcagatatccagaacaacccgcaaaaaactcgtccattcgacattcaacaaggaaagaaacttgtcgctggcatggacgtcaacattgacgatgagattggcgacgacgaataa

SEQ ID NO: 1149 - DNA, 1572 bp, Escherichia coli
atggccaacatcgaaatcagacaagaaacgccaactgcgttttatataaaagttcacgacacagataatgtggcaattattgttaatgataatggcctgaaagcaggaacgcgttttccggatgggctggaattaattgaacatattccccaggggcataaagtcgcattgctggacattccggctaatggtgaaattattcgttatggcgaggtgattggttacgccgtgcgcgcaatcccacgcggaagctggatcgacgaatcaatggttgtactaccggaagcgccgccgttacatacgctgccactggcaaccaaagtcccggaacccttaccgccgctggaaggatacacctttgagggctatcgcaatgccgatggcagcgtgggcaccaaaaacctgctcggcatcaccaccagcgtccactgtgtggcaggcgtggtggactacgtagtaaaaatcattgaacgcgatctgctaccgaaatacccgaacgtcgatggcgtggtggggctgaatcatttgtacggttgtggcgtggcgattaacgcacccgcggcagttgtgcctattcgtaccattcacaatatttcgctgaaccctaactttggcggcgaagtaatggtgattggtctgggttgtgaaaagttgcagcctgaacgcctactgactggaacggatgatgtgcaagctattccagtagaaagcgccagcattgtcagtttgcaggatgaaaagcatgtcggttttcagtccatggtcgaggatattttgcaggtcgccgaacgccatctacaaaaactgaatcaacgtcagcgagaaacctgtccggcttcagaactggttgtcggcatgcagtgcggtggcagcgatgcgttttctggcgtaacggcaaacccggcggttgggtatgcgtctgatctattggtgcgctgcggcgcaacggtgatgttttcagaagtcacagaagtgcgtgacgcgatacatttgctgacaccacgcgctgtgaacgaagaggtcggcaaacggctgctggaggagatggagtggtacgataactatctcaatatgggaaaaaccgatcgcagcgccaacccttcgccggggaacaagaaaggcggtctggcaaatgtggtggagaaagcgctcggctccattgctaaatcgggtaaaagtgcaattgttgaagtgctgtcgcccggtcaacgcccgactaaacgcggattaatttacgccgcgacgccagccagcgattttgtctgtggcacgcaacaggtggcttcgggtatcaccgtgcaagtgtttacgaccggtcgtggtacgccgtacggcctgatggcggtacccgtcattaaaatggcgacccgcaccgagctggcgaaccgctggtttgatttaatggatattaacgcgggcactatcgctaccggcgaagaaaccattgaagaagtgggctggaagttgttccactttattctcgacgtcgccagcgggaagaagaaaactttctcggatcaatggggactgcataaccagctggcggtgtttaacccggcaccggtgacctga

SEQ ID NO: 1150 - DNA, 1335 bp, Escherichia coli
atgatgctggacaccgttgacgaaaaaaagaaaggcgtgcatacccgctatttaatattactgattatttttattgttaccgccgttaactacgccgatcgtgcaacgctgtctattgctggtaccgaagtggcaaaagagttgcagttaagtgcggtttcgatgggttacatcttctctgcttttggctgggcctacttgctgatgcaaattcccggcggctggctgcttgataagtttggctcgaaaaaagtttacacctacagcctctttttctggtcgctgttcaccttcctgcaaggctttgttgatatgttcccgctggcctgggcagggatctccatgttctttatgcgctttatgctcggcttctcggaagctccatcattcccggcgaacgcccgtattgtcgccgcctggtttccgacaaaagaacgtggtactgcctccgccatctttaactcggcgcaatatttctcgctggcgctcttttcgccgctgcttggctggctgactttcgcctggggctgggagcacgtctttaccgttatgggggtgattggttttgtgctgacggcgctgtggatcaagttgattcataatccgacagatcacccacgtatgtctgcggaagagctgaagtttatctcggaaaatggcgcggtggtcgatatggaccacaaaaagccgggcagtgcggcagcaagcggacccaaactgcattacatcaagcaattgctctctaaccgcatgatgctgggcgtatttttcggacaatattttatcaacaccatcacctggttcttcctcacctggttcccaatttatctggtgcaggaaaaaggcatgtcgattctgaaagtgggtctggtcgcctcgattccggcactgtgtggctttgcgggcggcgtgctgggaggtgtcttctcggattatctgatcaaacgcggtttgtccctgaccctggctcgtaagctaccaattgtgctgggaatgttgctggcttccaccatcatcttatgtaactacaccaacaacaccacgctggtggtcatgctgatggcgctggctttctttggtaaaggatttggtgcgctgggctggccagtgatttctgacaccgcgccgaaagagattgttggcctctgcggcggcgtctttaacgtctttggcaatgttgcctccattgtcactccactggtgattggctacctggtaagtgaactgcactccttcaatgcagcactggtttttgtgggatgttcagcgctgatggcgatggtctgctacctcttcgtagtcggcgacattaaacgtatggaattgcagaaataa

SEQ ID NO: 1151 - DNA, 771 bp, Escherichia coli
atgaataacgatgttttcccgaataaattcaaagccgcactggctgcgaaacaggtacaaattggttgctggtcagctctctctaacccgattagcactgaagttcttggtttggctgggtttgactggctggtgctggatggtgaacatgcgccaaacgatatctccacgtttattccgcagttaatggccctgaaaggcagcgccagcgcgccagtagtgcgagtgccgaccaacgagccggtaattattaagcgtcttctggatatcggtttctataacttcctgattccttttgtagaaacaaaagaggaagcagagcaggcggtggcatcaactcgttacccaccggaaggcattcgcggcgtctccgtttctcaccgcgccaatatgtttggcaccgtggcggattatttcgctcagtcgaacaagaacatcactattctggtccagatagaaagtcagcagggcgtagataacgtcgatgctattgccgctaccgaaggtgtagacggtatcttcgtcggccccagcgatctggctgcggcattaggccatctcggcaatgcctcgcacccggatgtacaaaaagcaattcagcatatttttaaccgtgccagcgcgcacggcaaacccagcggcatcctcgcaccggtcgaggctgatgcgcgtcgttatctggaatggggcgcgacgtttgtggccgtcggcagcgatctcggcgtcttccgctctgccactcagaaactggctgatacctttaaaaaataa

SEQ ID NO: 1152 - DNA, 891 bp, Escherichia coli
atgactatgaaagttggttttattggcctggggattatgggtaaaccaatgagtaaaaaccttctgaaagcaggttactcgctggtggttgctgaccgtaacccagaagctatcgctgacgtgattgctgccggtgcagaaacagccgctacggctaaagcgatcgctgaacagtgcgacgtcatcataaccatgctgccaaactcccctcatgtgaaagaggtggcgctgggtgagaatggcattattgaaggcgcgaagccaggtacggtattgatcgatatgagttctatcgcaccgctggcaagccgtgaaatcagcgaagcgctgaaagcgaaaggcattgatatgctggacgccccggtgagcggcggtgaaccgaaagccatcgacggtacactgtcagtgatggtgggcggcgacaaggctattttcgacaaatactatgatttgatgaaagcgatggcgggttccgtggtgcataccggggaaatcggtgcaggtaacgtcaccaaactggcaaatcaggtcattgtggcgctgaatattgctgcgatgtcagaagcgttaacgctggcaaccaaagcgggcgttaacccggatctggtgtatcaggcaattcgcggtgggctggcgggcagtaccgtgctggatgccaaagcgccgatggtgatggaccgcaacttcaaaccgggcttccgtattgatctgcatattaaggatctggcgaatgcgctggatacttctcacggcgtcggcgcgcaactgccgctcacagctgcggttatggagatgatgcaggcactgcgtgcagatggtttaggaacggcggatcatagcgccctggcgtgctactacgaaaaactggcgaaagtcgaagttactcgctaa

SEQ ID NO: 1153 - DNA, 1146 bp, Escherichia coli
atgaaaatcgtaatcgccccagactcttataaagaaagtttatctgccagcgaggttgcgcaggcgatagaaaaaggatttcgggaaatttttcctgatgcacagtatgtttctgttccggttgccgacggtggtgaaggaacggtggaagcgatgattgcagccacccagggggctgaacgtcacgcctgggttacagggccgctgggcgagaaagtgaatgccagttgggggatctccggcgatggcaaaaccgcgtttatcgaaatggcggcggccagtgggctggaactggtacctgcggaaaaacgcgatccactcgtgaccacttcacgcggtactggtgagttaatcctgcaggcgctggagagcggtgcgacaaacattattatcggcattggcggcagcgccaccaacgacggcggcgcaggcatggtacaggcgctgggggcgaaattatgcgatgccaacggcaatgaaattggttttggcggcggtagtcttaatactctgaatgatattgatatttccggtctcgatccgcgcttaaaagattgtgtcatccgcgtcgcttgtgatgtcaccaacccgttagtcggcgacagtggtgcttcgcgcatctttggcccacaaaagggagccagtgaggcgatgattgtcgagctggataataacctctctcactatgccgatgtcattaaaaaagcgctgcatgttgatgtgaaagatgtccccggcgcaggagctgcgggcggtatgggcgcggcgctgatggcgtttcttggtgcagaactgaaaagtggtattgaaatcgtcactacggcgctgaatctggaggaacatattcacgattgtacgctggtgatcactggtgaagggcgtattgatagccagagtattcacggcaaggtaccgattggtgtcgcaaacgtggcgaagaagtaccataaaccggtgattggcattgcgggtagcctgaccaatgatgttggcgttgtacatcagcatggcattgatgcggtcttcagcgtactgaccagcattggtacgttagacgaagcattccgcggagcttatgacaatatctgccgtgcttcacgtaatatcgccgcgacactggcgattggaatgcgcaacgcggggtga

SEQ ID NO: 1154 - DNA, 939 bp, Escherichia coli
atgagcactattcttcttccgaaaacgcagcacctggtagtctttcaggaagttattagaagtggttctatcggctcggctgcaaaagagttagggttaactcaaccggccgtcagtaaaatcattaacgatattgaagattattttggtgtggagttagtggtgcggaaaaataccggtgtaacattaacacctgccggtcaattgttactctcccgttccgaatccattacccgtgaaatgaaaaatatggttaatgagataagcggtatgtcttctgaggcggtggtggaagtctcatttggttttccttcattgattggttttacttttatgtcagggatgatcaacaagttcaaagaggtgttcccgaaagcgcaggtttctatgtatgaagcgcaactgtcttcgttcttaccggcaatccgcgacggccgactggattttgcgattggtacgttaagcgcagaaatgaagcttcaggatttacatgttgagccgctgtttgagtccgagtttgtgctggtagccagtaagtcccgaacatgcaccggcaccaccacgctggagtcgttgaagaacgaacagtgggtgttgccacaaaccaatatggggtactacagcgaactacttactacgttacaaagaaatggcatcagtattgaaaacatcgttaaaaccgactcagtcgtgacaatttataatcttgttctcaatgctgatttcttaactgtaattccttgtgatatgacatcaccttttggttctaatcaatttattactattccggttgaagaaacattacctgtggcacaatatgccgcggtatggtcgaaaaattatcgtattaaaaaagcagcatcggttttggtggaattagccaaagagtattcatcttataatgggtgtagacgaaggcaattaattgaagttgattag

SEQ ID NO: 1155 - DNA, 990 bp, Escherichia coli
atgcatattacatacgatctcccggttgctattgatgacatcattgaagcaaaacaacgactggctgggcgaatttataaaacaggtatgcctcgctccaactattttagtgaacgttgcaaaggtgaaatattcctcaaattcgaaaacatgcagcgtaccggttcatttaaaattcgtggcgcatttaataaattaagttcactgactgatgcggaaaaacgtaaaggtgtagtggcctgctctgcgggcaaccatgcgcaaggggtttcgctctcctgcgcgatgctgggtattgacggtaaagtggtgatgccaaaaggtgcgccgaaatccaaagtcgcggcaacgtgcgactactccgcagaagtcgttttgcatggtgataacttcaacgacactattgctaaagtgagcgaaattgtcgaaatggaaggccgtatttttatcccaccttacgatgatccgaaagtgattgctggccagggaacgattggtctggaaattatggaagatctctatgatgtcgataacgtgattgtgccaattggcggcggcggtttaattgcaggtattgcggtggcaattaaatctatcaacccgaccatccgtgttattggcgtacagtctgaaaacgttcacggcatggcggcttctttccactccggagaaataactacgcaccgaactaccggcaccctggcggatggttgtgatgtctcccgcccgggtaatttaacttacgaaattgttcgtgaattagtcgatgacatcgtgctggtcagcgaagacgaaatcagaaacagtatgattgccttaattcagcgcaataaagtcgtcaccgaaggcgcaggcgctctggcatgtgctgcattattaagcggtaaattagaccaatatattcaaaacagaaaaaccgtcagtattatttccggcggcaatatcgatctttctcgcgtctctcaaatcaccggtttcgttgacgcttaa

SEQ ID NO: 1156 - DNA, 1332 bp, Escherichia coli
atgagtacttcagatagcattgtatccagccagacaaaacaatcgtcctggcgtaaatcagataccacatggacgttaggcttgtttggtacggcaatcggcgccggggtgctgttcttccctatccgcgcaggttttggcggactgatcccgattcttctgatgttggtattagcataccccatcgcgttttattgccaccgggcactggcgcgtctgtgtctttctggctctaacccttccggcaacattacggaaacggtggaagagcattttggtaaaactggcggcgtggttatcacgttcctgtacttcttcgcgatttgcccactgttgtggatttatggcgttactattaccaatacctttatgacgttctgggaaaaccagctcggctttgcaccgctgaatcgcggctttgtggcgctgttcctgttgctgctgatggctttcgtcatctggtttggtaaggatctgatggttaaagtgatgagctatctggtatggccgtttatcgccagcctggtgctgatttctctttcgctgatcccttactggaactctgcagttatcgaccaggttgacctcggttcgctgtcgttaactggtcatgacggtatcctgatcaccgtctggctggggatttccatcatggttttctcctttaacttctcgccaatcgtctcttccttcgttgtttctaaacgtgaagagtacgagaaagattttggtcgcgacttcaccgagcgtaaatgttcacaaatcatctctcgcgccagtatgctgatggttgcagtggtgatgttctttgcctttagctgcctgtttacgctgtctccggcgaatatggctgaagcgaaagcgcagaatattccagtgctttcttatctggctaaccactttgcgtccatgaccggtaccaaaacaacgtttgcgattacactggaatatgccgcttccatcatcgcactcgtggctattttcaaatctttcttcggtcactatctggggacgctggaagggctgaatggtttgattctgaagttcggttataaaggtgacaaaaccaaagtgtcgctgggtaaactgaatactatcagcatgattttcattatgggctccacctgggttgttgcctacgccaacccgaacatcctcgacctgattgaagccatgggcgcaccgattattgcatcactgctgtgcctgttgccgatgtatgccatccgtaaagcgccgtctctggcgaaataccgtggtcgtctggataacgtgtttgttaccgtgattggtctgctgaccatcctgaacatcgtatacaaactgttttaa

SEQ ID NO: 1157 - DNA, 1209 bp, Escherichia coli
atgaatgaatttccggttgttttggttattaactgtggttcgtcttcgattaagttttccgtactcaatgccagcgactgtgaagtattaatgtcaggtattgccgacggtattaactcggaaaatgcattcttatccgtaaatgggggagagccagcaccgctggctcaccacagctacgaaggtgcattgaaggcaattgcatttgaactggaaaaacggaatttaaatgacagtgtggccttaattggccaccgcatcgctcacggcggcagtatttttaccgagtccgccattattaccgatgaagtcattgataatatccgtcgcgtttctccactggcacccctgcataattacgccaatttaagtggtattgaatcggcgcagcaattattcccgggcgtaactcaggtggcggtatttgataccagtttccaccagacgatggctccggaagcttatttatacggcctgccgtggaaatattatgaagagttaggtgtacgccgttatggtttccacggcacgtcgcaccgctatgtttcccagcgcgcgcattctctgctgaatctggcggaagatgactccggcctggttgtggcgcatcttggcaatggcgcgtcaatctgcgcggttcgcaacggtcagagtgttgacacttccatgggaatgacgccgctggaaggcttgatgatgggtacccgcagtggtgatgtcgacttcggggcgatgtcctgggtcgccagccaaaccaaccagagcctgggggacctggaacgcgtagtgaataaagagtcgggattattaggtatttccggcctttcttcggatttacgtgttctggaaaaagcctggcatgaaggtcacgaacgcgcgcaactggcaattaaaacctttgttcaccgaattgcccgtcatattgccggacacgctgcttcattacatcgcctggatggaattatattcaccggcggaataggagagaattcaagtttaattcgtcgtctggtcatggaacatttagctgtattaggcgtagagattgatacagaaatgaataatcgctctaactcttttggagagcgaattgtttccagtgaaaatgcgcgtgtcatttgcgccgtaattccgactaacgaagaaaaaatgattgctttggatgccattcatttaggcaaagtgaacgcgcccgcagaatttgcataa

SEQ ID NO: 1158 - DNA, 2295 bp, Escherichia coli
atgaaggtagatattgataccagcgataagctgtacgccgacgcatggcttggctttaaaggtacggactggaaaaacgaaattaatgtccgcgattttattcaacataactatacaccttatgaaggcgatgaatcttttctcgccgaagcgacgccagccaccacggaattgtgggaaaaagtcatggaaggcatccgtatcgaaaatgcgactcacgcgccattggatttcgataccaatattgccaccacaattaccgctcatgatgcaggatatattgaccagccgctggaaaaaatagtgggtctgcaaacggatgcgccattaaagcgtgcgctgcatccgttcggcggcattaatatgattagaagttcattccacgcgtatggtcgtgaaatggatagcgaatttgaatacatctttaccgatctgcgtaaaacccataatcagggcgtatttgatgtttactcaccggatatgctgcgctgccgtaaatctggtgtactgaccggtttaccagatggttatggtcgtgggcgtatcatcggtgactatcgccgcgtggcgctttacggcatcagttatctggtacgtgaacgcgaactgcaattcgccgatctccagtcccgtctggaaaaaggcgaagatctcgaagccacgatccgtctgcgtgaggagctggcggaacatcgtcgtgcgctgttgcagattcaggaaatggcggcgaaatatggctttgatatctcccgtccggcgcagaatgcacaagaagccgtgcagtggctctacttcgcttacctggcggcagtgaaatcgcaaaacggcggcgcgatgtcgctggggcgcacggcatcgttcctcgatatctacattgagcgcgactttaaagcaggcgtactcaatgagcagcaggcacaggaactgatcgaccacttcatcatgaagatccgtatggtgcgcttcttgcgtacgccggaatttgattcgctgttctccggcgacccgatctgggcgacggaagtgatcggcgggatggggctggacggtcgaaccctggtgaccaaaaactccttccgctatttgcacaccctgcacactatggggcctgcaccggaacctaacctgactattctgtggtcggaagccttgccgattgccttcaaaaaatatgccgcgcaggtgtctatcgtcacatcctctttgcagtatgaaaacgacgatctgatgcgtactgacttcaatagcgacgattacgcgattgcctgttgtgtcagcccaatggtgattggtaagcaaatgcagttctttggagcacgcgctaacctggcgaaaacgctactgtacgcaatcaacggcggaatggacgagaagctgaagattcaggttggcccgaaaacggctccgttgatggatgacgtgctggactacgacaaagtgatggatagcctcgaccacttcatggactggctggcggtacagtacatcagcgcgctgaatatcattcactacatgcacgacaagtacagctacgaagcttcgctgatggcgctacatgatcgtgatgtctatcgcaccatggcgtgcggcatcgcgggcctgtcggtggcaacggactccctgtctgccatcaaatatgctcgtgtgaaaccaatccgtgatgaaaacggcctggcggtggatttcgagattgacggcgaatatccgcagtatggcaacaacgacgagcgcgtagacagcattgcctgcgatctggttgaacgctttatgaagaaaattaaagctttgccaacctatcgcaatgctgtgccgacccaatcgattctgactatcacctctaacgtggtgtacggtcagaaaaccgggaacacgccggacggtcgccgcgccggaacaccgttcgcgccgggcgctaacccgatgcacggtcgtgatcgcaaaggcgccgtagcctcattgacgtcggtggcgaaactgccattcacctacgccaaagatgggatctcgtacaccttctccatcgtccctgcggcgctgggcaaagaagatccgatacgtaaaacgaaccttgtcggcctgctggatgggtatttccaccacgaagcggatgtcgaaggcggtcaacacctcaacgtcaacgtaatgaatcgggaaatgctgctggatgccatcgagcacccggaaaaatatcctaacctgacaatccgtgtctctggctacgccgtgcgcttcaacgcactgacccgtgaacagcaacaggatgttatttcacgtacctttacccaggcgctctga

SEQ ID NO: 1159 - DNA, 390 bp, Escherichia coli
atgaaaaagattatcgaaacgcaacgtgccccaggcgcaatcggcccttatgttcagggcgttgatttaggcagcatggtcttcacctccgggcaaattccggtttgcccacagaccggtgagatcccggctgatgtgcaagatcaggcgcgtttaagcctcgaaaacgtcaaagcgatcgtggttgctgccgggctgagtgtgggcgatatcatcaagatgaccgtgttcatcaccgatctgaatgattttgccaccatcaatgaagtctataagcagttcttcgatgaacatcaggcgacctacccgacccggagctgtgtgcaggtcgcgcgtttgccgaaagatgtgaagttggaaattgaagccatcgcagtacgtagtgcgtaa

SEQ ID NO: 1160 - DNA, 1365 bp, Escherichia coli
atgattagtgcattcgatattttcaaaattgggattggtccctccagttcgcatactgtggggccaatgaatgccggaaaaagttttattgatcggctggaaagtagcggcttattaaccgcgacgagccatattgtggtcgatctgtacgggtcgttgtcactgacgggcaaaggccatgccacggatgtcgccatcatcatgggactggcaggaaacagtccgcaggatgttgtcattgatgagatccctgcatttatagagttagtgacgcgcagcgggcggttgccggtggcttctggcgcgcatattgttgattttcctgtagcaaagaacattatcttccatcccgaaatgttgcctcgccatgagaacggaatgcggatcactgcctggaagggacaggaagagctattaagcaaaacctattactctgtcggcggcgggtttattgtcgaagaagaacacttcggcctgtcgcacgatgtcgaaacacccgtaccttacgatttccactcagcaggtgaactgctgaaaatgtgtggttacaacggcctgtctatatctggcctgatgatgcacaacgagctggcgctgcgcagtaaagcggaaattgacgcagggtttgcccgtatctggcaagtgatgcatgacggtattgaacgtggaatgaatactgaaggcgtgctgcctggtccgctcaatgtgccgcgccgtgccgtagcgctgcgtcgtcaactggtttccagcgataacatctctaacgatccgatgaatgtcatcgactggatcaacatgtacgcgctggcggttagtgaagaaaacgcagctggcgggcgcgtggtaacggcaccgactaacggtgcgtgcggcattattccggcagtgctggcttattacgataagttccgtcgtccggtaaacgagcggtcaattgcccgctattttctggcagcgggggctattggcgcgctgtataaaatgaacgcctccatctctggcgcggaagtcggctgtcagggggagattggtgtagcctgttcaatggcggcggcagggttaactgaactactgggcggcagtccggcgcaggtatgcaatgcggcggaaatcgcgatggagcataaccttgggctgacctgcgatccggttgccggacaggtacaaatcccgtgcattgaacgtaatgccattaatgccgtgaaagcagtaaacgccgcgcggatggcgatgcgccgcacctcggcaccgcgtgtttcactcgataaagtgatcgagacgatgtatgaaaccggcaaagatatgaacgataaataccgcgaaacatcacgcggaggactggctattaaagtggtctgcggctga

SEQ ID NO: 1161 - DNA, 1332 bp, Escherichia coli
atggaaattgcatcgaataaaggcgtcattgcagacgcttcgaccccggcgggtcgtgctggaatgagtgagagcgagtggcgagaagcgatcaaattcgacagtactgacaccggctgggtgattatgagtatcgggatggcgattggcgcggggattgtttttctcccggtgcaggtcggtttgatgggattgtgggtatttttgctctcatcggtgattggttacccggcaatgtatctgtttcagcggttgtttattaatacgctggcagaatcaccggagtgtaaagattacccgagcgtcatcagcggttatttaggtaaaaactggggcatcctgttaggtgcactctatttcgtaatgctggtgatttggatgttcgtctattccaccgccatcaccaacgatagtgcttcctacctgcataccttcggcgtgacggaagggttgctgtcagacagtcccttttatggtctggtactgatttgcattctggtggcgatctcctcacgcggcgagaaattgttattcaaaatttcgaccggcatggtgctgaccaagctgctggtggtcgcggcgctgggcgtgtcgatggtgggaatgtggcatctgtataacgtcggttcgctaccgccgctggggctgctgatgaaaaacgccattattacgctgccgtttaccctgacgtcgattctgtttatccagacgttaagcccgatggtgatctcttatcgctcacgggaaaaatcaattgaagtggcgcggcataaagcattgcgggcaatgaatatcgcgtttggcattttgtttgtcaccgtctttttctacgccgtgtcattcacgctggcgatgggacatgacgaagcggtaaaagcctacgagcagaatatttccgcgctggcgattgccgcacagtttattagcggtgacggcgcagcgtgggtgaaagtggtcagcgttattctcaatatctttgctgtaatgactgcattctttggcgtctatttaggctttcgcgaagcaacgcaagggatcgtaatgaacatcctgcgtcgcaagatacctgccgagaagattaacgaaaatctcgttcagcgcggcatcatgattttcgccattttgctggcctggagcgccatcgtactgaacgccccggtgttgagcttcacctctatctgtagcccgattttcggcatggtagggtgcctgatcccggcgtggctggtttacaaagtaccggcattgcacaaatacaaagggatgtctctgtacctgattatcgtcactggtttgttgctttgtgtttctccgttcctggcattttcttga

SEQ ID NO: 1162 - DNA, 1311 bp, Escherichia coli
atgtttgattcgactttaaatccgttatggcagcgttacatcctcgccgttcaggaggaagtaaaaccggcgctggggtgtactgaaccgatttcactggcgctggcggcggcggttgctgcggctgaactggaaggtccggttgaacgtgtagaagcctgggtttcgccaaatctgatgaagaacggtctgggtgtcaccgttcctggtacaggaatggtggggctgccaattgcggcggcgctgggagcgttaggtggaaatgctaacgccgggctggaagtgctgaaagacgcaactgcgcaggcaatttccgatgccaaagcactgctggcggcggggaaagtctcagttaagatccaggaaccttgcgatgaaatcctcttctcacgcgccaaagtctggaacggtgagaagtgggcgtgtgtcaccatcgtcggcgggcataccaacattgtgcatattgagacgcacaatggtgtggtgtttacccagcaggcgtgtgtgacagagggcgagcaagagtcgccgctgacggtgctttccaggacgacgctggctgagatcctgaagttcgtcaatgaagtcccgtttgcggcgatccgctttattctcgattctgcgaagttaaattgtgcgttatcgcaggaaggtttgagcggtaactgggggctgcatattggtgcgacgctggaaaaacagtgcgcgcgcggtttgctggcgaaagatctctcttcatccattgtgattcgtaccagcgcggcatccgatgcgcgtatgggcggcgctacgcttccggcaatgagtaactccggctcgggtaaccaggggatcaccgcaacaatgcccgtggtggtggtagcagaacacttcggagcggatgatgaacggctggcgcgtgcgctgatgctttcgcatttgagcgcgatttacatccataaccagttaccgcgtttgtctgcgctgtgtgccgcaacgaccgcagcaatgggggccgctgccgggatggcatggctggtggatgggcgttatgaaaccatctcgatggcgatcagcagtatgatcggcgatgtcagtggcatgatttgcgatggtgcgtcgaacagctgcgcgatgaaggtttcgaccagtgcttcggctgcgtggaaagcggtgttaatggcgctggatgataccgctgtgaccggcaatgaagggattgtggcgcatgatgttgagcagtcgattgccaacctgtgtgcgttagcaagccattcgatgcagcaaacggatcggcagattatcgagattatggcgagcaaggccagataa

SEQ ID NO: 1163 - DNA, 165 bp, Escherichia coli
atgagtaaaaaatcggccaaaaagcgtcagccagtgaagcccgtggtggcgaaagaacctgctcgcaccgccaaaaattttggctatgaagagatgttgagcgagctggaagctatcgtcgcggatgctgaaacgcgtttagccgaggatgaagctaccgcgtaa

SEQ ID NO: 1164 - DNA, 702 bp, Escherichia coli
atgattactacccgaactgccaggcagtgtggacaagcagactacggatggttgcaggcccggtatactttttcctttggacactacttcgacccgaaattgttaggctatgcctccctgcgtgtgcttaaccaggaagtgctggccccaggagccgcctttcagccgcgaacctatcccaaagtcgatattttaaatgtgattctggatggagaagcagagtatcgcgacagcgaaggcaatcatgttcaggcctgcgctggtgaggcgttgctgctctctacccagccgggtgtcagctatagcgaacacaatctcagcaaagacaaaccgttaacacgaatgcagctttggctggatgcctgcccgcagcgagagaatccgctgattcaaaagctggcgcttaatatggacaagcagcaattaatcgcctcgccagagggtgcgatgggaagcctgcaattacgccaacaagtgtggctgcaccatatcgtgctcgacaaaggcgaaagtgcgaatttccagttgcatgggccacgcgcgtatttgcaatcgattcacgggaaatttcatgcgcttacgcatcatgaagagaaagcggcgctaacctgcggtgatggggcgtttattcgtgacgaggctaacattacgctggttgccgattccccactgcgcgctttgctgatagatttgcctgtctag

SEQ ID NO: 1165 - DNA, 897 bp, Escherichia coli
atggccaaagaaagggcattaacgctggaagcactacgggttatggatgcgatcgatcgccggggcagttttgcggcggcggcggatgagctgggacgcgtgccttccgcacttagctacaccatgcaaaaactggaagaagagctggatgtggtgctgtttgaccgctcgggccatcgcaccaaattcaccaatgtcgggaggatgttgctggagcgagggcgcgttttgctggaagccgcagataaactgactaccgatgcggaagccctcgcgcgcggttgggaaacgcatctcaccattgtgaccgaggcgttggtaccgacacctgcctttttcccgttaatcgacaaactggcggcaaaagccaatacccaactggcaattatcaccgaagtgctggcgggggcgtgggaacggctggagcaggggcgggcggatatcgttatcgcgccggatatgcattttcgttcctcgtcggagatcaactcgcgcaaactctataccttaatgaacgtctatgttgccgcgccggatcacccgattcatcaggagccggaaccgttatctgaagtgacgcgcgtgaaatatcgtggaattgcggtggcggataccgctcgtgagcgcccggtgttgaccgtacagctgctggacaaacagccgcgcttaacggtgagcacgattgaagataaacgtcaggcattactggcggggcttggcgtggcgacgatgccgtatccgatggtcgaaaaagatatcgcggaagggcggttgcgtgtcgtcagcccagaatcgaccagcgagatcgatattattatggcctggcgtcgtgacagtatgggggaagcgaaatcctggtgtttgcgggaaattcccaaactttttagcggaaaataa

SEQ ID NO: 1166 - DNA, 369 bp, Escherichia coli
atggactggtatctgaaagtactaaaaaattatgtcggtttccggggtcgtgcgcggcgcaaagagtactggatgtttattctggtcaacatcatctttacgttcgtgctggggctactggataaaatgttaggctggcaacgtgccggtggcgaaggcatcctgacgacaatctacggtattctggtgtttttaccatggtgggcagttcagtttcgccgcctgcacgacaccgaccgctcggcgtggtgggcactgctattcttaatcccgttcatcggctggcttattatcatcgtctttaactgccaggcgggtacgccaggcgaaaaccgctttggaccagatccgaaactggaacaagaataa

SEQ ID NO: 1167 - DNA, 987 bp, Escherichia coli
atgggtcaactgattgacggcgtctggcatgacacctggtacgataccaaatccaccggcggtaaatttcaacgttcagcttccgcatttcgtaactggctcactgccgatggcgcgccaggccccactggcaaaggcggttttgccgcagagaaagatcgttatcatctctatgtttcactcgcctgcccgtgggcacaccgcacgctgatcatgcgtaagctcaaaggactggaaccgtttatttccgtttccgtagtgaacccgctgatgctggaaaacggctggacctttgatgacagttttccgggagcaaccggcgacacgctctatcaacatgaatttctgtatcagctttatctccacgccgatccacactacagcggacgagtgactgttcccgtgctgtgggacaaaaaaaaccacaccatcgtcagcaacgaatcagcagaaatcatacgcatgttcaataccgcgtttgatgcgctgggtgcgaaagctggagattactacccaccagccctgcaaccgaaaattgacgaacttaacggctggatttacgacaccgttaacaatggcgtgtataaagccggttttgccaccagccagcaagcctacgacgaggcggtggcgaaagtgtttgaatcgctggcgcgactggaacagattttaggtcagcaccgttacctgaccggcaaccagctaaccgaagccgatattcgcctgtggaccacgctggtgcgttttgatccagtgtatgtgacccacttcaagtgtgataagcaccgcatcagcgattacctgaatctgtatggcttcctgcgcgatatctaccagatgccgggaattgccgaaacagtcaatttcgatcacatccgtaatcattacttccgcagccataagaccatcaaccctacggggattatttcaattggtccgtggcaggatctcgatgaaccgcatggacgagatgttcgcttcggttaa

SEQ ID NO: 1168 - DNA, 483 bp, Escherichia coli
atgattctctccatcgacagcaacgacgctaatagcgcgcccttgcacaaaaaaacaatcagcagcctgagcggcgcagtggagagtatgatgaaaaaattagaagatgttggtgtactggtagcgcgtattttaatgccgattctgtttattaccgcaggctggggaaaaattactggctacgcgggtacccaacaatatatggaagcaatgggcgtccccggctttatgctgccgctggtgattctgcttgagtttggtggtggtctggcaatcctgttcggtttcctgacacgtaccacagccctgtttactgcgggctttacgctgctgacggcatttttatttcacagcaactttgcagaaggcatgaactcgctgatgtttatgaaaaacctgactatttctggcggattcctgctgctggcaattaccggtccaggcgcattcagcatcgaccgcctgctgaataaaaagtggtaa

SEQ ID NO: 1169 - DNA, 300 bp, Escherichia coli
gtgagcagtaaagtcgaacgtgaacgacgtaaggcgcaactgcttagccagatccagcaacaacggctggatctttccgccagtcgtcgtgaatggctggaggcaacaggcgcttacgatcgtcgctggaatatgctgttgagtctgcgctcctgggcgctggttggcagtagcgtgatggctatctggacgattcgccatcctaatatgctggtccgctgggccagacgcggttttggtgtatggagcgcctggcgtctggtgaaaacaaccctcaagcaacaacagcttcgcggttaa

SEQ ID NO: 1170 - DNA, 405 bp, Escherichia coli
atggcggacactcatcacgcgcaagggcccggtaaaagcgttctgggcatcgggcagcgaattgtttccatcatggttgaaatggtggagacacgtctgcggctggcggtggtggagctggaagaggaaaaagcgaatctctttcaacttttactgatgctgggcctgacgatgcttttcgctgcatttggtcttatgagcctgatggtgctagttatctgggcggttgatccgcaatatcgcctgaatgcgatgattgccaccaccgtggtgttgctgctactggcactgattggcggcatctggacgttacgtaaatcgcgtaagtctacgttgctgcgccacacgcgccatgagctggcaaacgatcggcagctgctcgaggaggagtcccgtgagcagtaa

SEQ ID NO: 1171 - DNA, 306 bp, Escherichia coli
atgtcgaaagaacacactacggaacatctgcgtgctgagttgaaatccctttccgatacgctggaagaggtgcttagctcatctggcgagaagtcaaaagaagagttgagtaagattcgtagcaaagcggagcaggcactgaaacagagccgttatcgcctgggtgaaaccggtgatgccattgccaaacaaacccgtgtcgcggcggcgcgtgccgatgagtatgtgcgtgaaaatccgtggacgggcgtgggcattggcgcagcaatcggtgtagtgctcggcgttctgctgtcgcgtcgttaa

SEQ ID NO: 1172 - DNA, 369 bp, Escherichia coli
atgaaataccgcatcgctttagctgtttctctctttgctcttagtgccggtagttatgccactaccctgtgtcaggaaaaggagcaaaatatccttaaggagatcagctatgccgaaaaacaccaaaaccagaatcgtattgacggtctgaataaagccctgagtgaagtccgggccaactgttcagatagccagctgcgtgccgatcatcagaagaaaatcgcaaagcagaaagatgaggtggcggaacgccagcaagatttagccgaggcgaagcaaaaaggcgatgcagataagattgccaaacgcgaacggaaactggtagaagcgcaggaagagctgaaaaagctgaaagcgcgcgactactaa

SEQ ID NO: 1173 - DNA, 384 bp, Escherichia coli
atgcaaatacctcgcatgtcacttcgccagctagcctggtccggcgctgttttacttctggtcagcacactattgctggcctggtccgcggttcgccagcaagagtctacgctggcgattcgtgccgttcatcaagggacaacgatgccagacggtttttcaatctggcatcaccttgacgctcacggcattcctttcaaaagtatcacccccaaaaacgacactctgttaattacctttgactccagcgaccagagcgccgccgcaaaagcggtcctcgacagaacattgccccatggctacatcattgcgcagcaggacaataacagtcaggctatgcagtggctgacccggttgcgggataactctcatcgcttcggataa

SEQ ID NO: 1174 - DNA, 663 bp, Escherichia coli
atggaacttttgacccaattgctgcaagccctgtgggcgcaggattttgaaaccctggccaatccgtcgatgattggcatgttgtattttgtcttgtttgtcattttgttccttgaaaacggcttgcttccggcggcctttttaccgggcgacagtttactggtactggtcggcgtattgattgcgaaaggcgcgatgggctatccgcaaacgattctgctgctgaccgttgccgccagcctcggttgctgggtcagctatattcaggggcgatggctgggcaatacccgcaccgtacaaaactggctatctcatttacccgcgcattatcatcaacgcgcgcaccatctttttcataaacacggtttatcggcgctgttaattggtcgctttattgcgtttgtcagaacactgctgccgacgattgccgggttatcagggctgaataacgcgcgctttcagttcttcaactggatgagtggtctgctgtgggtgttgatcctgacaactctgggttacatgctcggcaaaacgccggtatttttaaagtacgaggaccagctgatgtcatgcctgatgctgctcccggtggtgctgctggtgtttggcctggcaggttctctggtcgtgttatggaaaaagaaatatggaaatcgggggtaa

SEQ ID NO: 1175 - DNA, 777 bp, Escherichia coli
atggaaatcactgaaccacgccgtttgtatcaacaacttgccgctgatctgaaagagcgcatcgaacagggcgtctatctggtgggtgataaactgcctgccgaacgctttattgccgatgaaaaaaacgtcagccgcaccgtggttcgtgaagccatcatcatgctggaagttgaaggctatgtcgaagtgcgtaaaggttcaggtattcatgtggtttccaaccagcctcgccatcagcaggcggctgacaataatatggaattcgccaattacggtccgtttgagttgctccaggctcgccagctcatcgaaagtaatattgccgagttcgcggcaactcaggtcacaaaacaggacatcatgaaattgatggccattcaggagcaggcacgcggcgaacaatgcttccgtgattccgagtgggatttgcagttccatattcaggtagccctggcgacgcagaactccgccctggcggctatcgttgaaaaaatgtggacccagcgtagtcataacccgtactggaaaaaactgcacgaacacattgatgcccgtaccgtcgataactggtgtgatgaccacgatcaaatcctcaaggcgctgattcgcaaagatcctcatgctgctaagctggcaatgtggcagcacctggaaaacaccaagatcatgttatttaacgaaaccagcgacgatttcgagttcaatgccgaccgctatctgttcgccgaaaacccggtggtgcatctcgatacagccaccagcggcagtaaatga

SEQ ID NO: 1176 - DNA, 720 bp, Escherichia coli
atggtggcgaaaattaatcgattattacggctcgggcctgtcttacttctgtgtacatcatttttcgcacaatctaatatgactgtctaccctatggctgtttccattaatagccagggagaaggaagtgttcgtgtaatatctaaaagtaacgaagttcaatacataaaagcgacagtattccgcatcgataacccatcaacgcctctagaaaacgaagtggaaattaaatccggtgatgctaatcatttggttgttatgccacctaaattcgccttaccagccggtagtagcaaaaccgtgcgctttgtcgcaatggaaccagagcaacaagaaaaaaactatcgtgttaagtttgaagctgtacccagcattgatgatgttgctaccgataaaaaagatctctctatgcagttaacggttaatttaatttggggcatcgttgttagtgttccacctcaacaaccagttactaaattagaaattaattcagcaaaaaaactactcaatgcaggaaatcagcgtcttaaagtgttgacaatcgcttattgtaaaaataatagcaaagataatagttgtaagactcagaccgtaaataaaaacattttccctggtcaggaaaaaagtttagaaagcatatctggctacgataaaatcgttgtcaaatataataactggatcaccaaggacaatggcgagtttgagctggcggtccattaa

SEQ ID NO: 1177 - DNA, 501 bp, Escherichia coli
atgaaaaaggtattcgtaaaatctcttctggtagccgcaatgttttccgttgcaggttctgcattagcagtacaaaaagatattactgtcactgctaatgttgatgctgctctggatatgactcagaccgataactctgcgctgccgaaagcagtagagatgcaatatctgccgggtcagggtctgcagtcttatcagttaatgaccaaaatctggtctaacgacgtcactaaagatgtgaaaatgcagttagtttctccggcgcaactggttcagagcctggacgccagcaaaattgttccgctgactgtaagctggggtgatgaagagattaaagctgatgcagcaaccacttttagcgcagttaaaatttttgcgtctgatgctataaccaacggttctctggctaaaaacctgatgtttgctcagaccaccaaaggtgttctggaaacaggtatctaccgtggcgtagtcagcatttatctgtctcaggatatctaa

SEQ ID NO: 1178 - DNA, 2685 bp, Escherichia coli
atggataaaaaattactggctcttttgatcctggcgagtctcagcccggcaaaggcgacattaaccaaaattcccgctggttttgaggttattgctcagggacagcaggagtatatcgaggtttattttgcagggaaaagtctcggtaaatattatgcgatggttaatcttgataccgtaacctttcttgattcagcaagtttatacagcaaacttgaattgagcactgacgatcaaaaaatcactcatacagtgaaagaaaaactatcgcagcccttagctcgccacggtgaactggcttgtggttttgtacgtactgattcaggatgcggttttcttaatactgagacagtagaaataatctacaatgatgaagaaagttcagtaacgctatttcttaatccgcaatggagttctgcgtttaactcgaagtcattgtatttaaatccagacaaaaatacggttaacgcttttatacatcagcaagacattaatgttctggtacaggacgattaccaatcgttgtcaattcagggtaacggtgcgctgggaataacagaaaatagctatattggcgcacactggaatttcaacggttatgatgcagatgatgtcagcgacaacaatgtcgatgtcagcgatctctattaccgctatgattttttacgccgttattatgtgcaggcggggcggatggacaaccgcacattatttaatgcgcaaggtggaaactttacttttaactttctgccgcttggtgcaatcgacggtatgcgtatcgggtcgacactcagttatttaaaccagacgcaaagccagcagggaacgccggtaatgatcctgctttcgcgcaattctcgtgttgatgcttatcgtaatgagcaactgttgggatcgttttatctcaatagcggttcgcaatttattgataccagttcctttccgccaggcagctatagcgtggcgttaaaagtctatgaaaataaccaactcacccgcaccgagcttgtgccgtttaccaaaactggcggtctgacagacggaaatgcccagtggttcttacaggcaggtaaaaccacatcacaggtttctgatgatgaaagttcagcttatcagctaggggtacgcctgccattacatccgcaatatgagctctacgcagggctggcgaatgccgatgatgtaagtgctttcgagttaggtaataactggacggcggatttaggcgaggcggggaatctggccatcagcgccagcgtgttccgtaacaatgacggtggcaaaggcgatatgcaacaggccaactggagtcatccgggatggccgacgttgggtttttatcggaccaactctgacggtgatgcttgtacaaccgatagcagagagagctacaacgccttaagctgttatgaaagtatttccgcgacggtttcacagaatcttgtcggctggaatatgatgctgggttatacccgcacgcaaaataacactgatgatagtttgcgttgggataaacagcagagctttgaaaataactatcttcgccagactacggcacaaagtatttccgaaaccgtacaacttagcgcttctcgcgcttttgtgatgcgtgactggattttgagtacttcccttggggttttccatcgtaacgacaacggcagtggtagcgatgataacggtttgtatctgtcattttcgttatctgatacgccgacgatggacagcaataacaacagccattcaaccaatgtttctacggattatcgttatagcgatcaggatggcgatcaaacgtcatggcagttatcgcataccttttataacgactcattcagccataaagagcttggcgtgaccgtcggcggtttgaacaccgataccataaacagcgcggttaacgggcgttgggatggtcaatatggaaatgtctacgctacagtctcagacagttatgatcgccagaatcatgatcatctctcggccttcaccgggacatacagctccacgctggcggtgagtcgctatggcatcaatgtgggggccagcggcacagatgatttgctgggggcggtgttggtggatgtgaaaggtttctctgaacaggatgaacagagtcaggatctgcaactcgaagcgcgggtggctggcagcagaacattgcagcttggtcaacgcgacagcgtgttattcccctatcctggatttcagtctggctttgttgaagttaacgacagtaatcagggtaaccagcaaggaacaaccaacatcattaacggcgcgggaaatcgcgagttaatgctgttgccgggcaaattacgttatcgcgaggtgtcggccagttttaattacaactatattggtcgcttgttattacccgcatcggtagagaagttcccgctggtgggtctgaatagcgccatgctactggtggctgaagatggcggatttacactggagattaacggtagtgaaaaagaactgtatctgctttccgggcagcagttcctgaaatgtccgctgagtgttttgaagaaacgcgccagcattcgctatagcggggatgtgaattgtagcgtggtgagttattcgcaactgccggagtctattcaggttcaggcacagttaaaacagcctaaattacgtggaaacgtccagacggcgcaaagggagattgcaccatga

SEQ ID NO: 1179 - DNA, 660 bp, Escherichia coli
atgataaatcgattgattgccgtggttttatgcttatttggcatggtcgcgtgggttcaggcaacacccaatgtgacggctgaaattacttatgatttggccgtcggtagggctgattattacttctggaacgaggaagagtcggctgggaataatgcatatatgtggtatgaatgttcgtaccccaatctccagcaaacctgtacgaattctggaaatatctcgacagtacaaatttatttaacggagcaacgtagtggtatgcgctggccacttaagctcaaaggatttaaagaagcttatgtcatgaatcaagtacctgggtgcgaaggatatgttgcaaaaacgcacctccaggaatctaatcggtataaatgcatggcaactggtgattcaaccatatattttgctgataaaaagtttcttacactttaccttgaacaggcagaaatgaagaagctgccaattggtggtgtctggaaagggcaggttaaactgcattctaatagtcctgctcaggactattttgcggatattaccctgaacaccctcgatcccaaccatattgacgtattcttcccggagttcgcccacgctacgccacgggtacaactggatttgcacccaacaggcagcgtgaatgccagtaattatgcctag

SEQ ID NO: 1180 - DNA, 411 bp, Escherichia coli
ttggatatgtgcctgtacgacggttttaacggtaatgccatcagttatgaaattatgcttaaagatgaagggctacccgcggcagggcgcagagatggttatttttccatttatcgtcagggaagaacaacgactgacgatgtagagcgtatcgattacagagtaaaaatgtataacccggaaacaggtgggcaaatcgacgtacgcaataatgaaaatatggtctggaacagcattaacctgaagcgagttcgtccggtggtattgccgggcattcgttacgccgtaatgtgtgtgcctacgccactaaccctggcggtcgataaattcagcgtgatggataaacaggcgggatattacatgggtaaattgtcggtcatttttaccccgtcattgccgacgatcaattag

SEQ ID NO: 1181 - DNA, 1299 bp, Escherichia coli
atgcgtaaaattaaagggttacgttggtatatgatcgcactggtgacgctcggcaccgtgcttggttacctgacgcgtaacactgtggcggcagctgcgccaactctgatggaagagttaaacatctccacccaacagtattcctatatcatcgcagcgtattctgctgcttatacggtcatgcaaccggtagcgggttatgtactggatgtgctgggtacgaaaatcggttatgcaatgtttgctgtactgtgggccgtgttctgtggtgcaaccgcgctggcaggtagttggggtggcctggcggttgctcgtggtgcggtcggtgccgcggaagccgcgatgattccggcgggtctgaaagccagttccgaatggttcccggcaaaagagcgttccatcgcggtaggttactttaacgtaggttcttcgattggtgcgatgattgcgccgccgctggtggtatgggcaatcgtgatgcacagctggcagatggcatttatcatctccggtgcgttgagctttatctgggcgatggcatggctgattttctataaacatccgcgcgaccagaaacatctgaccgatgaagaacgcgactacattattaatggtcaggaagcccagcaccaggttgacacagcgaagaaaatgtccgttggtcagatcctgcgcaaccgtcagttctggggtatcgcgctgccgcgcttcctggcagaaccggcatggggtacttttaacgcgtggatcccgctgttcatgtttaaagtttacggctttaacctgaaagagatcgcgatgtttgcctggatgccgatgctgtttgctgacctcggttgtatcctcggtggttacctgccgccgctgttccagcgttggtttggtgtgaacctgatcgtttcccgtaagatggtcgtaacgctgggtgcggtgctgatgattggcccgggtatgatcggtctgttcaccaacccgtatgtcgcgattatgctgctgtgtatcggtggttttgctcaccaggcactgtctggcgcactgattacgctctcgtctgacgtgttcggtcgtaacgaagtggcgacggcgaacggtttaaccgggatgtccgcatggctggcaagtacgctgtttgcactggtagtcggtgcactggctgacaccatcggcttcagcccgctgttcgcagttctggcagtgttcgacctgttaggtgcgctggttatctggaccgtgttgcagaacaaaccggcgattgaggtggcgcaggaatcacataacgatcccgcaccgcaacattaa

SEQ ID NO: 1182 - DNA, 1413 bp, Escherichia coli
atgactccgtttatgactgaagatttcctgttagatactgaatttgcccgccgtctgtatcacgactacgcaaaagaccagccgattttcgattaccattgccatttgccgccgcagcagattgcggaagactatcgttttaaaaacctgtatgacatctggttgaagggcgatcactacaaatggcgcgctatgcgtaccaacggtgtggccgagcgtctgtgcaccggtgatgcgtctgaccgtgaaaaatttgacgcctgggcggcgactgttccgcacactattggcaacccgttataccactggacgcacctcgaactgcgtcgtccgtttggtatcactggcaaattgctttctccgtcaactgccgatgaaatctggaacgaatgtaacgaactgctggcgcaggataatttctctgcacgcggcatcatgcagcagatgaacgtgaaaatggtcggcaccaccgatgacccgatcgattctctggagcatcacgcagagatcgccaaagacggctctttcaccattaaagtgctgccgagctggcgtccggacaaagcctttaacattgaacaggcgacctttaacgactacatggcgaagctgggcgaagtttccgataccgacattcgccgctttgctgacctgcaaactgccctgactaaacgtctggatcacttcgccgctcacggctgtaaagtgtctgaccacgcgctggatgtggtgatgtttgctgaagcgaacgaagcggaactggacagcatcctcgcgcgccgtctggcaggcgaaaccctgagcgagcacgaagtggcacagttcaaaactgcggtgctggtgttccttggtgccgaatatgcacgtcgcggatgggtacagcagtaccacattggcgcactgcgtaataacaacctgcgtcagttcaaactgctggggccggatgtcggctttgactccatcaacgaccgtccgatggcggaagagctgtctaagctgctgagcaagcagaacgaagaaaacctgctgccgaaaaccattctctactgcctgaacccgcgcgataacgaagtgctgggcaccatgatcggtaacttccagggcgaaggtatgccgggcaaaatgcagttcggttccggctggtggtttaacgaccagaaagacggtatggaacgtcagatgacccaactggcgcagctcggtctgctgagccgctttgtcggcatgctgactgacagccgtagcttcctgtcatacacccgtcacgaatacttccgccgcattctgtgccagatgatcggtcgctgggtggaagcaggcgaagcaccggcggacatcaacctgctgggcgagatggtgaaaaatatttgctttaacaatgcgcgtgactacttcgccattgaactgaactaa

SEQ ID NO: 1183 - DNA, 1488 bp, Escherichia coli
atgcaatacatcaagatccatgcgctggataacgtcgcggttgctttagcggatttggctgaaggcacagaagtcagtgtcgataaccagactgttacgctgcgccaggatgttgctcgtggacataaatttgcgttaacggatatcgcaaaaggggccaacgtcattaaatatggcctgccgattggttatgcattggcggatattgcggcgggggaacacgttcacgcccacaatacgcgcacgaatctgagcgatctggatcagtatcgctatcaacctgattttcaggatctgcctgcgcaagcggcagatcgtgaagtgcagatctatcgtcgcgctaacggcgatgtcggggtgcgtaatgagctgtggatcctgccaaccgtgggctgtgtcaacggcatcgcgcggcagatccaaaatcgtttcctgaaagagaccaacaacgctgaaggtaccgacggcgtgttcctcttcagccacacctacggctgctcacaactgggcgacgatcacatcaatacccgcaccatgctgcaaaacatggtgcgccacccgaacgcgggcgcagtgctggtgattggtctgggctgtgaaaacaaccaggttgccgcattccgtgaaacgttgggcgatatcgatcctgaacgcgttcatttcatgatctgccaacagcaggatgatgaaatcgaggccgggatcgcgcatttgcatcagctgtatagcgtgatgcgcaacgataaacgcgagccgggcaaactcagcgaactgaagtttggtctggagtgcggtggttctgacggtctttctggtattactgctaacccgatgctggggcgtttctctgactacgtgattgctaacggcggtactaccgtactgaccgaagtgccggagatgtttggcgcagagcagttgctgatggaccattgccgcgacgaagcaacgtttgaaaaactggtcaccatggtcaatgacttcaagcagtactttattgcccatgaccagccgatctacgaaaacccatcaccggggaacaaagcaggcggtatcactacgctggaagataaatcgcttggctgtacccagaaagcgggttccagtgtcgtggttgatgtgctgcgttacggcgagcgtctgaaaacgccggggctgaacttgttaagtgcgccgggtaacgatgccgtagcgaccagcgccctggcgggtgcgggctgccatatggtgctgttcagtactggtcgtggcacgccgtatggtggatttgtgccgacggtgaaaatcgccaccaacagtgaactggcggcgaagaaaaaacactggatcgactttgacgcgggtcagctgatccacggtaaagcgatgccgcagttgctggaagaatttatcgacaccatcgttgagtttgccaacggtaagcaaacctgtaacgagcgtaacgacttccgcgaactggcgatcttcaaaagcggcgtaacgctataa

SEQ ID NO: 1184 - DNA, 552 bp, Escherichia coli
atgaccgcgtattggctggcccagggcgtgggtgtcatcgcctttctgattggtatcacaacatttttcaatcgtgacgaacgtcgcttcaaaaagcaactttcggtctatagcgccgttattggcgtacatttttttcttctgggcacctatcctgccggtgccagtgccatccttaatgccattcgtacattgattaccttacgcacgcgcagcttatgggtaatggcgatttttattgtgctgactggcggaattggcctcgcgaagttccatcatcctgtcgaactattgccggtaatcggcacgattgtcagtacctgggcgctgttccgctgtaaagggctgaccatgcgctgcgtaatgtggttttcaacgtgttgctgggtgattcacaacttctgggcggggtcgataggcggcacgatgattgaaggcagttttctgctgatgaatggcctgaatatcattcgtttctggcgtatgcagagaaggggaattgatccgtttaaagtggagaaaaccccttccgccgtagacgaaaggggctaa

SEQ ID NO: 1185 - DNA, 1245 bp, Escherichia coli
atgactacgcaacgttcaccggggctattccggcgtctggctcatggcagcctggtaaaacaaatcctggtcggccttgttctggggattcttctggcatggatctcaaaacccgcggcggaagctgttggtctgttaggtactttgttcgtcggcgcactgaaagccgttgcccccatcctggtgttgatgctggtaatggcatctattgctaaccaccagcacgggcagaaaaccaatatccgccctattttgttcctctatctgctgggcaccttctctgctgctctggccgcagtagtcttcagctttgccttcccttctaccctgcacttatccagtagcgcgggtgatatttcgccgccgtcaggcattgtagaagtgatgcgcgggctggtaatgagcatggtttccaaccccatcgacgcgctgctgaaaggtaattacatcgggatcctggtgtgggcaattggcctcggtttcgcactgcgtcacggtaacgagaccaccaaaaacctggtcaacgatatgtcgaatgccgtcacctttatggtgaaactggtgattcgcttcgcaccgatcggtatttttggtctggtttcttctaccctggcaaccaccggtttctccacactgtggggctacgcgcaactgctggtcgtgctggttggctgtatgttactggtggcgctggtggttaacccattgctggtgtggtggaaaattcgtcgtaacccgttcccgctggtgctgctgtgcctgcgtgaaagcggtgtgtatgccttcttcacccgcagctctgcagcgaacattccggtgaatatggcgctgtgtgaaaagctgaatctggatcgcgatacctattccgtttctattccgctgggagccaccatcaatatggcgggcgcagcaatcaccattaccgtgttgacgctggctgcagttaatacgctgggtattccggttgatctgcccacagcgctgctgttgagcgtagtggcttctctgtgtgcctgtggcgcatccggcgtggcgggggggtctctgctgctgatcccactggcctgtaatatgttcggtatttcgaacgatatcgccatgcaggtggttgctgtcggctttatcatcggcgtattgcaggactcttgcgaaaccgcgctgaactcgtcaactgacgtgctgttcactgcggcagcttgccaggcggaagacgatcgtctggcaaatagcgccctgcgtaactaa

SEQ ID NO: 1186 - DNA, 966 bp, Escherichia coli
atgaatactgtcggcacgccgttgctatggggcggattcgctgttgttgtcaccattatgctggctatcgacctgttgttgcaggggcgtcgtggggcacatgccatgaccatgaaacaggctgcggcctggtcgctggtctgggtgacgctgtcgttactgtttaacgccgctttctggtggtatctggtgcaaaccgaaggtcgcgccgttgccgatccacaggcactggcctttctcacgggttatctgattgagaaatcgctggcggtcgataacgtctttgtctggctgatgttgttcagctatttctctgttccggcggcattacaacgccgcgtgctggtgtatggcgtactcggggcgattgttctgcgtaccatcatgatcttcactggtagctggctgatttcacagttcgactggatcttgtatatcttcggtgccttcctgctgtttaccggcgtgaagatggcgctcgcccatgaagatgaatcaggcattggcgacaagccgctggtgcgctggctacgcggtcatttgcgcatgaccgacaccatcgacaacgagcatttctttgtgcgtaaaaatggtttgttgtatgccacgccgctgatgctggtgctgattctggtggagttgagcgacgtgattttcgccgtggatagtattccggctatcttcgccgtgaccaccgatccgtttattgtgctgacctcaaacctgtttgcgatcctcggcctgcgtgcgatgtatttcctgctggcaggtgtggcagagcgtttctcgatgctcaaatatggtctggcggtgattctggtgtttatcggtatcaagatgctgattgtcgacttctaccatattccgatcgccgtctcgctgggcgtggtgtttggcattctggtgatgacgtttattatcaacgcctgggtgaattatcggcatgataagcagcgggtagaataa

SEQ ID NO: 1187 - DNA, 1005 bp, Escherichia coli
atggagtatccacgcgttatgatacgtttcgctgtgattggtacgaactggatcactcgccagttcgtcgaggccgcccatgagagcggtaaatacaagttaaccgccgtttattcccgcagtcttgaacaggcccagcacttcgccaatgatttttctgtcgagcatctgtttacgtcgctggaagcgatggcagaaagcgatgccattgacgcggtgtatattgccagcccgaattccctgcacttttcccagacacaacttttccttagtcacaaaattcatgtgatttgcgagaaaccgctggcgtcgaatctggcgggagtggatgccgccattgcctgtgcgcgggaaaatcaggtggtgctgtttgaggcatttaaaacggcctacctgccgaactttcatctgttacgccaggcgctgccgaaagtcggcaaactgcgtaaagtctttttcaactattgccagtattcctcgcggtatcagcgttacctggacggagagaatcccaacacctttaatccgacattctctaacggttcaattatggatatcggcttttactgcctggcgtcggcggtggcattattcggtgaaccgaaaagcgtgcaggcaaccgccagtttgctggcaagcggtgtggatgcccacggcgtggtggtgatggattacggtgatttcagcgttacgttgcagcactcaaaagtgagcgattctgtcctggcaagcgagattcaaggcgaagcgggatcgctggtgattgaaaaactgtctgaatgcctgaaagtttgctttgtaccgcgtggcagccagatgcaggatctcacccagccacagcatattaataccatgctctacgaagcagagctgttcgctaccctggtggatgagcatctggtgaatcatccagggctggcggtcagtcgtatcaccgccaaactgctgactgagatccgccgccagactggggtgatttttccggcagataacgtaaaactataa

SEQ ID NO: 1188 - DNA, 693 bp, Escherichia coli
atgctgcgcgtatttgcccaccttcttcgccgcgtttgtttctctcgccggactcttaagattggctgtttattgttgcttatagcaggagcaaccctttttattgccgatcgcgttatggtcaacgccagccaacaactgacctggagcgatgtcaacgccgttccggcgcggaacgtgggtttattgctgggggcgaggccgggtaatcgctactttacccgacgtattgataccgcagcagcgttgtaccacgccggaaaagtgaaatggctattggtgagcggcgataacggacgtaaaaattacgatgaagcgtcaggaatgcagcaggccttgatcgctaaaggcgtaccggcaaaagccatcttctgcgactatgccggattctcaacgcttgattcggtggtacgtgccaacaaggtgtttagtgaaaaccatatcaccattatctcgcaagaatttcataaccaacgcgccatctggctggcaaagcaatacggcatcgacgctatcggttttaacgcgccagacctcaatatgaagcacggtttatatactcaactgcgggaaaaacttgccagagtcagcgcggtgattgatgcgaaaatcctccatcgccagccgaaatatctcgggccgttggttatgattgggccgtttagtgagcatggctgtccggcgaaagaataa

SEQ ID NO: 1189 - DNA, 504 bp, Escherichia coli
atgagcaatcttacttatcttcagggttatcccgagcagctactttcccaggtgcgaacgctgataaacgaacagcgtctgggcgatgtgctggcaaaacgctatccgggaacacacgactacgccaccgataaagccctctggcaatatactcaggatcttaaaaatcagtttctgcgcaatgccccgccgatcactaaagtgatgtatgacaacaagatccatgtgctgaaaaatgcgctcgggttacataccgctgtttcgcgtgtgcagggcggcaagctgaaagcaaaggcggagatccgcgtcgctaccgtgtttcgcaacgcgccggaaccgtttttgcgcatgatcgtggtgcacgagttggcgcacctgaaggagaaagagcataacaaagcgttctatcaattgtgctgccatatggagccgcagtaccaccagcttgagttcgacacccggctgtggctaacgcagttgtcgcttgggcaggacaaaatctga

SEQ ID NO: 1190 - DNA, 1137 bp, Escherichia coli
atgagccacttagacaacggtttccgttcactgacactacaacgttttccggcgacggatgacgtaaacccactacaggcgtgggaagcggcggatgaatatttgctgcaacagttggacgacacagaaatccgcggcccggtgttgatcctgaatgatgcctttggtgcgttaagttgtgcgctggcggaacataagccatacagcattggcgactcatacatcagcgaactggcgacgcgcgagaatttacgcctcaacgggattgatgagtcgagcgtgaagtttctcgacagcaccgccgactacccgcaacagccgggcgtggtactgatcaaagtaccgaaaacactggcgttgctggaacaacaactgcgcgcgctgcgcaaagtggtcacgccggatacacgtattattgccggtgccaaagcccgtgacatccacacttccacgctggaactgttcgaaaaagtgctcggcccgaccaccaccacgctggcatggaagaaagcgcgcctgattaactgcaccttcaacgaaccgccgttggccgatgcgccgcagaccgttagctggaagctggaaggcactgactggactatccacaaccatgcgaatgttttctcccgcactgggctggatattggcgcgcgcttctttatgcaacatctgccagagaatctcgaaggtgagattgtcgatctcggttgcggtaatggcgttattggcctgacattgctcgataaaaacccgcaggcgaaagtggtgtttgtcgatgaatcgccgatggcggttgcttccagccggttaaacgtagaaaccaacatgcccgaggcgttggatcgctgcgagtttatgatcaacaacgcgctctccggcgtggagcctttccgttttaatgctgtgctctgcaacccgccgtttcatcagcaacatgcgctgaccgataacgtcgcctgggagatgttccaccatgcccgccgctgcctgaaaatcaacggcgagctgtatatcgttgccaaccgtcacctggattacttccataaactgaagaaaattttcggcaactgcaccaccatcgccacgaataataaatttgtggtgctgaaagcagtgaagctggggcgtcgtcggtaa

SEQ ID NO: 1191 - DNA, 417 bp, Escherichia coli
atgattgcgattgccgacatcttgcaagcaggagaaaagttaactgctgtggcaccttttctggcgggtattcagaacgaggaacaatacacccaggcgctggaactggtagatcatctgctgctcaacgatcctgaaaaccccttgctggatctggcgtgtgccaaaataaccgcgtgggaagaatcagcgcccgaatttgctgaatttaatgccatggcgcaagccatgcctggcggtatagctgtgattcgtacccttatggatcaatatggtttaaccctttccgatcttccggaaattggcagtaaatcgatggtgtcacgcgttttgagcgggaagaggaaattaacgctggaacacgctaaaaaactggcaacgcgattcggcatttctcccgccttgtttattgattaa

SEQ ID NO: 1192 - DNA, 2019 bp, Escherichia coli
atgagctacccgtcgctgttcgccccgctggatttaggttttaccacgttaaaaaaccgcgtgttgatgggctcaatgcacaccgggctggaggaatacccggacggcgctgaacggctggcagcgttttatgccgaacgcgcccgtcacggcgtggcgttgattgtcagcggcggtatcgcaccagatttaacaggcgttggcatggaaggcggtgcaatgctcaatgacgccaaccagatcccacaccatcgcaccattaccgaagccgtacatcaggaaggcggcaaaatcgccctgcaaattttgcataccgggcgctacagctaccaaccgcatctggtcgctccctccgcattgcaggcccccatcaaccgtttcgttcctcacgaactcacccatgaagagatcctgcaactgatcgacgatttcgcccactgcgcgcaattggcacgggaggcaggatacgacggtgtagaggtgatggggtccgaagggtatttgatcaacgaatttctgacgctgcgcaccaatcagcgtagtgaccagtggggcggcgattaccgcaaccggatgcggtttgccgtagaagtagtgggtgcggtgcgcgaacgtgtcggcaacgacttcattattatctaccgtttgtcgatgctcgacctggtcgaaggcggcggtacttttgccgaaacggtagagctggcgcaggccattgaagcggcgggcgcaacgattatcaacaccggcattggctggcatgaagcacgtattccgaccattgccacgcccgtgccgcgcggcgcatttagctgggtcacgcgcaaactgaaaggccacgtttcgctgccactggtgaccaccaaccggattaacgatccgcaggttgccgacgacattctctcgcgcggtgatgcggacatggtatcgatggcgcgaccgtttctcgctgatgcggagctgctgtcaaaagcgcaatcgggacgagccgatgagatcaacacttgtattggctgcaaccaggcctgtctcgatcagatcttcgttggcaaagtcacctcgtgcctggtgaatcctcgcgcctgccatgaaaccaaaatgccaatccttcctgccgtgcagaaaaaaaatctggcggtggtcggtgcgggacctgctgggctggcgtttgccattaacgcggcggcgcgtgggcatcaggtaacattgtttgatgcgcacagcgagatcggcgggcagtttaatatcgccaaacagatccccggcaaagaggagttttacgaaacgctgcgctattaccgccggatgatcgaagtgacgggtgtgacgctaaaactcaatcacaccgtgacagcggatcagttacaggcgttcgatgaaacgatcctcgccagtgggatcgtgccgcgcgttccgcctatcgacgggatcgatcatccgaaggtattgagttatctcgatgtactgcgcgacaaagcgccggtgggcaacaaagttgccatcatcggttgtggcggaattggttttgatacggcgatgtatttaagtcagccgggagaatccaccagccagaatatcgccgggttctgtaatgagtggggaatcgacagtagcctgcaacaggccggaggtttgagtccgcaaggcatgcaaatcccccgtagcccacggcagattgtgatgctccagcgcaaagccagcaaaccaggacaagggttaggcaaaaccaccggctggatccatcgcaccaccctgctctcacgcggcgtgaaaatgatcccaggcgtaagttaccagaagatcgacgatgaagggctgcatgtggtgatcaacggcgaaccgcaaattttggcggtagatcatgtggtgatctgcgcggggcaggagacaaaccgcacgctggcgcaaccgctcattgatagcgggaaaaccgtgcatttaattggcggctgcgatgtggctatggagctggacgcacgacgggcaattgcccagggaacacggttggcgctggagatttaa

SEQ ID NO: 1193 - DNA, 2352 bp, Escherichia coli
atgaaaataaaaaccattttaacgccagtagcctgtgctctgctgatgagcttttccgcccatgccgctaacgctgacaattataaaaacgtgattaaccgtactggcgcgccgcagtacatgaaggattacgattacgacgatcaccagcgttttaatccgtttttcgatctcggagcctggcatggtcatctgttgccagacggcccgaacactatgggcggctttcctggcgttgcgctgctgacggaagaatacatcaactttatggccagcaatttcgatcgcctgaccgtctggcaagacggcaagaaagtcgatttcacgctggaggcatacagtattcccggcgcgctggtgcaaaagttgatatcgaaagatgtacaggtcgaaatgattctgcgcttcgccacgccgcgcacatcactactggaaaccaaaatcaccagcgataaaccgctggatctggtgtgggatggcgaactgctggaaaaactggaagcgaaagaagggaaaccgctttccgataaaaccattgctggcgaataccctgactatcagcgcaaaatcagcgccacccgtgatggcctgaaagtcacctttggcaaagtgcgcgccacctgggatctgctgacctccggtgaatcagaatatcaggtgcataaatccctgccagtgcagactgaaatcaacggcaatcgctttaccagtaaggcgcatatcaacggttcgacgacgctctataccacctactcccatctgctgaccgctcaggaagttagcaaagagcaaatgcagatccgcgatattctggcgcgtccggcgttttatctcaccgcctcgcagcaacgctgggaaaagtatctgaagaaagggttaaccaatccggatgcgacgccggaacagacgcgcgtcgcggtgaaagccatcgaaacgctcaacggtaactggcgatcgccgggcggtgcggtgaaatataacaccgtcacgccgtcggtgaccgggcgctggttctccggcaatcagacctggccgtgggatacctggaagcaggcgtttgcgatggcgcatttcaatccggatatcgccaaagagaatatccgcgcggtcttctcctggcagatccagccaggcgacagcgtgcgtccgcaggatgtgggctttgtccccgacctgatagcgtggaaccttagccccgagcgtggcggcgatggcggcaactggaacgaacgtaacaccaaacccagccttgccgcctggtcggtgatggaagtgtacaacgtcacccaggataaaacctggctggcagagatgtacccgaaactggtggcctatcacgactggtggctacgtaaccgcgatcacaacggcaacggcgtaccggaatatggcgcaacccgcgataaagcccacaatactgataatggcgagatgctgtttacagtgaaaaaaggcaataaagaagagacgcagtctgggctgaacaactacgcccgcgtggtggagaaaggccagtacgacagtctggaaattccggcacaggttgcggcgtcgtgggaatcggggcgtgatgatgccgccgtctttgggtttatcgacaaagaacagttggataaatatgtcgctaacggcggcaaacgtagcgactggacggtgaaattcgccgagaaccgcagtcaggacggaacgttgctgggctactcgctattgcaggagtcggtggatcaggccagctatatgtacagcgataaccattatctggcggagatggcgacgattctcggtaagccggaagaggccaaacgctatcgtcagttagcacaacagctcgcggactacatcaacacttgtatgttcgacccgactacacagttctactatgacgtgcgtattgaagataaaccgctggcgaacggctgcgcgggcaaaccgattgtcgagcgcggtaaagggccggaaggctggtcaccgctgtttaacggtgcggcaacgcaggccaacgccgacgcggtggtgaaggtgatgctggatccgaaagaattcaacacctttgtcccgctggggacggcagcgttaaccaacccagcctttggcgcagatatctactggcgcgggcgcgtatgggtggatcagttctggtttggtctgaaagggatggagcgttacggttatcgcgatgacgccctgaaactggctgatacgttcttccggcacgccaaaggattaaccgccgatggcccaattcaggagaattacaacccgctcactggcgcgcagcaaggcgcaccaaatttctcctggagtgccgcgcatttgtatatgttgtataacgatttttttcgtaagcagtaa

SEQ ID NO: 1194 - DNA, 1071 bp, Escherichia coli
atgaaattaatcactgcaccatgcagagcattacttgctctgccgttttgctacgccttttctgcggccgctgatgaagcacgtccggcagaacatgacgactcaaaaacccccgcaatgacctcgacatcttctccttcatttcgtttttacggcgaattaggggttggtggatatatggatttagagggtgagaataaacataaatacagcgacggcacctatattgaaggtggcctggagatgaagtacggctcctggttcggcctgatttacggcgaaggctggaccgtacaggccgaccacgacggtaatgcctgggtgcctgaccatagctggggtggtttcgaaggtgggattaaccgtttctatggcggttatcgtaccaatgatggcaccgaaatcatgctcagtctgcgtcaggattcctcgctggatgacctgcaatggtggggcgatttcacgcccgatctgggctacgtcattcctaatacccgcgacattatgactgcgctgaaggtacagaacttaagcggcaactttcgttatagcgttaccgccacacctgccggacatcatgacgaaagcaaagcctggctacattttggcaagtacgatcgctacgacgacaaatacacctatccggcaatgatgaacggttacatccagtatgaccttgcagaagttatcacctggatgaacggtctggaaatcaccgacggcacaggccaactctatctcacgggcctgcttacccctaactttgccgctcgcgcctggcaccataccggacgcgccgacgggctggacgtatcgggaagtgaaagcgggatgatggtgagcgccatgtatgaagcgttaaagggcgtttatctctccaccgcttacacctacgccaaacatcgccctgaccacgctgacgatgaaaccacctctttcatgcagtttggtatctggtacgaatacggcggcggacgtttcgcaacggcttttgatagccgcttctacatgaaaaatgcctctcacgatcccagcgaccaactcttcctgatgcaatatttttactggtaa

SEQ ID NO: 1195 - DNA, 1434 bp, Escherichia coli
atgtctgataccaaacgtaatacaatcggcaaattcggcttgctctcgctgacttttgccgccgtttacagctttaacaacgttatcaataataatattgagcttggactggcctcggcaccgatgtttttcctcgcgacgattttttattttattcccttctgtctgatcattgcagaatttgtttcgttaaataaaaactcagaagccggtgtctacgcgtgggtaaaaagttcgctgggcggacgttgggcatttattactgcctatacctactggttcgtaaacctgttctttttcacctcgctgttaccgcgcgttattgcttatgcttcgtatgccttcctcggctacgaatatattatgacgccggttgccaccaccattatcagtatggtgctgttcgccttctccacctgggtttctaccaacggggcgaaaatgctggggccaattacctccgtcacttcaacgctgatgctgctgttaacgctctcctacattttgctggcaggaacggcactggttggcggcgtacagcctgctgaccccatcactgttgacgcgatgatcccaaactttaactgggcgttcctcggcgttaccacctggatctttatggccgcaggtggcgcggagtccgtcgctgtgtacgttaacgacgtcaaaggcggttcgaaatcgttcgttaaagtgatcatcctcgccgggatttttatcggcgtactgtattccgtctcctcggtgctgattaacgtcttcgtcagcagcaaagagttgaaatttactggcggatcggtacaggtattccacggcatggcggcgtattttggtctaccggaagcactgatgaatcgctttgtcggtctggtgtcctttaccgcgatgttcggttccctgctgatgtggacggcaacgccggtgaaaattttcttctccgaaatcccggaaggcatctttggtaagaaaaccgtcgaactgaacgaaaacggcgttccggcgcgcgcagcgtggatccagttcctgatcgtcatcccgctgatgattatcccgatgctcggttccaataccgtgcaggatctgatgaatactattattaatatgactgccgcagcgtccatgcttccgccgttattcatcatgctggcttacctgaatttacgcgccaaattagatcacctgccacgcgatttccgtatgggctcccgccgcaccggtattatcgttgtttcaatgctgattgcgatatttgccgtagggtttgtcgcttcgacattcccgactggcgcgaatattctgaccatcattttttataacgtcggcggtattgttatcttcctcggctttgcgtggtggaaatacagtaaatatataaagggattaacggctgaagagcgccatattgaggcgacaccagccagcaatgttgattaa

SEQ ID NO: 1196 - DNA, 450 bp, Escherichia coli
atgaggatcatcgataacttagaacagttccgccagatttatgcctctggcaagaagtggcaacgatgcgttgaagcgattgaaaatatcgacaacattcagcctggcgtcgcccactccatcggtgactcattgacttaccgcgtggagacagactccgcgaccgatgcgctatttaccgggcatcgacgctattttgaagtgcattactacctgcaagggcagcaaaaaattgaatatgcgccgaaagagacattacaggtagtggaatattatcgtgatgaaactgaccgtgaatatttaaaaggctgcggagaaaccgtagaggtccacgaagggcaaatcgttatttgcgatatccatgaagcgtatcggtttatctgcaataacgcggtcaaaaaagtggttctcaaagtcaccatcgaagatggttatttccataacaaataa

SEQ ID NO: 1197 - DNA, 3093 bp, Escherichia coli
atgaatcgctgggaaaacattcagctcacccacgaaaaccgacttgcgccgcgtgcgtactttttttcatatgattctgttgcgcaggctcgtacttttgcccgtgaaaccagcagcctgtttctgctcttaagcggtcagtggaatttccacttttttgaccatccgctgcaagtgccagaagccttcacctctgagttaatggctgactgggggcatattaccgtccccgccatgtggcaaatggaaggtcacggcaaactgcaatataccgacgaaggttttccgttccccatcgatgtgccgtttgtccccagcgataacccaaccggtgcctatcaacgtattttcaccctcagcgacggctggcagggtaaacagacgctgattaaatttgacggcgtcgaaacctattttgaagtctacgttaacggtcagtatgtggggttcagcaagggcagtcgcctgaccgcagagtttgacatcagcgcgatggttaaaaccggcgacaacctgttgtgtgtgcgcgtgatgcaatgggcggactctacctacgtggaagaccaggatatgtggtggtcggcggggattttccgcgatgtttatctggtcggtaaacaactcacgcatattaacgatttcaccgttcgtaccgactttgacgaagcctattgcgatgccacactttcctgcgaagtggtgctggaaaatctcgccacctcccctgtcgtcacgacgctggaatataccctgttcgacggcgaacgcgtggtgcacagcagcgccattgatcatctggcaattgaaaaactgaccagcgcccgctttgcttttactgtcgaacagccgcagcaatggtcagcagaatccccttatctttaccatctggtcatgacgctgaaagacgccgacggcaacgttctggaagtggtgccacaacgcgttggcttccgtgatatcaaagtgcgcgacggtctgttctggatcaataaccgttatgtgatgctgcatggcgtcaaccgccacgacaacgatcatcgcaaaggccgcgccgttgggatggatcgcgtcgagaaagatctccagttgatgaagcagcacaacatcaactccgtgcgtaccgctcactacccgaacgatccacgtttttacgaactgtgcgatatctatggcctgtttgtgatggcggaaaccgacgtcgaatcgcacggctttgctaatgtcggcgatatcagccgtattaccgacgatccgcagtgggaaaaagtctacgtcgagcgcattgttcgccatattcacgcgcagaaaaaccatccgtcgatcatcatctggtcgctgggcaatgaatccggctatggctgtaacatccgcgcgatgtaccatgcggcgaaggcgctggatgacacgcgactggtgcattacgaagaagatcgcgatgctgaagtggtcgatattatttccaccatgtacacccgcgtgccgctgatgaatgagtttggtgaatacccgcatccgaagccgcgcatcatctgtgaatatgctcatgcgatggggaacggaccaggcgggctgacggagtaccagaacgtcttctataagcacgattgcattcagggacattatgtctgggaatggtgcgaccacgggatccaggcgcaggatgacaatggcaacgtctggtacaaattcggcggcgactacggcgactatcccaacaactataacttctgtcttgatggtttgatctattccgatcagacgccgggaccgggcctgaaagagtacaaacaggttattgcgccggtaaaaatccacgcgctggatctgactcgcggcgagttgaaagtcgaaaataaactatggtttaccacgcttgatgactacaccctgcacgcagaggtgcgcgccgaaggtgaaacactcgcgacgcagcagattaaactgcgcgacgttgcgccgaacagcgaagccaccttgcagatcacgctgccgcagctggacgcccgcgaagcgttcctcaacattacggtgaccaaagattcccgcacccgctacagcgaagccgggcattctatcgccacttatcagttcccgctgaaggaaaacaccgcgcagcctgtacctttcgcaccgaataacgcccgtccgctgacgctggaagacgatcgtttgagctgtactgttcgcggctacaactttgcgatcaccttctcaaaaacgagtggtaaaccgacatcctggcaggtaaatggtgaatcgctgctgacccgcgagccaaagatcaacttcttcaagccgatgatcgacaaccataagcaggagtacgaagggctgtggcagccaaatcatttgcagatcatgcaggagcatctgcgcgattttgtcgttgagcaaagtgatgatgaagtgttgctagtcagccgcacggttattgccccaccggtgtttgacttcgggatgcgttgtacctacatctggcgcatcgctgccgatggccaggttaatgtggcgctttccggcgaacgttacggcgactatccgcacatcattccgtgcatcggtttcaccatggggattaacggcgaatacgaccaggtagcatattacggacgtggaccgggcgaaaactacgccgacagccagcaggctaacatcatcgatatctggcgcagcaccgtcgatgccatgttcgagaactatcccttcccgcagaacaacggtaaccgtcagcatgtccgctggacggcactgactaaccgccacggcaacggtctgctggtggttccgcagcgaccaattaacttcagcgcctggcactatacccaggaaaacatccacgctgcccagcactgtaacgagctgcagcgcagtgatgacatcactctgaatctcgaccaccagctgcttggcctcggctccaactcctggggcagcgaggtgctggactcctggcgcgtctggttccgtgacttcagctacggctttacgttgctgccggtttctggcggagaagctaccgcgcaaagcctggcgtcgtatgagttcggcgcagggttcttttccacgaatttgcacagcgagaataagcaatga

SEQ ID NO: 1198 - DNA, 984 bp, Escherichia coli
atggcaacactaaaagacatcgcaatcgaagctggcgtatccctggcgacagtatccagggtcttaaatgacgatccgacattgaatgtgaaagaagagacgaaacatcgcattctcgagatcgccgaaaagctggagtacaagaccagtagcgcccgtaaactccagacaggcgcagtcaaccaacaccatattctggctatctacagctaccaacaggagctggagatcaacgatccttactatctggcgatccgccacggcattgaaactcagtgcgaaaagctggcgatcgaactgaccaactgttatgaacacaacggcttaccagacattaaaaacgtcaccggtattttaattgtcggcaaacccacgcccgccctgcgcgccgctgcctgtgcgttgaccgacaatatctgttttatcgactttcacgaacccggcagcggttacgatgcggtggatatcgatctggcacgtatcagtaaagaaatcatcgatttctatatcaatcagggcgttaatcgtattggttttattggcggtgaagacttgcctggcaaggcggatattcgtgaggtcgcctttgcggaatatggtcgtctgaaacatgtggtacgcgaagaggatatctggcgcggcggtttttccagttcgtcgggctatgaactggcaaaacagatgctggcgcaggaagactatccgaaggcactgtttgttgcttccgattccattgctatcggcgtactgcgggcaattcatgaacgtggcctgaacatcccacaggatatttcgcttatcagcgttaacgatatccccaccgcgcgatttacctttccgccgctctccaccgtgcgcatccattccgagatgatgggaagtcagggcgttaacctggtgtatgaaaaagcccgcgatggtcgcgcgctgccgctgttggtcttcgttcccagcaaattaaaactgcgcggcacgacccgttaa

SEQ ID NO: 1199 - DNA, 333 bp, Escherichia coli
atggaaaccgtggcttacgctgattttgcacgtctggaaatgcgtgtcggaaagattgtggaagtgaaacgccatgaaaacgccgacaagctgtacatcgtacaggttgatgtgggtgaaaaaacgctgcaaaccgtgaccagcctggtgccgtactacagcgaagaagagctgatggggaaaacagtggtggtcttatgcaatctgcaaaaagcgaaaatgcgcggtgaaacgtcggaatgcatgctgttgtgtgcggaaaccgatgacggcagtgaaagcgtgctgttaacgccggagcggatgatgcctgcgggcgtacgtatcgtataa

SEQ ID NO: 1200 - DNA, 1290 bp, Escherichia coli
atgaaagcacttaaccgggaggtgattgaatacttcaaagagcatgtcaatccggggtttttagagtatcgcaaatctgttaccgccggcggggattacggagccgtagagtggcaagcgggaggtttaaatacgcttgtcgacacccagggacaggagtttatcgactgcctgggaggttttggaattttcaacgtggggcaccgtaatccagttgtggtttccgccgtacagaatcaacttgcgaaacaaccgcttcacagccaggagctgctcgatccgttacgggcgatgctggcgaaaacccttgcggcgctaacgcccggtaaactgaaatacagcttcttctgtaatagcggcaccgaatccgttgaagcggcgctgaagctggcgaaggcttatcagtcaccgcgcggcaagtttacttttattgccaccagcggcgcgttccacggtaaatcacttggcgcgctgtcggccacggcgaaatcgaccttccgcaaaccgtttatgccactgctgccagggttccgtcatgtaccgtttggcaatatcgaagccatgcgcacggctcttaacgagtgcaaaaaaaccggtgatgatgttgctgcggtgatcctcgaaccgattcagggcgaaggtggcgtaattctgccgccgccaggctatctcaccgccgtgcgtaagctgtgcgatgagttcggcgcactgatgatcctcgatgaagtacaaacgggcatggggcgcacgggcaagatgttcgcctgcgagcatgagaacgtacagccggatatcctttgtctggcaaaagcgctcggtggcggcgtgatgccgattggcgcaaccatcgccactgaagaggtgttctcagtcctgttcgacaatccgttcctgcataccaccacctttggcggcaacccgctggcctgtgcggcggcgctggcgaccatcaatgtgttgctggagcagaacttaccggctcaggctgaacaaaaaggcgatatgttgctggacggtttccgtcaactggcgcgggaatatcccgatctggtacaggaagcgcgtggtaaagggatgttgatggcgattgagtttgttgataacgaaatcggctataactttgccagcgagatgttccgccagcgcgtactggtggccggaacactcaacaacgctaaaacgatccgcattgaaccgccactgacactgaccattgaacagtgtgaactggtgatcaaagcggcgcgtaaggcgctggcggccatgcgagtcagtgtcgaagaagcgtaa

SEQ ID NO: 1201 - DNA, 1521 bp, Escherichia coli
atgtcttctcatccgtatgtcacccagcaaaataccccgctggcggacgacaccactctgatgtccactaccgatctgcaaagctatatcactcatgctaatgacacttttgtgcaggtgagcggctataccttgcaggagttacaggggcaaccacacaacatggtgcgtcacccggatatgccaaaagcggcgtttgcggatatgtggttcaccctgaaaaaaggggagccctggagcggcatcgtgaaaaatcgccgcaaaaatggcgaccattattgggtgcgggccaatgcggtaccgatggtgcgcgagggaaaaatcagtggctatatgtcgattcgtacccgggcgacggatgaagagatcgcggcggtggagccgctgtacaaagcgttgaacgccggacggaccagtaagcgtattcataaaggcctggtggtgcgtaaaggttggttgggaaaactgccttcattaccgcttcgctggcgggcgcgtggagtgatgaccctgatgtttatcttgctggcggccatgctctggtttgttgctgccccggtggtgacgtatatcctctgtgcattagtggtattgttggcaagcgcttgttttgaatggcagattgtccgcccgatagaaaatgtcgcctgtcaggcactgaaggtggcgaccggagagcgtaatagtgttgagcatctgaagcgcagcgatgagctggggctgacattacgtgcggtagggcagcttggcctgatgtgccgttggctaattaatgatgtctcaagccaggtgtccagtgtcagaaacggcagtgagacgctggcgaaaggcaccgatgaactgaacgaacatacccagcagacagttgataacgttcagcaaacggtggcgaccatgaaccaaatggcggcgtcggtgaaacagaactctgccacggcgtcggctgccgataaactttctatcaccgccagtaatgcggcagtgcagggcggggaggcgatgactacggtgatcaagacaatggacgatattgccgacagtacccagcgcattggcaccattacttcgctgattaacgatattgcgtttcagaccaatattctggccctgaatgcggcggtggaagcggcgcgtgccggcgaacagggcaaaggttttgcagtggtggcgggggaagtgcgtcatttagccagccgcagcgccaatgctgccaacgatattcgcaagctgattgatgccagtgctgataaggtgcaatctggttcgcagcaggtacacgccgccggacggacgatggaagatattgtggcgcaggtaaaaaacgtcacccagttgatagctcagattagccattcaacgctggaacaggccgatgggctttccagcctgacccgtgcagtggatgagcttaacctgatcacccagaaaaacgccgagttggtggaagagagtgcgcaggtgtcggcgatggtgaaacaccgcgccagccgactggaagacgcggtgacggtgctgcattaa

SEQ ID NO: 1202 - DNA, 624 bp, Escherichia coli
atgagccatcatcacgaagggtgctgtaaacatgaaggccagccacgccatgagggctgctgcaaaggtgagaagtcagaacacgagcactgcggacacggtcaccagcatgaacacggtcaatgctgcggtggtcgccacggtcgcggcggcggtcgtcgacaacgtttctttggtcacggtgaattgcgtctggtgattctggatattctctcgcgcgatgacagccacggttacgagttgattaaagcgattgaaaatctgacccaggggaattacaccccaagcccgggcgtcatctacccgacgctggattttctgcaggagcagtcgctgattaccatccgcgaagaggaaggtggtaagaagcagattgcgctgaccgaacaaggcgcgcagtggctggaagaaaaccgcgcacaggtagagatgattgaagaacgcatcaaagcgcgttgcgttggcgctgcgctgcgccagaacccgcaaatgaagcgggcactggataattttaaagcggtgctggatttacgcgtcaaccagagcgatatcactgatgcacaaataaaaaagatcattgcggtgatcgaccgcgccgcttttgatattacccaactggattaa

SEQ ID NO: 1203 - DNA, 765 bp, Escherichia coli
atgaataactccccccgctacccgcagcgcgttcgcaatgatctgcgcttccgtgaactgactgtgctacgcgttgagcgtatcagcgccggttttcagcgcattgtccttggcggcgaggcgctggacggttttacatcgcgcggctttgacgatcacagcaagctcttctttcctcaaccaggcactcactttgtgccgccaacggtaacggaagagggcatcgtctggccggaaggaccacgcccaccgtcgcgtgactatacgccgctgtatgacgaactacgccatgaactggcgatcgatttctttattcacgacggtggggtcgccagcggctgggcgatgcaggcgaaaccgggcgataaacttacggtggcaggtccgcgcggttcgctggtggtgccagaggattacgcgtatcagctgtatgtctgcgatgaatccggaatgcccgcactgcgccaccgcctggaaacgttgagcaaacttgccgttaaaccgcaagttagtgcgctggttagcgtgcgggataacgcctgtcaggattatctcgcgcaccttgatggttttaatatcgaatggctggcacatgatgagcaggcggtagatgcgcgtctggcgcagatgcaaatccctgccgatgattacttcatctggataaccggcgaaggcaaagtcgttaagaatttaagccgccgctttgaagcggaacagtatgacccacagcgggtacgtgcagcggcttactggcacgcaaagtaa

SEQ ID NO: 1204 - DNA, 507 bp, Escherichia coli
atggttgaggatattttggctccagggttacgggtcgtgttttgcggtatcaaccctggtctttcatccgccggaacgggttttccctttgctcatccggcaaaccgcttctggaaggtgatatatcaggccgggtttaccgaccgtcagttgaagccgcaggaggcacagcatctgctggattatcgttgtggcgtcaccaaactggtagaccgtccaacggtgcaagccaatgaagtgtcaaagcaggagctgcacgcaggcgggcgtaaactaattgaaaaaatagaagattatcagccgcaggcgttggcgattctgggcaaacaagcatatgaacagggattcagccagcgcggtgcacagtgggggaaacaaactctcaccattggttcgacgcagatttgggtgctgccaaatcccagcggtttaagtcgcgtttcactggagaaactggttgaagcgtatcgcgagctggaccaggcgctggtggtgcgtgggcgataa

SEQ ID NO: 1205 - DNA, 1842 bp, Escherichia coli
atggagcaaaacccgcagtcacagctgaaacttcttgtcacccgtggtaaggagcaaggctatctgacctatgccgaggtcaatgaccatctgccggaagatatcgtcgattcagatcagatcgaagacatcatccaaatgatcaacgacatgggcattcaggtgatggaagaagcaccggatgccgatgatctgatgctggctgaaaacaccgcggacgaagatgctgccgaagccgccgcgcaggtgctttccagcgtggaatctgaaatcgggcgcacgactgacccggtacgcatgtacatgcgtgaaatgggcaccgttgaactgttgacccgcgaaggcgaaattgacatcgctaagcgtattgaagacgggatcaaccaggttcaatgctccgttgctgaatatccggaagcgatcacctatctgctggaacagtacgatcgtgttgaagcagaagaagcgcgtctgtccgatctgatcaccggctttgttgacccgaacgcagaagaagatttggcacctaccgccactcacgtcggttctgagctttcccaggaagatctggacgatgacgaagatgaagacgaagaagatggtgacgacgataccgccgatgatgacaacagcatcgacccggaactggctcgcgaaaaatttgcggaactgcgcgctcagtacattgtaacgcgtgacaccatcaaagcaaaaggccgcagtcacgctgccgctcaggaagagatcctgaaactgtctgaagtattcaaacagttccgcctggtgccgaagcagtttgactacctggtcaacagcatgcgcgtcatgatggaccgcgttcgtacgcaagaacgtctgatcatgaagctctgcgttgagcagtgcaaaatgccgaagaaaaacttcattaccctgtttaccggcaacgaaaccagcgatacctggttcaacgcggcaattgcgatgaacaagccgtggtcggaaaaactgcacgatgtctctgaagaagtgcatcgcgccctgcagaaactgcagcagattgaagaagaaaccggcctgaccatcgagcaggttaaagatatcaaccgtcgtatgtccatcggtgaagcgaaagcccgccgtgcgaagaaagagatggttgaagcgaacttacgtctggttatttctatcgccaagaaatacaccaaccgtggcttgcagttccttgacctgattcaggaaggtaacatcggcctgatgaaagcggttgataaattcgaataccgccgtggttacaagttctccacctacgctacctggtggatccgtcaggcgatcacccgctctatcgcggatcaggcgcgcaccatccgtattccggtgcatatgattgagactatcaacaagctcaaccgtatttctcgccagatgctgcaagagatgggccgtgaaccaacgccggaagaactggctgaacgtatgctgatgccggaagacaagatccgtaaagtgctgaagatcgccaaagagccaatctccatggaaacgccgatcggtgatgatgaagattcgcatctgggggatttcatcgaggataccaccctcgagctgccgctggattctgcgaccaccgaaagcctgcgtgcggcaacgcacgacgtgctggctggcctgaccgcgcgtgaagcgaaagttctgcgtatgcgtttcggtatcgatatgaacaccgaccacacgctggaagaagtgggtaaacagttcgacgttacccgcgaacgtatccgtcagatcgaagcgaaggcgctgcgcaaactgcgtcacccgagccgttctgaagtgctgcgtagcttcctggacgattaa

SEQ ID NO: 1206 - DNA, 1746 bp, Escherichia coli
atggctggacgaatcccacgcgtattcattaatgatctgctggcacgcactgacatcgtcgatctgatcgatgcccgtgtgaagctgaaaaagcagggcaagaatttccacgcgtgttgtccattccacaacgagaaaaccccgtcattcaccgttaacggtgagaaacagttttaccactgctttggatgtggcgcgcatggcaacgcgatcgacttcctgatgaactacgacaagctcgagttcgtcgaaacggtcgaagagctggcagcaatgcacaatcttgaagtgccatttgaagcaggcagcggccccagccagatcgaacgccatcagcggcaaacgctttatcagttgatggacggtctgaatacgttttaccaacaatctttacaacaacctgttgccacgtctgcgcgccagtatctggaaaaacgcggattaagccacgaggttatcgcccgctttgcgattggttttgcgccccccggctgggacaacgtcctgaagcggtttggcggcaatccagaaaatcgccagtcattgattgatgcgggcatgttggtcactaacgatcaggggcgcagttacgatcgtttccgcgagcgggtgatgttccccattcgcgataaacgcggtcgggtgattggttttggcgggcgcgtgctgggcaacgatactcccaaatacctgaactcgccggaaacggacattttccataaaggccgccagctttacggtctttatgaagcgcagcaggataacgctgaacccaatcgtctgcttgtggtcgaaggctatatggacgtggtggcgctggcgcaatacggcattaattacgccgttgcgtcgttaggtacgtcaaccaccgccgatcacatacaactgttgttccgcgcgaccaacaatgtcatttgctgttatgacggcgaccgtgcaggccgcgatgccgcctggcgagcgctggaaacggcgctgccttacatgacagacggtcgtcagctacgctttatgtttttgcctgatggcgaagatcctgacacgctggtacgaaaagaaggtaaagaagcgtttgaagcgcggatggagcaggcgatgccactctccgcatttctgtttaacagtctgatgccgcaagttgatctgagtacccctgacgggcgcgcacgtttgagtacgctggcactgccactgatatcgcaagtgccgggcgaaacgctgcgaatatatctacgtcaggaattaggcaacaaattaggcatacttgatgacagccagcttgaacgattaatgccaaaagcggcagagagcggcgtttctcgccctgttccgcagctaaaacgcacgaccatgcgtatacttatagggttgctggtgcaaaatccagaattagcgacgttggtcccgccgcttgagaatctggatgaaaataagctccctgggcttggcttattcagagaactggtcaacacttgtctctcccagccaggtctgaccaccgggcaacttttagagcactatcgtggtacaaataatgctgccacccttgaaaaactgtcgatgtgggacgatatagcagataggaatattgctgagcaaaccttcaccgactcactcaaccatatgtttgattcgctgcttgaactgcgccaggaagagttaatcgctcgtgagcgcacgcatggtttaagcaacgaagaacgcctggagctctggacattaaaccaggagctggcgaaaaagtga

SEQ ID NO: 1207 - DNA, 216 bp, Escherichia coli
atgccggtaattaaagtacgtgaaaacgagccgttcgacgtagctctgcgtcgcttcaagcgttcctgcgaaaaagcaggtgttctggcggaagttcgtcgtcgtgagttctatgaaaaaccgactaccgaacgtaagcgcgctaaagcttctgcagtgaaacgtcacgcgaagaaactggctcgcgaaaacgcacgccgcactcgtctgtactaa

SEQ ID NO: 1208 - DNA, 1014 bp, Escherichia coli
atgcgtgtactgggtattgaaacttcctgcgatgaaaccggcatcgccatttacgacgatgaaaaaggtttgttagccaaccaattgtatagtcaggtgaaattgcacgctgactacggcggcgtcgtgcctgaactggcctcccgcgatcacgtgcgtaaaaccgtaccgttgatccaggaggcgctaaaggagtctggtttaacggcaaaagacattgatgctgtggcctataccgcaggcccaggattagtcggcgcactgctggttggcgcgaccgtggggcgttctctggcgtttgcctgggacgttccggcaatcccggtacatcatatggaaggacatctgttagcgccgatgctggaagataacccaccggaatttccgtttgtcgcgctgctggtttccggcggtcatacgcagttaatcagcgtgactggcattggtcagtacgagctgctcggagagtctatcgatgatgcggctggtgaagcgtttgataaaaccgcgaagctgctggggctggattatcctggcgggccattactgtcgaaaatggcggctcagggtactgccgggcgctttgtcttcccgcgcccgatgaccgaccgtccggggctggatttcagcttttctggtctgaaaaccttcgcggcaaataccatacgtgacaacggcactgacgatcagacgcgtgccgatatcgcccgcgcctttgaagatgcagtggtcgatacgttgatgattaagtgtaagcgagcactggatcagacgggcttcaagcgtctggtaatggcgggcggcgtgagtgctaaccgcacactgcgggcgaaactggcggaaatgatgaaaaagcgtcgtggcgaagtgttctacgcgcgtccggaattttgcactgataacggtgcgatgatcgcctatgccggaatggtgcggtttaaagcaggcgcgacggcggatctcggcgtgagtgtgcgtccgcgctggccgctggcggagttaccggctgcgtaa

SEQ ID NO: 1209 - DNA, 1464 bp, Escherichia coli
atgaaaccttccactgaatggtggcgataccttgcgccgctggcggtcatcgccattattgctctacttccgcttcccgcagggctggagagtcatacctggctctactttgccgtttttactggcgtgatcgttggactgatcctcgaacccgtgccgggtgccgtggtggcgatggtgggtatatccatcatcgccattctttcgccgtggctgctgtttagcccggagcagctcgcccagccaggttttaagttcaccgccaaatccctctcctgggcggtttctggtttttctaattcagttatctggcttattttcgccgcctttatgtttggtacgggctatgaaaaaaccgggcttggacgtcgcatcgcgctgattctggtgaaaaaaatggggcatcgcacgctgtttctcggctatgcagtgatgttctccgagctgatactcgcgcctgtaacaccgtccaactcggcgcgtggtgcggggattatctatcccatcatccgtaacctgccaccgctctatcaatcacaaccaaacgacagcagttcgcgcagcattggctcgtacatcatgtggatggggattgttgccgactgcgtgaccagcgccattttcctgacggcgatggctccaaatttgctgttaattggactgatgaaaagcgcatctcacgccacgctgagctggggcgactggttcctcgggatgttgccgctcagtattttactggttctgctggttccctggctggcttacgtgctgtacccgccgatactgaagtctggcgatcaggtgccgcgctgggcagagacggaactgcaggcaatgggcccgctctgttcgcgtgaaaaacggatgctggggctgatggtaggcgcactggtgctgtggatttttggcggtgattatatcgatgccgcgatggtcggttacagcgtggtggcgctgatgctgcttctgcgcattatcagttgggacgacattgtcagtaataaagcggcgtggaacgttttcttctggctggcctcgcttatcaccctcgctaccggactcaacaacaccggttttattagctggtttggcaaactgttagcaggcagcttaagcggttattcgccaacgatagtgatggtggcgttgattgtggtcttttatctgctgcgctacttttttgccagcgccacagcgtatacctccgctctcgcaccgatgatgattgccgccgcgctggcgatgccggaaatcccgctgccggtgttctgcctgatggttggtgcggcaattggtctggggagcattcttacaccatacgccaccggacccagtccgatttactacggcagtggttatctgccaacggcggattactggcgactgggggcgatttttgggctgatattcctcgtattgctggtgattaccggcttactgtggatgcccgtggtgttgctttaa

SEQ ID NO: 1210 - DNA, 606 bp, Escherichia coli
atgaaaaagatcctgacaaccccgatcaaagctgaagatctgcaagatattcgcgtcggcgatgtgatctacctgaccggtacgctggtgacctgccgtgacgtttgtcaccgccgattgatcgaactgaaacgtccgatcccttacgatctcaacggcaaagcgattttccacgctggccccatcgtgcgcaaaaacggcgacaaatgggagatggtgtccgtcggcccgacaaccagtatgcgtatggaaagttttgaacgtgaatttatcgagcagaccggcgtgaaactggtggtcggcaaaggcggaatggggccgctgaccgaagaaggctgccagaaattcaaggcgctgcatgtgattttcccggctggctgtgcggtactggcggcaactcaagtggaagagattgaagaggtacactggacagaactcgggatgcctgagtcgctgtgggtctgccgggtcaaagagtttggcccgctgattgtctctatagatacccacggcaacaacctgatagccgaaaacaaaaagctgttcgccgaacgccgcgatcccatcgtggaagagatctgcgagcacgtccactacatcaaataa

SEQ ID NO: 1211 - DNA, 912 bp, Escherichia coli
atgatgagcgaaagtaataagcaacaggcagtgaataagttgacggagattgtcgctaactttaccgccatgatttctacccgaatgcctgatgacgtggtggataaactaaaacagctaaaggatgccgaaacatcgtcgatgggaaaaatcatctaccacacgatgttcgataacatgcaaaaagcgatcgacctgaatcgtcctgcctgtcaggacaccggcgaaatcatgttttttgttaaggtcggttcccgtttcccactgcttggcgagctgcaaagcatactcaaacaagccgtggaagaggcaaccgtcaaagcgccactgcgtcacaatgcggtagaaatttttgacgaagtaaacaccggcaaaaataccggcagcggcgtaccgtgggtcacctgggatatcgtccccgacggtgacgatgcggaaatcgaagtttacatggcaggcggcggctgcacgctacctggccgatcgaaagtgttaatgccgtcagaaggctacgaaggtgtagtgaaattcgtcttcgaaaatatctccaccctcgccgtaaacgcctgtccgccggtacttgtgggcgttggcatcgctacctcggtggaaaccgccgcagtgctctcgcgtaaagccattttgcgcccgattggcagccgccatcccaatccaaaagcggcagagctggagctacgcctggaagaaggactcaaccgtctggggattggtccacaagggctgactggcaacagttcagtgatgggcgtgcatatcgaatctgccgctcgccatccgtcaaccatcggcgttgctgtttctaccggctgctgggcgcatcgtcgcggcacactgcgagttcatgccgatctcacctttgaaaatctgtctcatacccggagcgcgttatga

SEQ ID NO: 1212 - DNA, 933 bp, Escherichia coli
atgctaaatagctggcctttagccaaagacttgcaggtactggtggaaatcgtccatagcgggagttttagtgctgcagcggcgacgcttgggcaaacgcctgcatttgtcaccaagcggatccaaatccttgaaaatacgctggcaacaactctgctgaaccgctccgctcgcggcgtggcgctgactgaaagtggccagcgttgttacgaacatgcgctggaaatcctcacccaatatcagcgactggtcgatgacgtcacgcaaatcaaaacgcgcccggaggggatgatccgcattggttgcagttttggttttgggcgcagccatattgcgccagctattaccgaactgatgcgcaattatcctgagttacaggtgcattttgaattgttcgatcgacaaattgatttagtgcaggataatattgatctggatattcgtattaatgacgcaattcctgattattatattgcgcatcttttgacaaaaaataaaagaatattatgcgcagcacctgagtatctgcaaaaatatccgcagccacaatccttacaggaattaagtcgtcatgactgcctggtgaccaaagagcgcgatatgacccacggaatatgggagttggggaacggtcaggagaaaaaatcggtgaaggtaagcggacatctttcctccaatagcggcgagattgtgctgcaatgggcgctggagggcaaagggattatgctgcgttccgagtgggatgtgttgccgtttctggagagtggcaaactggtgcgagtattgccggagtatgcacaaagcgccaatatctgggctgtttaccgggagccgctctatcgcagcatgaaattacgtgtctgtgtggaatttctggcggcatggtgccagcaacggctgggcaagcccgacgaaggctatcaggtcatgtag

SEQ ID NO: 1213 - DNA, 618 bp, Escherichia coli
atgagtgcaatcgcgcctggaatgatcctcatcgcgtacctctgcggctccatttccagtgccattctggtttgccgcttgtgtgggttgcccgatccgcgaaccagcggctccggcaatccaggcgcaaccaatgtgttacgtatcggtggcaagggagcagccgtagcagtactgattttcgacgttctgaaaggaatgttgcccgtctggggcgcgtatgaattaggtgtcagccccttctggctaggcttaattgccatcgtcgcctgtcttggacacatctggcccgttttcttcggttttaaaggaggaaaaggcgttgctaccgcttttggtgccatcgcaccaattggctgggatctcactggagtaatggcgggaacctggttactgaccgtgctattgagtggttactcgtcgctgggagcgattgtcagtgcactgattgctccgttttatgtctggtggtttaagccacaattcaccttcccggtttcgatgctctcttgcctgatcctgctgcgtcatcatgacaacatccagcgtctgtggcgtcgtcaggagacaaaaatctggacgaaattcaaaagaaagcgcgaaaaggatcccgagtga

SEQ ID NO: 1214 - DNA, 369 bp, Escherichia coli
atggatattgtatttatagagcaactttcggtaatcaccactattggtgtttacgactgggaacagaccatcgaacagaagttagtgttcgatatcgaaatggcgtgggataaccgtaaagcggcgaaaagtgatgatgtggcggattgcctcagttacgctgacattgcagaaacggtggtcagccacgtcgagggagcgcgttttgcgctggtggaacgcgtggctgaagaggtggcggagctgctgttagcacgcttcaactcgccgtgggtgcgtatcaaactcagcaagccaggcgcagtggcgcgggcggcgaatgttggcgtcatcattgagcgtggcaataatctgaaagaaaataattaa

SEQ ID NO: 1215 - DNA, 822 bp, Escherichia coli
atgagcgatatgcactcgctgctgatagcggcaatattgggtgtggtcgaaggattgacagaatttctgccggtatccagcacgggccatatgattattgtcggtcacttgttggggtttgagggcgacacggcgaaaacctttgaagtcgtgatccagttaggatcaattctggcggtagtagtgatgttctggcggcgtctgtttggcctgattggcatccactttggtcgcccgttgcagcacgaaggagaaagcaaaggtcgtttaacgctgatccacattttgctggggatgattccggcggtggtactggggctgttgttccacgacacgattaaatcattgtttaacccgataaatgtcatgtatgcactggtcgttggcggtatgttgctgattgccgccgaatgcctgaagccgaaagagccgcgtgcgccgggtcttgatgatatgacctatcgtcaggcgtttatgattggctgtttccagtgtctggcgctgtggccgggtttctcccgttccggggcgaccatttcaggtgggatgctgatgggggtgagccgttacgctgcttccgagttctcgttcctgctggcggtgccgattatgatgggcgcaacggcgctcgatctctacaaaagctggggcttcctgactaccggcgatatcccgatgtttgccgttgggtttatcaccgcttttgtggtggcgctgatagcgattaaaaccttcctgcaattgattaagcgcatttcgtttatcccgttcgccatttatcgctttattgtggcggctgcggtgtacgttgtgttcttttga

SEQ ID NO: 1216 - DNA, 1239 bp, Escherichia coli
gtgaagatttatctggtcggtggtgctgttcgggatgcattgttagggctaccggtcaaagacagagattgggtggtggtcggcagtacgccacaggagatgctcgacgcgggctaccagcaggtaggccgcgattttcctgtgtttctgcatccgcaaacgcatgaagagtatgcactggcacgtaccgaacggaaatccggttccggttacaccggttttacctgctatgccgcaccggatgtcacgctggaagatgatcttaagcgtcgcgatctgaccattaatgcgctggcccaggacgataacggcgagattatcgacccgtacaacggtctgggcgatctgcaaaatcgtctgttgcgccatgtttcccccgcttttggcgaagatccgttacgcgtgttgcgcgtagcgcgttttgctgcgcgttatgcccacctcagtttccgtattgccgatgaaactctggcgctgatgcgcgagatgacccatgcgggtgaactggaacacctgacgcctgaacgggtatggaaagagacggaaaacgccctcaccacccgcaatccccaggtgttcttccaggtactgcgcgattgcggcgcactgcgcgttttattcccggaaattgacgccctgtttggcgttccggcccctgccaggtggcatccggaaatcgacaccggtattcataccttaatgacgctctcaatggcggcgatgctgagtccgcaggtcgatgtccgtttcgcaacgttatgccacgatctcggtaaaggactgacgccaccagaactttggccgcgtcatcatggtcatggcccggcgggtgtgaagttagtggaacaactatgccagcgtctgcgcgtgccaaatgaaattcgcgatttagccagactggtggctgagtttcacgatctcatccacaccttcccaatgctgaacccaaaaaccatcgtcaaactatttgattccatcgacgcctggcgtaaaccgcagcgtgtcgagcaactggcgctgaccagcgaggctgatgtgcgcggcagaaccggttttgaatcagcggactacccgcaaggccgctggttgcgcgaagcctgggaagtggcgcagtcagtgccgacaaaagctgtcgttgaagcaggatttaaaggtgtggagattcgtgaggagctgacccgacggcggattgcggcggtagccagctggaaggaacaacgttgcccaaaacctgagtga

SEQ ID NO: 1217 - DNA, 621 bp, Escherichia coli
atgccaaaattacgcctgatcggattaactttactcgcacttagcgccactgccgtctcacacgctgaagaaacgcgctatgtttctgatgaactgaatacctgggtccgtagcggtccgggagaccattatcgcctcgtgggcacggttaacgccggcgaggaagtgaccttattacaaactgacgccaacaccaattatgcccaggtgaaagacagctctggtcgtactgcctggatcccgttgaaacaacttagcacggagccaagcctgcgttcccgtgtgccagatctggaaaatcaggtcaaaacgctgaccgataaactcaccaatatcgataacacctggaatcagcgcaccgcagaaatgcagcaaaaagtggcgcagagtgacagcgtgatcaacgggttaaaagaagaaaatcagaaactgaaaaacgagctgattgtcgcgcagaaaaaggtcgatgccgccagcgtacagctggatgacaaacagcgcaccatcatcatgcagtggtttatgtatggcggtggcgtgctggggcttggcttgctgctcggtctggtactgccgcacctgatcccaagccgcaaacgcaaagatcgctggatgaactaa

SEQ ID NO: 1218 - DNA, 1302 bp, Escherichia coli
atggctcaggaaatcgaattaaagtttattgttaatcacagtgccgttgaggcgttgcgtgaccatctcaatacgctgggcggcgagcaccatgatcccgtgcagttgctgaatatttactacgaaacgccggataactggctgcgtgggcacgacatgggcttgcgtattcgtggcgaaaacggtcgctatgagatgaccatgaaagttgcaggaagagtgacaggcggcttacaccagcgcccggaatataacgtggcgttgagcgaaccgacgctcgacctggcgcagttaccgacggaagtctggccgaacggcgaattgcctaccgatctcgcttcccgcgtgcagccgctgtttagcaccgatttttatcgcgaaaagtggctggtagaggttgatggtagccaaattgaaatcgccctcgaccagggggaagtgaaagcgggtgaatttgctgaacctatctgcgagctggaactggaactgcttagcggcgacacgcgcgcggtgctgaaactggcgaaccaactggtatcgcaaaccggattacgccagggcagcctgagcaaagcggcgcgtggctatcatctggcgcagggcaatccggcgcgtgaaatcaaaccgaccaccattttgcatgttgcggcaaaagctgatgtggaacaggggctggaagcggcgttcgagctggcgttagcgcaatggcagtatcatgaagaactgtgggtacgcggcaacgatgcggcgaaagagcaggtgctggcagccattggcctggtccgtcatacactgatgctgttcggcggtatcgtgccgcgtaaagcgagcactcacttacgtgatctgctgactcaatgcgaggcgaccattgcttctgcggtttctgccgtaacggcggtctactctaccgaaacggcaatggcgaagctggcgttgaccgaatggctggtaagcaaagcctggcagccgtttttagatgccaaagcgcagagcaaaatcagcgattccttcaaacgctttgccgatatccatctttcccgccatgccgctgaactgaaaagcgttttctgccagccgttaggcgatcgctaccgtgaccaattgccacgcctgacgcgtgatattgactcaatactgttgctggcgggttactacgatcctgtcgtcgcgcaagcctggctggagaactggcaggggctgcgtcacgctattgcgaccgggcaacgcattgaaattgaacatttccgtaatgaggcaaacaatcaggaaccgttctggttgcacagcggaaaacgttaa

SEQ ID NO: 1219 - DNA, 2841 bp, Escherichia coli
atgaagccgctctcttcaccgttacagcagtactggcagaccgttgttgagcggctgccagagcctttagccgaggaatcacttagcgcacaggcgaagtcagtacttactttcagtgattttgtgcaggacagcgtgattgcgcatccaaagtggctgacggaactggaaagccaaccgccgcaggccgacgaatggcagcattacgctgcatggttgcaggaggcgctcagtaatgtgagtgacgaagccgggttaatgcgcgagctgcggctattccggcggcgcattatggtgcgcatcgcctgggcgcaaacgctggctctggttactgaagagagcatattgcagcagctcagccatctggcggagacgctgattgttgcggcgcgtgactggctgtatgacgcctgctgccgcgaatggggaacgccgtgcaatgcgcagggcgaagcgcaaccgctgctgattttaggcatgggtaagctgggcggcggggaactgaatttctcctctgatatcgatctgatttttgcctggccggaacatggttgtacccagggtggacgccgggaactggataacgcgcagttttttacccgcatggggcagcggctgattaaagtgctggatcaaccaacgcaggatggcttcgtctatcgcgtggatatgcggctgcgtccgtttggtgaaagtggcccgctggtgctgagttttgcggcgctggaagattattaccaggagcaggggcgcgactgggagcgttacgcgatggtcaaggcgcggattatgggggatagcgacggcgtctatgctaacgagttgcgtgcgatgctgcgtccgtttgttttccgtcgttacatcgatttcagcgtgattcagtcgctgcgcaacatgaaaggaatgattgcccgtgaagtgcgtcgacgcggtttgaccgacaacatcaaacttggcgcaggcggcattcgcgaaattgaatttatcgtccaggtgttccagctcattcgcggcgggcgcgaaccgtcgctgcaatcgcgcgctttactgccaacgctcagcgccattgccgcgctgcatctgctttctgaaaacgatgctgaacaattgcgagtggcgtatctgttcctgcggcgtctggaaaacctgctgcaaagcattaacgacgaacaaacccagacgcttccttctgatgagcttaaccgtgcgcggctggcgtgggcgatggactttgctgactggccgcaattgaccggggtgctgaccgcacatatggccaatgtgcgccgggtgtttaatgaattgattggcgacgacgaaagtgaaactcaggaagagtcgctgtcggaacagtggcgtgagctgtggcaggatgcgttgcaggaagatgacaccacgccagtgctggcgcatcttagcgaggatgatcgcaaacaggtgctaatgctgattgctgatttccgcaaagagctggataagcgcactatcgggccgcgaggacgtcaggtgctcgaccatctgatgccacatctgctaagtgatgtctgtgcgcgtgaagacgctgctgtcacgctgtcgcgcattaccgccttgctggtggggattgttactcgcaccacttatcttgagctgcttagtgaattccctgcggcgcttaaacatttgatttctctgtgtgcagcatcgccgatgattgccagccagctagcgcgttatccattattgctggatgaattgctcgatccaaataccctctaccaaccaacggcgacggatgcctaccgtgatgaactgcgccagtatttgctgcgcgtgccggaagatgacgaagaacaacagcttgaggcgctgcgtcagttcaaacaggcgcagctgttacgcattgcggcagcggatatcgccggtacgctaccggtaatgaaagtgagcgatcacttaacctggctggcagaagccatgattgatgccgtcgttcagcaggcgtgggttcaaatggttgcccgctacggtaagccaaatcacctgaacgaacgcgaagggcgtggttttgcggtggtcggctacggcaagctgggtggctgggagttaggctacagttccgatcttgacctgatcttcctccatgattgcccaatggatgcgatgactgacggcgagcgggaaatcgacgggcgacagttttatctgcgtctggcgcaacgcattatgcatctgttcagtacgcgaacctcttccggcattttgtatgaagtggatgcacgactgcgtccgtccggggcggcgggaatgctggtgacatccgcagaagcatttgctgattatcagaaaaacgaggcctggacgtgggagcatcaggcgctggtgcgtgcgcgtgtagtgtacggcgatccgcagctcaccgcgcactttaacgcagtacgccgggagattatgacgctgccgcgcgaaggcaaaaccctgcaaacagaagtgcgggaaatgcgcgagaaaatgcgtgcccatctcggcaataaacatcgcgatcgctttgatatcaaagccgatgaaggcggaattaccgatatcgaatttattactcaatatctggtgttgcgctacgctcacgaaaaaccgaagttaacgcgctggtcagacaacgtgcgcattctggaactactggcgcaaaacgacattatggaagagcaggaagcgatggcgctgacccgtgcttacacgacgctgcgcgatgaacttcatcatctggcattacaggaattgccgggtcatgtgtcggaggattgcttcaccgcagagcgtgaactggtgcgggcaagctggcagaagtggctggtggaagaatga

SEQ ID NO: 1220 - DNA, 1434 bp, Escherichia coli
atgaaagtaacgctgccagagtttgaacgtgcaggagtgatggtggttggtgatgtgatgctggatcgttactggtacggtcccaccagccgtatctcgccggaagcgccggtgcccgtggttaaagtgaataccatcgaagaacgtccgggcggcgcggctaacgtggcgatgaatatcgcttctctcggtgctaatgcacgcctggtcgggttgacgggcattgacgatgcggcgcgcgcgctcagtaaatctctggccgacgtcaacgtcaaatgcgactttgtttctgtaccgacgcatccgaccatcaccaaattacgggtactttcccgcaaccaacagctgatccgtctggatttcgaagaaggtttcgaaggggttgatccgcagccgctgcacgagcggattaatcaggcactgagttcgattggcgcgctggtgctttctgactacgccaaaggtgcgctggcaagcgtacagcagatgatccaactggcgcgtaaagcgggtgttccggtgctgattgatccaaaaggtaccgattttgagcgctaccgcggcgctacgctgttaacgccgaatctctcggaatttgaagctgttgtcggtaaatgtaagaccgaagaagagattgttgagcgcggcatgaaactgattgccgattacgaactctcggctctgttagtgacccgttccgaacagggtatgtcgctgctgcaaccgggtaaagcgccgctgcatatgccaacccaggcgcaggaagtgtatgacgttaccggtgcgggcgacacggtgattggcgtcctggcggcaacgctggcagcgggtaattcgctggaagaagcctgcttctttgccaatgcggcggctggtgtggtggtcggcaaactggggacatccacggtttcgccgatcgagctggaaaacgcagtacgtggacgtgcagataccggctttggtgtgatgaccgaagaggaactgaagcttgctgtagcggcagcgcgtaaacgcggtgaaaaagtggtgatgaccaacggtgtctttgacatcctgcacgccgggcacgtctcttatctggcaaatgcccgtaaactgggtgaccgtttgattgtcgctgtgaacagcgatgcctccaccaaacggctgaaaggggattcccgccccgttaacccgctcgaacagcgtatgattgtgctgggcgcactggaagcggtcgactgggtggtgtcgtttgaagaggacacgccgcagcgcttgatcgccgggatcttgccagatctgctggtgaaaggcggcgactataaaccagaagagattgccgggagtaaagaagtctgggccaacggtggcgaagtgctggtgctcaactttgaagacggttgctcgacgaccaacatcatcaagaagatccaactggataaaaaaggctaa

SEQ ID NO: 1221 - DNA, 1662 bp, Escherichia coli
atggatgatatcgttaattctgtgccctcctggatgtttaccgcgattatcgccgtatgcattctgtttattattggaattattttcgccaggctctatcgtcgcgcttcggcagagcaagcatttgttcgtactggtttaagtgggcaaaaagtggtgatgagcggtggcgcaatcgtgatgccgatctttcatgaaataattcccatcaatatgaataccctgaagctggaagtcagtcgttctactattgatagcctgattacgaaagatcgtatgcgtgttgatgttgtagtggctttctttgtacgggtaaaaccgtcagtagaaggcatcgccactgcggcccagacgctggggcaacgcactctatcaccagaagatttacgtatgctggtggaagataaatttgtcgatgccctccgtgcaacagcggcacaaatgaccatgcatgagttacaggatacccgcgagaacttcgtgcagggagtacaaaataccgtagctgaagatctgtcgaaaaatggcctggaactggaaagcgtttcacttaccaactttaaccagacctcgaaagaacatttcaatccgaacaatgcctttgacgccgaaggtttaaccaaactgactcaggagacggagcgccgtcgtcgcgaacgtaacgaagttgaacaggatgtggaagtcgcagtgcgtgagaaaaaccgtgatgcactttcgcgcaagttggagattgaacaacaagaagcgtttatgacgcttgagcaggagcagcaggttaaaacccgtaccgctgagcagaatgcgaaaattgcggcttttgaagctgaacgtcgtcgtgaagcagagcagacgcgaattctggctgaacgacagattcaggaaacggaaatcgaccgcgaacaggccgtccgctcaagaaaggttgaggccgaacgtgaagttcgcattaaagagatcgaacagcagcaggtcaccgaaatcgctaaccagacgaaatcgatcgctattgccgccaaatcggaacaacagtcccaggcagaagcgcgtgctaaccttgcactcgcagaagcagtaagcgcccaacaaaacgtagaaaccactcgccagactgccgaagccgatcgtgctaaacaagtggcgttgatcgccgcagcgcaggatgcagaaaccaaagcggttgaactgaccgtgcgggcgaaagcagaaaaagaagccgcagagatgcaggcggcggctatcgttgagttagccgaagctacacgtaaaaagggtctggcggaagcagaagcacaacgtgcgctgaacgatgctatcaacgtactttctgatgaacaaaccagccttaaattcaaactggcattattgcaggcgctgcctgcggtaattgagaaatccgttgagcctatgaaggctatcgacggcatcaaaattattcaggtcgatgggctgaatcgtggtggcgctacgggtgatgcaaacacggggaatgtggggggcggaaacctggcagaacaagcgttatcagccgcactctcttaccgcacacaggcaccgctgattgactccttgctcaatgaaattggcgtttcaggcggctcactggcggcattgacttcatccttaagctcaacaactcccgtcgaagaaaaagcagagtaa

SEQ ID NO: 1222 - DNA, 630 bp, Escherichia coli
atgattttattcgccgactataacaccccttatcttttcgctatttcctttgtactcttgatcggccttttagaaatttttgcacttatctgcggtcacatgctctccggtgctcttgatgcacatcttgaccattatgattccataaccacaggtcatattagccaggcacttcattatctcaatattggaagattaccagctctcgtcgtcctctgcttactcgctggtttttttggtcttattggcatcctgttgcaacatgcctgcgttacgctctggcaatcaccactccccaacctgttcgtggttcctgtcagtttactgtttacaattattgcagtgcattataccggtaaagtcgttgcaccctggattccacgcgaccatagttcagctattacagaagaagaatatgttggtagcatggcattaattaccggccatcaagccacttcaggtaacccttgcgaaggaaaactcaccgatcaatttggccaaatacattatttgctactggagcctgaagaaggaaaaactttcactaaaggagacaaagtgttaattatttgccgactttctgcaacgcgatatttggcggaaaataatccctggccccagatattgtga

SEQ ID NO: 1223 - DNA, 201 bp, Escherichia coli
atggatcatagtcttaattctttaaataatttcgattttctcgcgcgtagttttgccagaatgcacgcagaaggtcgcccggtcgatattctggccgttactggtaacatggatgaagaacatagaacctggttttgcgcacgttatgcctggtattgccaacagatgatgcaaaccagagaacttgaattagaacactga

SEQ ID NO: 1224 - DNA, 300 bp, Escherichia coli
atgattgacccgaaaaaaattgagcaaatcgctcgccaggttcacgaatcaatgcctaaaggaatcagggagttcggggaagatgtggagaaaaaaatccgccaaaccctacaagcgcagctgacgcgtctcgatctggtaagccgcgaagaattcgacgttcagacgcaagtcctgttacggactcgtgaaaaactggcgttactggagcagcgcatcagcgaactggaagcgcgcaataatccggtagcagaacttcaatctcctccggctatcccgccagttgataaagcagaataa

SEQ ID NO: 1225 - DNA, 654 bp, Escherichia coli
atgaatcagacgctactttcctcttttggtacgcctttcgaacgtgttgaaaatgcactggctgcgctgcgtgaaggacgcggtgtaatggtgcttgatgatgaagaccgtgaaaacgaaggcgatatgatcttcccggcagaaaccatgaccgttgagcagatggcgctgaccattcgccacggtagcggtattgtttgcctgtgcattactgaagatcgccgtaaacaactcgatctgccaatgatggtagaaaataacaccagcgcctatggcaccggttttaccgtgaccattgaagcggctgaaggtgtgactaccggtgtttctgccgctgaccgtattacgaccgttcgcgcagcgattgccgatgacgcaaaaccttctgatctgaatcgcccgggccacgttttcccacttcgcgcgcaggcaggtggagtactgacgcgtggcggccatactgaagcaactattgatctaatgacgctggcaggctttaaaccggctggtgtgctgtgtgagctgactaatgacgatggcacgatggcgcgtgcaccagagtgcattgagtttgccaataaacacaatatggcgctcgtgactattgaagatctggtggcttatcgtcaggcgcatgaacgcaaagccagctga

SEQ ID NO: 1226 - DNA, 171 bp, Escherichia coli
atgtttatcgcctggtactggattgtattgattgctctggttgtggtgggttatttcctgcatttgaaacgttattgtcgggcgtttcgccaggacagagacgcactgcttgaagcacggaacaaatacttaaacagtacgagagaaaagacagccgaaaaggtagaataa

SEQ ID NO: 1227 - DNA, 774 bp, Escherichia coli
atgtcagtacctctcattctgaccatactggcgggggcagccacgtttattggcgcgtttctcggcgttctcgggcaaaaaccctcgaaccgcttactggcgttttcgctaggatttgcggcggggatcatgttgctcatctcattaatggaaatgcttcctgccgcattagccgccgaaggaatgtcacctgtgttgggttatggaatgtttatcttcggtctgcttggctattttggcctggaccgcatgttgccacatgcgcatccgcaggatttaatgcaaaaatcggtgcagccgttgccaaaatcgatcaagcgcacagccattctgctcactctcggcatcagtctgcataacttcccggaagggattgccacctttgtcacggcaagcagcaacctggagctgggctttggcatcgcactggccgttgcgttacacaatattcctgaaggtctggcggttgcaggcccggtttatgcagcaacgggttctaaacgcacggcaattctgtgggcggggatttctggattggcagaaattcttggtggtgtgctggcgtggttaatcctcggtagcatgatttccccggtggtcatggcggcaatcatggcggcggttgcaggaattatggtggcgctctcggttgatgaattaatgccgctcgccaaagagattgaccctaataataaccccagctatggcgtactatgtggaatgtcagtgatgggattcagtttagtgctgctacaaacggcaggaattggttaa

SEQ ID NO: 1228 - DNA, 816 bp, Escherichia coli
atgacacctttagttaaggatatcatcatgtcttcaacacgtatgccagcattgtttttaggtcacggtagtccgatgaacgtgctggaagataatttgtatacccgcagctggcagaagttggggatgacattgccacgcccacaagcgattgtggtggtttcggctcattggtttacccgtggaacaggggtgaccgcgatggagacgccgcccacgattcatgactttggtggcttcccgcaggcgctgtacgatacgcattatcctgctccgggttcgcctgcgctggcacagcatctggttgagctgttagcgccggtccctgtgacgctggataaagaagcctggggcttcgaccacggctcgtggggcgtactgattaagatgtatcctgacgccgatatcccgatggtgcagttgagtatcgacagtagcaaacctgccgcctggcatttcgaaatggggcgcaaactggcagcgctgcgggatgaaggaataatgttggtcgccagcggtaacgtggtgcataacctgcgtacggtgaagtggcacggtgatagttcaccgtatccttgggcgatgtcgtttaatgagtatgtgaaagcgaatctgacgtggcaagggccggtagagcagcatcctctggtgaattatctcgaccatgaaggtggcgcgttatcgaacccaacgccagagcactatctgccgttgttgtatgtcttaggggcgtgggatgggcaggagccaattaccattccggtcgatggtatagaaatgggcagtttaagtatgctgtcggtgcagataggttaa

SEQ ID NO: 1229 - DNA, 672 bp, Escherichia coli
atgggtattaagggaatgtggaaagatcttcgcacatcaccagttgacacactggtcagatggcaggagcaacgcttgttgtggttgttaatggccgttgcgatgggcgcgttaattatcctggcgcactctttcttccagatctatctctacatggcaccctgtgagcaatgtgtatacattcgctacgccatgtttgtgatggttattggaggattggttgcagcgatcaacccaaagaacatcatcctaaagctaattggctgcgtgatggcattttacggcagcattttgggactgaagttttcgctcaaactgaacgatatccaccatgcagtacataatccggatcccgattcactgtttggcgtacagggttgctctaccgatcccacttttccctttaacctgccgctggcacagtgggcaccaaattggttcaagcctaccggggattgtggctatgacgcaccaatcgttcctgatggcgtcacactgagcagcacgcaacagtggtttgtggaaatgtatcagcaatctgaaggctggtatctgctaccaccatggcattttatgaatatggctcaggcttgtatgctggcttttggtatgtgtctggtgctgctggtcattatgagtggcgcatgggcgcttaaaatcatcagaggctaa

SEQ ID NO: 1230 - DNA, 669 bp, Escherichia coli
atgtcgaaattagggatctcatcactatttaaaaccatactgcttaccgcagctttggctgtttcatttaccgcttctgcatttaccgaaggcacggattacatggttctggaaaaacctattccgaatgccgacaaaacgctgattaaggtatttagctacgcctgcccgttctgttacaagtacgacaaagcggttaccggtccggtatcggaaaaagtgaaagatatcgttgctttcacgccgttccatctggaaaccaaaggtgaatacggcaaacaagcaagcgaagtctttgcggtcttgatcaataaagataaagcagcaggcatttccttatttgatgctaactctcagtttaagaaagccaagtttgcctactacgcggcttatcacgacaaaaaagaacgctggtctgacggtaaagatccggctgcttttatcaaaaccggtctggatgccgcaggtatgagtcaggcggattttgaagcggcactgaaagaaccagcggttcaagaaacactgaaaaaatggaaagcctcttatgatgtcgccaaaatccagggggttccagcctatgtcgttaatggtaagtacttgatctacaccaagagcatcaaatccatcgacgcgatggcagaccttatccgtgagttagcaagcaaataa

SEQ ID NO: 1231 - DNA, 1797 bp, Escherichia coli
atgtttgataaatatagaaaaacactcgtagccggaactgtggcgataaccctgggtttgtcagcatcgggggtgatggctgcgggttttaaaccagcgccacctgccgggcaactgggtgcggtcattgtcgatccctacggcaatgcaccactgaccgctttggttgacttagatagccatgttatttctgacgtcaaagttaccgtccatgggaagggcgaaaaaggcgtagaaatcagctatcccgtgggtcaggaatcactaaaaacttacgatggtgtaccgatttttggtctttatcagaaatttgctaacaaagtgaccgttgagtggaaagaaaacggcaaggtcatgaaagatgattatgtggtgcacacttcggccatcgtcaataattacatggataaccgctctatctccgatttacaacagaccaaagttattaaagtcgcaccgggttttgaagatcgcctctatctggttaatacccacacctttaccgcccaaggttccgatctccactggcatggtgagaaagataaaaatgccggtatccttgatgcgggtccggcaaccggcgcactcccttttgatatcgcgccctttactttcatcgtcgataccgaaggtgaataccgctggtggctggatcaagacactttctacgatggtcgtgaccgcgatatcaacaagcgtggttatctgatgggtatccgcgaaacgccacgcggcacctttaccgctgtacaaggtcagcactggtacgagttcgacatgatgggacaggtgctcgaagatcacaaactaccgcgcggatttgctgacgccactcatgagtccattgagacgccaaatggcacggtactgttgcgcgtaggtaagagtaactatcgtcgcgatgacggcgtacacgtcaccaccattcgtgaccatatcctcgaagtcgataaatctggtcgcgttgtcgatgtatgggatctgaccaagatcctcgatccgaaacgcgatgcactgctcggcgcgctggatgcaggtgcagtttgcgttaacgttgaccttgcccatgcaggacaacaggcaaaactggaaccagatacaccgttcggcgacgcgctgggtgtagggccaggccgcaactgggcgcacgtgaactctatcgcctatgacgcaaaagatgactctatcatcctctcctctcgccaccagggtgttgtgaaaattggtcgtgataagcaagtgaaatggatccttgcgccctctaaaggttgggaaaaaccgctggccagcaagctgctgaaaccggttgatgctaacggtaagccaattacctgtaacgaaaatggcctgtgcgaaaactcagacttcgactttacctacacccagcataccgcctggatttccagcaaaggaacgctcaccatttttgataatggcgatgggcgtcatctggaacaacctgccttaccaaccatgaaatactctcgctttgtggaatataagattgatgagaagaaaggcaccgttcagcaagtgtgggaatacggtaaagaacgtggctacgatttctatagcccgattacctccatcattgaatatcaagccgaccgtaacaccatgtttggcttcggtggttctattcatttgttcgatgtcgggcagccaaccgtcggtaagttgaacgaaatcgattacaaaaccaaagaagtgaaagtggaaatcgacgtgctgtcagataaacccaatcagactcactaccgtgcgctgttagtccgtccacaacagattttcaaataa

SEQ ID NO: 1232 - DNA, 1161 bp, Escherichia coli
atggaaagagtcagtattaccgagcgcccggactggcgcgaaaaagcccacgaatacggtttcaattttcacaccatgtacggcgagccgtactggtgtgaagatgcttactacaagttgaccctcgcccaggttgaaaagctggaagaagtcaccgccgaactgcaccagatgtgcctgaaagtggtggaaaaagtgatcgccagcgatgagctgatgaccaaattccgcattccaaaacacacctggagttttgtgcgccagtcatggctgacgcaccagccatcgctttattcgcgtcttgatctggcatgggatggtactggcgaacctaaacttctggaaaataacgccgatacgccaacgtcactatacgaggcggcgttctttcagtggatctggctggaagatcagcttaacgccggtaacttgccggagggcagcgaccagtttaacagtttgcaagaaaagctgatcgatcgcttcgttgagctgcgtgaacagtatggcttccagttgctgcatctcacctgctgtcgcgacacggtggaagatcgcggaaccattcagtatttgcaggactgcgcgacggaagctgaaatcgctaccgagttcctctacatcgacgatatcgggttaggtgaaaaaggtcagttcacggatttacaggatcaggtgatttccaacctgttcaagctgtatccgtgggaatttatgttgcgtgagatgttctccaccaagctggaggatgcaggcgtacgctggctggaaccggcgtggaagagcattatctccaacaaagcgcttctaccgctactgtgggagatgttcccgaatcacccgaacctgctgcccgcttattttgcggaagatgatcatccgcaaatggaaaaatatgtggttaaaccgatcttctcccgtgaaggcgcaaacgtgtcgatcattgagaacggcaaaaccattgaagcagcggaaggtccgtatggcgaagaagggatgattgttcagcaattccacccgttaccgaaattcggcgacagctatatgctgattggtagctggctggtgaacgatcaacctgccggaattggcattcgtgaagaccgtgcattgatcacccaggatatgtctcggttttatccgcatatttttgttgagtaa

SEQ ID NO: 1233 - DNA, 672 bp, Escherichia coli
atgaaacggacaaaatccatacgccacgcatcgttccgcaaaaactggagcgcacgccatctgacaccagtcgctctcgcggttgccactgtttttatgctggctggctgtgaaaagagtgatgaaacagtgtctctctatcaaaatgctgacgactgttcagctgcaaacccaggcaaaagcgccgaatgtaccaccgcgtacaacaatgcgctgaaagaagccgaacgtactgcgccgaaatacgccacccgtgaagactgtgttgctgaatttggtgaaggtcagtgccagcaggcaccagcccaggctggcatggcaccagaaaaccaggcgcaggcccagcaatccagcgggagtttctggatgccgctgatggccggttacatgatggggcgtctgatgggcggcggcgcgggatttgcacagcagccgctgttctcctcgaaaaatccggccagcccggcttacggtaaatataccgacgcgaccggtaaaaactatggcgcagcccagccaggccgaaccatgaccgtaccgaagacggcaatggcaccaaaaccggcgaccactactactgttacccgtggcggttttggtgaatctgttgccaaacaaagcactatgcagcgtagcgcaaccggcacctcttctcgttcaatgggtggctga

SEQ ID NO: 1234 - DNA, 1482 bp, Escherichia coli
atgaagaaattgctccccattcttatcggcctgagcctttctggtttcagttcgttgagccaggccgagaacctgatgcaagtttatcagcaagcacgccttagtaacccggaattgcgtaagtctgccgccgatcgtgatgctgcctttgaaaaaattaatgaagcgcgcagtccattactgccacagctaggtttaggtgcagattacacctatagcaacggctaccgcgacgcgaacggcatcaactctaacgcgaccagtgcgtccctgcagttaactcaatccatttttgatatgtcgaaatggcgtgcgttaacgctgcaggaaaaagcagctgggattcaggacgtcacgtatcagaccgatcaacaaaccttgatcctcaacaccgcgaccgcttatttcaacgtgttgaatgcgattgacgttctttcctatacacaggcgcaaaaagaagcgatctaccgtcaattagatcaaaccacccaacgttttaacgtgggcctggtagcgatcaccgacgtgcagaacgcccgcgcacagtacgataccgtgctggcgaacgaagtgaccgcacgtaataaccttgataacgcggtagagcagctgcgccagatcaccggtaactactatccggaactggcggcgctgaatgtcgaaaactttaaaaccgacaaaccacagccggttaacacgctgctgaaagaagccgaaaaacgcaacctgtcgttgttacaggcgcgcttgagccaggacctggcgcgcgagcaaattcgccaggcgcaggatggtcacttaccgactctggatttaacggcttctaccgggatttctgacacctcttatagcggttcgaaaacccgtggtgccgctggtacccagtatgacgatagcaatatgggccagaacaaagttggcctgagcttctcgctgccgatttatcagggcggaatggttaactcgcaggtgaaacaggcccagtacaactttgttggtgccagcgagcaactggaaagcgcgcatcgtagcgtcgtgcaaaccgtacgttcctccttcaacaacattaatgcttctatcagtagcattaacgcctacaaacaagccgtagtttccgctcaaagctcattagacgcgatggaagcgggttactcggtcggtacgcgtaccattgttgatgtgttggatgcgaccaccacgctgtacaacgctaagcaagagctggcaaatgcgcgttataactacctgattaaccagttgaatattaagtcagctctgggtacgttgaacgagcaggatctgctggcactgaacaatgcgctgagcaaaccggtttccactaatccggaaaacgttgccccgcaaacgccggaacagaatgctattgctgatggttatgcgcctgatagcccggcaccagtcgttcagcaaacatccgcacgcactaccaccagtaacggtcataaccctttccgtaactga

SEQ ID NO: 1235 - DNA, 630 bp, Escherichia coli
atgcttaagccagacaacctgcccgttacatttggcaaaaacgatgtagaaattattgcacgagaaacactttatcgcggctttttttcattagatctttatagatttcgtcatcgtctattcaacgggcaaatgagtcatgaggtacggcgggaaatttttgagcgcggtcacgccgcagtcttgctaccctttgacccagcacgtgatgaagttgtgctgattgagcagattcggattgccgcgtacgacaccagcgaaaccccctggctactggagatggttgccgggatgattgaagagggtgaaagtgtggaagatgttgcccgtcgcgaagcgattgaagaggcgggactgatagtcaaacggaccaaaccggtgttaagtttcctggcaagcccggggggcaccagtgagcgttcgtcaattatggtgggcgaagtggacgccacgaccgcaagcggtattcacggtctggctgatgaaaacgaagatattcgcgttcatgtggtaagccgggaacaggcataccagtgggtagaagaggggaaaatcgacaacgcagcgtcggtcatcgctttgcaatggctgcagctgcatcatcaagcgttaaaaaatgagtgggcataa

SEQ ID NO: 1236 - DNA, 423 bp, Escherichia coli
atgaagcgttacacacctgactttcctgaaatgatgcgcctgtgcgagatgaacttttcacaattgcgccgtttgttaccgcgcaatgacgcacccggcgaaactgtaagctatcaggtggcaaacgcacaatatcggctgacgattgtggaatcgacccgatacactaccctggtgacaatagaacagactgcgcccgcgatcagttactggagccttccgtcaatgacggtgcgtctgtatcatgacgcgatggtggctgaagtgtgttcaagccagcagatttttcgcttcaaagcgcggtatgattatcctaataaaaagttgcatcaacgcgacgaaaagcatcaaattaatcagtttttagcggactggttgcgatactgtttagcacatggagcgatggcgattccggtttattag

SEQ ID NO: 1237 - DNA, 828 bp, Escherichia coli
ttggaaagcctgttaacccttcctctggctggtgaggccagagtcaggattttacaaattaccgacactcacctgtttgcacaaaagcacgaagccctgttaggggtaaacacctgggaaagctaccaggcggtgctggaggcgattcggccacaccagcacgaattcgacctgattgtcgcgacaggtgatttagcgcaggatcaatcctctgcggcctatcagcatttcgctgaaggcatcgcaagttttcgtgcgccctgcgtctggctgccgggcaaccacgatttccagcccgcgatgtacagtgcgttacaggatgcgggtatctccccggcgaagcgcgtgtttattggtgagcaatggcaaatcctgttgctggatagccaggtgtttggcgtgccgcacggtgagctgagcgagtttcagcttgagtggctggaacgtaaactggccgatgcgccagaacgccatacgttgctgctgctgcatcatcatccgctacctgcgggttgtagttggcttgatcaacacagcctgcgtaacgcgggcgaactggataccgtgctggcgaagtttccgcacgtcaaatacttgctgtgcggtcatattcatcaggagctggatctcgactggaacggtcgccgcttgctggcaacgccgtcgacctgtgtgcagtttaagccgcactgttctaactttacgctggacaccatcgcgcccggctggcgtactctcgagttacatgctgatggcacgctgaccaccgaggtgcatcgcctggcggacgcacgcttccaacctgataccgcttcagaaggctactga

SEQ ID NO: 1238 - DNA, 582 bp, Escherichia coli
atgtctacgcttctttatttacacggtttcaacagctcgccgcgctctgcaaaagcgagcttgttaaaaaactggctggcggaacatcaccctgacgttgagatgatcattccgcagttgcccccgtatccttctgacgcggcagaactgctggaatccattgtcctggaacatggcggcgattcgctgggtattgtcggttcgtcactggggggatattacgccacctggttgtcgcaatgttttatgctgcccgcagtggtggtcaacccggcggtgcgcccgtttgaactgctgacggactatctcggtcagaacgagaacccctacacagggcagcaatatgtgctagagtcacgccatatttacgatctcaaagtcatgcagattgacccgctggaagcgccggatttgatctggctgctgcaacagacgggagatgaagtgctggattaccgccaggcggtggcgtactacgcttcctgccgccagactgtcatagaaggcggcaaccacgcattcacgggcttcgaagattatttcaacccgatcgtcgattttcttggtctgcaccatctctga

SEQ ID NO: 1239 - DNA, 1893 bp, Escherichia coli
atgacgcaaacttataacgctgatgccattgaggtactcaccgggcttgagccggttcgccgccgtccggggatgtataccgataccactcgccctaaccatttggggcaagaagttattgataacagtgtcgatgaagcactggcgggccacgcaaaacgcgtggatgtaatcttacatgccgaccagtcgttagaagtgattgacgatgggcgcgggatgccggtagatattcacccggaagagggggtaccggcggttgaactgattctttgccgtctgcacgcgggcggtaaattctctaacaaaaattaccagttctctggcggcctgcatggcgtggggatttcggtagttaacgccctgtcgaagcgcgtagaagttaacgtacgccgcgatggtcagatctataacatcgcctttgaaaatggcgaaaaggtgcaagatttacaggttgtcggcacttgcggtaaacgcaataccggtaccagcgtgcacttctggccggatgaaaccttctttgacagcccgcgtttttctgtttcacgcctgacgcatgtgctgaaagccaaagcggtactgtgcccgggcgttgagatcacttttaaagatgagatcaacaacaccgaacagcgctggtgctatcaggacggtctgaatgattacctggcggaagcggtaaacggtttaccgacgctgccagaaaaaccgtttatcggtaatttcgctggcgatactgaagcggtggactgggcgctactgtggctgccggaaggcggtgaactgctgaccgaaagctacgtcaacctgatcccaacgatgcagggcggtacccatgttaatggcctgcgtcagggcctgctggacgcgatgcgtgagttctgtgaataccgcaacattctgccgcgtggtgtaaagctgtcggcggaagatatctgggatcgctgcgcctatgtgctgtcagtaaaaatgcaggatccgcagtttgccgggcagaccaaagaacgtctctcttcgcgtcagtgtgcggcattcgtttcgggcgtggtgaaagatgccttcatcctgtggctgaaccagaacgttcaggcggcggagctgttggcagagatggcgatttccagcgcccagcgtcgtatgcgtgcggctaaaaaagtggtgcgtaaaaagctaaccagcggcccggcgctgcctggtaaattggctgactgtaccgcgcaggatcttaaccgtaccgaactattccttgtggaaggtgactccgcaggcggatctgccaagcaggcgcgcgatcgcgaatatcaggcgatcatgccactgaaaggtaagatccttaacacctgggaagtctcttccgacgaagtgctggcttcgcaggaagtgcacgatatttcggtagctatcggtatcgatcctgacagcgacgatttgagccagcttcgttacggcaagatctgtatcctggcggatgctgactccgatggtctgcacattgccacgctgctctgcgctttgtttgtaaaacacttccgcgcattggtgaaacacggtcacgtttacgttgcactgccaccgctctaccgtattgacctcgggaaagaggtttattacgcgctgacggaagaagagaaagagggcgtacttgagcaattaaaacgcaagaaaggcaagccaaacgttcagcgttttaaaggtctcggggaaatgaacccgatgcaattgcgcgaaaccacgcttgatccgaacactcgccgtctggtgcagttgactatcgatgatgaagacgatcagcgtactgacgcgatgatggatatgctgctggcgaagaaacgctcggaagatcgccgcaactggttgcaagagaaaggcgacatggcagagattgaggtctga

SEQ ID NO: 1240 - DNA, 2142 bp, Escherichia coli
atggctatgttcacaccttcattctcaggactcaaaggtcgggcgctcttttcactgctttttgcggcaccgatgattcatgcaacagactctgtaacgaccaaagatggcgaaacaatcactgttacagcagatgcaaataccgcaactgaggcaaccgatggttatcaacctctgagcacctccacggcgacattaaccgatatgccgatgctggatatcccgcaggtggtcaatacggttagcgatcaggttctggaaaaccagaatgcgacaacgctggatgaggcgctttataacgtcagtaacgtggtacagaccaatacattaggcgggactcaggatgcttttgtacgccgtgggtttggcgcaaaccgggatggctccatcatgaccaacggtctgcgaaccgtacttcctcgtagtttcaacgccgcaacagagcgtgtggaagtgctaaaaggcccggcctccacgctgtatggcattctcgatcctggcggactgattaacgtcgtgaccaagcgcccggaaaaaacattccatggttcggtttcagccacctcctccagttttggtggcggcactgggcaacttgatatcacaggtcccattgaaggcactcagctggcgtatcgccttaccggggaagtgcaggatgaagattactggcgaaacttcggtaaagagcgcagtacatttattgccccgtcactcacctggtttggtgataatgcaacagtaaccatgctctattcccatcgggactataaaactccgttcgatcgtggaacgattttcgaccttacgacgaaacagcccgtaaacgttgatcgaaaaatacgttttgacgaaccgtttaatattacagatggtcagtccgatctggcgcaactcaacgcagaatatcatctcaatagccagtggacagcgcgctttgattacagctacagccaggataaatacagcgataatcaggcgcgtgttaccgcgtatgatgcaacgacaggaacactgacacggcgtgttgatgcaactcagggatctacccagcgtatgcatgctactcgtgcggatctgcaagggaatgttgatattgccggattctataatgagattctgggtggggtgtcatatgaatattatgatcttctgcgtacagatatgattcgctgtaaaaaagctaaagatttcaatatctacaaccctgtttatggtaataccagcaaatgtacaacggtttcggcgtcggacagtgatcagacgatcaaacaggagagctactcagcgtatgcacaggacgcactctatctgaccgataactggattgccgtcgccgggatccgctatcagtattacacgcagtatgcgggtaaaggccgtccttttaatgtcaatactgacagccgcgatgaacaatggactcccaaactggggttggtctacaaactgacgccatcggtatccttatttgccaattattcgcaaacatttatgccgcagtcgtcaattgccagctacattggcgatcttccaccggaatcatctaatgcttacgaagtcggggcaaaattcgagctattcgatggtatcaccgcagatattgcgctgtttgatatccataaacgtaatgtgttgtataccgaaagtgttggtgatgaaaccattgccaaaacggcaggccgtgttcgttcaagaggggtagaagtcgaccttgcgggagcattaactgaaaacattaatatcattgccagctacggctataccgatgctaaggttctggaagatcctgattatgcaggtaaaccattgccgaatgttcctcgtcataccggttcgctattcctgacctatgacattcataacatgcctggcaataatacgctgacatttggcggtggtggacatggcgtaagccgtcgttcggcaaccaatggggctgactattatctgccaggctattttgttgccgatgccttcgccgcatacaaaatgaaattgcagtatccggtcacactgcaattaaacgtcaaaaacctgtttgataaaacgtattacacctcttccatcgccacaaataatctgggcaaccagattggcgatccgcgtgaagtgcaattcacggtgaaaatggaattttga

SEQ ID NO: 1241 - DNA, 810 bp, Escherichia coli
gtggcacataacgcaaaagggcaggggctgatcctcgacaatgtttctgccgggtatcacaagaagatcattgttgatggtgtttctttctccgttcccacagaaaaaatgaccgttctggttggggcaaacggctgtggaaagtcgacgttgctcagcaccattgcacgtatcttgcaacctatgggcggttcgatattgcttgatggcaaagcgattcacgagcaaccaacgaaagcgttatcccgtagacttgggatcttgccgcagtcgccattattgccggagggcttaaccgtttatgaactggtgtcgcgtgggcgttttccctggcaaaatttcatacgtcaatggagcgacgccgatgagcaggcggtggaagaggccctgaaattaaccggtacgcaggagtttgcacatttacctgttgaaaaactctctggtgggcagcgccagcgttgctggattgcgatggtgttggcgcaaaagacgccttatatcctgctggatgaacccacaacctggcttgatttacgttatcaggttgaaattcttgagttattacatgatttaacgcgtcatcacgggcgtacagtcgtcgtggtgttgcatgatctgaattttgccgtcaattatggcgatacgttgatatttttacgccaggggaaagtggtgcgcgtgttgaatgagggggagcattgcacgcctgaactggtaaaagctgtctttgacgttgatgttcacgcatcaataaatcctctgacgggaaagccgttcttcatgccgtttcgtggtgtagaaaaagtatga

SEQ ID NO: 1242 - DNA, 984 bp, Escherichia coli
atgatgcgcacagggctggttactgtaattttcctcgccttactgctggtgggatgcgtggtatatccagggattggtgcccgatttattgcaccacaaacggtgttgcaggcatttcttcattttgatccgcaaaacttcgatcacaacgtaattgtaagactccgtttgccgcgtttagcggcagcattgcttaccggtgcttctcttggtgttgctggtgctttgttgcaggctgtcattcgtaacccattgggggagccacatattttaggcttaaatgccggagccgctcttgctgtcgttgccgccagtgcgcttggactggcctttccggttggacgcccactgctggcatctacggggggcgcgttattgttcctgttgatattgctgctttcctccgcagggcgttcaggggtaacgccaatgaaagttactttatgcggcgtggcgctatcggcgttcgtgtcctcaataacggctgcaatcctgattcttgacgaacaaacactgctggcgatgcggacatggctagcaggtgatttagcggggcaggattgggcgacgctgggtacgtccgcctggttttctctggggggatttgtgttagccctttaccttgcaccctcccttaatatgttggcactgggcgatcgcatggcgcaggggctgggcgtctctgtactccgcacgcgaacatttaccctgcttgcgatcgcgttgctctgtggcgcagccgtatcgattgctggccccattggttttgtcggcctgctagtaccgcagattgtccggcgtctggtatcagcggatctgcgcgttctgctccctctttcagcttgtgtcggcgcgcttttgttattactggcagatattattgcccggacgcttttcacgccccatgagttagcgaccggtgtcatgacggcgttagttggtgcgcctgtttttgtcattatggcgacgaggatgttcaaatga

SEQ ID NO: 1243 - DNA, 1050 bp, Escherichia coli
atgagtcggataatgaacgtcgggctacgcccactacgtgttggtaagttttcgacactggtgcgccctaaaaatctgctgttgcttggtgggctgttcctgcttgcggttggaatactgatattcggtctgatgcagggttctttctctgttccggcatcggaagtaggacgagcgttgtttgctccagaaaacgtaagcacagacgcacgttatattgtgcaggatattcgcttgccgagagtcatcatggcattgctatgcggggccatgttaggtatggcgggggccgcgatgcaatccattgcgcgtaacggccttgccgatcctggtttaatcggcgtcaaagaaggatgtagcgtggcggtgctgtggctgattttccagtttccaatgctgggaatgttctggcgtccagtggctggtcttgctggtggtctgttggtggctttaatcgtgattttttgtgcgcgcgatatttcccgcccgcgatttgttctgattggtattggtgtttcctggtttttcgccgccggtatcggtgtatttatgaccactgcagatgttcgagatgtacaaactgcattgatgtggttatcgggaagcctgcatgcagctaactggatgttagtcggtatttcagcctgttggatgttgccagccgctcttttattgctgttcaccgccaggactgcggatatcgctctgcttggtcatcaggttgcaaccgggttaggggtgaatagttctcgtctggcgttgttacgtgtcgccgcacccataatcctgacagccgtctgcgtttcgtgtgttggtaacatcggttttgtcggattgatagcaccccatatatcacgttttattctacgtggcgggcagacgacattactgctggggagcgcggtatcgggggcgttgttagttattctggcggatagcattggtcgtttggcttttttgcctttgcaactgcctgccggaatcattatctcactgattggtggaccattttttttgctactgctctggcagcgcaggaacagtttttaa

SEQ ID NO: 1244 - DNA, 948 bp, Escherichia coli
atgcgtttatttttttctctgctgatactgttgtcatttttttcccgtgcaacagaacctgttcaggtatttactgatgatttagggcgcaaagtcactgttcctgctcatccaaagagaattgtctctttacacgatcttgatatcactattcctctgattgagctcggtgtacctcctgtcgccagccacgggcgaactcggcctgacggtagccatttcattcgatctggcgcgttattgacaggtgtcgactttgataattcatcgatcgcctttattggtaccgctgatattgatattgaagcgattgtggcggcaaagcctgacctgatcatcacagaaccgacccgtaatacgcctattgaacaacttgaaaaaattgcgcccacggtgagcattgatcatctcaaagggggcgcgccagaaatctatcgcaagctggcagaacttacaggaacgcagtcgcagctggcgatacttgaacgccgctatcaggcacaaatcaatgcgctgaaggcgacgctggacagccaaaaaataacggtatcggtgattcaggcaaaccagggaaaaattaatgtgatgcatagctatcattcgctggggcgggtattacgcgatgcgggttttcgttttccgccgctgattgagagcattcctgaaggtgggcgaatggatgtgagcgcggagcgtttacctgaactggatgccgattttgtttttgcaacctggcgcggtgacaccggtggtaaacctcaggatgagctggcagcaatggaaaaagtcatgccgggatggtgtcagtttctgactgcctgtcgttccgggcgttatgtgctgatttctcgtgaagaggcaatttctaactcctttgcatctctggggctgatggctgcgcagatacaatcacaaattgcagggcgacctctaccggaggctaaatga

SEQ ID NO: 1245 - DNA, 888 bp, Escherichia coli
atgatccagaaagataaagcgcgggttgatatttttggtgagcgttttcgcactcgcgcgagtcagttaacgcctgggttaagagctgtcgccagctacattaatgagcatcgtgaagtggtactcgagcaaacggcgatggaaattgcggccacgttgaacacttccgatgccacagttatcagggctatacaggccctggggtttgccgggctgcgtgatctgaaacgcactctggaacagtggcttggtccagcccttagttccagcgaaaagatgtctacgacggtgagtaacttgacgagcgatgttaacaccgcaatcgactttgttcttgaagggcatttgtatacctgtaatgtcctgtcagagcctgaaaaccgccacgcgcttgcgcaagctgtagcgttgttggtgcaggcacggcaagtcgcaatttttggcattggcgcttcgggtattctggcggactataccgcacgactattcaaccgcataggtttgcctgccacggcactaaaccgtacgggtattggccttgccgagcaactgatcgcgcttcaacgtggcgatgttctgatcatgatggcgcaaaaatctgcgcaccgggaagggctgacaacgcttcgtgaggcgaggcggctagggatccctgttattttgctgacaaacgcgctggattcacgttttagcaaagacgccagtatcgtgattcatgttccgcgcggggatgaaaaagggaaaacgccgctacatggtacggtattgttgtgtctggaaatgattgtctggtcggtagcttccgcagtgccgcagcgtgcggttaaaaccattaagcgaattaacgatttccatcgaggactgaaaacgggaagaaagaatggctaa

SEQ ID NO: 1246 - DNA, 315 bp, Escherichia coli
atgattacagtaatcgcagaaatccgtactcgtcctggtcaacatcaccgtcaggcagtgttggatcagtttgctaaaatcgttccaaccgtactgaaagaagaaggttgccacggctatgcgccaatggtggattgcgctgctggcgtgagtttccagtctatggcaccggattctatcgtgatgattgagcagtgggaaagcatcgcgcatcttgaagcgcatctgcaaaccccgcacatgaaagcatatagcgaagccgtaaaaggtgacgtgctggagatgaatattcgtatcctgcagccggggctttga

SEQ ID NO: 1247 - DNA, 582 bp, Escherichia coli
atgagcaacatcctgattatcaacggcgcgaaaaaattcgcccactccaatggtcaactgaacgacaccctgaccgaagtcgcggatggcacactgcgcgacctcgggcatgatgtccgcatcgttcgcgccgacagcgactacgatgtcaaagcggaagtacaaaactttctctgggctgatgtggtgatctggcagatgcctggctggtggatgggcgcgccgtggacagtgaaaaaatatattgatgatgtattcaccgaaggtcacgggactctgtatgccagcgatggtcgtacccgcaaagatccatcaaaaaaatacggttccggcggcctggtacagggcaaaaaatatatgctttcactgacctggaacgcaccaatggaagccttcaccgaaaaagatcagttcttccacggcgttggtgttgacggtgtgtacctgccgttccataaagcaaaccagttccttggcatggaaccgctgccgacatttatcgctaatgacgtgataaaaatgcctgatgttccccgctatactgaagaatatcgcaagcatcttgtggaaatttttggttaa

SEQ ID NO: 1248 - DNA, 378 bp, Escherichia coli
atgtcaaatatcatatacttatcaattaaagggaaaatacaaggtttgatctctgagggttgtggttcgtatgcatctattggtaataaatatcaaatagatcatgtggatgaaatttttgttttacagttcgaccattctttaagccgagagtataatgtagtgcatcaccccataaaattttacaagccaatagataaatcctcccctttattaaatgccgctctttctgaaaatgaagagttatcagctgtatttaatttttatagagttaattctggcggttgtattgaaaggttttacacaattgaattgcaaggagcacatttatcagaatattctgacatgttatccacattcaattacacatgcgggtaa

SEQ ID NO: 1249 - DNA, 711 bp, Escherichia coli
atgaaaagcgatctcactataaaaaatagatattgtacaattccacaagcgaagttccgtaaatgggatgaaatggacgttttactctggaagttaggaaaaaatgattcgcgtcgccgttcaggagtatattatttaaatgcttataaagatgcatatgtacaatataatagagacaaaataattaaacatgcatacgccgctggaattcgtccagagttactgggcggcgtggcctggattgagtcaggaggtatgcctgaaaattataagtttcagatatatgaaacaaaaagaatgatcggattgttagatatgcctgaaaataaaacatcatttggctcaatgggtatacaaatacgaaccgcagcgattactctaggtctagacccttcagaattaactaccagaaatcagttagagttagcgacatgcctaatggaggatgattttacctttcaaattgctgctacttatttaagagatcttgtcctttttgattatccctcttcggcaacactgtatatgactaatgagcagtatattatggctggtattagatataatcgtggtgttgaacgagatttgggtttttttatttgtttaattaataatttgcctgcgcgtgatacagatgattataaattcatctcttatggtatgaggttgttagagattagagaacatatcaaaaaattgattaatgagtaa

SEQ ID NO: 1250 - DNA, 333 bp, Escherichia coli
atgttaaaaaaacaactactatcaatatttgaagcactattatatataatgcttacttattggttaatagattctttttttgctttcaataagtatgactggatgcttgagtcgggagacaatatttgcagtataccttctgtttcaggcgaagatcgtatattgcaagcaatgattgcagcattttttcttctgacaccacttattattcttatcttaagaaaactctttatgcgggaaatgttcgagttttggctatatgtattctcgctcgttatttgtctgggttgtggttggtggcttttttggggacggtttatattttgctattag

SEQ ID NO: 1251 - DNA, 1350 bp, Escherichia coli
atgaaatttacccaacgtcttagtctgcgagtcaggctgacgctaatctttttaattctggcctcggtgacctggctgctttccagctttgtcgcctggaaacaaacaacggataacgtcgatgagttgttcgacacccaactgatgctgtttgccaaacggttaagtacgctcgatctcaacgaaatcaacgcggcggatcgcatggcacagacgccaaataaattaaaacacggtcatgttgatgacgatgcgctgacctttgccatctttacccacgacggcagaatggtccttaacgatggcgataacggagaagatattccttatagctatcagcgggaaggttttgctgacgggcaactggtcggtgaagacgatccctggcgttttgtctggatgacctcacctgatggcaaatatcgcatcgttgtgggtcaggaatgggaataccgtgaagacatggcgctggcgattgttgccggacaattgatcccgtggctggtcgcactgccgattatgttaatcatcatgatggtactactgggtcgtgaactcgcgccgctgaacaaactggcgctggcactacgtatgcgtgaccctgactcggaaaaaccactaaacgcgacgggcgtacccagcgaagtgcgcccactggttgagtcgctaaatcaactgttcgcccgcacacatgcgatgatggttcgtgaacgacgctttacctccgacgcagctcacgaacttcgtagcccgttaacggcgctgaaagtgcaaaccgaagttgctcagctctctgacgatgatccgcaggcgcggaaaaaagcgctgctccaattacattccgggatcgatcgcgctactcgtctggttgatcaactgctcacgctatcgcggctggactcactggataaccttcaggacgtcgcggagatcccgcttgaagatctcctgcaatcgtcggtgatggatatttaccacacggcgcagcaggcgaaaattgacgtgcgactgacactcaaagccaacggcatcaaacgcaccggacaaccgctattgctaagtttgttggtgcgaaatttgctggataacgccgtgcgttacagtccacaaggtagcgtggtagacgtcacgctgaatgccgataatttcatcgtgagggataacggccctggtgtgacaccagaggcactggcgcgaattggcgaacgcttctatcgcccacccggacaaaccgctaccggcagtggacttgggctatcgattgtccagcgaatcgccaagctgcatgacatgaatgttgaatttgggaatgcggaacaaggtggatttgaggcgaaggtaagctggtaa

SEQ ID NO: 1252 - DNA, 660 bp, Escherichia coli
atgcgaattttactgatagaagatgacatgctgattggcgacggcatcaaaacgggccttagtaaaatgggttttagcgtcgactggtttacacaaggtcgtcagggaaaagaggcgctatatagcgcaccttatgatgcggtgatcctggatttaaccttaccaggcatggatggtcgcgatattttgcgcgaatggcgagaaaaaggtcagcgtgagcctgtattgatcctgactgcgcgcgatgcgctggcggaacgtgtagaagggctgcgtctgggagctgacgattatctgtgtaaaccttttgcgttgatagaagtcgccgccaggctggaagctctgatgcgccgaaccaacggccaggccagcaacgagctgcgccacggcaacgtcatgctcgaccccggcaaacgtatcgccacgctggctggcgaacccttaacgctgaaaccaaaagaatttgccctgctggaattactgatgcgtaacgctggtcgggtactgccgcgcaaactgattgaagagaaactgtatacctgggacgaagaggtcaccagtaatgccgttgaagtgcatgtgcatcatctgcgacgcaaactcggtagtgattttattcgtaccgtgcatggtattggctacacattaggtgagaaatga

SEQ ID NO: 1253 - DNA, 393 bp, Escherichia coli
atgaaaaaattcgcagcagtaatcgcagtaatggccctgtgcagtgcaccggttatggcagcagagcagggaggtttttctggcccatcggcaacgcaaagtcaggccggaggattccaggggccgaacggcagcgtaacgaccgtagaaagcgcaaaatccctgcgtgacgacacctgggtaaccctgcgcggcaatatcgttgaacgcatctctgacgatctctacgtgttcaaagatgccagcggtactatcaatgtggatatcgatcacaaacgctggaacggcgtgacggtgacgccgaaagatacggttgagattcagggggaagtcgataaagactggaactctgttgaaattgacgtcaaacagatccgcaaagtaaatccgtaa

SEQ ID NO: 1254 - DNA, 483 bp, Escherichia coli
atgacaaacctgacactggatgtaaatattatcgatttcccatcaatccctgtggcgatgttgccgcaccgctgtagccctgagttgctcaactacagcgtggcgaaatttatcatgtggcgtaaagagacggggctttctcctgttaaccaaagccagacttttggcgtcgcctgggacgacccagccaccaccgcaccggaagcgtttcgctttgatatctgcggcagcgttagcgaaccgatccccgataatcgttatggcgtgagtaatggcgaacttaccggtgggcgttatgctgttgcccgccatgttggcgagctggacgatatttcacacacgatatggggcatcattcgccactggctacctgcaagcggcgaaaaaatgcgcaaagccccgatcctgtttcactacaccaatcttgccgaagggatgacagagcggcgactggaaacggatatttatgtgccgttggcgtga

SEQ ID NO: 1255 - DNA, 1608 bp, Escherichia coli
atgtatacgcaaaatttattatggctggtcagcctggtaagtgcggctcctctctacgctgctgacgttcccgccaacacaccgctcgccccgcaacaagtctttcgttacaacaatcatagcgacccaggcacgctcgacccgcaaaaggtagaggagaatactgccgcgcagattgtgctggatctgtttgaaggtctggtatggatggacggtgaaggccaggtgcagcccgctcaggctgaacgctgggagatacttgacggcggcaagcgctatattttccatctacgtagcggtttgcagtggtcagacggtcagcctctgacggcagaggattttgtcctcggctggcaacgtgcggttgacccgaaaacggcaagcccttttgctggctatctggcacaggcgcacattaacaatgccgcggctattgttgcgggtaaagcagatgttacatcgctgggtgtcaaagcgatggatgatcgtactcttgaagttacgcttgagcagccagttccttggttcacgacgatgctcgcctggccgacgctgttcccggttcctcatcatgtcatcgctaaacatggcgatagctggagtaagccagagaacatggtttacaacggtgcctttgtgcttgataaatgggtagttaacgaaaagattactgcacgcaaaaatccaaagtaccgcgatgcgcaacatacagtattgcaacaggttgagtatctggcgctggataattcggtcaccggctataaccgctatcgcgcgggagaggtcgatctcacctgggttccggcgcagcaaattcccgccattgaaaaatcactgcctggcgagctacgaattatcccgcgtctgaacagcgaatattacaactttaaccttgagaaaccgccatttaacgatgtgcgggtgcgtcgggcgctatatcttacggttgatcgacagcttattgcgcaaaaggtactggggttgagaacgcccgcaaccacgctgacgccgccagaggtaaaaggctttagcgcgacgacgttcgatgaactgcaaaagccaatgagtgagcgcgtcgcgatggcaaaagtcttgctgaaacaggcgggatacgacgcctctcatccgctacgctttgagctgttctacaacaagtacgatctgcatgaaaagaccgcgatagcgttgtcttccgaatggaaaaaatggctgggtgcacaggtgacgctgcgcacaatggagtggaaaacctatcttgatgcccgacgagccggtgattttatgctgtctcggcagtcgtgggatgcgacgtacaatgatgcctccagcttcctgaacacgctcaaaagcgatagtgaagaaaacgtcggtcactggaaaaatgcgcagtatgacgccttactaaaccaggccacgcagatcactgatgcgacaaagcgtagtgcgttgtatcagcaggcagaagtgatcatcaaccagcaggcaccgctgattcccatctactatcagccgttaatcaacctgcttaaaccctacgttggcggttttccgctgcataatccccaggattatgtctacagcaaagagttgtatatcaaggcacattga

SEQ ID NO: 1256 - DNA, 2259 bp, Escherichia coli
atgagcgatatggcagagcgccttgcgctacatgaatttacggaaaacgcctacttaaactactccatgtacgtgatcatggaccgtgcgttgccgtttattggtgatggtctgaaacctgttcagcggcgcattgtgtatgcgatgtctgagctgggcctgaatgccagcgccaaatttaaaaaatcggcccgtaccgtcggtgacgtactgggtaaataccatccgcacggcgatagtgcctgttatgaagcgatggtcctgatggcgcagccgttctcttaccgttatccgctggttgatggtcaggggaactggggtgcgccggacgatccgaaatcgttcgcggcaatgcgttacaccgaatcccggttgtcgaaatattccgagctgctattgagcgagctggggcaggggacggctgactgggtcccaaacttcgacggcactttgcaggagccgaaaatgctacctgcccgtctgccaaacattttgcttaacggcaccaccggtattgccgtcggcatggcgaccgatattccaccgcataacctgcgtgaagtggctcaggcggcaatcgcattaatcgaccagccgaaaaccacgctcgatcagctgctggatatcgtgcaggggccggattatccgactgaagcggaaattatcacttcgcgcgccgagattcgtaaaatctacgagaacggacgtggttcagtgcgtatgcgcgcggtttggaagaaagaagatggcgcggtggttatctgcgcattgccgcatcaggtttcaggtgcgcgcgtactggagcaaattgctgcgcaaatgcgcaacaaaaagctgccgatggttgacgatctgcgcgatgaatctgaccacgagaacccgacccgtctggtgattgtgccgcgctccaaccgcgtggatatggatcaggtgatgaaccacctctttgctaccaccgatctggaaaagagctatcgcattaacctcaatatgatcggtctggatggtcgtccggcggtgaaaaacctgctggaaatcctctccgaatggctggtgttccgccgcgataccgtgcgccgccgactgaactatcgtctggagaaagtcctcaagcgcttgcatatcctcgaaggtttgctggtggcgtttctcaatatcgacgaagtgattgagatcattcgtaatgaagatgaaccgaaaccggcgctgatgtcgcggtttggccttacggaaacccaggcggaagcgatcctcgaactgaaactgcgtcatcttgccaaactggaagagatgaagattcgcggtgagcagagtgagctggaaaaagagcgcgaccagttgcagggcattttggcttccgagcgtaaaatgaataacctgctgaagaaagaactgcaggcagacgcgcaagcctacggtgacgaacgtcgttcgccgttgcaggaacgcgaagaagcgaaagcgatgagcgagcacgacatgctgccgtctgaacctgtcaccattgtgctgtcgcagatgggctgggtacgcagcgctaaaggccatgatatcgacgcgccgggcctgaattataaagcgggcgatagcttcaaagcggcggtgaaaggtaagagcaaccaaccggtagtgtttgttgattccaccggtcgtagctatgccatcgacccgattacgctgccgtcggcgcgtggtcagggcgagccgctcaccggcaaattaacgttgccccctggagcgaccgttgaccatatgctgatggaaagcgacgatcagaaactgctgatggcttccgatgcgggttacggtttcgtctgcacctttaacgatctggtggcgcgtaaccgtgcaggtaaggctttgatcaccttaccggaaaatgcccatgttatgccgccggtggtgattgaagatgcttccgatatgctgctggcaatcactcaggcaggccgtatgttgatgttcccggtaagcgatctgccgcagctgtcgaagggcaaaggcaacaagattatcaacattccatcggcagaagccgcgcgtggcgaggatggcctggcgcaactgtacgttctgccgccgcaaagcacgctgaccattcatgttgggaaacgcaaaattaaactgcgtccggaagagctacagaaagtcgctggcgaacgtggacgccgcggtacgttgatgcgcggtttgcagcgtatcgatcgtgttgagatcgactctcctcgccgtgccagcagcggtgatagcgaagagtaa

SEQ ID NO: 1257 - DNA, 738 bp, Escherichia coli
atgctatatatctttcgtcttattattaccgtgatttacagcatcttagtctgtgtattcggctccatttactgccttttcagcccgcgtaacccgaaacatgtggccacctttgggcatatgtttggccgtcttgcgccgctgtttggcctgaaagttgagtgccgcaaacctgcagatgctgaaagctacggcaatgctatctatattgctaaccaccagaacaactatgacatggtgacggcatcgaacatcgtgcaaccgccgacagtgacggtaggtaaaaagagcttgctgtggatccccttcttcgggcagttgtactggttaaccggcaacttattgatcgacagaaacaatcgcactaaagctcacggcactattgcggaagtagtgaatcacttcaaaaaacgccgtatttccatctggatgttcccggaaggaacccgcagccgtggtcgcggcctgctgccgttcaagaccggggcatttcacgcggcaattgcggcgggcgtcccgattatacccgtgtgcgtctctacaacttcgaataagattaatcttaatcggctacacaacggtctggtgattgtcgaaatgctgccgccaattgacgtcagtcagtatggcaaagatcaggttcgcgagttggctgcccattgtcgttcgataatggaacaaaaaatcgccgagctcgataaagaagtcgcagaacgcgaagcagccggaaaagtttaa

SEQ ID NO: 1258 - DNA, 1413 bp, Escherichia coli
atgtcactcagtcggcgtcagttcattcaggcatcggggattgcactttgtgcaggcgctgttcccctgaaggccagcgcagccgggcaacagcaaccgctacccgttccgccgctgcttgaatctcgccgtgggcaaccgctgtttatgactgtacaacgtgcgcactggtcatttacgccagggacacgcgcatcggtttggggaatcaatggtcgttacctggggccgactatccgcgtctggaagggcgacgatgttaagcttatttacagcaaccgcctgacagaaaatgtctcaatgacggtggccgggctacaggtacctggcccgctgatgggcggtccggcacggatgatgtcgccaaacgctgactgggcacccgtactgcccattcgccagaacgcagctactctgtggtatcacgccaatactcccaaccgcacggctcagcaggtctataacggccttgccggaatgtggctggtggaagatgaagtcagcaaatcgctgcctatccccaaccattatggtgtggatgattttccggtcattattcaggataaacggttggataactttggtacgccggaatataacgaaccgggaagcggcggctttgttggcgatacgctactggttaacggtgtacaaagcccgtacgttgaagtctcgcgtggctgggtgcgcttgcgtctgttgaacgcgtcgaactctcgtcgctatcaactacagatgagcgatggtcgcccgttacatgtgatttctggcgatcagggattcctgcccgctcctgtatcggtgaagcaactttcgctggcaccgggcgagcgtcgtgagattctggtggatatgagcaacggtgatgaagtgtcgattacctgtggcgaagcggcgagcattgttgatcgtattcgtggcttctttgagccatccagcattctggtttctactctggtgctaacgctgcgcccaaccggccttctgccgctggtcactgacagtcttccgatgcgcttgctgccaactgaaatcatggccggttcgccgattcgaagtcgtgatatcagtctgggtgatgacccggggattaatgggcagttgtgggacgtcaaccgtattgatgttactgcgcagcaaggaacgtgggaacgctggacggtgcgcgcggacgagccgcaagcgttccatattgaaggcgtgatgttccagatccgtaacgtgaatggcgcgatgccgttcccggaagacagaggctggaaagataccgtttgggttgacggacaagtggagctgcttgtttatttcggtcagccttcctgggcgcacttcccgttctacttcaacagtcagacgctggaaatggcggaccgtggctcgattgggcaactgttggtcaatccggtaccgtaa

SEQ ID NO: 1259 - DNA, 1305 bp, Escherichia coli
atggactttgaatatatctaccccgtcttaattttatttggcagttttgccgtcatgctggcaataggtgtgccaattacttttgcgattggtctttcttcgctgttatctattattactgccttaccacccgatgccgccatttctgtgatttcgcaaaagatgactgtggggctggatggctttacgctattagccattcccttcttcgtgttagccggaaacattatgaataccggtggtatagccagacgactggttaacctggcgcaagcattagttgggcgtcttcctggctcactggctcattgtaatatcctcgcgaatacactgtttggtgcgatttcaggttcagccgttgcgtcagccgccgcggtaggtgggattatgtcaccactgcaagaaaaagagggatatgatccggcgttttcagcagcggttaatattgcctctgcccccattggcctgatgatcccaccgagcaatgtgttgattgtttattccctcgccagtggcgggacttctgtcgctgcgttgttcttagctggatatctgccgggcatcctcaccgctgttgccttaatgtttgtagctgcactttatgcccgacgtcaccattatccggtggccgaacgcatcaattttcgtcagtttttacaagtattccgcgaatcaattcctagcctgatgcttatttttatcattattggcggtattatcgccggggtatttacgcctacagaagcatcggcaattgcggtaatttatagtttagccctggcgatgatttaccgggaaatcactcttaagaagctcaatgatattctgttagattcggtagtaaccagttcaattgttctgttactggtaggctgctcgatggggatgtcatgggccatgacgaatgctgatgttcctgagttgatcaacgaactgattacccgcgtttcggataacaaatgggtcattctatttattattaatatcattctgttgatcgtcggtacctttatggatatcacgccggcgatcctgatatttacacctattttcctgccgatcgcccagcatctggggattgatccgattcacttcggcatcattatggttttcaacttaaccattggcctttgcacaccacctgtcggcaccattctgtttgtggggtgcagcattggtaaggtcagtatcgacagggcaataaaaccattactgccgatgtttctggcattgtttgtagtaatggcaattatttgttatttcccgcagcttagtctgatgttgccaggattattttcgacctga

SEQ ID NO: 1260 - DNA, 483 bp, Escherichia coli
atgcgaacactcactcatattcttaataagatccttgccggatgttgctgcattattctcgccattatggtgttctgcgtaacctggcaagttattgcacgttttatttttaacgctcccagcactgtgcttgatgagttcacccagattttatttatgtggatgattttacttggcggtgtatatactgcggggttaaaaaaacatctggccattgatttgttggctcaaaaacttccggctgcatctgttctgacgcttgacagttttatccaaattattattacggtctttgcggttattttcatgatctatggcgggaatattgttgttgaaaaagcacaacatgttggacaaatctctccagtattaaaatggccaatggataaagtatattgggttatgcctgtcagtgggcttattctggtctggtattcagtaatgaatattattgacaactatcgtaaacggaattttcattaa

SEQ ID NO: 1261 - DNA, 984 bp, Escherichia coli
atgaaagcacttcgtcctctgacggcatcgcttatgctgttaaccagttgtttattaatatctaataccacactggcaaaaacaacattaaaactgagtcataatcaggataaaagccatgctgtccataaagcattaagctatttagcggataaaaccaaagagtattctaatggtgaattagttattcgcatttacccaaatgcgacattaggtaatgagcgtgaatcactggaattaatgaactccggtgcattacagatggttaaggttaatgccgcatcactagaatcatttgctccggattacagccttttcagtctgccgttcttattccgcgaccgtgatcactattatcgtgttctgcaaagtgatttaggtaaaaaaatacttaattcatcagaaagcaaaggttttgttggtattacgtactatgacggtggtgcgagaagtttttattccaataaaccgattacaaaacctgaagatttagcgggaatgaaaatcagggttcaacaaagccccagcgccattgcaatgatgaaagcactcggtggtgtcgctaccccgatggcgcaaggcgaactctacaccgtacttcagcaaggagtggttgatggcggagagaacaataccgttgtctatgccgatatgcgtcacgccgaagtcgcaaaagtctattcacgtgatgaacacaccatggtacctgatgtgttaattatcagcaccgacgtgttgaataaacttggtgataaagagcgcacggcattattaaaagcagccgatgagtcaatgatgcagatgaaggacgtcatttggcctgcggctgaaaaagaagcctacgacaaaatgaaagggatgaacgcaacagttgttgatgttgataaatccgctttcaaagaacgcgtcaaaccgttatacgatgaattcaaggcgaaagatgcacaatcagccaaaaaccttgagctagtagaaagtatgtaa

SEQ ID NO: 1262 - DNA, 1011 bp, Escherichia coli
atgacaactgtttatgtcagtgaagaaaatttaaaatcactggtgcaccacaaattacataccgccgggctggataccgacaccacacaacaggtgacagatgttttagtacatgccgatattaccggtgtgcattcacatggtgttatgcgtgtcgaacattattgcacccgccttgctgccggagggttaaataaagccccgcagtttagcattgagcaaatttcaccgtcagtggccattctcgactctgacgacggaatggggcattccgcattaattagcgccactgagcacgctattaaactggcccagcaagagggtctcggttttgttagcgttaaaaacacgtctcactgtggtgcgttatcttattttgcagagatgatcaccaacaaagggttggttgctatcgtaatgacgcaaaccgatacctgcgtggctccccatggcggcgccgagcgctttttgggaactaaccccatcgcctttggtttcccggtggaaaacagccatccgatgattgttgatatggcgaccagtgccacggctttcggcaaaatacttcatgcaaaggaaaccggaaaacatattggtgaagggctggcgatagataaaaacggttatggcaccactgatccgtataagattgaaaacctgctacctttcggccaacacaaaggttcaggcattgcactggctattgatgcactgactggcgtgctgatgaatgcgaattttggcaaccatattgttcgcatgtatggtgattatgacaagatgcgtaagctggcaagtttggttattgccatcgatccgaaaaagctcggcaatcctgtttttgcaaaaactatggcgaaaatggtcacggagctgcatgccgttaaaccggctcctggtgtcgaaaaagtgttagcgccgaacgatccgcaaatgcactacaaagaaaaatgccaacaggaaggtattccggttccggcaggaatattccattatctggcagagaattaa

SEQ ID NO: 1263 - DNA, 1017 bp, Escherichia coli
atgaaaacattaatttgtcagcagcctagcgttatggaatatgtggaaaaggatattcccacaccagcagataatgaagtgctgttaaaaatcaaagctgtgggtatttgtggtactgatattcacgcttttgccggcagacagcctttttttagctacccacgtgtattaggtcatgaaatatgcgccgaagcggtttcgcgaggcagccagtgccaaacagcacagccaggccagcgctattccgtcatcccatgcattccgtgtggcgagtgcgcagcctgtcgggaagagaaaacgaactgctgcgaacgtgtttcgctgtatggcgtgcatcaggatgggggttttagtgagtaccttgcggtacgtgaagacaaccttgtgcctctccctgacgaggtcagcgacagtgccggagcattggttgaatgtttcgccattggtgcacatgccgttcgtcgggcagagatcaaggctgaacaaaacgtactggtgattggcgctgggccaatcggtctggctaccgcagccatcgccagggctaaaggggcacatgttgttgttgctgatattgactgtcaacgtcgccagcacgttgtggatcatctggcgattaatgccttcaatcccacacaggaagattttattgccgcgcttcgtgaggcctttggaggcgaactggcttgcgtagtactggatgcgacgggaaataaagcttcaatgagtcatgatgtcaatcttattcgtcatggcggcaaaattgttttcatcggtttgtacattggtgaacttgttattgacgatccgaccttccataaaaaagagacaacgttactcagcagccgcaatgccacacgggaagattttgcgttggtgattaaactgatgcgcagcaataaaattcacgaaaatttaatgaaaaaccaggcgttcgatttctttagtgttggcgaagattaccagcgtaacgttgtagaaaataaaaatatggtcaaaggtgtgatcactttttaa

SEQ ID NO: 1264 - DNA, 1473 bp, Escherichia coli
atgtcagggaacgaaagtatcgatgccgcccactatgatcaggtaaccacctggcctcggggcgggttacaggcagatattgtccatattggttttggcgcttttcatcgcggacaccaggctgtctacacggatctcactaatcagctttctgacacccactgggggatctttgagatcaacctgtttggtgatgctcaactgatcgaaaacttaaatgcgcaaaatgggctgttttcggttgtggaaacatctgcatcgcaatctacctcacgccttgtgcgttcggtggctggcggtattcatacccccagagatggcattgccgcagcaatccataaactggctgaacctcaggtaaaaatcgtttcattaaccatcaccgagaaaggttattgcctcgatccgcaaacacgttcacttgatctcaccaatggattaatccaacacgatctacaaaacccggatgcgcctctgtcagctattggcgtgatcgtctgtgctttgcaacaacgtaaagcgacaggactcgccgcttttagtgtgctctcctgtgacaacttgccagacaatgggcatctgacgcgcaatgccgttctcggttttgcccgacaactggaccagcccctggctcagtggatcgaagaaaatgtctcatttccaggcacgatggtcgatcgcattgttccggcaatgactgaatcgcaattcgccttactggaaactaaaaccggttatgccgatccctgtgggatcgtctgcgaatcatttcgtcagtgggtgatcgaagataattttgtgcgcggacgaccggaatgggataaagccagcgcgatgtttgtcagcaatgttcagccttatgaagagatgaagttacgcatgttaaatggtagccattcatttctggcttataacggctcactggctggctatgagtttatctggcaatgcatggaagacgctaattttcgttccattacccgccaactgatgattaatgaacaagcccgaacacttaatccagacttaaatatcaacatccaggaatacgccgacctgttaattgaacgctttagcaaccgtaatgttgcacaccgtaccgggcaaatcgctatggacggttcgcaaaagcttccccagcgagcgctgacgccctggctgaaattgcatcagcaaaaacaaaacaatgctgttctgtcactgctcgttgctggttggttgcattatgtcattgatgctgttgagaaaagccagtctgtcgctgatccaatgaatgaccaacttcaggcgctaataaaggaacaacaagacgcatggcaacaggcgctcgcattactgcaccttagcgccatatttggtgatttaagcaaccatcagccatttataaatgaaataaaaatcgcctttgcaaatataaaaaacaaaggcatcaaggccaccatcagccaattattatcggatgagcagaaatga

SEQ ID NO: 1265 - DNA, 750 bp, Escherichia coli
atggaacaggttattacaaagcgccgctattacgatattggtctacagattgaagagctgctgtattcaggcgtatttaaggccggagaacgcttaccttcagaacgtgaactgagcgagcggtttaataccagccgaactaccattcgtgaagccatcattatgctggaactgaaaggcgtattgaatgtgaagcaagggtcagggattttctttgtcgactccaccgataagctcaaccagaaatcattaatgccctattcagaaattggcccgtttgaactgttacaggcacgtcaggtaattgagagcaatattaccggttttgctgccagccagatcagctttaacgagttacaagagttgaagaaaatcattggattacaggaaaaagccatcgctgcggaaagtgataaatttgaagacctggatcaccgatttcatagcattattgccgaagcgacgcaaaatcgggtactcatcaaacaagctgctgaattatggcgggcagttcgtacagaaaacccccgctggaagaaacttaactacaagtacctgcatgaaaagcatttgcgtctgcaatggctggaagatcaccgggctattttcctggctctgcaacagaaagattcagagctcgccagggaagcgtcctggagacatctggaaaacagcaaaaatgaactgatcaaaatcttcaaacaagacgcttccatcagcgattttgatgactttttcttcgctcgttaa

SEQ ID NO: 1266 - DNA, 2220 bp, Escherichia coli
atgagctctatctccctgatccaaccggatcgcgacctgttctcctggccgcagtactgggccgcctgttttggaccggcaccgtttttgccgatgtcacgtgaagagatggatcaacttggctgggatagctgcgacatcattttggtaacaggtgatgcgtatgttgatcacccaagcttcgggatggcgatttgtggtcgtatgctggaagcgcagggctttcgcgttgggatcatcgctcagccagactggagcagtaaagacgatttcatgcgtctgggtaaaccgaatctgtttttcggtgttactgctggcaacatggactcgatgatcaaccgctataccgccgatcgccgtttacgtcatgacgatgcctacacgccagataatgtcgcgggtaagcgtccggatcgcgccacactggtttatacccaacgttgtaaagaggcgtggaaagatgtgccggtgatcctcggcggtattgaggccagcctgcgccgtaccgcgcattatgattactggtccgataccgtgcgccgttctgtgctggtggattcgaaagccgacatgctgatgtttggtaacggtgagcgtccgctggtggaagtggcgcaccgtctggcgatgggcgagccgattagtgaaatccgcgatgtgcgtaataccgcgattatcgtaaaagaggcgttgccaggctggagcggtgtggattccacccgtcttgataccccagggaaaatcgacccaatcccgcatccgtatggcgaagatttgccgtgcgcggataacaaaccggtagctccgaaaaagcaggaagccaaagctgtaaccgtgcagccaccacgcccgaaaccgtgggaaaaaacctacgtgttgctgccttctttcgagaaagtgaagggcgataaagtgctgtacgcccatgcttcgcgcattctgcaccacgaaactaacccaggctgcgcccgcgcattgatgcaaaaacatggcgaccgctatgtatggatcaacccgcctgctattccgctttctaccgaagagatggatagcgtctttgcgctgccgtacaagcgcgtgccgcatccagcttacggtaatgcccgaattccggcttacgaaatgattcgtttctcggtcaacattatgcgtggctgctttggcggctgctctttctgttctattaccgagcacgaagggcgcattattcagagccgttccgaagattcgattattaatgagatcgaagcgatccgcgacaccgttccaggttttacaggcgtaatttccgatctcggtgggccaactgccaacatgtatatgttgcgctgcaaatcgccacgcgctgagcaaacctgccgtcgtttgtcgtgcgtttatccggatatttgtccgcacatggacactaaccacgaaccgacgatcaacctctatcgccgcgctcgtgatctgaaaggcattaaaaagatcctgatcgcttccggcgtacgttatgacatcgccgtggaagatccgcgctatatcaaagagctggcgacccatcacgttggcggttatctgaagattgccccggaacataccgaagaagggccgttatcgaagatgatgaagccgggcatgggcagctatgaccgctttaaagagctgttcgatacttactcgaaacaggcaggtaaagaacagtatctgatcccgtatttcatctcggcacaccccggtacgcgggatgaagatatggtgaatctggcgctgtggctgaaaaagcatcgtttccgcctcgaccaggtgcagaacttctatccgtcgccgctggctaactcgaccaccatgtattacaccggcaaaaacccgctggcgaagattggttataagagtgaagacgtcttcgtgccgaagggcgacaaacagcgtcgtctgcataaagcgttgttgcgttaccacgatccggcaaactggccgttaatccgccaggcgctggaagcgatgggcaaaaagcatctgattggcagccgtcgcgattgcttagtgcctgcgccaaccattgaagagatgcgtgaggctcgccgccagaaccgcaatacccgtccggcgttgactaaacatacgccgatggcgacccagcgtcagacgcctgctacggcaaaaaaagcgtcgtctacgcaatctcgcctgcagaatgctggtgcgaagaaacgccctaaagcggcggttggacgttaa

SEQ ID NO: 1267 - DNA, 258 bp, Escherichia coli
atgaaaacgattttcaccgtgggagctgttgttctggcaacctgcttgctcagtggctgcgtcaatgagcaaaaggtcaatcagctggcgagcaatgtgcaaacattaaatgccaaaatcgcccgacttgagcaggatatgaaagcattacgcccacaaatctatgctgccaaatccgacgctaacagagccaatacgcgtcttgatgcccaggactatttcgattgcctgcgctgcttgcgtatgtacgcagaatga

SEQ ID NO: 1268 - DNA, 927 bp, Escherichia coli
atgaaaataatacttctgtttttagcagccctggcaagttttaccgtacacgcacagcccccctcacagaccgtagaacaaacagtccggcatatttatcagaactataaatcagatgccactgccccttattttggtgaaaccggagagcgagcgataacttctgcgcgtattcaacaggcgcttaccctgaacgacaatcttacactaccgggcaatattggctggctggattatgatccggtttgtgattgtcaggattttggcgatctggtgttagaaagcgtagcgataacccaacctgacgccgatcatgccgatgccgttgtgcgctttcgtatctttaaagacgataaagaaaagaccacgcagacactgaaaatggtggcggaaaatggtcgttgggtcattgacgatattgtcagcaatcatggcagcgtcttacaagcagttaatagcgagaatgaaaaaatgctggccgctatagcttcgttgcaaaaagaacagccggaagcctttgttgccgaactctttgaacatattgctgattatagctggccgtggacgtgggtggtttccgactcttaccgccaggcggtcaatgccttctataaaaccaccttcaagactaccaacaatcccgatgaagatatgcaaatagaacggcaatttatttacgacaatccgatctgttttggcgaagagtcgttattttcacgcgttgatgaaattcgagtcctggagaaaaccaccgattccgcccgcattcatgttcgttttacgctgagcaatggcaacaacgaagagcaagaactgattttacagcggcgcgaaggtaagtgggaaatcgctgattttatccgcccgaatagcggcagcctacttaagcagattgaggcaaaaaccgtcgccagattaaagcaatga

SEQ ID NO: 1269 - DNA, 828 bp, Escherichia coli
atggctaatccaaccgttattaagctacaggatggcaatgtcatgccccagctgggactgggcgtctggcaagcaagtaatgaggaagtaatcaccgccattcaaaaagcgttagaagtgggttatcgctcgattgataccgccgcggcctacaagaacgaagaaggtgtcggcaaagccctgaaaaatgcctcagtcaacagagaagaactgttcatcaccactaagctgtggaacgacgaccacaagcgcccccgcgaagccctgctcgacagcctgaaaaaactccagcttgattatatcgacctctatttaatgcactggcccgttcccgctatcgaccattatgtcgaagcatggaaaggcatgatcgaattgcaaaaagagggattaatcaaaagcatcggcgtgtgcaacttccagatccatcacctgcaacgcctgattgatgaaactggcgtgacgcctgtgataaaccagatcgaacttcacccgctgatgcaacaacgccaactacatgcctggaacgcgacacacaaaatacagaccgaatcctggagtccattagcgcaaggtgggaaaggtgttttcgatcagaaagtcattcgcgatctggcagataaatacggcaaaacacctgcgcagattgttatccgctggcatctggatagcggcctggtggtgatcccaaaatcggtcacaccttcacgcattgtcgaaaactttgatgtctgggatttccgtctcgacaaagacgaacttggcgaaattgcaaaactcgatcagggcaagcgtctcggtcccgatcctgaccagttcggcggctaa

SEQ ID NO: 1270 - DNA, 1164 bp, Escherichia coli
atgaacaactttaatctgcacaccccaacccgcattctgtttggtaaaggcgcaatcgctggtttacgcgaacaaattcctcacgatgctcgcatattgattacctacggcggcggcagcgtgaaaaaaaccggcgttctcgatcaagttctggatgccctgaaaggcatggacgtgctggaatttggcggtattgaaccaaacccggcttatgaaacgctgatgaacgccgtgaaactggttcgcgaacaaaaagtgacttttctgctggcggttggcggcggttctgtactggacggcaccaaatttatcgccgcagcggctaactatccggaaaatatcgatccgtggcacattctgcaaacgggcggcaaagagattaaaagcgccatcccgatgggctgtgtgctgacgctgccagcaaccggttcagaatccaacgcaggcgcggtgatctcccgtaaaaccacaggcgacaagcaggcgttccattctgcccatgttcagcccgtatttgccgtgctcgatccggtttatacctacaccctgccgtcgcgtcaggtggctaacggcgtagtggacgcctttgtacacaccgtggaacagtatgttaccaaaccggttgatgccaaaattcaggaccgtttcgcagaaggcattttgctgacgctgatcgaagatggtccgaaagccctgaaagagccagaaaactacgatgtgcgcgccaacgtcatgtgggcggcgactcaggcgctgaacggtttgatcggcgctggcgtaccgcaggactgggcaacgcatatgctgggccacgaactgactgcgatgcacggtctggatcacgcgcaaacactggctatcgtcctgcctgcactgtggaatgaaaaacgcgataccaagcgcgctaagctgctgcaatatgctgaacgcgtctggaacatcactgaaggttcagacgatgagcgtattgacgccgcgattgccgcaacccgcaatttctttgagcaattaggcgtgccgacccacctctccgactacggtctggacggcagctccatcccggctttgctgaaaaaactggaagagcacggcatgacccaactgggcgaaaatcatgacattacgctggatgtcagccgccgtatatacgaagccgcccgctaa

SEQ ID NO: 1271 - DNA, 957 bp, Escherichia coli
atgctacaaaattgcgcacaatcaaattgccgcattattcctaagaaattacgcgatatgaaacgtgaagagatttgccgcttgctggcggataaagttaataaactgaaaaataaagaaaatattttgtcagagctgttgcccgatgtgcgtttgttgtatggcgagacgcctttcgcacgcacaccggtgatgtacgagcctggcatcataattctcttttccggacataaaatcggttatatcaatgaacgcgtgtttcgttatgacgctaatgaatatctcctgctgacggtgccgttgccgtttgagtgcgaaacctatgccacgtcagaggtgccgctggcaggattgcgtctcaatgtcgatattttgcagttacaggaactgttgatggacattggcgaagatgaacattttcagccgtcaatggcagccagcggtattaactccgccacgttatcagaagagattttatgcgcggcagagcggttactggatgtgatggagcgaccgctggatgcgcgcattctcggcaaacagattatccgcgaaattctgtactacgtgctgaccggaccttgcggcggcgcgttactggcactggtcagccgccagactcacttcagcctgattagtcgcgtgctgaaacggattgagaataaatacaccgaaaacctgagcgtcgagcaactggcggcagaagccaacatgagcgtatcggcgttccaccataattttaagtctgtcaccagcacctcgccgttgcagtatttgaagaattaccgtctgcataaggcgcggatgatgatcatccacgacggcatgaaggccagcgcggcggcgatgcgcgtcggctatgaaagcgcatcgcaatttagccgtgagtttaaacgttacttcggtgtgacgccgggggaagatgcggcaagaatgcgggcgatgcaggggaattaa

SEQ ID NO: 1272 - DNA, 660 bp, Escherichia coli
atggctgttattcaagatatcatcgctgcgctctggcaacacgactttgccgcgctggcggaccctcatattgttagcgttgtttactttgttatgtttgccacgctgtttttagaaaacggcttgctgcccgcctcatttttgccaggcgacagcttgttgatactggcaggcgcattgattgcccagggggttatggattttctgcctacgattgcgattctgaccgccgcagcaagtctgggctgctggctaagttatattcaggggcgctggttagggaataccaaaacggtgaaaggctggctggcacagcttcctgctaaatatcaccagcgcgccacctgcatgtttgaccgccacggtctgctggcgctgctggctggacgttttcttgcatttgtccgtacgctgctgccaaccatggcgggaatttccggtctgccaaaccgccgcttccagtttttcaactggttaagcggattgctgtgggtcagcgtggtaaccagtttcggctatgccttaagtatgattccgttcgttaaacgacatgaagatcaggtaatgacgttcctgatgatcctgccaattgccttgttaaccgctggcttgttgggcacgctgtttgtggtgattaaaaaaaaatactgtaacgcctga

SEQ ID NO: 1273 - DNA, 1188 bp, Escherichia coli
atggcggacaaaaagcttgatactcaactggtgaatgcaggacgcagcaaaaaatacacgctcggtgcggtaaatagcgtgattcagcgcgcgtcttcgctggtctttgacagtgtagaagccaaaaaacacgcgacacgtaatcgcgccaatggcgagttgttctatggacggcgtggaacgttaacccatttctccttacaacaagcgatgtgtgaactggaaggtggcgcaggctgtgtgctatttccctgcggggcggcagcggttgctaattccattcttgcttttgtcgaacagggcgatcatgtgttgatgaccaacaccgcctatgaaccgagtcaggatttctgtagcaaaatcctcagcaaactgggcgtaacgacatcgtggtttgatccgctgattggtgccgatatcgttaagcatctgcagccaaacactaaaatcgtgtttctggaatcgccaggttccatcaccatggaagtccacgatgttccggcgattgttgccgccgtacgcagtgtggtcccggatgccatcattatgatcgacaacacctgggcagccggtgtgctgtttaaggcgctggattttggcatcgatgtttctattcaggccgccaccaaatatctggttgggcattcagatgcgatgattggcactgcggtgtgcaatgcccgttgctgggagcagctgcgagagaatgcctatctgatgggccagatggtcgatgccgataccgcctatataaccagccgtggcctgcgcacattaggtgtgcgtttgcgccaacatcatgaaagcagtctgaaagtggctgaatggctggcagaacatccccaagtagcgcgagttaaccaccctgctctgcctggcagtaaaggccacgaattctggaaacgagactttacaggcagcagcgggctattttcctttgtgcttaagaaaaaactcaatgatgaagagctggcgaactatctggataacttcagtttattcagcatggcctactcgtggggcgggtatgaatcgttgatcctggcaaatcaaccagaacatatcgccgccattcgcccacaaggcaagatcgattttagcgggaccttgattcgcctgcatattggtctggaagatgtcgacgatctgattgccgatctggacgccggttttgcgcgaattgtataa

SEQ ID NO: 1274 - DNA, 735 bp, Escherichia coli
gtgggtaataatttaatgcagacggacctttccgtctggggtatgtatcagcacgccgatattgtcgttaagtgcgtgatgattgggcttattttggcctccgtagtcacctgggcaatcttcttcagtaagagcgtagagttcttcaatcagaagcgtcgccttaagcgcgagcagcaactgctggctgaagcgcgttccttaaaccaggccaacgatatcgccgctgattttggtagcaaaagcttaagcctgcatttgctcaatgaagcgcagaatgagctggaactgtcagaaggcagcgacgataacgaaggtattaaagaacgtaccagcttccgtctggagcgtcgggtcgccgcagtaggtcgtcaaatgggccgcggtaacggctatctggcaaccatcggcgcgatttcgccgttcgttggtctgtttggtacggtctggggcatcatgaacagctttattggtatcgcgcaaacgcagaccactaacctggcagtcgttgcgccgggtattgcagaagctctgttagcaacggcaatcggcctcgtggcagcgattcctgcggtcgttatctataacgtatttgcacgccagattggcggctttaaagcgatgctgggtgatgttgcagcgcaggtattgttgctgcaaagccgtgacctggatctggaagccagcgccgctgcgcatccggttcgtgtcgcacaaaaattacgtgcaggataa

SEQ ID NO: 1275 - DNA, 426 bp, Escherichia coli
atggcgatgcatcttaacgaaaacctcgacgataacggcgaaatgcatgatatcaacgtgacgccgtttatcgacgtgatgttggttttgctgattatctttatggtggcggcaccgttagcgacggtagatgtgaaggtgaatttgcctgcttctaccagcacgccgcagccgcgcccggaaaaaccggtttatctgtcagtgaaagcagacaactcgatgtttattggtaacgatccggtcaccgatgaaacaatgattacggcgttgaatgcgttaaccgaaggcaagaaagacaccaccatcttcttccgtgcggataaaactgtcgattacgagacgttgatgaaggtaatggatacgctgcatcaggcgggttacctgaaaataggtctggtcggcgaagaaactgcgaaagcgaaataa

SEQ ID NO: 1276 - DNA, 885 bp, Escherichia coli
atgtctcatttaaaagacccgaccacgcagtattacactggtgaatatcccaaacagaaacaaccgacgccaggcatccaggcgaagatgacaccggtaccggattgcggcgagaaaacctatgttggtagcggtcgcctgaaagatcgtaaagcactgatgacagggggcgattccggaatcggtcgcgctgccgccattgcttacgcgcgtgaaggggctgacgtggcgatcagttatcttcccgtggaagaagaagacgctcaggatgtgaaaaagatcattgaagaatgcggacgcaaagccgttctgctgccaggcgatttaagcgatgagaaattcgcccgttcgctggttcacgaagcacacaaggcgttaggcgggctggatattatggcgctggtagccgggaaacaggttgccattcctgatattgcagacctcaccagcgaacagtttcaaaagacctttgccattaacgttttcgcgttgttctggctaacccaggaagcgatccccctgctaccgaaaggtgcaagtatcatcaccacttcctcaatccaggcgtaccagccaagcccgcatttactggactatgcggctacgaaggcggcaattctgaactacagccgtggcctggcaaaacaggtcgcggagaaaggtattcgggtgaatattgtcgcgccaggcccgatctggacagcactgcaaatttctggcggacaaacgcaggataagatcccgcagtttggtcagaaaacgccgatgaagcgtgcggggcaaccggcggagctggcccctgtatatgtttacctggcaagtcaggagtcgagctacgtcaccgcagaagtgcacggtgtctgcggcggcgagcatttaggttaa

SEQ ID NO: 1277 - DNA, 495 bp, Escherichia coli
atggaacgttttcttgaaaatgcaatgtatgcttctcgctggctgcttgcccccgtgtactttggcctttcgctggcgttagttgccctggcgctgaagttcttccaggagattattcacgtactgccgaatatcttctcgatggcggaatcagatttgatcctcgtgttgctgtcgctggtggatatgacgctggttggcggtttgctggtgatggtgatgttttccggttacgagaatttcgtctcacaactcgatatctctgagaacaaagagaagctgaactggctggggaaaatggacgcaacgtcgctgaaaaacaaagtagcagcgtcgattgtggcaatttcttccattcacttactgcgcgtctttatggatgcgaaaaatgtccctgataacaaactgatgtggtacgtcattatccatctgacgtttgtgctctctgcatttgtgatgggctatcttgaccgactgactcgtcataatcactga

SEQ ID NO: 1278 - DNA, 1041 bp, Escherichia coli
atggtctggttagcgaatcccgaacgttacgggcagatgcagtaccgctattgcggaaaaagtggtttacgcctacccgcgttatcgctcggtttatggcacaatttcggtcacgttaacgcgctggaatcacagcgtgcgatcctgcgtaaagcgtttgatttaggcattacgcactttgatttagccaacaattacgggccgcctccaggaagcgcagaagagaactttggtcgcctgctgcgcgaggattttgccgcttatcgcgatgaactgattatctctaccaaagccggatacgatatgtggcccggcccatatggctctggcggctcacgtaaatacctgctcgccagcctcgaccaaagcctgaagcgtatggggcttgagtatgtcgatatcttttactctcatcgcgtcgatgaaaatacgccgatggaagaaaccgcctctgcgctggctcatgctgtacaaagcggtaaggcgctgtatgtcgggatctcctcttactcgccagagcggacgcaaaaaatggtcgagttgctgcgcgagtggaaaattccgctgttaattcatcaaccttcgtacaatttactgaaccgctgggtggataaaagcggcctgctggataccctgcaaaataacggcgtgggctgcattgcctttactccactggctcagggattgctgaccggaaaatatctcaacggtattccgcaagattcacggatgcatcgtgaagggaataaagttcgtggtctgacgccgaaaatgctcaccgaagccaacctcaacagcctgcgcttattgcatgaaatggcacagcagcgtggacaatcaatggcgcaaatggcgttaagctggttgctgaaagatgagcgagtgacgtcggtattgattggtgccagccgcgcggagcaacttgaggagaacgtgcaggcgctgaataatctgacatttagcaccgaggagctggcgcagattgatcagcatatcgccgatggagagctgaatctgtggcaggcgtcttccgataaatga

SEQ ID NO: 1279 - DNA, 561 bp, Escherichia coli
atgccgcgtttaactgccaaagctttcccacaagagttgctggattactacgactattacgctcacgggaaaatctcgaaacgtgagttcctcaaccttgcggcgaagtatgcggtgggcgggatgacggcattagcgctgtttgatttgctcaagccaaattatgcgctggcgactcaggtagagtttaccgacccggaaattgttgcagagtacatcacgtatccctcgccaaatggtcacggcgaggtacggggttatctggtgaagcccgcaaaaatgagcggtaaaacgccagccgtggtagtggtgcatgagaatcgagggctgaatccgtatatcgaagatgtgacgcggcgagtggcgaaggaagggtacatcgccctggcgccagacggtttaagctcagtaggtggctatcctggtaacgatgataaaggccgcgaactgcaacagcaggttgatccaaccaaactgatgaatgatttctttgccgcaattgagtttatgcaacgctatccgcaagcgtcaggcacccactgccgatgtggcgaagattga

SEQ ID NO: 1280 - DNA, 288 bp, Escherichia coli
atgaataaccattttggtaaaggcttaatggcgggattaaaagcaacgcatgccgacagtgcggttaatgtgacaaaattctgtgccgattataaacgcggttttgtattaggctactcacaccggatgtacgaaaagaccggagatcgccagcttagcgcctgggaagcgggtattctgacgcgccgttatggactggataaagagatggtaatggatttctttcgtgagaataattcctgttctacgttgcgcttttttatggccggttatcgcctagaaaattga

SEQ ID NO: 1281 - DNA, 1119 bp, Escherichia coli
atgactggagataacaccctcatccattctcacggcattaaccgtcgtgatttcatgaagctttgtgcagcattagccgccaccatggggttaagtagcaaagccgctgcagagatggtcgaatcggttactaacccgcagcgtccgccagttatctggattggcgcgcaggagtgcaccggttgtacggaatctctgcttcgtgcaacgcatccaacggtagaaaacctcgtgctggagactatctctctggagtatcacgaagtgctttccgccgccttcggtcatcaggtcgaagagaacaaacataacgctctcgagaagtacaaagggcagtatgtgttagtggtggatggttccatcccattaaaagataacggtatttattgcatggttgccggtgagccgattgtggatcacatccgcaaagcggcggaaggcgcagcagccattatcgctatcggttcctgctctgcgtggggcggtgttgccgcagctggagttaacccaactggcgcagtcagcctgcaagaagttctaccgggcaaaaccgttatcaatattcctggctgcccgccgaacccgcacaacttcctggcgaccgttgcgcacatcatcacttacggcaaaccgccgaaactggatgacaaaaaccgtccgactttcgcctatggtcgtctgattcacgaacactgtgaacgtcgcccgcacttcgatgctggtcgttttgccaaagagttcggtgatgaaggccaccgcgaaggctggtgcctgtaccacctcggctgtaaagggccagaaacttacggcaactgctcaacgctgcaattctgcgatgttggcggcgtgtggccggtagcgattggtcacccgtgctatggctgtaacgaagaaggtatcggcttccataaaggcatccatcagcttgccaacgtcgaaaaccagactccgcgttcacagaaaccggacgttaacgctaaagaaggcggcaacgtctcggcaggcgctattggtttgctcggcggagtggttgggctggttgccggtgtcagcgtgatggcggtgcgtgaactgggtcgtcagcaaaagaaagataacgctgactcacggggagaataa

SEQ ID NO: 1282 - DNA, 987 bp, Escherichia coli
gtgaacagacgtaattttattaaagcagcctcctgcggggcattgctgacgggcgcgctgccgtctgtcagtcatgcggctgctgaaaaccgcccgccaattccgggatcgctggggatgttgtacgactcgaccttgtgcgtaggctgccaggcttgcgtcaccaagtgtcaggatatcaacttccctgaacgtaacccgcaaggggaacagacctggtcgaacaacgacaaactgtcgccgtataccaataacatcattcaggtgtggaccagcggcacaggggtcaacaaagaccaggaggagaatggctacgcgtacattaagaaacagtgtatgcactgcgtcgatccgaactgtgtctctgtgtgcccggtctctgcgctgaaaaaagatccgaaaaccggcattgtccattacgacaaagatgtgtgcaccggctgccgttactgcatggtcgcctgcccatacaacgtgccgaagtacgactacaacaacccgtttggtgcgctgcataagtgcgagttgtgcaaccagaaaggtgtggaacgtctcgataaaggcggtctgcctggctgcgtagaagtgtgcccggcgggcgcggtgatttttggtacgcgtgaagagctgatggcggaggcgaaaaaacgtctggcgctgaagccgggcagcgaataccactatccgcgtcagacgctgaaatctggcgacacttacctgcatacggtgccgaaatattatccgcatctgtacggcgagaaagagggcggcggtactcaggttctggtactgacgggtgtgccttatgaaaatctcgacctgccgaaactggacgatctttctactggtgcgcgttccgaacatgtccaacacaccctgtataaaggcatgatgctaccactggctgtgctggcgggcttaaccgtgctggttcgtcgcaacactaaaaacgaccatcacgacggaggagacgatcatgagtcatga

SEQ ID NO: 1283 - DNA, 1179 bp, Escherichia coli
atgagtcatgatccacaaccgctgggcggcaaaatcatcagtaaaccggtcatgatttttggaccgttaatcgtcatctgtatgctcctgattgtgaagcgtctggtgttcggtctgggctctgtctctgacctgaacggcggcttcccgtggggcgtgtggatcgcgtttgacctgctgattggcaccggctttgcctgtggcggctgggcgctggcgtgggcggtgtacgtctttaaccgtgggcaataccatccgctggtgcgtccggcgctgttggcgagtctgttcggttactcactgggtggcttgtcgatcaccatcgacgttggtcgctactggaacctgccgtacttctacattccgggtcacttcaacgtgaactcggtactgttcgagacggcggtctgtatgaccatctacatcggcgtgatggcactggagtttgctccggcattgtttgaacgattgggctggaaggtttctctcaagcgtctgaacaaggtgatgttcttcatcattgcacttggcgcactgttgccgaccatgcaccagtcttcaatggggtcactgatgatctcggcgggctacaaggtgcatccgctgtggcagagctatgaaatgttgccgttgttctcgctgctgacggcgttcatcatgggcttctcgattgtcatctttgaaggttcgttggtgcaggcgggtctgcgtggcaacggtccggatgaaaagagcctgttcgtcaagctgaccaacaccatcagtgtgttgctggcgattttcatcgtgctgcgctttggcgaacttatctatcgcgacaagctgtcgttagcgtttgccggtgacttctattccgtgatgttctggattgaagtcctgctgatgctcttcccgctggtcgttctgcgtgtggcgaagctgcgtaatgattcccgcatgctgttcctgtcagcactgagtgcactgttaggttgtgcaacctggcgtctgacctattcgctggtggcattcaacccgggtggcggttacgcctacttcccgacctgggaagaactgttgatttctattggttttgtggctattgagatttgcgcttatatcgtactcattcgtctactgccgatacttcctcctttaaaacaaaacgatcataatcgtcatgaggcgagcaaagcatga

SEQ ID NO: 1284 - DNA, 1704 bp, Escherichia coli
atgagccagagaattactattgatccggtaacccgtattgaagggcatttacgcatcgattgcgaaatcgaaaatggcgtcgtttcgaaagcatgggcttccggtaccatgtggcgcggcatggaagagatcgtgaaaaaccgcgatccgcgcgatgcatggatgattgtgcaacgtatctgtggcgtatgtactaccactcacgcgctctcttccgttcgtgcggcagaaagtgcgctgaatatcgacgttccggttaacgcgcaatacatccgtaacatcattctggctgcgcacaccacgcatgaccatattgttcatttctatcagctttcggcgctggactgggtggacatcacttctgcactgcaagctgatccagccaaagcctccgaaatgctgaaaggcgtttcgacctggcatctgaacagcccggaagagttcaccaaagttcagaacaagatcaaagatctggttgccagcggtcagttgggtattttcgccaatggctactggggtcacccggcaatgaaactgccgccggaagtgaacctgattgcggtagcgcactacctgcaggcgctggagtgccagcgtgacgctaaccgcgttgtggcgctgctgggcggtaaaacgccgcatattcagaacctggcggtaggtggtgtcgcgaacccgatcaacctcgacggtctgggtgtgctgaaccttgagcgcctgatgtacatcaagtctttcatcgacaaactgagcgactttgttgagcaggtttataaggttgataccgcggttatcgccgcgttctacccggaatggctgacgcgcggtaaaggtgcggtgaactacctgagcgtgccggaattcccgactgacagcaaaaacggcagcttcctgttccctggcggctacattgagaatgcggatctgtcctcgtatcgtccgatcacttcccactccgatgaatacctgatcaaagggattcaggaaagcgcgaagcactcctggtataaagacgaagcgccgcaggcaccgtgggaaggtaccaccattccggcttacgacggttggtctgacgacggtaaatactcctgggtgaaatcaccgactttctacggcaaaacggtagaagtgggtccgctggctaacatgctggtgaaactggcggcaggtcgcgaatctacccagaataaactgaatgaaatcgttgcgatttatcagaaactgactggcaacacgctggaagtagcgcaactgcactccacgctgggccgtattattggtcgtaccgttcactgctgtgaattgcaggatatcctgcaaaatcaatacagtgcactgatcaccaatatcggcaaaggcgatcacaccacctttgtgaagccgaacattccggcaacgggtgagttcaaaggcgtaggcttcctcgaagcaccgcgcggtatgctctctcactggatggtgatcaaagacggtatcatcagcaactaccaggcagttgttccatcaacctggaactctggcccgcgtaacttcaatgatgacgtcggtccttacgagcagtcgctggtgggtacaccggttgccgatccgaataaaccgctggaagtggtgcgtaccattcactccttcgacccgtgcatggcctgtgcggtacacgtagtggatgccgacggcaacgaagtggtttcagtgaaggttctgtaa

SEQ ID NO: 1285 - DNA, 495 bp, Escherichia coli
atgcgtattttagtcttaggggtcggcaatattttgctgaccgatgaagccatcggtgtgcggattgttgaagcgttagagcaacgatacattctgccggattatgttgagatcctcgatggcggcacggcgggaatggagctgcttggtgacatggcaaatcgcgatcatctgattattgcggatgccattgtctcgaaaaagaacgcgccgggaacgatgatgatcctgcgggatgaagaagttccggcgttgtttaccaacaaaatctctccgcatcagcttggcctggccgacgtattgtcggccctgcgcttcactggcgagtttccgaaaaagctgaccctggtcggcgtgatcccggaatcactggagccacacatcggtttgacaccgacggtcgaagcgatgattgaacctgcgcttgagcaggttctggctgcgctgcgcgaatcaggcgtggaagctatcccacgggaggcgactcatgactga

SEQ ID NO: 1286 - DNA, 489 bp, Escherichia coli
atgactgaagagatagcaggtttccagacctccccgaaggcgcaagtacaggtagcttttgaagaaattgcccggcgttcgatgcatgatctctcttttctgcatccttcaatgccggtgtatgtttctgactttacgctgttcgaaggtcagtggacggggtgtgtgatcaccccgtggatgctgagtgcagttatcttccccggcccggatcaactctggccgctgcgcaaagtgagtgaaaaaattggtctgcaactgccgtatggcactatgacctttactgttggtgaactggatggtgtttcgcaatacctctcctgctcgctgatgtcgccgctttcgcacagcatgtcgattgaagagggccaacggctgacggatgactgcgcccgaatgatcctttcgctgccagtcaccaatccggatgtaccacacgcagggcgtcgtgccctgctatttggccgcaggagtggcgaaaatgcatga

SEQ ID NO: 1287 - DNA, 342 bp, Escherichia coli
atgcatgagttgtcgctttgccagagcgccgttgaaattatccaacggcaggcggagcagcacgatgttaagcgcgtcaccgccgtgtggctggaaattggcgcactctcctgcgttgaggagagcgccgtccgttttagttttgaaattgtctgccacggaacggtagcgcaagggtgcgatttacatatcgtctataaacccgcccaggcctggtgttgggattgcagccaggtggtggagattcatcagcacgatgcgcagtgtccgatctgtcacggcgagcggttgcgtgtcgataccggcgattcgctaatcgtcaaaagtattgaagttgaataa

SEQ ID NO: 1288 - DNA, 249 bp, Escherichia coli
atgtgtattggcgttccaggccaggtgctggctgtcggtgaagatattcaccagcttgcgcaggttgaagtatgtggtatcaagcgcgacgtgaatatcgccctgatttgtgaaggtaaccctgccgatctgctgggccagtgggtactggtacacgtcggatttgccatgagcattatcgatgaagacgaagccaaagccacattagacgcactgcgccaaatggattacgacattaccagcgcgtga

SEQ ID NO: 1289 - DNA, 867 bp, Escherichia coli
atgacagacaatacttatcagcccgcgaaagtctggacgtgggataaatccgctggcggcgcgttcgccaatatcaatcgcccggtttctggtccgacgcatgaaaaaacgctgccggtgggcaaacatccattgcaactttattcgctgggaacgccgaacggtcagaaagtaacgattatgcttgaggagctgctggcactgggcgttactggtgcagagtacgacgcctggctgattcgcattggcgatggcgatcaattctccagcggctttgtcgaagtgaacccgaattcgaagatcccggcattgcgcgatcatacccataatccgccgatccgcgtgtttgagtcaggctcgattctgctttatctggcggagaaatttggctacttcttgccgcaggatctggcaaagcgtactgaaacgatgagctggctgttctggttacagggcgcggcaccgttcctcggcggtggttttggtcacttttaccattacgcgccggtgaaaattgagtacgccatcaaccgctttactatggaagccaagcgccttctcgacgtgctggataagcaactggcgcagcataagtttgttgcgggcgatgagtacaccattgcggatatggcgatttggccatggtttggcaatgtggtgttaggcggcgtatatgatgccgcagagtttcttgatgcgggcagttataagcatgtacaacgctgggcgaaagaagtgggcgaacgtccggcagtgaagcgtgggcgtattgttaaccgcatcaacggaccgctgaacgagcagttgcatgagcgccatgacgccagtgatttcgagacaaatacggaagataagcgtcaggggtaa

SEQ ID NO: 1290 - DNA, 1860 bp, Escherichia coli
atgagcaaaggaacgaccagccaggatgccccgttcgggacattattgggctacgccccaggtggggtagcaatctactcttcagattacagttctctcgatccgcaggaatacgaagatgacgccgtattccgtagctatatcgacgatgaatatatgggccacaaatggcaatgcgttgaatttgctcgccgttttctctttctgaactacggtgtagtcttcactgacgtgggtatggcatgggagattttctcactgcgcttcctgcgtgaagtggtcaatgacaacatcctgccattgcaggcatttcctaacggttcgccgcgtgcaccggtagcgggggcgcttcttatctgggataaaggcggtgaatttaaagacactggccatgtcgccatcattacccaattgcatggcaacaaagtccgtattgcggaacagaacgtgattcataccccgttgccgcaaggacaacagtggacacgcgagctggagatggtggtcgaaaacggcggctataccctgaaagacaccttcgatgacaccactattctgggctggatgatccagacggaagataccgaatacagcttgccacagccggaaattgcaggcgaactgctgaaaatcagcggggcgcgtctggaaaacaaaggccagtttgacggtaaatggctggatgaaaaagatccgctgcaaaacgcctatgtacaggccaacggtcaggtgatcaatcaggatccgtatcattactacaccattaccgagagcgccgagcaggagctgattaaagccaccaacgagctgcacctgatgtatcttcacgccaccgacaaggtgctgaaagatgacaacctgctggcgctgtttgacattccgaaaatcctctggccacgtttgcgtctctcctggcagcgtcgccgtcatcatatgatcactggtcgtatggatttctgcatggatgaacgtggcctgaaagtctacgaatacaacgccgattctgcctcctgtcataccgaagcgggcttgatcctcgaacgttgggcggagcagggctataaaggcaacggcttcaatcctgcggaaggactgattaacgaactggctggcgcgtggaaacacagtcgtgcacgtccgtttgtccatatcatgcaggacaaagatatcgaggaaaactatcacgcgcagtttatggagcaggcgctgcaccaggcgggctttgaaacgcgtatcttgcgtgggttggatgaactgggctgggatgctgccgggcaactgattgatggggaagggcgactggttaactgcgtatggaaaacctgggcgtgggaaacggcatttgatcaaatccgcgaagtgagcgaccgtgaatttgccgcagtgccgatccgtaccgggcatccacaaaatgaagttcgtctgatagacgttctgttacgcccggaagtgttggtttttgagccgctatggacggtgatccccggtaacaaagcgattctgccgatcctctggtctctgttcccgcaccatcgttatctgttggatactgacttcaccgtgaatgatgagctggtgaaaaccggttatgccgttaaaccgatcgccggtcgctgtggcagtaacatcgacctcgtcagccatcatgaagaggtgctggacaaaaccagcggtaaatttgccgagcagaaaaacatctatcagcaactgtggtgtttgccgaaagtggacggtaaatacattcaggtatgtactttcaccgttggcggcaactacggtgggacgtgtttgcgcggtgatgaatcactggtcatcaaaaaagagagtgatattgaaccgttaattgtggtgaaagagtaa

SEQ ID NO: 1291 - DNA, 1500 bp, Escherichia coli
atgctaaatttatttgttggccttgatatatatacggggcttttgttattacttgctctggcatttgtgttgttctatgaagcaatcaatggttttcatgacacggcgaatgcggtggcaaccgttatttatacccgtgccatgcaaccacagcttgccgtggtcatggcggcattttttaacttttttggcgtattgcttggcgggcttagcgttgcctatgccatcgtccatatgttgccaaccgatttgttgctgaatatggggtcaactcacggtctggcgatggtcttttccatgctgctggcggcgattatctggaacctgggaacgtggttctttggtttaccggcctccagttcgcacactttgattggtgcgattatcggcattggtttaaccaacgcgctgttaaccggctcgtcggtgatggatgcgttaaacctgcgcgaagtcaccaagattttctcttcactcattgtctctcccatcgtggggctggtgattgcgggggggctaatttttctgctacgccgtttctggagtgggacgaaaaagcgtgaccgtattcatcgtattcctgaagatcgcaaaaagaaaaaaggcaaacgtaagccgccattctggacgcgtattgccctcattgtttccgctgcgggcgtggcgttttcgcacggcgcgaacgacgggcagaaaggaattggtctggtgatgctggtgctggtggggattgctcccgccgggtttgtcgtcaatatgaatgcgtccggctatgaaattacccgtacccgcgatgccgtcaccaacttcgaacactacctgcaacagcatcctgaactgccgcagaagttgattacgatggaacctccattgcctgcggcatcgactgatggcgcgcaagtgacggagtttcactgtcatccggcaaatacctttgatgcgattgcgcgcgttaaaacgatgctgccaggcaatatggaaagttacgagccgttaagcgtgagtcagcgcagccagctgcgccgcattatgctgtgcatctctgatacctccgcgaagctggcgaaactgccaggcgtcagtaaagaagaccagaacctgctgaaaaaactgcgcagcgatatgttaagcaccattgagtacgcaccggtatggatcatcatggcggtagcactggcgctcggcatcggcaccatgattggctggcgtcgtgtagcgatgaccatcggtgagaagattggtaagcgcggcatgacgtatgcgcaaggcatggcggcacaaatgacggcggcagtgtctatcggccttgccagttatattgggatgcccgtctccacaacacacgtactctcatctgccgtagcaggaacgatggtggtggacggcggtgggttacagcgtaaaacggtaaccagcatcctgatggcgtgggtatttactttaccggcggcgatttttctttctggtgggttgtactggatagcattgcagttgatttaa

SEQ ID NO: 1292 - DNA, 693 bp, Escherichia coli
atgcagtcaataacacctccattaattgccgttattggtagcgatggttcaggcaagtcaacggtgtgtgaacatcttattaccgttgtcgaaaaatatggtgctgccgaaagggttcatttaggaaaacaggccggaaatgtcggtcgtgcagtgacaaaattaccgttgatgggaaaatccttacataaaacaattgaacgaaatcaggtaaaaacagcaaaaaaattgcctggaccagttccggcgctggtaattacagcgtttgtcgcccgtcgcttactgcgctttcgtcatatgcttgcctgtcgtcgtcgcgggttaattgttttaaccgaccgttatccgcaggaccagattcctggcgcttatgatggtacggtgtttccgcctaacgttgaaggtggtcgttttgtctcatggctggcaagtcaggaacgtaaagcatttcactggatggcgagccacaagcccgatctggtcatcaaactcaatgttgaccttgaagttgcctgcgcgcgtaaacccgaccataaacgggaatcgctggcgaggaagattgccataacgccacagttaacctttggtggtgcacaactggttgatatcgacgccaatcagccactggaaaaggtgctggttgatgcagaaaaagcgattacggattttatgaccgcgcgtggttatcactag

SEQ ID NO: 1293 - DNA, 699 bp, Escherichia coli
atgtcaataattaattccacgccagtgcgtgttattgccattgtaggatgtgatggttcaggtaaatcgaccctcacggcaagcctggtaaatgaactggcatcaagaatgccaacagaacacatttatctcgggcaatcgtccgggcgaattggcgaatggatttcacagctacctgttattggcgcaccttttgggcgttatttgcgaagtaaagcggcacatgtgcacgaaaagccctcaacaccgcctggcaatattactgcgctggttatctatctgctttcctgctggcgggcgtacaagtttcgcaaaatgttgtgtaaaaaccagcaaggctatctgctcatcaccgaccgctacccgcaggttgaagtgccgggtttccgctttgatggcccgcaattggcaaaaaccacgggcggtaacggttggataaaaatgttaaggcagcgtgagctgaagctgtaccaatggatggcgtcttatttgcctgtattgttgattcgtcttggcattgatgaacaaaccgcgtttgcgcgtaaacctgaccaccaactggcagcgttacaggaaaaaatcgccgttacgccgcaactgacattcaatggcgccaggattcttgaactggatggtcggcaaccagccgatgaaattctgcaagcgtcactactcgcaattcacgccgcgctttcctga

SEQ ID NO: 1294 - DNA, 771 bp, Escherichia coli
atgattaaacgaatggatgcactacaaacacaaactgttaagagtacaaccgcgccgcagcccaactacattccggggctgattgcggtggtcgggtgtgatggaaccggtaaatccacactgaccaatgacctggtgaaatcgctgcaacaacactggcaaaccgagcgacgctatctggggctgctctccggcgaagacggcgacaaaatcaaacgattgccgttggttggtgtctggctcgaacggcgactggcggccaaatcctcgaaaacccaaagcatgaaaaccaaatctccggcgctatgggcggcggtgattatgtactgcttctcgctgcgaagaatggcgaatctgcgcaaggttcagcgactggcgcaaagtggcgttctggtggtcagcgatcgcttcccgcaggctgaaatttcgggcttttattatgacggaccggggattggcgtcgaacgtgcgaccgggaaaatcagcatgtttctggcgcagcgtgaacggcgtttataccaaaaaatggcgcaataccgtcctgaattaatcattcgcttggggattgatattgatactgccatctcccgcaagcctgaccatgactatgccgagctgcaggacaaaatcggtgttatgtcgacgattggctataacggcacaaaaattcttgagattgattccagagcgccttacagcgaggtgctggaacaggcacagaaggcgctttctctggttgccatcgtttctgaccgccgaagtttaacttaa

SEQ ID NO: 1295 - DNA, 1350 bp, Escherichia coli
ttggcgggttttaacatcaaacattggtttgcagatggcgcgtttcgcaccattattcgcaatagcgcctggttaggctccagtaatgttgtgagcgctttgctggggctgttggcgctctcgtgtgccggtaaagggatgacgcccgccatgtttggcgtactggtaattgtgcaatcgtacgccaagtcgatcagcgattttattaagtttcagacatggcaactggtggttcagtacggaacgccggccttgaccaacaataatccgcagcaatttcgcaatgttgtctcattttccttctcgctggatatcgtcagcggcgcggtggcgattgtcggcggcattgccttactgccattcctttcccattcattaggtctggatgaccaaagcttttggctggcggcgctctattgcacgctcattccttcaatggcttcctccacgccgaccggcattctgcgtgcggtagatcgctttgatttgattgctgtacagcaggcgacgaaaccttttctgcgcgcagcggggagcgtcgtagcctggtattttgactttggttttgcgggttttgttattgcctggtacgtgtcgaatctggttggcggcaccatgtactggtggtttgccgcgcgcgaattacgccgcagaaatatccataacgccttcaaattgaatctgtttgagtctgcccgacacattaaaggcgcgtggagttttgtctggtcaaccaacattgcccactccatctggtcggcgcgtaactcgtgcagcacagtgctggtggggatcgtgttaggacccgctgccgccgggttatttaaaatcgccatgacattcttcgacgccgccggaacgccagcgggtttactgggcaaaagtttttacccagaggtgatgcgtttagatccgcgcaccaccagaccgtggttgttaggcgtgaagtcaggtttactggcgggcggaatcggtattctggtggcgctcgcggtgttgattgtcggcaagccgctcatttcgctggtgtttggcgttaagtatctcgaagcgtatgacctgattcaggtgatgctgggcgcaattgtgatctcgatgctgggcttccctcaggagtcattgctattgatggcgggaaaacagcgcgcttttctcgtggcgcaaaccatcgcctcaatcggctacatcgtattgctgttcatgttctgtcatctgtttggcgtgctgggagcagcgtttgcttatttcggcggtcaatgtctggatgtggtgctttcgctaattccgaccttaaaggcattttttcagcgccattccttgctttataacgcagccggagagaaatcctga

SEQ ID NO: 1296 - DNA, 837 bp, Escherichia coli
atgatgagaaaatatttcccgcttgaggctagcgagcgtctatttgttgcgattgaagaagatgatgtcgttgatgcacaggtcagtttgccgccgactatcgcactaagttgtaccaccgaaatcatccatgataattacgcgttatgcctgcagttctggctcaatggcgtcaatcgccaggagttactgcgtttaatatgcaaacaggccaaaggcgatgagctgactgctgatgagcgcaaacaatttaaatacatgcgagcgcgctacaagcacctgcgttttgcgcaacggctgtatttaaagaagcatcaggccggatttttattcggcaaaacgaccgtttttttggggcgttttcaggacggctttcgtaacggtaagaaaaatattgtgtcgtattacggcaacctgttacgggtttatttaagctctccggtctggtcgttggtgaactattcattacgccatagccagttagaaagcgtaagcggttttattgcctatcggcaaaagcaaatgcataccctgaaagagataattgccaaaccgcaactaactggcagggaatttcatgatgtgcgaaaaatcatcagccagcaggtttcttattacgacaccctaagatcgcttgatcctgaaaataaagaagcgttacagatttcccgcttcctcgccgccattaatggcctgatgggggataaacacgacgacatggtggcggatgatatggaaaaccgccattcgtatgatgcaccgatggcgctggatagcgatattcgccagcgtttagaactgcttatttcgcgtttcccactctatccggagcaataa

SEQ ID NO: 1297 - DNA, 561 bp, Escherichia coli
atgccatctcgttggattttcgctctgatcatcgcactcttagcgccaggcgcggcggcgcacaatttcgtcactggcaaaacggttacccctgtttatatccaggaaggcggcgagctgcttctgaatagcgacgacgaaattcactaccaaaagtggaacagcacacaattggcgggaaaagtccgcattattcagtatatcgccgggcgtaagtcggcgaagaaaaagaactcactgttaattaaagcggttgaagcggcaaactttccgcaggatcgttttcagcccaccaccattgtgaacaccgatgatgccatctttggtactggctattttgtcgttggcaaaatcgaaaaaaataaacgccgctatccgtgggcgcaattcgttattgacggcaatggactgggacgcgttgcctggcggttgccggagcagagttcaaccattctggtgctgaataaaaccgggcaaattcagtgggcaaaggacggcagcctgacgccggaagaggtagatcatgtcattgcgctggcgcagaaactgatcaatgaataa

SEQ ID NO: 1298 - DNA, 1071 bp, Escherichia coli
atgaagctggttgaacactacatcatgcgtggtacgcgccgtctggtgctgattatcgtcggttttctgatctttattttcgccagctactccgcacagcgttatctgaccgaagcggcaaatgggacattagctcttgatgttgtgctggatatcgttttctacaaagtgctgattgcactggagatgctgttacctgttggactatatgcttcagttggcgtgacgctagggcaaatgtataccgactcggaaattaccgctatctccgcggcggggggcagtccgggacgtttgtacaaagccgttctttatctggcgataccgttaagtatttttgtcacccttctgtcgatgtatggtcgtccctgggcttatgcgcagatttatcaactggagcaacaatcgcagtcggagctggatgttcgtcagttgcgggcaaagaaatttaacactaacgataacggacgaatgatcctttcgcagacggttgatcaggataataatcgcctgactgacgcgctgatttatacttctactgccaatcgaacccgcattttccgcgcccgttcggttgatgtggttgacccatcacccgagaaaccgaccgttatgttgcataacggtaccgcctatcttctcgatcatcagggtcgtgacgacaacgaacagatctaccgtaatctgcaattgcatctgaatccgctggatcaaagccctaacgtcaaacgcaaagcaaaatcggtcacagagctggcgcgctccgtctttccagccgatcatgccgaactgcaatggcgacaaagccgtggcctgacagcattgttgatggcgctgctggccatttcattaagtcgggtaaaaccgcggcaggggcgattttcaacgctactgccactgacgttgctgtttgttgccattttttatggcggcgacgtctgccgtacgctggtggctaacggcgcgattcccctcattcctggtttgtggttagtacccggactcatgctaatgggcctgctgatgctggtcgcacgcgacttctctttgctgcagaaattttcccgatga

SEQ ID NO: 1299 - DNA, 1080 bp, Escherichia coli
atgaatgttttcagtcgctatttaatccgtcacctctttctcggttttgccgccgccgcagggctattactgccgctttttaccaccttcaacctgattaacgaactggatgatgtcagcccgggcggttatcgctggacccaggcggcgctggtggtgctgatgaccttaccgcgcacactggtcgaactttcgccgtttatcgccttattgggaggtattgtcggtctcgggcagctatcgaaaaacagtgagcttaccgccattcgcagcacggggttttctatcttccgtattgcactggtggcgctggttgccgggatactgtggactgtttcgttaggcgcgatagatgagtggggggcgtcgccattgcagcaacaggcgctgcaaatcaaatcgaccgccaccgcgttgggggaggacgatgacattaccggcaatatgctttgggccaggcgcggtaatgaatttgtgacggtgaaatcgctgaacgagcagggccagccggtgggcgtggagatttttcattaccgcgatgatctctcgctcgaatcctacatttatgcgcgcagtgccaccattgaagatgacaaaacgtggatcctgcatggtgtgaatcataaaaaatggctgaatggcaaagaaacgctggaaacatctgataatcttgcctggcaatcgaccttcaccagtatgaatcttgaagagttatcgatgccggggaatactttttctgtccgtcagcttaatcattacatccattatttgcaggaaaccgggcaacccagcagcgaataccgccttgcactgtgggaaaaactggggcaacccatcttgactctggcgatgattttgctggctgtgccgtttacctttagtgccccgcgctcgccagggatgggtagccgtctcgctgtaggcgtcatcgttggtttactcacctggatcagctatcaaatcatggtcaatctgggattgttatttgcgttgagcgcacctgttaccgcgctcggtttaccggtagcgtttgtgctggtggcgttgagcctggtgtattggcatgacagacaacattaa

SEQ ID NO: 1300 - DNA, 1173 bp, Escherichia coli
atggggctatacgataaatatgcgcgccttgctggcgagcgcctgcaatttagtgacaacgggttaacaccatttggcacctgtattgatgaagtgtattccgccaccgaaggccggatcggcaataaaaaagtgattctggccgggaccaataattatctcggtttaacctttaatcatgatgctatccgcgaaggtcaggcagcgttagcggcccaaggcaccggcaccaccggttctcgtatggcaaacggcagttatgcgccgcatctggcgttagagaaagagattgccgagtttttcaatcgccctaccgctatcgttttttcaaccggttataccgctaatttaggcgtcatcagcacacttgccgaccataacgccgtggtgttactggatgccgacagccacgccagtatttatgacgcctgttctctcggcggcgcggagattattcgtttccgccataatgacgtcaacgatctggaacggcgcatggtccgcctcggtgaacgggcgaaagaggcgattattatcgttgaaggcatctacagtatgctcggtgacgttgcgccgctggcagaaattgttgatatcaaacgtcgtctcggtggttatttgattgtcgatgaagcacattcgtttggcgtgttaggcgctacggggcgcggactggttgaagccgttggcgttgaagacgacgtggatattatcgtcggcaccttcagtaaaagtttggcttccattggtggttttgccgtgggttcagaagcgatggaagtgctgcgctacggcagccgcccgtatatttttaccgcctctccttctccgtcctgcattgcgaccgtgcgctcgtcgttaagaaccattgcctcacaaccagagctgcggcaaaagctgatggataacgccaaccatctgtatggcggtctgcaaaaactgggttacgagttaagttcacatattagcccggtagtgccagtaataatcggttcgaaagaggaaggtttacgcatctggcgcgagcttatttcgctgggcgtttatgtgaatcttatcctgccacctgccgcgcctgctggcatcacgctgctgcgctgtagcgtaaacgctgcccacagtcgtgagcaaatcgatgccatcattcaggcatttgctactctgaagcagtaa

SEQ ID NO: 1301 - DNA, 249 bp, Escherichia coli
atggtaaatcgtgaaatagtaatggattacatcctttcctgtttacaggatttggtcgaaaacggtgtggaaattaagcccgacagcgatctcgtcaacgatcttggcctggagtcgatcaaagtgatggatctcttaatgatgctggaagacagattcgatatttccattcctattaatattctgctggatgtcaaaacccctgcgcaattaatggaaactctacttccatggctggagaataactaa

SEQ ID NO: 1302 - DNA, 915 bp, Escherichia coli
atgaatcaaactgtcgcggtgacgggcgctaccgggtttatcggtaaatatattattgataacctgctcgcccgcggctttcacgttcgcgcattgacgcgtactgcccgcgctcacgtcaatgataatctcacttgggtgcgcggttcgctggaagatacacattcgcttagcgaactggttgccggagccagcgcggtggtccattgcgccgggcaagtgcgcgggcacaaagaagagatttttacccgctgcaacgttgacggcagcctgcgcctgatgcaagcggcaaaagagagcggcttttgccaacgttttctgtttatctcttcgctggcggcgcgccatcccgaactctcctggtacgcaaattccaaacacgtcgccgaacaacggctgactgcaatggctgacgaaattacgttgggcgtttttcgcccgacagccgtgtatggtcccggcgataaagagttaaaaccgctgtttgactggatgctgcgcggtctgctgccacgacttggcacgccagagacacagctctcttttcttcacgtcaccgattttgcgcaagcagtgggtcagtggttaagcgccgaaactgtacagacgcaaacctatgaattatgcgatggcgtcgccggaggctatgactggcaacgtgtccaacagcttgttgccgatgtccgctgtggttccgtgcggatggtcggtattcctcagccgctactcacctgccttgcggatatcagtaccgcgttgagccgtctggcgggtaaagaaccgatgctgactcgttcgaaaatccgtgaattaacccatgccgactggtcggcaagtaataaccgtatttctgaagatattaattggtttcccgagattagcctggaacacgcattacgcaacgggctattttga

SEQ ID NO: 1303 - DNA, 1692 bp, Escherichia coli
atgcgctatgccgattttccaacgctggttgatgctttggactacgccgctctgagtagcgccggaatgaatttttatgacagacgttgccaacttgaagatcaactggaatatcagacgttaaaagcgcgtgccgaagctggtgcgaaaaggttgttatcgctgaacctgaaaaaaggcgatcgcgtggcgctgattgccgaaacgagtagcgggtttgtagaggctttttttgcctgccagtatgccggcttagtcgccgtcccgttggcgattccaatgggcgtaggtcagcgggattcctggagcgccaaactgcagggtttactggcaagttgccagcccgcagccattatcactggtgatgagtggttgccactggtcaatgccgcgacgcataacaacaaccccgaattacatgttttaagccacgcctggtttaaggcattaccggaagccgatgttgtgctccagcgtccagttccaaacgatatcgcctacctccagtacacctccggcagcacccgttttccccgtggcgtcattatcacccatcgcgaagtgatggctaatctacgtgctataagccacgatggcataaaattacaccctggcgaccgctgcgtctcctggctgcctttctaccatgatatgggactggtcggctttctcctgacccccgtcgccacgcagctttcagtagattatttgcgcactcaggattttgccatgcgtcctctgcaatggcttaaattgatcagtaaaaatcgcggcaccgtttccgttgcgccgccgtttggctatgaattgtgccagcgccgcgtgaatgaaaaagatctcgctgaactggatctttcctgctggcgcgtcgctggtattggcgcagaacccatatccgcagaacaactccatcaattcgctgaatgtttccgtcaggttaactttgacgataaaactttcatgccgtgctacggactggcagaaaatgcgctggctgtcagcttctctgatgaagcctgcggggttgtggttaacgaagtggatcgcgacatcctcgaataccagggtaaagccgtcgcgccgggtgctgaaacacgcgccgtatcgactttcgtcaactgcggtaaagcgttgccggaacatggcattgaaatccgcaatgaagcagatatacctgtcgcggaacgtgtgataggccatatttgcatctccggccccagcctgatgagcgggtactttggcgaccaggtttcgcaagacgagattgccgcgacgggctggttagacaccggagaccttggttatctgctggacggttatctgtatgtcaccggacgcattaaagatctgattattattcgtggccgtaatatctggccgcaggatattgaatacattgcggaacaggagccggaaattcattctggcgatgcgattgcttttgttaccgcccaggaaaaaatcattttgcagatccagtgtcggatcagcgacgaagcacgtcgcgggcagcttatccacgcgctggcagctcggatccaaagcgaatttggcgttaccgcggatatcgatctgttgccgccccacagtattccccgaacatcctccggcaagcctgcccgtgcggaagcgaaaaaacgttatcagaaggcttatgctgccagtcttcatgtgcaggaatccctggcatga

SEQ ID NO: 1304 - DNA, 1143 bp, Escherichia coli
atggaatgcgatctgctgatgattaaaattgaaaaagtaattaataaaaaagaccttaaggcatttatcgcttttccgtcatcactttatcccgatgatccaaactggataccccctttattcattgaacgtagcgagcatttgtctacgaagaatccggggacggaccatatcatctggcaggcgtgggtggcaaaaaaagcggggcagatagttgggcgtattaccgcgcaaatagataccttgcaccgtgagcgttacggtgaagataccggtcatttcggcatgattgactccattgatgatccgcaggtttttgccgcgttgtttggcgcagcggaggcgtggttgaagtcacaaggtgcaagtaagatcagcgggcctttcagcctgaatatcaatcaggaaagcggattactgattgaaggttttgacacacctccctgtgcgatgatgccacacggcaaaccgtggtatgccgcgcatattgaacaactgggttatcacaaaggcattgatttactggcgtggtggatgcagcgaaccgatctcactttctctccggcgctaaaaaaactgatggatcaggtgcgcaaaaaagtgaccattcgctgcatcaatcgccagcggtttgccgaagagatgcagatcctgcgtgagattttcaattctggctggcagcacaactggggatttgtgccgtttaccgaacatgaattcgcgaccatgggcgatcaacttaaatatctggtgccggacgatatgatctacatcgctgagattgattctgcaccctgcgcgtttattgttggcttgccgaacatcaacgaggcgattaccgatctgaacggatcgctctttcccttcggctgggcaaaattgctgtggcgtttgaaagtcagcggtgtgcgaactgcgcgagtgccgctgatgggcgtgcgggacgagtatcagttcagccgcatcggcccggtgattgcgctgttattgattgaagccttacgcgatccgtttgcccgccggaagatcgatgcgctggaaatgtcatggatcctcgaaaccaatacaggcatgaataacatgctggaacgcattggggcggagccgtacaagcgttaccgattgtatgaaaagcagatttga

SEQ ID NO: 1305 - DNA, 765 bp, Escherichia coli
atgaaagatgaacgtcgccctatttgcgaagtggttgcagaaagtatcgaacggttaattatcgacggcgtactgaaggtcggtcagccgcttccctcggaacgtcgactgtgtgaaaagctcggcttctcacgctccgcactgcgtgaagggctgaccgtgctgcgcgggcgcgggattattgaaacggcgcagggtcgcgattctcgtgtcgcacggcttaatcgggtgcaggacgccagcccgctgatccatctgttcagtacgcagccgcgaacgctgtacgatctgctcgacgttcgcgcattactggagggcgaatcggcaaggctggcggcaacgctgggaacccaggctgattttgttgtgataacccgctgttatgaaaaaatgctcgccgccagtgagaacaacaaagagatttcgctgatcgaacatgcgcagttggatcacgctttccatctcgccatttgtcaggcttctcacaatcaggtgctggtgtttacgctgcaatcattgaccgacctgatgtttaattcggtgtttgccagcgtaaataatctctaccatcgaccacagcaaaaaaagcagatcgatcgccagcatgcgcggatctacaacgcggtgttgcagcggctgccgcacgttgcccagcgcgcagcacgcgatcatgtgcggaccgtgaaaaagaatctccacgatatcgagctggaaggccaccatttgattcgctcggcggtgccgctggagatgaagcaggggtga

SEQ ID NO: 1306 - DNA, 1500 bp, Escherichia coli
atgagcatcttgtacgaagagcgtcttgatggcgctttacccgaagtcgaccgcacatcggtactgatggcactgcgtgagcatgtccctggactggagatcctgcataccgatgaggagatcattccttacgagtgtgacgggttgagcgcgtatcgcacgcgtccattactggttgttctgcctaagcagatggaacaggtgacggcgattctggctgtctgccaccgcctgcgtgtgccggtggtgacccgtggcgcaggcaccgggctttctggtggcgcgctgccgctggaaaaaggtgtgttgttggtgatggcgcgctttaaagagatcctcgacattaaccccatcggtcgccgcgcgcgcgtgcagccgggcgtgcgtaacctggcgatctcccaggccgttgcgccgcataatctctattacgcgccggatccgtcctcacaaatcgcctgttcgattggcggcaatgtggcggaaaatgccggtggcgttcactgcctgaaatatggtctaaccgtacataacctgctgaaaattgaagtgcaaatgctggatggcgaggcgctgacgctgggatcggacgcgctggattcgcctggttttgacctgctggcgctgtttaccggatcggaaggtatgctcggcgtgaccaccgaagtaacggtgaagctgttgccgaagccgcccgtggcgcgggttctgttagccagctttgactcggtagaaaaagccggacttgcggttggtgacatcatcgccaatggcattatccccggcgggctggagatgatggataacctgtcgattcgcgcggcggaagattttattcatgccggttatcccgtcgatgccgaagcgattttgttatgcgaactggacggcgtggagtctgacgtacaggaagactgcgagcgggttaacgacatcttgttgaacgcgggtgcgactgacgtccgtctggcacaggacgaagcagagcgcgtacgtttctgggccggtcgcaaaaatgcgttcccggcggtaggacgtatctccccggattactactgcatggatggcaccatcccgcgccgcgccctgcctggcgtactggaaggcattgcccgtttatcgcagcaatatgatttacgcgttgccaacgtctttcatgccggagacggcaacatgcacccgttaatccttttcgatgccaacgaacccggtgaatttgcccgcgcggaagaactgggcgggaagatcctcgaactctgcgttgaagttggcggcagcatcagtggggaacatggcattgggcgcgaaaaaatcaatcaaatgtgcgcccagttcaacagcgatgaaatcacgaccttccatgcggtcaaggcggcgtttgatcccgatggtttgctgaaccctgggaaaaacattcccacgctacaccgctgtgctgaatttggtgccatgcatgtgcatcacggtcatttacctttccctgaactggagcgtttctga

SEQ ID NO: 1307 - DNA, 1053 bp, Escherichia coli
atgctacgcgagtgtgattacagccaggcgctgctggagcaggtgaatcaggcgattagcgataaaacgccgctggtgattcagggcagcaatagcaaagcctttttaggtcgccctgtcaccgggcaaacgctggatgtgcgttgtcatcgcggcattgttaattacgacccgaccgagctggtgataaccgcgcgtgccggaacgccgctggtggcgattgaagcagcgctggagagcgccgggcaaatgctcccctgcgagccgccgcattatggtgaagaagccacctggggcgggatggtcgcttgcggcctggcggggccgcgtcgcccgtggagtggttcggtccgcgattttgtcctcggcacgcgcatcattaccggcactggaaaacatctgcgttttggtggcgaagtgatgaaaaacgttgccggatacgatctctcacggttaatggccggaagctacggttgccttggcgtgctcactgaaatctcgatgaaagtgttaccgcgaccgcgcgcctccctgagcctgcgtcgggaaattagcctgcaagaagccatgaatgaaatcgcccagtggcaactccagccattacccgttagtggcttatgttacttcgacaatgcgttgtggatccgccttgagggcggcgaaggatcggtaaaagcagcgcgtgaactgctgggtggcgaagaggttgcaggtcagttctggcagcaattgcgtgaacaacaactgccgttcttctcgttaccaggtaccttatggcgcatttcattacccagcgatgcgccgatgatggatttacccggcgagcaactgatcgactggggcggggcgttacgctggctgaaatcgacagccgatgacaatcaaatccatcgcatcgcccgcaacgctggcggtcatgcgacccgctttagtgccggagatggtggctttgccccgctaccggctcctttattccgctatcaccagcagcttaaacagccgctcgacccttgcggcgtgtttaaccccggtcgcatgtacgcggaactttga

SEQ ID NO: 1308 - DNA, 1224 bp, Escherichia coli
atgcaaacccgattaacagaagagatgcggcagaacgcgcgcgcgctggaagccgacagcatcctgcgcgcctgtgttcactgcggattttgtaccgcaacctgcccaacctatcagcttctgggcgatgaactggacgggccgcgcgggcgcatctatctgattaaacaggtgctggaaggtaacgaagtcacgcttaaaacacaggaacatctcgatcgctgtctcacttgccgcaattgtgaaaccacctgtccttctggtgtgcgttatcacaatttgctggatatcgggcgtgatattgtcgagcagaaagtgaaacgcccactgccggagcgaatgctgcgcgaaggattgcgccaggtagtgccgcgtccggcggtcttccgtgcgctgacgcaggtagggctggtgctgcgaccgtttttaccggaacaggtcagagcaaaactgcctgctgaaaccgtgaaagctaaaccgcgtccaccactgcgccataagcgtcgggttttaatgctggaaggctgcgcccagcctacgctttcgcccaacaccaacgcggcaactgcgcgagtgctggatcgtctggggatcagcgtcatgccagctaacgaagcaggctgttgtggcgcggtggactatcatcttaatgcgcaagagaaagggttagcgcgggcgcgcaataatattgatgcctggtggcccgcgattgaagcaggtgccgaggcaattttgcaaaccgccagcggttgtggcgcgtttgtcaaagagtatgggcagatgctgaaaaacgatgcgttgtatgccgataaagcgcgtctggtcagtgaactggcggtcgatttagtcgaacttctgcgcgaggaaccgctggaaaaactggcaattcgcggcgataaaaaactggccttccactgcccgtgtaccctgcaacatgcgcaaaagttaaatggcgaagtggaaaaagtgttactgcgcctgggatttaccttaacggacgttcccgacagccatctgtgctgcggttcagcgggaacatatgcgttaacgcatcccgatctggcacgccagctgcgggataacaaaatgaatgcgctggaaagcggcaaaccggaaatgatcgtcaccgccaacattggttgccagacgcatctggcgagcgccggtcgtacctctgtgcgtcactggattgaaattgtagagcaagcccttgaaaaggaataa

SEQ ID NO: 1309 - DNA, 405 bp, Escherichia coli
atgaaaactaaagtcattcttagccagcaaatggcgagtgcaattattgccgcaggtcaggaagaggcgcagaaaaataactggtctgtttccattgctgttgccgatgacggcggtcatctgctggcgttaagtcgcatggacgattgcgcgccgattgcggcttacatctcccaggagaaagcgcgtaccgccgcgctggggcgtcgtgaaactaagggctatgaagagatggtgaacaacggacgtaccgcgttcgtgactgcgccgttactgacgtcgctggaaggtggcgtaccggttgttgtggatgggcaaattattggtgccgtgggcgtttctggtttaaccggagcacaggatgcgcaggtcgcgaaagcggcagcagcggtgttggcgaaataa

SEQ ID NO: 1310 - DNA, 2172 bp, Escherichia coli
atgagtcaaaccataacccagggccgtttacgcattgacgccaattttaaacgttttgtggatgaagaagttttgcctggcgtggaactggatgctgccgcgttctggcacaatgttgatgagatcgttcacgatctggcgccagagaatcgtcagttgctggcagagcgcgatcgcattcaggcggcgcttgatgagtggcatcgcagcaatccggggccggtaaaagataaagcagcctataaatctttcctgcgtgaactgggctacctggtgccacagcctgaccacgttacggtggaaaccacgggcatcgacagcgaaatcaccagtcaggcggggccacagctggtggttccggcgatgaacgcccgctacgcgctgaacgcggcgaacgctcgctggggctcactgtacgatgcgttatacggcagcgacatcatcccgcaggaaggggcgatggtcagcggctacgatccgcagcgtggtgagcaggttatcgcctgggttcggcgtttcctcgatgaatcactaccgctggaaaacggcagctatcaggatgtggtggcgtttaaggtggtcgataaacaattacgcatccagttgaaaaatggtaaagaaaccacgttacgtactccagcacagtttgtcggttaccgtggcgatactactgcgctgacctgcattttgctgaaaaataacggcctgcatattgagctacaaatcgatgccaacgggcggattggcaaagacgatccggcgcacatcaacgatgttatcgtcgaagcggccatcagtaccattctcgactgcgaagattcggtcgcggcggttgatgcggaagataaaatcctgctgtatcgcaacctgcagggcctgatgcaggggactctgcaagagaaaatggagaagaacggtcggcaaatcgtgcgtaaactgaatgacgatcgtcagtacactgccgccgatggatctgaaatttctctgcacggacgctcgttgctgtttatccgcaacgtgggtcatttgatgaccattcctgtgatttgggacagcgaaggcaatgaaatcccggaaggcattcttgatggcgtcatgactggcgcgattgccctctatgatttaaaagtgcagaaaaactcgcgcactggcagcgtctatattgtgaaaccgaaaatgcacggtccgcaggaagtggcgttcgccaacaaactgttttcccgcgttgagacaatgctcggtatggcaccgaataccctgaaaatgggcattatggatgaagaacgccggacctcgctgaacttgcgtagctgtatcgctcaggcgcgcaaccgcgtggcgttcatcaataccggtttcctcgaccgtaccggcgatgaaatgcattcggtgatggaagcgggcccgatgcagcgtaaaaaccagatgaaatcgacgccgtggatcaaagcctacgaacgtaataacgtgctttccggtctgttctgtgggctacgtggaaaagcgcaaatcggtaaaggcatgtgggcaatgccggacctgatggcagacatgtacagccagaagggcgaccaattgcgtgccggggcaaacacggcctgggttccgtcgccaactgccgctacgctccatgcgctgcactaccaccaaaccaacgtacagagcgtgcaagccaacattgcccagaccgagttcaatgctgaatttgaacctctgctggacgatctgctgactattccggttgctgaaaacgctaactggtcggcgcaagagatccaacaagagctggataacaacgtgcaggggattctggggtacgtggtgcgttgggtggagcaggggattggttgttcaaaagtgccggatattcacaacgtggcgttgatggaagaccgcgcaacgctgcgtatttccagccagcatatcgccaactggttacgtcacggtattctgaccaaagatcaggtgcaggcgtcgctggagaatatggcgaaagtggttgatcagcaaaacgctggcgatccggcttatcgtccgatggcggggaatttcgctaactcgtgtgcttttaaagctgcctgcgatttgatcttcctcggcgtgaaacagccaaacggctataccgaaccgttattacacgcctggcgtttacgcgaaaaagaaagtcattaa

SEQ ID NO: 1311 - DNA, 1683 bp, Escherichia coli
atggttacctggacccaaatgtatatgccgatgggaggactggggctatctgctctggtcgccctgatcccgataatattcttcttcgttgcactcgcggtattacgtctgaaaggacatgtcgccggagcaataacccttatattatctattctgattgcgatattcgcctttaaaatgccgattgatatggcatttgctgctgcgggctatggctttatttatggtttatggcctattgcgtggattattgtcgcggcggtattcctgtataaattaaccgttgccagcggccagtttgatattatccgcagctcggttatctccatcaccgacgatcagcgtttgcaggtgttactgattggtttctcctttggtgcgctgctggaaggggcggctggctttggcgcaccggtggcgattaccggtgcgctgctggtgggcctgggcttcaaaccgctatacgcggcggggctgtgtctgattgccaacactgcgccggtggcgtttggtgcgttgggtgtgccaattctggtcgccggtcaggtaacgggaatcgatccgttcgacattggcgcaatggcgggacgtcagttaccgttcctgtcggttcttgtgccgttctggctggtagcaatgatggacggctggaaaggggtgaaagagacgtggccagcggcgctggttgcagggggaagcttcgctgtcactcagttctttacctctaactatattggtccggaactgccggatattacttcggcgctggtgagtatcgtctcactttctttatttcttaaagtctggcggccaaaaaataccgaaacggcaatcagtatgggacaatccgcaggtgcgatggtggtgaataaaccgtcttctggcggtcccgtgccttcagaatatcgtctggggcaaatcattcgtgcgtggtcaccgtttttaatcttaacggtgttggtcaccatctggaccatgaagccgtttaaagcgttatttgctccgggcggcgcgttttattcactggtgattaatttccagatccctcatttgcatcaacaagtcttgaaagcggcccccattgtcgcccagccgacgccaatggacgcggtgtttaaattcgaccccctctccgctggcggcaccgctatttttattgcggcgattatctcgatcttcatcctcggcgtggggatcaagaaaggtattggtgtctttgccgaaacgctaattagtctgaagtggccgatactgtcgattggcatggtgctggcatttgccttcgtgaccaactattccggcatgtccaccacgttggcgctggtactggctggtacaggcgtgatgttcccgttcttctcaccgttcctcggctggctgggcgtattccttaccggctctgacacttcttcaaacgccctgtttggttcactgcaatcgaccacggcgcagcaaatcaacgtctctgacaccctgctggtggcagcaaacaccagcggcggagtaactggcaagatgatctccccgcaatctatcgccgtggcctgcgccgcgacgggcatggtgggtcgagaatctgaactgttccgctacaccgtgaagcacagtctgatttttgccagcgttatcggcattatcacactgttgcaggcgtatgtgtttaccgggatgttagtttcgtaa

SEQ ID NO: 1312 - DNA, 4563 bp, Escherichia coli
atgaataagaaatttaaatataagaaatcgcttttagcggctattttaagcgcaaccctgttagccggttgtgatggtggtggttcaggatcgtcctccgatacgccgtctgtagattctggatcagggactttgccggaagtgaaacccgatccaacaccaaccccggagccgacacctgagccgacgccggacccagaacctacgccggatccaacacctgatcctgagccgacaccagaaccggagccagaacctgttcctacgaaaacgggttatctgaccctgggcggaagccagcgggtaactggtgctacctgtaatggtgaatccagcgatggctttacctttacgccaggcaataccgtgagttgtgtggtgggcagtacgaccattgcaacattcaacacccagtcagaagctgcgcgtagcctgcgtgcggttgacaaagtgtcgtttagcctggaggacgcgcaggagctggcgaattctgaaaataagaaaaccaacgccatctctctggtgacgtccagcgacagttgccccgcagatgcagaacagctttgtcttactttctcgtcagtggttgatcgcgcgcgatttgaaaaactgtataagcaaattgatctggcaacagacaatttcagcaagctggtcaatgaagaggtggaaaacaatgctgcgactgataaagcgccgtccacccatacctcaacggtagtgccagtcacgactgagggaacaaaaccggatctgaacgcgtccttcgtgtcggctaacgcggaacagttttatcagtatcaacccactgaaatcattctttccgaaggccaactggtggatagcctggggaacggtgttgctggcgttgactactacaccaattcaggccgtggcgtaactgacgaaaacggtaaattctcctttagctggggcgaaaccatctcctttggtatcgatacctttgaactgggctcagtacgtggcaataagtcgaccattgcgctgactgaattgggtgatgaagttcgcggggcaaatatcgatcagctcattcatcgttattcgacgactggtcaaaataatacccgtgttgttccggacgatgtacgcaaggtctttgccgaatatcccaacgtgatcaacgagataatcaatctttcgttatccaacggtgcgacgctggatgaaggcgatcaaaacgttgtgctgcctaacgaatttatcgagcagtttaagacgggtcaggccaaagagatcgataccgcgatttgtgcgaaaaccgacggttgtaacgaggctcgctggttctcgctgacaacgcgcaatgttaatgacggccagattcagggcgttattaacaagctgtggggcgtggatacgaactatcagtctgtcagcaagttccacgtcttccatgactctaccaacttctatggcagcaccggtaacgcgcgcggtcaggcggtggtaaatatctccaactcggcattcccgattctgatggcgcgtaatgataaaaactactggctggcgtttggcgaaaaacgcgcctgggataaaaatgagctggcgtacattacggaagcgccttccattgtgcagccagagaacgttacgcgcgatactgcgactttcaacctgccgtttatttcgctggggcaagtcggtgaaggcaaactgatggttatcggtaacccgcactacaacagcatcctgcgttgcccgaacggttacagttggggcggtggtgttaatagtaaaggtgagtgtacgctcagcggtgattctgatgacatgaagcactttatgcagaacgtcctgcgctacttgtcaaatgacatctggcagccaaataccaagagcatcatgactgtcggcaccaacctggagaacgtttatttcaaaaaagcgggccaggtattgggaaatagtgcaccatttgctttccatgaggatttcactggtatcacggttaaacagttgaccagctatggcgatctgaatccggaagagattccgttgctgatcctcaacggctttgaatatgtgactcagtggtctggcgatccctatgctgtgcctctgcgtgcagataccagcaaaccgaagctgactcagcaggatgtgaccgatctgatcgcttatctgaacaaaggtggctcggtgctgatcatggaaaacgtgatgagcaatcttaaggaagagagcgcgtccagttttgtgcgtctgctggatgccgcgggtctgtcaatggctctgaacaaatcggtggtgaacaacgatccgcaagggtatccggatcgcgttcgtcagcgtcgcgcgactggcatttgggtttatgaacgttatcctgctgcagacggcgcgcaaccgccgtacaccatcgacccaaatacaggggaagtgacctggaaataccagcaagacaacaagcctgatgacaagccgaaactggaagttgcgagctggcaggaggaagttgagggcaaacaggtaacgcgttatgcctttattgatgaagcggaatacacaacagaagaatctctggaagcggcaaaggcaaaaatctttgagaagtttcctgggttacaggagtgtaaggactcgacttaccattacgagattaactgtttggagcgccgcccaggcacggatgttccggtaacaggtggcatgtatgttccgcgctatacgcaactgaatcttgacgccgacaccgcgaaagcgatggtgcaggcggcggatttaggcaccaacattcagcgcctgtatcagcatgagctttatttccgtaccaaaggcagtaaaggtgagcgtctgaacagtgttgatctggaacgtctgtaccagaacatgtcggtctggctgtggaacgatacgaaatatcgttacgaagagggcaaggaagatgagctgggctttaaaacgttcaccgagttcctgaactgctacgccaatgatgcctatgcaggcggcaccaagtgctccgcagatctgaaaaaatcgctggtcgataacaacatgatctacggtgacggtagcagcaaagcgggcatgatgaacccaagctatccgctcaactatatggaaaaaccgctgacgcgtctgatgctgggccgttcctggtgggatctgaacattaaggttgatgtggagaagtacccaggagccgtatcggcaaagggtgagagcgttacggaaaacatcagcctgtactcgaatccgaccaaatggtttgcgggtaacatgcagtcaaccggcctgtgggcaccggccctgcaggacgttaccattaagtcttcggcgtcagtcccagtgactgttaccgtggcgctggctgacgacctgactggacgtgagaagcatgaagttgcgctgaaccgtccgccaagagtgactaaaacgtatactctggaggctaacggtgaagtgaccttcaaggtgccttatggtggtctgatttatatcaagggcgacagtaaggatgatgtttctgctaacttcacctttaccggtgtagtaaaagcgccgttctataaagacggcgaatggaaaaacgatctggactcaccggcgccgctgggcgagctggagtctgcgtcgttcgtctataccacgccgaagaagaaccttgaggccagcaatttcactggtggtgtagcagaattcgctaaagatctggatacctttgccagctcgatgaatgacttctacggtcgcaatgaaacgagcggtaaccaccggatgtttacctatgaagcattgacggggcataaacaccgtttcgccaacgatgtgcagatctccatcggtgatgcgcactcgggttatccggtaatgaacagcagcttctcgacgaacagcaccacgctgccgacaacgccgctgaacgactggctgatttggcacgaagtcggtcataacgctgcagaaacaccgctgaacgtaccgggtgcaactgaagtggcgaacaacgtgctggcgctgtacatgcaggatcgctatctcggcaagatgaaccgtgtcgctgacgacattaccgtcgcgccggaatatctggacgagagcaacggtcaggcctgggcgcgcggcggtgcgggggaccgtctgctgatgtacgcacagctgaaagagtgggcagagaaaaactttgatatcacgaagtggtatccagatggcaagctgccagcgttctacagcgagcgtgaagggatgaaaggctggaacctgttccagttgatgcatcgtaaagcacgcggcgatgatgttggtaacagcacctttggtggcaagaattactgtgctgaatccaatggtaacgctgccgacacgctgatgctgtgtgcctcctgggtcgctcagacggatctttcggagttctttaagaaatggaatccgggtgcgaatgcttaccagctaccgggagcggcagagatgagcttcgagggcggtgtgagctcttcggcttacagcacgctcgcgtcgcttaatctgccgaaaccggaaaaagggccggaaaccattaacaaggttaccgagcataagatgtctgccgagtaa

SEQ ID NO: 1313 - DNA, 810 bp, Escherichia coli
atgctttttgatgtttttcagcaataccccgcggcgatgcccatactggcaaccgcaggaggattgatcatcggcagttttttgaatgtggtgatttggcgttaccccatcatgctgcgccaacaaatggcggagtttcatggtgaaacgccgagtacgcagtcaaaaataagccttgcgctaccgcgttcgcactgtccgcattgccagcagactatccgcgttcgtgacaatattccgctgctctcatggttgatgctcaaagggcgctgccgcgactgtcaggcgaaaatcagcaagcgttatccgctggttgagttattgacagcacttgcttttttgctggcgagtctggtgtggccagaaagtggatggggactggcggtgatgatattatccgcgtggctgattgccgcgagcatcatcgacctcgacaaccaatggctgcccgatgtttttactcagggcgtattgtggacaggactgattgcggcatgggcgcagcagagtccgttaacgctacaagacgcagtcaccggcgttctggtggggtttattacgttttactccctgcgctggatagccggaatagttctgcgtaaagaagcattaggcatgggcgatgtattactcttcgctgcgttaggtggctgggtggggccgttgtcgttacccaatgtggctttaatcgcatcatgctgcggcctgatatatgccgttattacaaaaagaggatcaaccacactgccttttggaccgtgtttaagtctgggcggtatagcaacactttatctacaggcattgttttaa

SEQ ID NO: 1314 - DNA, 411 bp, Escherichia coli
atgtcgataaaacagatgccagggagggtattaatatcgctattgttgagcgttacaggattattaagtggctgcgccagccataatgaaaacgccagtttactggcgaaaaaacaggcgcaaaatatcagccaaaacctgccgattaaatctgcgggatataccttagtgctggcgcaaagtagtggcacgacggtaaaaatgaccattatcagcgaatcgggtactcagaccacgcagacacctgacgcctttttaaccagctatcaacgacaaatgtgcgctgacccaacggtgaaattaatgatcaccgagggaattaattacagcataacgattaatgatacacgtacaggtaaccagtatcagcggaaactggatcgtaccacctgtggaatagtcaaagcataa

SEQ ID NO: 1315 - DNA, 843 bp, Escherichia coli
atggtgcgcgggatgttctggctgatgctgcttattatttctgcaaaaatggcgtattcactctggcgctatttctccttttctgcggaatatacggcggtttcctcatcggcgaataaaccgctccgtgcggatgcaaaaccgttcgataaaaatgacgtgcaattagtcagccaacaaaactggtttggcaaatatcaacccgtcgccgcaccggtaaaacaacctgaatctgcgcctgtggcagaaacgcgtcttaatgtggtgctgcgcgggatcgcctttggtgccagacccggcgcggttattgaagaaggcggcaaacagcaggtctatttgcagggggaacggcttgactctcacaacgcagtgattgaggaaatcaaccgcgaccatgtgatgctgcgctatcaggggaaaatggaacgtctgagtctggcagaggaggaacgcccccctgtggcggtgaccagcaaaaaagccgccagtgacgaagcaaagcaagctgttgctgagcctgctgccagtgcgccagtggagatcccggctgccgtgcgtcaggcactggcgaaagatccgcagaaaatttttaactatatccagcttacgcctgtgcgtaaggaggggattgtcggttatgcagtgaaaccgggggcagatcgttctctgttcgatgccagcggttttaaggaaggcgatatcgccattgcgctaaatcagcaggatttcactgatccacgagcaatgattgctctgatgcggcagttaccttcaatggattccattcaacttacggttttacgcaagggtgcgcgctacgacatttccatcgcactgcgctaa

SEQ ID NO: 1316 - DNA, 2061 bp, Escherichia coli
gtgttttggcgtgatatgacgttgtctatctggcgtaagaagacaactggcctcaaaacaaaaaagcgtttactgccgctgatgctggcagcggcattgtgtagttcaccggtctgggcggaagaagccactttcaccgctaattttaaagataccgacctgaaatcgttcatcgaaaccgtcggcgctaaccttaataaaaccatcattatggggccgggcgttcaggggaaagtgagtattcgcactatgactccgctcaatgaacgccagtattaccagttattccttaacctgctggaagcacaggggtatgcggtcgtaccgatggaaaacgacgtgctgaaggtggtgaaatcaagcgccgcgaaagtcgagccgctgccgctggtcggtgaaggcagcgacaactacgcgggcgatgaaatggtcaccaaagtcgtgccggtacgcaatgtgtcggtacgcgagctggcaccgattctgcgccagatgattgacagcgcaggctcaggcaacgttgttaattacgatccctccaacgtgattatgcttaccggacgcgcctcagttgtggagcgcctgacggaagtgatccagcgcgtggatcacgcgggtaatcgcaccgaagaggtgatcccgctggataacgcctcagcctcggaaattgcccgcgtgctggaaagcctgaccaaaaacagcggcgagaaccagccagcaacgctgaaatctcaaattgtcgccgatgaacgcaccaacagcgtgattgtcagtggtgaccccgccacgcgagacaaaatgcgccgtctgatccgtcggctggattcagaaatggagcgcagcggcaacagccaggtgttctatctcaaatacagcaaagccgaagatctggtcgatgtgctgaagcaggtcagcggtacgctcacggcggctaaagaagaggcggaaggcacggttggtagcgggcgtgaggttgtctccatcgccgccagcaaacacagtaatgccctgattgttactgcgccgcaggacattatgcagtcgctgcaaagcgtgattgaacaactggatattcgccgtgctcaggtgcatgtcgaggcgttaatcgtggaagttgccgaaggcagcaatatcaacttcggcgtgcagtgggggtcaaaagatgccggattaatgcagtttgccaacggtacgcaaatccctattggtacgctgggggcagcgatttctgcagccaagccgcagaaaggttccacggtgatcagcgaaaacggtgctaccaccataaatccggatactaacggcgatctctccacgctcgctcagcttctttctggctttagcggtacggcggttggcgtggtgaaaggcgactggatggcgctggtacaggcggtcaaaaacgactccagctcgaacgtgctctccacgccgagtatcaccacgctggacaaccaggaagccttcttcatggtgggccaggacgttccggtattaaccggctctaccgttggctccaataacagcaatcctttcaatacggtagagaggaaaaaagtcggcatcatgctgaaagtcacgccgcagattaacgaaggtaacgcggtacagatggtgattgagcaggaagtctcgaaagtggaagggcagaccagcctcgatgtcgtgtttggcgagcgcaaactgaaaaccaccgtgctggctaacgatggtgagctgatcgtgcttggcggtctgatggacgaccaggcgggagaaagcgtggcgaaagtgccgctgctgggtgatatcccgttgattggtaacctgtttaaatcgacggcggataaaaaagaaaaacgtaacctgatggtgtttatccgcccgaccattttgcgtgacggtatggcggcagacggcgtgtcgcagcgcaaatataactacatgcgcgctgagcaaatctaccgcgatgagcaaggcttaagcctgatgccgcacaccgcgcagccgatattgccagcgcaaaatcaggccttaccgccggaagtacgcgcgttcctcaatgccgggagaacgcgttaa

SEQ ID NO: 1317 - DNA, 1494 bp, Escherichia coli
atggtgcctgtagcacaggaaaccaccgctaacaccgtgcgtctgccctacagtttcagccgtcggtttagcctggtggcatggtgcgaagcgtcgctggagatcctccatgttcatccgttgtcgctctctgttttgcaggagctacaacgggggctgaacgcgccctttacgctgcggcaaatcgacgaggccgaatttgaacagcggctgaatgcggtctggcagcgggactcttccgaagctcgccagctgatggaagatctcggttccgccgaggacttttttaccctcgctgaagaactgccggaaacggaagatctgctggaaagtgacgacgatgcgccgatcatcaaactgatcaacgccatgctggcagaggcaatcaaagaaggcgcttcggatatccacattgagacgtttgaaaagagtctggtgatccgttttcgtgttgacggcacattacatgaaatgttgcgccccggtcgtaaactggcctcgctactggtatcgcgtatcaaggtgatggcgcgactggatatcgccgaaaagcgcgtaccgcaggatggccgtattgcgctgctgctgggcggtcgggcgattgacgtccgtgtatcaaccatgccttccgcctggggggaacgggtggtgctgcgactgctggacaaaaaccaggctcgcctgacgctggagcgtctgggtttaagtctcgaactgactgcgcagttgcgccagctgttacacaaaccgcacggcatttttctggtgacggggccgaccggttccggcaaaagcaccacgctgtacgctggattgcaggagctgaacaaccactcgcgtaacattctcacggttgaagaccctatcgaatacatgattgaagggatcggtcagacgcaggttaacacccgcgtcggcatgacattcgcccgtggcctgcgcgcaattttgcgtcaggacccggatgtggtgatggtcggtgaaatccgcgataccgaaaccgcagaaatcgctgttcaggcttcactgaccggacacctggtactttccacgctgcataccaacacagcggtgggggcgatcacacgtttgcaggatatgggcgtggagcctttcctgctctcttccagtctgacgggcgtgatggcgcagcgactggtccgcacgctgtgctccgactgccgtcaggccgcgcctgccaccgacgaagaaaaacgtcttatggggatctccgatacgcatgccgtcacgctgtaccatccgcagggctgccctgcctgtaatcacaaaggttttcgcggacgtactgccatccatgaactgattgtggtggacgccacattgcgtgatttgatccaccgtcaggccggggaactggagctggaacgttatgtccggcaacactctgcgggtatccgcagtaacggcattgagaaagtgctcgccggagaaacctctctcgatgaagttctgcgggtaaccatggaggcgtaa

SEQ ID NO: 1318 - DNA, 1224 bp, Escherichia coli
atggcactgttttactatcaggcgctggagcgtaatggtcgcaaaaccaaaggcatgattgaggcggattccgcgcgtcatgcccgtcaattgttacgcggtaaagacctcattcccgtgcacattgaagcccggatgaatgcatcggcagggggattgttgcagcgtcggcggcacgcacatcgtcgcgtggcggcggcagatctggcgctgttcacgcgccaactggcaacgctggtgcaggcagcaatgccgctggaaacctgcttacaggcggtcagtgagcaaagcgaaaaactgcatgtaaaaagcctcggaatggcgctgcgcagccggattcaggaaggttataccctgtcggacagcctgcgcgaacatccccgcgtctttgactccctgttttgttcgatggtcgctgccggagaaaaatccgggcatctcgacgtggtgctcaatcgcctggcggattacaccgaacagcgacagcgcctgaaatcacgtctattgcaggccatgctctacccgctggtactgctggtggtggcaacgggcgtggtcactattttgctgacggcagtagtgccgaaaattatcgaacagtttgatcatctcggacacgcgctgcccgcctccacccgaatgctcatcgctatgagcgacgcgttacaggccagcggcgtgtactggctggcgggtttgctggggcttctggtgctggggcaacggctactcaaaaatcctgccatgcgcctgcgctgggataaaaccttgctgcgtttgcccgtgacggggcgtgttgcgcgcggactgaatacggcgcgtttttcccgcacgttaagcatcctcaccgccagcagtgttccgctgctggaaggcattcagaccgccgccgccgtgtcggcaaatcgttatgtcgagcaacaactgctgctggcggcagatcgcgtccgcgaaggaagcagcctgcgcgccgcgctggcggatcttcgcctgttcccgccgatgatgctgtacatgatcgcctccggcgaacagagcggcgagctggaaaccatgcttgaacaggccgcggtcaaccaggaacgggaatttgatacccaggtggggctggcgttagggctgtttgagccggcgctggtggtgatgatggcgggcgtggtgctgtttatcgtcatcgccatcctcgagccgatgctgcaactgaacaatatggttggaatgtaa

SEQ ID NO: 1319 - DNA, 456 bp, Escherichia coli
atgaattcgttatcccgcacacaaaaaccacgggcaggttttaccctgctggaagtgatggtggtgattgttattcttggcgtcctggcaagtctggtggtgcctaacctgttgggcaacaaagagaaagccgatcggcaaaaagccatcagcgatatcgtggcgctggagaatgcgctggatatgtaccgactggataacgggcgttatccgaccactgagcaggggcttgaggcgctgatccagcaaccggccaatatggcggacgcccgcaactaccgtaccggtggatacatcaaacgactgccaaaggatccgtggggcaatgattatcagtatctcagcccgggtgaaaaagggctgtttgatgtttataccctgggggcagatggtcaggaaaacggggagggcgctggcgcagatatcggtaactggaatttgcaggagtttcagtaa

SEQ ID NO: 1320 - DNA, 564 bp, Escherichia coli
gtgcctgaacgcggattcacacttctggaaatcatgctggtgattttccttatcggccttgccagtgcgggcgtggtacagacgtttgcgaccgcttcagagccgcctgcgaaaaaagcggcgcaggattttctgactcgctttgcgcagtttaaggacagggcagtgatcgaagggcaaacactcggtgtgctaatcgacccgccaggttaccagtttatgcagcgtcgtcacggacagtggttgcccgtttcctcgacccgcttatcggcacaggttacggtgccaaaacaggtgcagatgctgttacaacccggcagtgatatctggcagaaggagtatgcgctggagctgcagcgtcgtcgcctgacgctgcacgatattgaactggagctgcaaaaagaggcgaaaaagaagacaccgcagatccgtttttcgccttttgaacctgtcacgccgtttacactgcgtttttactcgtcggcacaaaacgcgtgttgggcggtaaagctggtgcacgatggcgcgttatccctcaatcaatgtgatgagaggatgccatga

SEQ ID NO: 1321 - DNA, 372 bp, Escherichia coli
atgaagcgcggatttaccttgctggaagtgatgctcgcgctggcgatttttgcgttggccgccacggcggtgttacagattgccagcggtgcgctgagtaatcagcaaatccttgaggagaaaacggtagcgggctgggtagctgaaaaccagaccgcgctgctttacctgatgacccgtgaacaacgagcggtcaggcaccagggcgagagtgatatggcaggaagtcgctggtactggcgaacgatccctctgaataccggtaacgtgctgctccaggcggtggatattgaagtcagtcttcatgacgacttttcgccagtgattcagtcacgacgcgtctggtttagcgccgtgggaggccaacagtga

SEQ ID NO: 1322 - DNA, 606 bp, Escherichia coli
gtgagaaggactcgcactggtttcacgttactggaaatgctggtggcgatagccatttttgcctcactggcactgatggcgcagcaggtgacaaacggcgttacacgcgtgaatagcgccgtcgccggacacgatcaaaaactaaacctcatgcagcaaacgatgagttttttgaaccacgatctgacacaaatgatgccgcgtccggtaagaggcgatcagggccagcgtgaaccagcgttactggcgggcgctggcgtgctggcgtctgagagtgaagggatgcgctttgtgcgtggcggcgtggttaatccgttgatgcgcctgccgcgcagtaatctgctcactgtcggttaccgcattcatgacggttaccttgaacggttagcctggccgctgaccgatgcggcaggcagcgtaaagccgacaacgcaaaaattaatcccggcggattcgctccgtttgcagttctacgacggcacgcgctggcaggagagctggtcgtcagtacaggcgatccccgtggcggtacgcatgaccctgcattcgccgcaatggggcgagattgaacgcatctggttgttacgcgggccgcaattatcatga

SEQ ID NO: 1323 - DNA, 978 bp, Escherichia coli
atgatcacctcaccatcaaaacgcggaatggcactggtcgtggtgctggtattgctggcggtcatgatgctggtgaccatcacgctttccgggcggatgcagcaacaacttgggcgaacgcgcagccagcaggaataccagcaggcgctgtggtacagcgccagtgcagaaagcctggcgctgagcgcactcagtctgagcctgaaaaatgaaaagcgtgtgcatctggcacaaccgtgggcttctggcccgcgttttttcccactgccgcaggggcaaattgccgtcactctgcgtgacgcacaggcctgctttaacctgaatgccctcgctcagccgacgacggcgtcgcgtccgctcgcggtacaacaactgattgccctgatctcgcgcctcgatgtgcctgcttatcgggccgaactgatagccgaaagcctgtgggagtttattgacgaagaccgcagcgtgcagacgcgtctgggtcgtgaagacagcgagtatctcgcccgctcggtgccgttctacgccgctaatcaaccgctggctgatatcagcgagatgcgcgtggtgcagggaatggacgccgggctttatcaaaaactgaaaccgttggtctgtgcgctgccgatggcccgccagcaaatcaacatcaatacattagatgtcacgcaaagtgtgattcttgaggcgctgtttgacccgtggttaagccctgttcaggcgcgggcattattacaacaacgtccggcgaagggctgggaagatgtcgatcagtttcttgctcagccgctacttgcagacgtcgatgagcgtactaaaaaacagctaaaaaccgtcctgagcgtggacagcaattacttctggctgcgttcagatatcaccgtgaatgagattgaactgacgatgaattcgttaattgtccgcatgggcccacaacacttttctgttctctggcatcagacaggagaaagtgagtga

SEQ ID NO: 1324 - DNA, 1179 bp, Escherichia coli
gtgagttccatgcttgagatttatttcccgctttgcgccgctgatcccatccgttggcagcgccgtacacccgacgtggagcacggcatctggcctgacgtcgccgacgaatatctccagcaatggctgcaaacagacacaattcgactctatattcccggcgaatggatcagcgtctggcaggttgaactgcctgatgtgcctcgcaagcagataccgacgattctgcccgccttgctggaagaagagctgaaccaggatatcgatgaactgcatttcgccccgttgaaaatcgaccagcaactggcaaccgtagctgtgattcaccagcagcatatgcgcaacattgcgcagtggttgcaggcaaacggcatcacccgcgctaccgtcgcgccagactggatgtccattccttgtgggtttatggctggcgatgcgcaacgggttatctgccgcatcgatgaatgccggggatggagcgccgggcgggcgctggctccggtcatgttccgcgcacagctcaatgagcagaatttaccgatttcactaaccgtggtcggcattgcaccggaagaactgtctgcatgggctggtgcggacgccgaacgcctgaccgttacggctctgcccgccattaccacttatggcgaatcggaagggaacctgctaacagggccgtggcagcctcgtgtcagctaccgaaaacagtgggcgcgctggcgggtgatgattctgccgatattgctgattctggttgcgctggtagtggaacggggcgtgacgttatggagcgtcagcgaacaggtggcgcaaagccgcacccaggcggagaaacagttcttaacgctattcccggagcagaagcggattgtgaatttacgctcgcaggtgacgatggcgctgaaaaaatatcgcccacaggccgacgatacccggctgctcgcagaattgtcagcgatcgccagtaccctgaaatcagcgtcacttaccgatatcgaaatgcgtggtttcacctttgatcaaaaacgccagacgcttcacctccaactgcgggctgcgaactttgccagcttcgacaaactgcgtagcgcactggcggcagattatgttgtgcaacaggacgcgttacagaaagagggtgatgcggtttccggcggcgtaacgttgcggaggaaataa

SEQ ID NO: 1325 - DNA, 537 bp, Escherichia coli
atgttacgcgataaatttattcactattttcagcaatggcgtgaacgccagttaagccgtggcgaacactggctgacacaacacctggcggggcgttctccgcgtgaaaaaggcatgttactggcagcggtagtgttcctgtttagcgccggatattacgttctcatctggcagccgttgagcgaacggattgagcaacaggagacgatgttgcagcagctggtggcgatgaacgcgcgactgaagagtgccgcgccggatattattgcggcgcgaaaatccggcacgacaacgccagcacaggtatcgcgggtcatcagcgacagtgcttcggcgcattcagtggtcattaagcgaatagccgagcgcggggagaatatccaggtctggatagaacctgtggtgtttaatgacctgctgaactggttaaacgcgctggatgaaaaatatgcgctgcgggtgacacaaattgatgtcagcgcaggtgagaagcctgggatggtgaatgtgcagcgactggagtttggacgggggtag

SEQ ID NO: 1326 - DNA, 777 bp, Escherichia coli
atggcaagaagtggatttgaagtccagaaagtcaccgtagaggcattatttctacgagaaatacgaacacgctttggtaagttccgtctgggatatttgtgggcgattctcgaaccctctgcgcatttgctgatactgttgggcatttttggttacattatgcaccgcacgatgccagacatctcattcccggtgtttttacttaatggcctgattcccttttttatctttagcagtatcagcaatcgttctgtaggtgctattgaagcgaatcaggggctgtttaattatcgaccagtaaaacccatcgatacgatcattgcgcgtgcattgcttgagacactgatttatgttgctgtttatatattgcttatgcttattgtctggatggcaggcgaatatttcgaaataacaaactttttacaacttgtgcttacctggagtttgttaatcattctttcatgtggcgttggcttaatattcatggtcgttggtaagactttccctgaaatgcaaaaggtcctgccgatactgcttaagccgctgtatttcatctcctgcatcatgttccctctacactcgattccgaagcaatactggtcatatctactctggaatccattagtgcatgtcgtagagttaagccgcgaggcagttatgcctggctatatcagcgaaggcgtgagtctgaactaccttgcaatgttcactctggtcaccctgttcatcggtctggcgttataccgaacgcgtgaagaggcaatgctgacatcatga

SEQ ID NO: 1327 - DNA, 672 bp, Escherichia coli
atgattaagattgaaaatttgacgaagtcatatcgcacgccagtgggtcgacattatgtctttaaggatttaaatattgaaatcccttcaggaaaaagtgttgcctttattggtcgcaacggagcgggtaaatcaacgttactgagaatgattggcggcattgaccgccccgacagtggaaagatcatcactaataaaacaatatcatggccagtcggcctcgcaggtggatttcagggaagtttaaccggacgcgaaaacgtaaaatttgttgcgcggttatacgcgaagcaagaagagctgaaagagaaaattgagtttgtcgaagaatttgccgaactcggtaagtacttcgatatgccgattaaaacttactcatctggtatgcgatcgcgtttaggctttggtttaagcatggcatttaagtttgattattatatcgtcgatgaagtaaccgcagtcggtgatgccaggtttaaagaaaaatgcgctcaattgtttaaagaaaggcataaagaatctagttttttaatggtttcacatagtttgaattcattgaaagagttttgcgatgtggccattgtatttaaaaatgataacacggttagttttcatgaagatgttcagaaaggagtggaggagtataaaaaagatcaaaatatctttgtttga

SEQ ID NO: 1328 - DNA, 696 bp, Escherichia coli
atgaaagtaattatcccactccaaacatgctcgacacgagtaccaaagaaaaatataattccattttataatggaatgtctttgtttgatataaaaatagaacaactccttaattctggtattaaaccagaaacaatatatatatcatctgaagctcaagaagttaaaagtatgtgtgatgataaaggagtgaattttttacttcgagacaaaaaattaactggtaatgagattaaacagccagaattaattggaggtatccttaacgatataaataaaaatagcaatgataatgatgatattatgtgggttcaagtgactaatccattgtttaatgagttctcctgcatgataaacgaatgggaatcaattaggaatgagtttgattctatggtcgcagttaaaaaatataaaggacatttaatagatgcgtcagggaatccattaaattattctttcgggtattggcataaagtctcacaaaacttaccatcatggtatgaggtattatggtcttgttttatacttaaaagagaaacaattgaaacatataagtatcatataggcgtaaacccttatttatatgtttctaatacggcaactgtcgatattgatactgttgatgatttccagttggctgcagaaatttactctattaggagaaaatatgagaaaggtaacagttataaactttaa

SEQ ID NO: 1329 - DNA, 3339 bp, Escherichia coli
atgcaagttctttattatatggatgtctttatcgatttggataaaagcactgatgaaagaagttttgtggcaaagtttgatcttaatgctgactttcttggtcgatactccaataaacaaaaagatctaaaagtcacttatttagctctggattctgttttggaaaaaagagaaataaaacaaaatttaataaagaataatgtgacagtaattaatataccagactcagaaataaaaaacatattgaattattatgatgcaacagttgagatggttattagcaatgatatttcagcaaagctaaaagaacatctagttgattattttaggaataagctgggtaatttaaaccccgatattgtcatttactgggaatattgttctgaaatttttgctgatgtttttaaagatagtgtcttgctcgaggggtctcatactggtttctggcgattggaaaataacaaccccgatgtgttatttaatgtctcaacaaaagacaaaaaatatgataatgtcttttttgaatccataaaaaaaattgaagtattaccggaagatattatcgacatacaaaatttaaaaaaatattataaagataacatcatatttgaaacacaagtaaatagaaaaactcttgatcctgacagtaaatttaaatacttgatattctaccccggaaactttccttcattacgatttaaaaaatattctggattttcgtctaatgcggcttttttacagtttcttttagaaaaaatcccaaatgattgtgcaatagtttattcaaaacattcgttagatagaacagaaaatgatcattatattgatcataacgaaagaataataaacctcgatgaagtatcatctattgataaggacatttctataagagtacttcctcatgttgatgctgttatcaatatttactcaaatatatttatgccggccatgcttttagggaaaccaatttttagctatggtaatagccctaatagtaaattttcaattgatactatcgaacatatatatgattatttatcaactaattccacccttccgtctcattatattgatataagtaataagatcataaaatatgtgttaacacataaagttaacactcgttttttgcgtaatgagaaaaatagttttttatatttaaaatacataattaaaaatattgaaaataatgagtatattaagtatcttcctcaattaggaactgttcgtggatataaagcaagactttcacaacaacttcttttacaaaatagtatatacgtaaattatgaacaaactaactttgagaaaatacttgggtacttgattaatgacaatatcaaaaatatcggcttcgatatttttgatacattattatgtcgtcctttagtcaacccagcagatttgttccatctaatagaagaagatgtacacaaaataacgaaattgagaagctttaatttcgcaaaaacaagaatatatgctgaaaatctagcccgccacggcaaagttgaagtgtcattagatgatatatatactaaattacaagaaagtactggtttttcagatgaagtaataggtaagataaaaaaactagaatgtgaaatggaacgccagttactctcaccaagagagtcaatgttagaatatttttcattagccaaaatacatcataaaagattgtttatcgcctctgatatgtacttatcagagacctttttaagagatgtgttaacaataaatggatataaaactgaaaaaataccagtttatatttcatgcgagtataataaagtaaaacataatggttcattatttaagtttattttatggaaagaagggttagaaccatctaaaactctttttattggtgataatttcaagtctgatgttcagcgagcgatcgataatggctttttagcagtgcattatcctaaagcaatagaaaaattaaaaaacacaaatttatttaaaccggacgtattaggttttgtctataaagaaaatttttcattctatcttggaatgattgctaataagatttttgataacccatttattcaatttgatcaaaaatcatctatcaacaactcaagtgcacttcttggttattatatttttggtccattagttttaagtttaacccattggttaatacaaaatttaaataatgagaattacaacaaaatactcttttcttcaagagattcaagagttatttttgatgtatacaatgagataaataaaaatctatatgattataaattacctaagagtgagtatttttatatatctcgaacagctacattgcctgcatatactaataaagccttaaggggaacgcttctttctctatataattcaaagctagatgtcaaaaagtttttagattatgtttttggcatagatgtttcaaacaatgaaatagctaaaaaaatagctcgtgatttaaaactcaatttaacatcagatagtagtaagcacaaaaaagaaattgctcagtttatacataaatattatgactctacagagtatagtaatacccttgaacaaaaaaatgaacatcttattgagtatgttactaatattatagggaatgatagttttgctgtttttgacttaggaacaagaggaacaagtcgagatattctatctgacattctgggtattaatatacctttatatatgtttagagaaacgaaacataaatgtacaaatgatataactagctatatagtagatacgtttaatccttttagaaaaggtgtccgagttattcttcctgcattttatgagttattactttctgatgctataacctctacctgctatggttatgagaaatcagcaacatctgttaagccaatcgtgaatccagcagaactcacagctacttctctattaactctcaaatcgcaagtatatatgaaagagttttgtaaggattatatttcgctgtttaaagataaatgggagtatatcaactctcaaacacgggatgcatttgtatatcctttgtcttatctatgtagtaatactacagatactttactattaagtcagtttgtcggtgatgatcccttatttaatgataagcatttctctataattcatcctccactgaacaaaaaaaacaccactactaaaaaggtaagcgaaattactaaaaataaaacacagagcaaggtacagccaagttctatatcgaatgtgaccaaaacaaatagtgatataaggaggaatgcgtttatttatttcaaacggaaattctataaaaatgaaatcacaaaaaaaatttgggataaggggcgtgagttatatataaaacatctaaactaa

SEQ ID NO: 1330 - DNA, 600 bp, Escherichia coli
atgaaaaaactatgtatgatttatgggaattgccagcatacacatctacaaaattttcttgaacaaactgattttataaattatttcaatctagttaaagttaaagatgtgtatctaaaagataaatcttatttggatgatgatacattatccaaaattgatctttttatatatcaacatgtatcgtcagcctttgatcctttttttagcacagatcatatttgtagtaaattacgttcggattgcattcgaatatctattcctaatttttggctttctgcttatttcccgcagcactcacaaaatcctgtgattaggccaaataggaaatactcgatatctccttcaggaatatttccatatggcgataaaaatataaattctttgctgttagcaaatatacgcacagaaaacattataaaaatcgtttctgatcctgacttttatgatgaaaaaacaataacggataatttaacaaaaacatttaatgatctaaatcaacgtgaaaagttaaataaagttgatataccttcagtaccatatttaaaaaatgccatttacagctgtctcttatacacatctccgagcccacgagactaa

SEQ ID NO: 1331 - DNA, 1170 bp, Escherichia coli
atgaaaattaactatccgttgctggcgctggcgattggcgcgtttggtatcgggacaacggagttctcgccaatgggcttgttgcccgtcattgcgcgcggtgtggatgtctcgattcccgctgccggaatgttaatcagtgcttatgcagttggcgtaatggttggcgcgccgctgatgacgcttctactttctcatcgtgcccgccgcagtgcgttgattttcctgatggcgattttcacgcttggcaacgtactttccgccatcgcgccggattatatgaccctgatgctttcacgcattttgaccagcctgaatcacggggcattttttggtttgggttcagtcgtggccgcaagcgtagtgccaaaacataaacaggctagcgcagttgccactatgtttatggggttaaccctggcaaatatcggtggcgtgccggcggcgacctggttgggcgaaaccatcggctggcggatgtcatttctggcaacagcggggctgggcgtgatttcaatggtaagtctgttcttctcattacctaaaggtggcgcaggggcgcgacctgaagtgaaaaaagagctggcggtattaatgcgtccgcaggtgctgtctgcattgctgacgacggtactgggcgctggtgcaatgtttaccctctacacctatatctctccggtactgcaaagtattacccacgtaacgccggtgttcgtcacggcaatgctggtgctgattggtgtcggattttctatcggtaactatctcggcggcaaactggcagatcgttcagttaacggcacgttgaaaggctttttgttgttgctgatggtgattatgctggtaatcccgttcctggcccgcaatgagttcggcgcagctattagcatggtagtgtggggagctgcaacctttgcggtcgtaccgccgttacagatgcgcgtgatgcgtgtcgccagtgaagcgccaggtctgtcttcatcagtcaatattggtgcctttaatcttggaaatgcgctgggagcagctgctggtggtgcggtaatttccgctgggctgggatacagttttgtgccggtgatgggggcgattgtcgcgggactggcattattgctggtgtttatgtcagtcagaaaacaacctgaaacagtttgcgttgccaacagctaa

SEQ ID NO: 1332 - DNA, 1026 bp, Escherichia coli
atggcaacaataaaagatgtagcgaaacgagcaaacgtttccactacaactgtgtcacacgtgatcaacaaaacacgtttcgtcgctgaagaaacgcgcaatgccgtgtgggcagcaatcaaagaattacactactcccctagcgcggtggcgcgtagcctgaaggttaaccacaccaagtctatcggtttgctggcgaccagcagcgaagcggcctattttgccgagatcattgaagcggtcgaaaaaaattgcttccagaaaggttacaccctgattctgggcaatgcgtggaacaatcttgagaaacagcgggcttatctgtcgatgatggcgcaaaaacgcgtcgatggtctgctggtgatgtgttctgagtacccagagccgttgctggcgatgctggaagagtatcgccatatcccaatggtggtgatggactggggtgaagcaaaagctgacttcaccgatgcggtcattgataacgcattcgaaggcggctacatggccgggcgttatctgattgaacgcggtcatcgcgaaatcggcgttatccctggcccgctggaacgtaacaccggcgcaggccgccttgccggttttatgaaggcgatggaagaagcgatgatcaaagtgccggaaagctggattgtgcagggtgactttgaacctgaatccggttatcgcgccatgcagcaaatcctgtcgcagtcgcatcgccctactgccgtcttctgtggtggcgatatcatggcaatgggcgcactttgtgctgctgatgaaatgggtctgcgcgtgccgcaggatgtttcgctgatcggttatgataacgtgcgcaacgcccgctattttacgccggcgctgaccacgatccatcagccaaaagattcgctgggcgaaacagcgttcaacatgctgttggatcgtatcgtcaacaaacgtgaagaaccgcagtccattgaagtgcatccgcggttgattgaacgccgctccgtggctgacggcccgttccgcgactatcgtcgttaa

SEQ ID NO: 1333 - DNA, 933 bp, Escherichia coli
atgtggtcagaatattctctggaagttgttgatgcggtagcgcgtaatggtagttttagcgccgcggcccaggagttgcatcgcgttccttctgcggtcagctataccgtgcgtcagctggaagagtggctggcggtgccgctttttgaacgacgtcaccgtgatgtggaactgaccgctgccggggcgtggtttctcaaagaaggacgctctgttgtcaaaaaaatgcagatcacccgccagcaatgtcagcagatagcgaacggctggcgcggtcagttagctatcgcagtggataatattgtcaggccagagcgaacacggcagatgatcgttgatttttatcgccattttgatgatgtcgaacttcttgtctttcaggaagtgttcaacggtgtctgggatgcactttccgacgggcgcgtggaactggcgattggcgcaacacgcgcgattccggtaggcggtcgttataccttccgggatatggggatgttaagctggagttgcgttgttgccagccaccacccgctggcgttgatggatggcccgttcagcgatgatacgttgcgcaactggccgtcattggtgcgcgaagacacctcgcgaacgctacctaaacgtattacctggttgctggataaccaaaaaagacttgtcgtgcctgactgggaatcatcggcaacctgtatctcggcaggattatgcatagggatggtgccaacacatttcgccaaaccgtggcttaatgaggggaagtgggtagcactagaactggaaaaccccttcccggattcggcatgttgtctgacatggcagcaaaatgatatgtcgcctgcgttaacctggttgcttgagtatctcggcgatagtgagacgctgaataaggagtggctgcgggagccggaagagactcccgcaacgggtgattaa

SEQ ID NO: 1334 - DNA, 1212 bp, Escherichia coli
atgcaacctgggaaaagatttttagtctggctggcaggtttaagcgtactcggttttctggcaaccgatatgtatctgcctgctttcgccgccatacaggccgacctgcaaacgcctgcgtctgctgtcagtgccagccttagtctgttccttgccggttttgccgcagcccagcttctgtgggggccactctccgaccgttatggtcgtaaaccggtgttattcatcggcctgacaatttttgcgttaggtagtctggggatgctgtgggtagaaaacgccgccacgctgctgatattgcgttttgtacaggctgtgggtgtctgcgccgcggcggttatctggcaagcattagtgacagattattatccttcacagaaagttaaccgtatttttgcgaccatcatgccgctggtgggtctgtctccggcattggctcctctgttaggaagctggctgctggtccatttttcctggcaggcgattttcgccaccctgtttgccattaccgtggtgctgattctgcctattttctggctcaaacccacgacgaaggcccgtaacaatagtcaggatggtctgacctttaccgacctgctacgttctaaaacctatcgcggcaacgtgctgatatacgcggcctgttcagccagtttttttgcatggctgaccggttcaccgttcatccttagtgaaatgggttacagtccggcagttattggtttaagttatgtcccgcaaactatcgcatttctgattggtggttatggctgtcgtgccgcgctgcagaaatggcaaggcaagcagttattaccgtggttgctggtactgtttgctgtcagcgtcattgcgacctgggctgcgggcttcattagccatgtgtcgctggtcgaaatcctgatcccattctgtgtgatggcgattgccaacggtgcgatctacccgattgttgtcgcccaggcgctgcgtcccttcccacatgcaaccggtcgcgccgcagcgttgcagaacactctgcaactgggtctgtgcttcctcgcaagtctagtagtttcctggcttatcagtatcagcacgccattgctcaccaccaccagcgtgatgttatcaacagtagtgctggtcgctctgggttacatgatgcaacgttgtgaagaagttggctgccagaatcatggcaatgccgaagtcgctcatagcgaatcacactga

SEQ ID NO: 1335 - DNA, 1149 bp, Escherichia coli
atgagttcatcgtgtatagaagaagtcagtgtaccggatgataactggtaccgtatcgccaacgaattacttagccgtgccggtatagccattaacggttctgccccggcggatattcgtgtcaaaaaccccgatttttttaaacgcgttctgcaggaaggttctttggggttaggcgaaagttatatggatggctggtgggaatgtgaccgactggatatgttttttagcaaagtcttacgcgcaggtctcgagaaccaacttccccatcatttcaaagacacgctgcgtattgccggcgctcgtctcttcaatctgcagagtaaaaaacgtgcctggatagtcggcaaagagcattacgatttgggtaatgacttgttcagccgcatgcttgatcccttcatgcaatattcctgtgcttactggaaagatgccgataatctggaatctgcccagcaggcgaagctcaaaatgatttgtgaaaaattgcagttaaaaccagggatgcgcgtactggatattggctgtggctggggtggactggcgcactacatggcgtctaattatgacgtaagcgtggtcggcgtcaccatttctgccgaacagcaaaaaatggctcaggaacgctgtgaaggcctggatgtcaccattttgctgcaagattatcgtgacctgaacgaccagtttgatcgtattgtttctgtggggatgttcgagcacgtcggaccgaaaaattacgatacctattttgcggtggtggatcgtaatttgaaaccggaaggtatattcctgctccatactatcggttcgaaaaaaaccgatctgaatgttgatccctggattaataaatatattttcccgaacggttgcctgccctctgtacgccagattgctcagtccagcgaaccccactttgtgatggaagactggcataacttcggtgctgattacgatactacgttgatggcgtggtatgaacgattcctcgccgcatggccagaaattgcggataactacagtgaacgctttaaacggatgtttacctattatctgaatgcctgtgcaggtgctttccgcgcccgtgatattcagctctggcaggtcgtgttctcacgcggtgttgaaaacggccttcgagtcgctcgctaa

SEQ ID NO: 1336 - DNA, 642 bp, Escherichia coli
atgtttacggggattgtacagggcaccgcaaaactggtgtcgattgacgagaaaccaaattttcgcacgcatgtggtggagttacccgaccacatgctggacggtctggaaaccggtgcttccgtggcgcataacggttgctgcctgaccgtgacggaaattaacggcaaccatgtcagttttgacctgatgaaagaaacgttacgcattactaatcttggcgatttaaaagtgggggattgggtaaacgttgagcgtgcggcgaaattcagcgatgaaattggcggacacttaatgtcaggtcatattatgaccaccgctgaagtggcgaaaatattaacctcggaaaataatcgtcagatctggtttaaagtccaggatagtcagttgatgaaatatatcctgtacaaaggatttattggcatcgacggtattagcctgaccgtcggcgaagtcacgccaacgcgtttttgcgtccatttaattccggaaacactcgaacgcacgactcttgggaagaaaaaactcggcgcacgcgtcaacattgaaatcgatccacaaactcaggcagtggtagatacggtagaacgtgtgctggcggcacgagaaaatgccatgaatcaaccaggtacagaagcctga

SEQ ID NO: 1337 - DNA, 1374 bp, Escherichia coli
gtgcagaagtatatcagtgaagcgcgtctgttattagcattagcaatcccggtgattctcgcgcaaatcgcccaaactgcgatgggttttgtcgataccgtgatggcgggcggctatagtgccaccgacatggcggcggtcgctatcggtacttctatctggcttccggcgatcctctttggtcacggactgctgctggcattaacgccggttatcgcgcaattaaatggttccggtcgacgtgagcgcattgcgcatcaggtgcgacaaggtttctggctggcaggttttgtttccgttctcattatgctggtgctgtggaatgcaggctacattatccgctccatggaaaacatcgatccggctctggcggacaaagccgtgggttatctgcgtgcgttgctatggggcgcgccgggctatcttttcttccaggttgcccgtaaccagtgtgaaggtctggcaaaaaccaagccgggtatggtgatgggctttatcggcctgctggtgaacattccggttaactatatctttatttatggtcatttcggtatgcctgagctcggtggagttggttgtggcgtggctactgcggcggtgtattgggtcatgttccttgccatggtttcttacattaaacgcgcccgctcgatgcgcgatattcgtaacgaaaaaggcaccgcgaagcccgatcctgcggttatgaaacgactgattcaactcggtttgccaattgcgctggcactgttctttgaagtaacgctgtttgccgtcgtggctctgttagtgtctccgctcggtattgttgatgtcgcaggacatcagattgccctgaactttagttcactgatgttcgtgcttcccatgtcgctggcggcagcggtaaccatccgcgtaggttatcgtctgggtcaaggctcaacgctggatgcgcaaaccgctgcgcggaccgggcttatggtgggtgtctgtatggcaaccctgacggccatattcacggtttcactgcgggagcaaatcgccctgttgtacaacgacaatcccgaggttgtaacgctggctgcacatttgatgttgctggcggcggtatatcagatttctgactctatccaggtgattggcagtggaattttgcgtggttataaagatacgcgttccattttctatatcacctttacggcttactgggtgctgggcttgccaagcggctatattctggcattgaccgatctggtcgttgaacctatggggccagcaggcttctggataggctttattattggcctgacgtcggcagccattatgatgatgctgcgtatgcggttcctgcaacgtctgccgtcagccatcattctgcaacgagcatcccgctaa

SEQ ID NO: 1338 - DNA, 1257 bp, Escherichia coli
atgggatctgatgcgaaaaacttgatgagcgacgggaacgtgcaaattgttaagaccggcgaggttattggcgcgacgcaacttactgaaggcgagttgattgttgaagctggcggaagagccgaaaataccgtggtcacgggggctggctggttgaaagtggcaaccggtgggatagccaaatgcgcacagtacggtaacaatggcacgctatcggtcagcgacggtgccattgccacagatattgttcagtccgagggaggcgcaattagtctctctacgctcgctacggttaatggccgccatcccgaaggtgaattcagcgttgataaaggttatgcctgcggtttgttgctggaaaatggcggtaacctgcgtgtactggaaggccatcgcgcggaaaaaattattctcgatcaagagggtggcctgttggtcaatgggacaacctcagcggtcgtggtagatgaaggtggtgaattgttggtgtatccaggtggggaagccagcaattgtgagattaatcagggcggcgtttttatgctggcggggaaagccaatgatacgttgcttgctggtggcaccatgaataatctcggtggtgaagactctgacactattgttgagaatggatccatttatcgtctggggacggatggtattcagctctacagttccggtaagacgcaaaacctgtccgttaatgtgggtggtcgggctgaagtgcatgctggtacgctggaaaacgcggtaatacaaggtgggacagtgattttgttgtcacccaccagcgcggacgaaaattttgtcgtagaggaagatcgtgcaccggttgaactgaccgggagtgttgcattactggacggcgcttcaatgattattggctatggcgcagatctgcaacaatcaacgattactgtacagcagggcggtgtgttgattctcgacggcagtacggtaaaaggcgacagtgtcacttttggtattggtaacatcaatctgaatggcggaaaactgtggctgatcactgatgcggcaacgcaggtgcaactgaaagtgaaacgcctgcgtggagagggagccatttgcctgcaaaccagtgcgaaagaaatttcacctgacttcatcaatgtgaaaggggaagttaccggtgatatacacgttgagataacagatgccagtcggcaaactctgtgtaacgcactgaaactacagccagacgaagacgggattggcgcaacgctccagcctgcgtaa

SEQ ID NO: 1339 - DNA, 306 bp, Escherichia coli
atggcaactttgttacaacttcattttgcttttaatggcccatttggcgacgcaatggctgagcagcttaaaccacttgctgagtcgattaatcaggaacctggttttctgtggaaggtttggacagaaagtgaaaagaaccacgaagccggtgggatctaccttttctctgatgaaaaaagcgcccttacctatctggaaaaacatactgcccgactgaaaaatcttggcgttgaggaagttgtcgccaaagttttcgatgtcaatgtgtcactgagtcaattcaatcaggcaaaacttgcctga

SEQ ID NO: 1340 - DNA, 1605 bp, Escherichia coli
atgaaaacaattgctattgtgggtgccgggcctacggggatctacaccttattctcgcttctacagcaacaaacgccactttctatttctatcttcgagcaggctgacgaagccggtgtcgggatgccatacagtgatgatgaaaactcaaaactgatgctggcaaacattgccagtattgaaataccgccgatttattgcacgtatctcgaatggctacaaaagcaagaagccagccatctccagcgttatggcgttaaaaaagaaaccttgcacgatcgtcagtttttaccgcgaattctgctgggcgaatatttccgcgatcaatttttacgattagtagaccaggcacgacagcaaaaatttgcagtggctgtttatgaatcatgccaggttaccgatctgcaaattacaaatgctggcgtcatgatcgctacaaatctggatttacccagcgagacgtttgatttagcggtgattgccacgggtcacgtctggcctgatgaagaagaagcaaccagaacgtattttcccagcccgtggtcaggcctgatggaagcaaaggtcgatgcgtgtaacgtggggattatgggaacatccttgagcggactggatgcggcaatggcagtggctattcagcatggttcgttcattgaagatgataaacaacacgtcatttttcaccgcgataacgcaagtgaaaagctaaatattacgttaatgtcgcgcacaggtattttacccgaagccgatttctattgccctattccctacgagcccttacacatcatcaccgatcaggcattaaatgctgagattcaaaaaggcgaagagggccttttggatcgggtatttagattgatcgtagaggaaatcaaatttgctgatccagactggagccaacgcatagccttagaaagcctgaatgtcgattcctttgctcaagcctggtttgccgagcgcaaacaacgcgacccattcgactgggcagaaaaaaatctccaggaggtcgaacgcaataaacgagaaaatcatactgttccctggcgttatgtcattctgcgcctgcatgaagccgtacaggaaattgttccacatctgaatgaacacgaccataaacggttcagtaaaggccttgcccgggttttcatcgataattatgcggcaatcccttcagagtctattcgtcgactattggccttacgtgaagcgggaatcattcatattctcgctctcggtgaagactacgaaatggaaattaacgagtcgcgcaccgtcctgaaaacggaagacaacagttactcgtttgacgtttttattgatgcccgcgggcagcgtccgcttaaagtgaaagatattcctttccctggactacgcgaacaattacagaaaacaggggatgaaatccctgatgttggcgaagattatacgttacagcaacccgaagatattcgtgggcgcgtagcgttcggcgcgttgccctggttgatgcacgaccagcctttcgttcagggacttacggcatgtgcagaaattggagaggcgatggctcgggcggtcgtaaaacctgcatcccgtgcgcgtcggcgtctttcgtttgattaa

SEQ ID NO: 1341 - DNA, 765 bp, Escherichia coli
atgtatcgctggtttctgcgccatttcccacgtggcggtagttatgccgatattcatcatgcactgattgaggaaggatatacggactgggcggagagtctggttgagtatgcgtggaaaaaatggctggcggatgaaaacttcgcgcatcaggaagtttcttctatgcaaaaactggccacagatcccggagaacgactattttgcagtcagtttgcccgcagcgacgatcatgctcgcatcggctgttgtgaggataacgccagaatcgcaaccgctgggtatgccgcgcaaattgccagtatgggttatagcgtgcggattggaagtgtcggctttaacagtcacattggcagctccggtgcacgcgcacgggttgctgtaaccggtaattcttcgcggataagcagcgctggagatagcagtcggattgcgaataccggaatgcgagtacgcgtttgtacattgggtgaacggtgtcatgtcgccagtaatggtgacctggtgcaaatcgccagctttggcgcaaacgccagaattgccaactgcggcgacaatgtacacatcattgccagcggtgaaaattcaacagtagtgagcacgggcgtggtcgactcaattattctcgggccagggggatgcgccgcactcgcatatcatgacggcgaaagagttcgcttcgccgtcgccattgaaggtgaaaacaatattcgagccggagtccgctatcgtcttaatgaacaacatcagtttgttgagtgctga

SEQ ID NO: 1342 - DNA, 786 bp, Escherichia coli
atgaacccgtcgcaacatgctgaacagtttcagagccagttggcgaactatgtgccacagttcaccccccaattttggccggtgtggttgatcattgccggactattgctggttgggatgtggttggtgctggggctacatgccttgcttcgtgctcgtggcgtgaagaaatcagccaccgatcatggtgagaggatttatctttacagcaaagcggtcagattatggcactggtcgaatgcgttactctttgtattgttgctggcaagtgggctgataaatcactttgcgctggtgggcgcaactgcggttaaaagtctggttgcggtgcatgaagtttgcggatttttgttactggcatgctggctcggctttgttctgatcaatgccgttgggggtaatggtcaccactatcgcattcgtcgtcaggggtggctggagcgagcggcaaaacaaacgcgattctatttgtttggcattatgcagggggaagaacatcctttcccggcaacaacccagtctaaatttaatcccttacagcaggttgcctatgttggtgtcatgtatggattgctgccgttgttactattgacggggctgctgtgtctctatccgcaagccgtgggagatgtgtttcctggcgtaagatactggttattgcaggcgcattttgctctggcatttataagcctcttttttatcttcggtcatctttatctttgcaccacggggcgtacgccacacgaaacctttaaaagcatggtcgatggctatcaccggcactaa

SEQ ID NO: 1343 - DNA, 669 bp, Escherichia coli
atgtccttcactcgacgcaaatttgttctggggatgggaacagtaatcttttttactggttctgcgtcttctctgttagcgaatacgaggcaagaaaaggaagttcggtatgccatgattcatgacgagtcacggtgcaatggctgtaatatctgcgcccgcgcatgccgtaaaactaaccacgtccccgctcagggaagccgtttatcgatggcacacattccagtcatcgataacgacaatggaacgcagtatcacttttttcgccagtcatgtcagcactgcgaagatgctccttgcatcgacgtttgcccgacaggggcgtcgtggcgtgatgagcaggggatcgtgcgggtagaaaaatcgcagtgcatcggctgcagttattgcattggcgcttgcccgtaccaggttcgctaccttaaccctgtcactaaagtggcagataaatgtgatttctgcgctgagacccgactggcaaaaggctttccgcccatttgcgtcagtgcctgcccggaacacgcattgatctttggtcacgaagatagcccagaaattcaggcgtggttgcaggaaaataaatactatcaatatcagctacctggcgccgggaaaccgcatctgtatcgccggttcggtcaacatttgattaaaaaggaaaatgtatga

SEQ ID NO: 1344 - DNA, 639 bp, Escherichia coli
atgaaccatcaggatgaattgccgttagcggaagtcagcgaaattgatgaggcgaagcggcaatggttgcaggggatgcgtcaccccgttgatacggtaaccgaaccagaaccggctgaaatcctggcagagttcattcgccagcattctgcggctgggcagctggtggcgcgcgctgtgtttctctcgccgccctattcggttgcagaagaggaactgtcagttttgctggaaaacattaagcagaacggagactacgcggatatcgcttgtatgacgggaagccaggatgattactattactcaacgcaggccatgagtgaaaactacgcggcgatgtctttgcaagttgtggagcaggacatttgtcgcgccattgcacacgccgttcgttttgagtgccagacgtatcctcgtccttacaaagtcgccatgctgatgcaagcgccatattacttccaggaagcgcagattgaagccgcgatcgccacgatggatgttgcacctgaatatgccgatatacggcaggtggagtcatcgacggcagtgttgtacttgtttagcgagcgatttatgacctatggcaaggcgtatggcttatgcgaatggttcgaggtagagcagtttcagaacccctga

SEQ ID NO: 1345 - DNA, 2103 bp, Escherichia coli
atggctaacggttggacaggtaatatattaagagtcaatctcacgacaggaaatattaccctcgaagattccagtaagtttaaaagttttgtcggtggcatgggcttcggctacaaaattatgtatgacgaagtaccgccaggcacgaaacctttcgatgaagcgaataaattagtttttgctaccggcccattaactggatctggtgccccctgtagttctcgcgtaaatatcacttcactttctacttttaccaaaggaaatttagtcgtcgatgcccatatggggggcttttttgcagcgcaaatgaaattcgctggatacgacgtcattattatcgaagggaaagcgaaatcaccggtatggctgaagattaaagatgacaaagttagccttgaaaaagccgatttcttatggggaaaagggacgcgcgcaacgacggaagaaatttgtcgcttgaccagtccggaaacctgtgtggcggctattggtcaggctggggaaaaccttgttcctctctctggcatgttgaatagccgtaaccacagcggcggtgcgggaactggcgcaataatgggttcgaaaaacctgaaagcgattgcggttgaagggacgaaaggggtcaacattgccgatcgtcaggagatgaagcgtctcaacgattacatgatgactgaacttatcggtgcgaataacaaccatgtcgtgccaagtacgccgcaatcgtgggcagagtattcagatcccaagtcacgttggacagcacgtaaagggctgttttggggcgcggctgaaggtggtccgattgaaacgggggaaattccgccaggcaatcagaatacggtcggctttcgtacctataaatccgtttttgacttaggtccggcggcagagaaatacacagtaaaaatgagtggctgccactcttgcccgatccgttgtatgacccaaatgaatattcctcgggtgaaagagtttggcgtgcccagcacaggtggtaacacttgtgtagcaaactttgtccataccaccatcttcccgaacgggccgaaagattttgaagataaagacgatggtcgtgtgattggtaacctggttggtctgaatttgttcgatgactacggcctatggtgtaactacgggcagttgcatcgcgactttatttattgttacagcaaaggtgtgttcaagcgtgttctgcctgctgaagagtatgcggaaattcgctgggatcaactggaagcgggtgacgttaactttattaaagatttttactaccgtctggcgcatcgcgtgggtgagttgagtcacctggctgatggttcatatgccatcgcagaacgctggaatttgggtgaagagtactggggctacgcgaaaaataaactctggtcgccatttggctatccggttcaccatgccaatgaagcgtcagcgcaagttggttccattgttaactgtatgttcaaccgtgactgcatgacgcatacccatatcaattttattggttccggcttgccattgaaattgcagcgtgaagtggcgaaagagctttttggttctgaagatgcttacgatgaaaccaaaaactacacaccgatcaatgacgcaaaaattaaatatgctaagtggtcgctgttgcgggtctgtttgcataacgccgtcaccctgtgcaactgggtctggccaatgaccgtttcgccgctgaaaagccgtaattaccggggcgatctggcacttgaagccaaattcttcaaagcgatcactggcgaagatatgactcaggaaaaattagatttagctgcagagcgtatctttacgttgcatcgcgcctacacggtaaaactgatgcaaaccaaagatatgcgtaatgaacacgatcttatctgttcctgggtattcgacaaggatccgcagatcccggtctttactgaaggtacagacaaaatggatcgtgacgatatgcatgcttcgctcacgatgttctacaaagaaatgggctgggacccacagcttggttgtccgacccgcgaaacattgcagcgtctggggctggaagatattgccgccgatctggcagcacacaatctactgcctgcgtaa

SEQ ID NO: 1346 - DNA, 627 bp, Escherichia coli
atgaacccggttgatcgtccactattaaatattggcttaacgcgattagaattcttgcgtatatcaggaaaaggccttgctggtttaacaattgtccctgctttactgtcacttttgggttgcaaacaggaagatattgatagcggcacagtagggttgataaatacacccaaaggggtgctggtgacccaacgtgcgcgatgcacgggttgccaccgctgtgaaatctcttgtaccaacttcaacgatggctcagtagggacattcttctcccgtatcaaaatccatcgcaattatttctttggcgacaacggggttggctctggcggtggcctgtatggcgatctcaactataccgcggatatctgccgtcaatgcaaagagccgcaatgcatgaacgtctgcccgattggtgcgattacctggcagcagaaagaaggctgtattaccgtcgatcataaacgttgtattggctgtagcgcctgtacgacggcatgcccgtggatgatggccaccgtaaataccgaaagtaaaaaatcctcgaaatgtgtgttatgcggtgaatgcgcaaacgcctgcccaacaggggcgttaaaaattatcgagtggaaagatattactgtgtga

SEQ ID NO: 1347 - DNA, 210 bp, Escherichia coli
atgggaaaccggacaaaagaggatgaactgtaccgagaaatgtgcagagttgtcggtaaagttgtgctggaaatgcgcgatctggggcaggaaccaaagcatattgttatcgcaggcgtattacgtacagcattagccaataaacgcattcagcgcagtgagctggaaaagcaggcgatggaaacagtcattaacgcactggtaaaatga

SEQ ID NO: 1348 - DNA, 1413 bp, Escherichia coli
atgaaaaagaccaaaattgtttgcaccatcggaccgaaaaccgaatctgaagagatgttagctaaaatgctggacgctggcatgaacgttatgcgtctgaacttctctcatggtgactatgcagaacacggtcagcgcattcagaatctgcgcaacgtgatgagcaaaactggtaaaaccgccgctatcctgcttgataccaaaggtccagaaatccgcaccatgaaactggaaggcggtaacgacgtttctctgaaagcgggtcagtcctttactttcactactgataaatctgttatcggcaacagcgaaatggttgcggtaacgtatgaaggtttcactactgacctgtctgttggcaacaccgtactggttgacgacggtctgatcggtatggaagttaccgccattgaaggtaacaaagttatctgtaaagtgctgaacaacggcgacctgggcgaaaacaaaggtgtgaacctgcctggcgtttccattgccctgccagcactggctgaaaaagacaaacaggacctgatctttggttgcgaacaaggcgtagactttgttgctgcttcctttattcgtaagcgttctgacgttatcgaaatccgtgagcacctgaaagcgcacggcggcgaaaacatccacatcatctccaaaatcgaaaaccaggaaggcctcaacaacttcgacgaaatcctcgaagcctctgacggcatcatggttgcgcgtggcgacctgggtgtagaaatcccggtagaagaagttatcttcgcccagaagatgatgatcgaaaaatgtatccgtgcacgtaaagttgttatcactgcgacccagatgctggattccatgatcaaaaatccacgcccgactcgcgcagaagccggtgacgttgcaaacgccatcctcgacggtactgacgcagtgatgctgtctggtgaatccgcaaaaggtaaatacccgctggaagcggtttctatcatggcgaccatctgcgaacgtaccgaccgcgtgatgaacagccgtctcgagttcaacaatgacaaccgtaaactgcgtattaccgaagcggtatgccgtggtgccgttgaaactgctgaaaaactggatgctccactgatcgtggttgctactcagggcggtaaatctgcccgcgcagtacgtaaatacttcccggatgccaccatcctggcactgaccaccaacgaaaaaacagctcaccagttagtactgagcaaaggcgttgtgccgcagctggttaaagagatcacttctactgatgacttctaccgtctgggtaaagaactggctctgcagagcggtctggcacacaaaggtgatgtcgtagttatggtttctggtgcactggtaccgagcggcactactaacactgcatctgttcacgtcctgtaa

SEQ ID NO: 1349 - DNA, 237 bp, Escherichia coli
atgaaagctactaaactggtactgggcgcggtaatcctgggttctactctgctggcaggttgctccagcaacgctaaaatcgatcagctgtcttctgacgttcagactctgaacgctaaagttgaccagctgagcaacgacgtgaacgcaatgcgttccgacgttcaggctgctaaagatgacgcagctcgtgctaaccagcgtctggacaacatggctactaaataccgcaagtaa

SEQ ID NO: 1350 - DNA, 1005 bp, Escherichia coli
atgaaacgcgcgtctttgcttacactcacgcttatcggcgcttttagcgccatccaggctgcctgggcggttgattatccgctaccaccaaccggcagtcgactggttgggcaaaatcaaacgtatacggtgcaagaaggggataaaaaccttcaggccatcgcccgacgttttgatactgcggcaatgttgatccttgaagccaataacactatcgccccggtgccaaaacccggtacgacgataactattccttcacaactattattacctgatgcgccgcgtcaggggattattgtaaaccttgcagagctgcgcctttataattatccgccgggagaaaatatcgtgcaggtttatccgataggtattggtttgcaggggctggaaacgccggtgatggaaacgcgtgtggggcagaaaatccctaacccaacctggacgcctacggcgggcattcgtcaacgttcgctggaacgtggcattaaattaccaccagtcgttcctgccgggcccaataacccactaggacgttacgcactgcgcctcgcgcatggtaatggcgaatacctcattcatggcaccagtgcgccggacagcgtcggtttgcgcgtcagttcgggctgtattcgcatgaatgcaccggatattaaagctttattctccagcgtgcggacgggaacgccggtgaaagtgatcaacgaaccggtgaaatattccgtggaacctaacgggatgcgttatgttgaagtacatcgaccactatcggcagaagaacagcagaacgttcagacaatgccgtacacgctgccagcaggctttacgcaatttaaagacaataaggctgtagatcagaagttagtcgataaagcgttgtatcgtcgggcagggtatccggttgcggtgagcagtggagcaactcccgcagccagcaatgcgccttcagtagagtcagcgcagaatggggaaccagagcaagggaatatgttacgcgcgacgcagtag

SEQ ID NO: 1351 - DNA, 417 bp, Escherichia coli
atggctttattgccggataaagaaaaattgctgcgtaattttttacgctgcgccaactgggaagagaaatatctctacattattgagttgggtcagcgtctgccagaattacgtgacgaagacaaaagcccgcaaaatagcatccagggctgccagagtcaggtgtggattgtgatgcgtcaaaatgcgcagggaattattgaattacagggcgacagcgatgcggccattgtaaaagggcttattgcggtcgtctttattctttacgatcaaatgacgccgcaggatattgtcaatttcgatgtgcgcccgtggtttgaaaaaatggcgctcacccaacatctcaccccatcacgctcacaaggtctggaagcgatgattcgcgcaattcgcgccaaagccgctgcacttagctaa

SEQ ID NO: 1352 - DNA, 1221 bp, Escherichia coli
atgactttttccgtcgacaaagtgcgggccgactttccggtgctttctcgtgaggtaaacggtttgccgctggcttatctcgacagcgccgccagtgcgcagaaaccgagccaggtgattgatgccgaggctgagttttatcgtcatggctacgcggcggtgcatcgcggtattcataccttaagcgcccaggcgaccgagaaaatggagaacgtgcgcaagcgtgcttcgctgtttattaatgcccgttcggcggaagagctggtgttcgtccgcggcacgacggaagggatcaatctggtcgccaatagctggggcaacagcaatgtgcgagcgggcgataacatcatcatcagtcagatggagcaccacgctaacattgtcccctggcagatgctttgtgcacgcgttggcgcagagctgcgtgtgatcccgctcaaccccgacggtactctgcaactggagacgctgcctacgctgtttgatgagaaaactcgtctgctggcaattactcatgtctccaacgtgcttgggacagaaaatccgctggcggagatgatcacacttgcgcatcaacatggcgcaaaagtgctggtggatggcgctcaggcggtgatgcatcatccggtggatgttcaggcgctggattgcgatttttacgtgttctccgggcataaactgtatggccctaccggaattggcattctttatgtcaaagaagccttgttgcaggagatgccgccgtgggaagggggcggttctatgatcgccaccgtcagcctgagtgaaggcactacctggaccaaagcaccatggcggtttgaagccggtacacccaataccggaggcatcattggtcttggcgcggcgctggagtatgtttcggcgctggggcttaataacatagccgagtatgaacagaatctgatgcattacgcgttatcacagttggaatctgtaccggatctcactctctatggcccacaaaacaggcttggcgttattgcttttaatctcggtaaacaccacgcctatgatgttggcagttttctcgataattacggcattgctgtgcgtaccggacatcactgcgcaatgccattaatggcctattacaacgtccctgcgatgtgtcgggcatcgctggccatgtataacacccatgaagaagtggatcgtctggtgaccggcctgcaacgtattcaccgtctgctgggataa

SEQ ID NO: 1353 - DNA, 1272 bp, Escherichia coli
atggctggcttaccgaacagcagtaacgcactgcaacagtggaatcatttgtttgaagctgaaggggcgaaacgctccccgcaagcacagcagcatttacaacaattgctgcgtaccggactgccgacacgtaaacatgaaaactggaaatatacgccgctggacgggctgaccaatagccagtttgtcagcattgcgggggagatatccccacagcagcgtgatgccttagcgttaacattagacgccgtgcggctggtgtttgtcgatggacgttacgtgcccgcactgagcgatgcaactgaaggcagcggatatgaagtgagcattaacgacgaccgtcaggggttacccgacgctattcaggcggaagtgtttctgcatttgacggaaagcctggcacaaagcgtgacgcatatcgccgtgaagcgcggtcaacggccggcaaagccattgctgttaatgcatatcacccagggcgtggcaggtgaagaggtgaatactgcccattaccggcatcatctggatctggcggaaggtgccgaagcaacggtgatcgaacattttgtcagccttaatgatgctcgtcacttcaccggcgcacggttcactatcaacgtcgcagcgaacgcccatttgcagcatatcaagctggcgtttgaaaacccgctcagtcaccactttgctcataacgatttgttgctggctgacgatgccaccgcatttagccacagtttcctgctgggtggcgcagtattacgacacaacaccagtacgcaactcaatggcgaaaacagcacgctgcggatcaatagcctggcgatgccggtgaaaaacgaggtgtgtgatactcgtacctggttggaacacaataaaggtttttgtaacagccgacagttgcacaaaactatcgtcagcgacaaaggccgcgcggtatttaacggtttgatcaacgtcgcgcagcacgccatcaaaacggatggtcagatgaccaacaataatctgctgatgggcaaactggcggaagtggatacgaaaccgcagctggaaatctatgcagatgatgtgaaatgcagccacggcgcgacggtggggcgtattgatgacgaacagatgttttatctgcgctcgcgcgggatcaatcagcaagatgcccagcagatgatcatttacgcctttgctgccgaactgacggaagcactgcgtgatgaggggcttaaacagcaggtgctggcccgaatcggtcaacgactgccaggaggtgcaagatga

SEQ ID NO: 1354 - DNA, 747 bp, Escherichia coli
atgttaagtattaaagatttacacgtcagcgtggaagataaagctatcctgcgtggattaagcctcgacgttcgtcccggcgaagttcacgccattatggggcccaatggttcgggcaaaagtaccttatcggcaacgcttgccgggcgagaagattatgaagtgacgagcggcacggttgagtttaaaggcaaagatttgcttgcgctgtcgccggaagatcgtgcaggtgaaggcatctttatggccttccagtatccggtggaaattcccggcgtcagtaaccagtttttcctgcaaacggcacttaatgcggtgcgcagctatcgcggccaggaaacgcttgaccgctttgattttcaggatttgatggaagagaaaatcgctctcctgaagatgccggaagatttattaacccgttcggtaaacgttggtttttccggcggcgagaaaaagcgcaacgatattttgcaaatggcggtgctggaaccggagttatgcattcttgatgagtcagactccgggctggatattgacgcattaaaagtggttgccgatggcgtgaactcgctgcgtgacggcaagcgttcattcatcattgttacgcactaccaacgcattctcgactacatcaagcctgattacgtccatgtgctgtatcagggacgaattgtgaaatccggcgatttcacgttggtcaaacaactggaggagcagggttatggctggcttaccgaacagcagtaa

SEQ ID NO: 1355 - DNA, 1488 bp, Escherichia coli
atgtctcgtaatactgaagcaactgacgatgtcaaaacctggaccggcggcccgctgaattataaagaaggattcttcacccagttagccaccgatgagctggcaaaggggataaacgaagaggtggtgcgcgcaatttcggcgaagcgtaatgagccggagtggatgctggagtttcgtctcaacgcctatcacgcatggctggagatggaagaaccgcactggttgaaagcgcactacgacaagctgaattatcaggattacagctactactcggcaccatcgtgcggtaattgtgacgacaactgcgcgtctgaacccggcgcggtgcagcaaactggcgcgaacgcctttttaagtaaagaggtggaggcggcgtttgagcagttgggcgttcccgtgcgggaaggcaaagaggtggcagtggatgccattttcgactctgtttcggttgccactacttatcgcgaaaaactggcggagcagggaattattttttgttcctttggcgaggcgatccacgatcacccggaactggtgcgtaaatatctcggcaccgtggtgccggggaatgacaacttctttgccgcacttaatgcggcggtagcctctgacggtacgtttatttatgtgcctaaaggcgtgcgttgcccgatggaactttccacctattttcgcattaacgcggaaaaaaccgggcagtttgagcgcaccattctggtggccgacgaagacagctacgttagctacattgaaggctgttccgctccggtgcgtgacagctatcagttacacgcggcggtggtggaagtcatcatccataaaaacgccgaggtgaaatattccacggtacaaaactggttccctggcgataacaacaccggcggtattctcaacttcgtcaccaagcgtgctttgtgcgaaggcgaaaacagcaaaatgtcatggacgcaatcagaaaccggctcagcgattacgtggaaatatcccagctgcattttgcgcggcgataactccattggtgagttttactcagtggctctgaccagcggtcatcagcaagcggataccggcaccaagatgatccacatcggtaaaaacaccaaatcgaccattatctcgaaagggatctctgccggacatagtcagaacagttatcgcggcttagtgaaaatcatgccgacggcaaccaatgcgcgcaatttcactcagtgcgattcaatgctgattggcgctaattgtggggcgcataccttcccgtatgtcgaatgtcgcaataacagcgctcagctggagcacgaggcaacgacatcacgtattggtgaagatcaactgttttactgcctgcaacgcgggatcagcgaagaagatgccatctcgatgattgttaacggtttttgcaaagacgtgttctcggaactgccgctggaatttgccgttgaagcacaaaaactcctcgccatcagtcttgaacacagcgtcggataa

SEQ ID NO: 1356 - DNA, 369 bp, Escherichia coli
atggacatgcattcaggaacctttaatccacaggatttcgcctggcaaggcttaacgctgacacccgcagcggcgatacacatccgcgaactggtggcaaagcagcctggtatgatcggcgtgcgcttaggcgttaagcaaacaggctgcgcgggctttggctatgtgctcgacagtgttagcgagccggacaaagacgatctgctgtttgaacacgacggcgcgaagctgtttgtcccgctgcaagcgatgccttttattgatggcacggaagtcgatttcgttcgcgaaggacttaatcagatattcaaatttcacaaccctaaagcccagaatgaatgtggctgtggcgaaagctttggggtatag

SEQ ID NO: 1357 - DNA, 189 bp, Escherichia coli
atgtctactcaacttgatcccacccaactggccattgaatttttacgccgtgaccaaagcaatctttcacctgcccaatatctcaagcgtctgaaacaattagaacttgaatttgctgacctgcttactctctcttctgctgaattaaaagaagaaatctacttcgcctggcgtctgggcgtgcattga

SEQ ID NO: 1358 - DNA, 411 bp, Escherichia coli
atgatatggaaacgaaaaatcaccctggaagcactgaatgctatgggggaaggaaacatggtgggattgctggatattcgctttgaacatattggtgatgacacccttgaagcgacaatgccagtagactcacggacaaagcagcctttcgggttgctgcatggaggtgcatccgtggtactggccgaaagtatcggttccgttgccggttatttatgtaccgaaggtgagcaaaaagtggttggtctggaaatcaatgctaaccacgtccgctcggcacgagaagggcgggtgcgcggcgtatgcaaaccgttgcatctcggttcgcgtcaccaggtctggcagattgaaatcttcgatgagaaacggcgtttgtgctgttcgtcacgattgacgaccgccattttgtga

SEQ ID NO: 1359 - DNA, 3057 bp, Escherichia coli
atgattccacagatttcccaggcacccggcgtcgttcaactggtgcttaattttttgcaagagctggagcaacagggttttaccggcgatacggcgacaagttatgccgatcgtctgacaatgtcgactgacaacagtatttaccaacttctccccgatgcggtggtatttccgcgttcaaccgcagatgtagcgctgatcgcccgtcttgccgcgcaggaacgctattcatcgttgatctttaccccccgcggcggcggcaccggcactaacggtcaggcgctcaaccaggggattattgttgatatgtcccgccatatgaaccgcatcatcgaaattaaccctgaagagggctgggtgcgcgttgaggccggggtgattaaagaccaactcaatcagtacctgaaaccctttggctacttttttgcgccagaactttcgaccagcaaccgggcaacgctcggcgggatgatcaataccgatgcatccggtcagggatcgctggtctatggcaaaacgtcagatcacgtacttggcgtacgtgcggtgttgttggggggcgatattctcgatacgcaacctttacccgtcgaactggcggaaacgctgggtaaatccaataccacaatcgggcgaatttataacacggtttatcaacgtagccgtcagcaacgccagttaatcatcgacaacttccccaagcttaaccgctttcttaccggttacgatctgcgtcatgtctttaacgatgagatgaccgagttcgacctgacgcgcattctgacgggttcagaagggacgctggcctttattaccgaagcgcgactggatattacgcgcttgcctaaagtacgccgtctggtgaacgtcaaatatgactcttttgactccgcgctgcgtaacgcgccgtttatggttgaggcgcgggcgctttcggtagagacggtggactcaaaagtgctgaatctggcgcgggaagatattgtctggcattccgtcagcgagttgattaccgatgtgcctgataaagagatgctcgggctgaacattgtggaatttgccggtgatgatgaggcactgattgacgagcgagttaatgcactctgtgtgcggcttgatgagctgattgccagccaacaggcaggagtgatcggctggcaggtgtgccgcgagctggcgggtgttgaacgtatctatgcgatgcgcaaaaaagccgttggtctgcttggcaatgccaaaggtgctgctaagccaattccgtttgctgaggatacctgcgtaccgccggaacacctggcggattatattgctgaatttcgcgcgctgctcgacagccacggcttaagctacggtatgttcggtcacgtcgacgcaggtgtcttgcacgtccgtccggcactggatatgtgcgatccgcaacaagagattttgatgaagcaaatctctgatgatgtagtggcgcttaccgcgaaatacggtggtttgttgtggggcgaacacggcaaaggttttcgcgccgaatacagcccggcgtttttcggtgaggaactttttgcagaactgcgtaaagtgaaagcggcatttgacccgcataaccgactcaaccccgggaagatttgcccgccagaaggtctcgatgcgccgatgatgaaagtggacgcggtgaagcgcggtacattcgatcgacagatccccattgcggtacgccagcagtggcgtggtgcaatggagtgtaacggcaacggtttatgcttcaactttgatgctcgtagtccgatgtgcccgtcgatgaagatcacccagaaccggattcattcaccgaaagggcgcgcaacgctggtacgtgaatggctgcgtttgttggcggatcgcggcgttgacccactcaaactggaacaagaactgcctgaatccggcgtcagtttgcggacgttaattgcccgcacgcgcaatagttggcatgcgaataaaggcgaatatgacttctcacacgaagtcaaagaggcgatgtcgggctgtctggcctgtaaagcttgttcgactcagtgccccatcaaaattgatgtgccggagtttcgctctcgtttcctgcaactctatcacacccgttatttacgcccgctgcgcgaccacctcgtcgctacggttgagagttacgcaccgctgatggcacgcgcgccgaaaacctttaacttcttcattaaccagccgctggtgcgcaaactctcggaaaaacatatcggcatggttgatttgccgctgctgtcggtcccctcgctacaacaacaaatggtggggcatcgctcggcaaacatgacgctggaacagcttgaagctctcaatgcagagcagaaagcgcgcacggtgctggtggtgcaggacccctttaccagctattacgatgctcaagtggtggcggattttgtccgtctggtcgaaaaattaggtttccagcccgtgttactgccattttcgccaaatggaaaagcccagcatatcaaaggttttcttaatcgttttgcgaagacggcgaaaaagacggcggatttcctcaaccgtatggcgaagctgggtatgccaatggtaggcgtcgacccggcgctggtactttgttatcgcgatgaatataaactggctctgggcgaggagcgtggcgagtttaacgtcttactggcaaatgaatggctggcaagcgcacttgagtcacagccagtggctacagtcagcggtgaatcatggtatttctttggtcactgtaccgaagttaccgccttgccgggcgcgccagcacaatgggcggcaatatttgcccgttttggcgcgaaactggaaaatgtcagcgtggggtgctgcggcatggcagggacttacggacatgaagcgaaaaaccataaaaattcgctcgggatctatgaattatcctggcatcaggcgatgcagcgactgccgcgtaaccgctgtctggcgaccggatattcctgccgtagtcaggtaaaacgggttgaaggcacaggggtacgccatcctgtgcaggctttactggagattattaaatga

SEQ ID NO: 1360 - DNA, 1113 bp, Escherichia coli
atggtaaatgttcgtcagcccagggatgtcgcacaaattctgctttcggtgctgtttttagccatcatgattgtggcatgtctgtggattgtacaaccctttattctcggctttgcatgggccggtacagtggttatcgccacctggccggtattgttacgtttgcaaaagatcatgtttggtcgccgctctctcgccgttctggtgatgacgctgttattagtgatggtgtttatcatccctattgctttgctggttaacagtatcgtcgacggcagcggcccgctaattaaagccatttccagtggtgacatgacgttacccgatctggcgtggcttaataccattccggtgattggcgcgaagctatatgcaggctggcacaatttgctggatatgggggggacggcgatcatggcgaaagtccgtccttatattggcaccaccaccacctggttcgttgggcaggcggcgcatatcgggcgctttatggtgcattgtgcgctgatgcttctcttcagcgccctgctgtactggcgcggtgaacaggtggcacaaggcattcgccattttgcaacccgtctggcaggcgttcgcggagatgccgccgtgctgctggcggcacaggctatccgcgcggtggcgctgggtgtggtggtgacggcgttagtacaggcagtgcttggcggtatcggcctcgccgtatccggcgtaccttatgcaactttgctaacggtgttaatgatcctctcctgccttgtccagcttggaccgttgccggtactgattccggcgattatctggctctactggactggcgataccacctggggaacggtattgttagtttggagcggtgtggttggcacgctcgataacgtcatccgcccaatgttaattcgcatgggtgccgatttaccgctgatcctgatcctctctggcgttattggtggtttgattgctttcgggatgatcggtctgtttattggtccggttctgttagccgtttcctggcgtctgtttgccgcgtgggtggaagaagtcccaccgccgacggaccaaccggaagaaattctcgaagaacttggcgaaatcgagaaaccgaataagtaa

SEQ ID NO: 1361 - DNA, 357 bp, Escherichia coli
atgaacgcttatgaactccaggcacttcgccatatttttgccatgactattgatgaatgcgcgacctggattgcccagaccggtgacagtgaaagctggcgtcagtgggaaaatggcaaatgcgccattcctgattgtgtagtcgagcaactgttggctatgcgtcagcaacgaaaaaaacatcttcatgccatcatagagaaaataaataaccgcatcggcaacaacaccatgcgttttttccccgacttaaccgcgtttcaacaagtctaccctgatggcaattttattgactggaagatctatcaatcggtagccgctgaattatatgcacacgatctggagcggctttgttaa

SEQ ID NO: 1362 - DNA, 1215 bp, Escherichia coli
atgaaaaatccctattaccctaccgcacttgggttgtattttaattacctggtgcatggtatgggcgtcattttgatgagcctgaatatggcctcgctggagacgctttggcagactaatgccgcgggcgtctcgatagttatctcatcactgggcattggtcgattaagtgtcttgctttttgcaggattattatccgatcgctttggtcgccgcccttttatcatgctcgggatgtgctgctatatggccttcttttttggcatcctgcacaccaataacatcattatcgcttatgtttttggctttctggcgggaatggcaaacagttttctcgatgcaggcacctatcccagtttgatggaagcttttccacgctcaccgggtacagccaatattttaattaaagcatttgtttccagcggacagtttttattaccgctaattatcagcctgttagtgtgggctgaactgtggttcggttggtcctttatgattgccgcaggcattatgtttattaacgctctgtttttataccgttgtacgttcccaccccatccgggtcgtcacttacctgtcataaagaaaaccaccagctctacggaacatcgctgttcaattatcgatttagccagttattccctatatggctatatctcaatggcaacgttttatctggttagccagtggctggcacaatacggacaatttgtcgctggcatgtcatacaccatgtcgatcaaattactcagtatctacaccgtgggttcgctgctgtgtgtatttattactgctccactcattcgtaataccgttcgcccaacaacattactgatgctgtacacctttatctcatttatcgccctgctcaccgtctgcctgcatcccacattttatgtggtgataatatttgcttttgtcatcggttttacctccgcaggcggtgttgtacaaattggcctgacgttaatggcggaacgttttccctacgctaaaggaaaagcaacggggatctattacagtgcgggcagcattgcaacatttaccattccgttgattacggctcatctttcgcaaagaagtattgccgatattatgtggtttgataccgccatcgctgctatcggctttatactggcactgtttattggcttacgcagtcgcaaagaaacgcggcatcacacgctaaaggaaaatatcgctccgggtgggtaa

SEQ ID NO: 1363 - DNA, 1266 bp, Escherichia coli
atgtctcaaaataaggctttcagcacgccatttatcctggctgttctttgtatttacttcagctatttcctgcacggcattagtgttattacgcttgcccaaaacatgacatctttggcagaaaagttttccactgacaacgcgggcattgcctatttaatttccggtatcggattggggcgattgatcagtattttattcttcggagtgatctccgataagtttggtcgtcgggcggtgatattaatggcagtaataatgtatctgctattcttctttggtattcctgcttgcccgaatttaactctcgcctactgtctggcagtgtgcgtaggtatcgctaactcagcgctggatacgggtggctaccccgcgctcatggaatgctttccgaaagcctctggttcggcggtcatactggttaaagcgatggtgtcattcgggcaaatgttctacccaatgctggtgagctatatgttgctcaataacatctggtacggctatgggctgattattccgggtattctgtttgtactgatcacactgatgctgttgaaaagcaaattccccagccagttggtggacgccagcgtagctaatgaattaccgcaaatgaacagcaaaccgttagtctggctggaaggtgtttcatcagtactgttcggtgtagccgcattctcgaccttttatgtgattgtggtgtggatgcccaaatatgcgatggcttttgctggtatgtcagaagctgaggcattaaaaaccatctcttattacagtatgggttcgctggtctgtgtctttatttttgccgcactgctgaaaaaaatggtccggcccatctgggctaatgtatttaactctgcactggcaacaataacagctgccattatctacctgtacccttctccattggtgtgtaatgccggagcctttgttatcggtttctcagcagctggcggcattttacagctcggcgtttcggtcatgtcagagtttttcccaaaaagcaaagctaaagtcaccagtatatatatgatgatgggtggactggctaactttgttattccgctgattaccggttatctgtcgaacatcggcctgcaatatatcattgttctcgattttactttcgcgctgctggccctgattaccgcaattattgtttttatccgctattaccgcgttttcattattcctgaaaatgatgtgcggtttggcgagcataaatttagcacccggttaaacacaattaagcatagaggttaa

SEQ ID NO: 1364 - DNA, 867 bp, Escherichia coli
atggatgttaccgcaaaatacgaattgattgggttgatggcctatcccatccgccacagtttatcgcccgaaatgcagaataaagccttagaaaaagcgggattgccatttacctatatggcctttgaagtggataacgatagttttcccggagcaattgaaggattaaaagccctcaaaatgcgcggaactggtgtatcaatgccgaacaaacaactggcgtgtgaatatgttgatgaattaacgccagcggccaaactggtgggagccatcaacaccatcgttaatgatgatggctatctgcgtggctataacaccgacggcacgggtcatattcgcgccattaaagagagcggttttgatatcaaaggcaaaacgatggtgctattaggggccggtggtgcctcaacggcaattggcgcgcagggggcaattgaaggtttaaaagaaattaaactctttaaccgtcgggatgagttcttcgataaagctctcgccttcgcgcagcgggttaacgaaaacaccgattgcgtcgtgacagtcaccgatctcgccgatcagcaagcctttgcagaagccctggcttccgccgacattttaaccaatggcaccaaagtgggtatgaaaccccttgagaatgaatcattggttaatgatatcagtctgttacatccgggacttctggtcactgaatgcgtgtataaccctcatatgacgaagttattgcagcaggcgcaacaagcgggttgcaaaacgattgatggatacggcatgttgttgtggcaaggggctgaacagttcacgttatggactggcaaagatttccctctggaatatgttaaacaggtcatggggttcggtgcctga

SEQ ID NO: 1365 - DNA, 759 bp, Escherichia coli
atgaaaaccgtaactgtaaaagatctcgtcattggtacgggcgcacctaaaatcatcgtctcgctgatggcgaaagatatcgccagcgtgaaatccgaagctctcgcctatcgtgaagcggactttgatattctggaatggcgtgtggaccactatgccgatctctccaatgtggagtctgtcatagcggcagcaaaaattctccgtgaaaccatgccagaaaaaccgctgctgtttaccttccgcagtgccaaagaaggcggcgagcaggcgatttccaccgaggcttatattgcactcagtcgtgcagccatcgacagtggcctggttgatatgatcgatctggagttatttaccggcgatgatcaggttaaagaaaccgtcgcctacgcccacgcgcatgatgtgaaagttgtcatgtccaaccatgacttccataaaacgccggaagccgaagaaatcattgcccgtctgcgcaaaatgcagtccttcgacgccgatattcctaagattgcgctgatgccgcaaagtaccagcgatgtgctgacgttgcttgccgcgaccctggagatgcaggagcagtatgccgatcgtccaatcatcacgatgtcgatggcaaaaactggcgtaatttctcgtctggctggtgaagtatttgggtcggcggcaacttttggtgcggtaaaaaaagcctctgcgccagggcaaatctcggtaaatgatttgcgtacggtattaactattttacatcaggcataa

SEQ ID NO: 1366 - DNA, 1596 bp, Escherichia coli
atgaaacctgtaaaaccacctcgtattaatggacgagtgccggtcctgtcggcacaggaagcggtgaattatattcccgacgaagcaacactttgtgtgttaggcgctggcggcggtattctggaagccaccacgttaattactgctcttgctgataaatataaacagactcaaacaccacgtaatttatcgattattagtccaacagggcttggcgatcgcgccgaccgtggtattagtccgctggcgcaagaaggtctggtgaaatgggcattatgcggtcactggggacaatcgccgcgtatttctgatctcgcagaacaaaataaaattattgcttataactatccacaaggtgtacttacacaaaccttacgcgccgccgcagcccaccagcctggtattattagtgatattggcatcggaacatttgtcgatccacgccagcaaggcggcaaactgaatgaagtcactaaagaagacctgattaaactggtcgagtttgataacaaagaatatctctattacaaagcgattgcgccagatatcgccttcattcgcgctaccacctgcgacagcgaaggctacgccacttttgaagatgaggtgatgtatctcgacgcattggttattgcccaggcggtgcacaataacggcggtattgtgatgatgcaggtgcagaaaatggttaagaaagccacgctgcatcctaaatctgtccgtattccgggttatctggtggatattgtggtggtcgatccggatcaaacccaactgtatggcggtgcgccggttaaccgctttatttctggtgacttcactcttgatgacagcaccaaacttagcctgcccctaaaccaacgtaaattagttgcacggcgtgcattattcgaaatgcgcaaaggcgcagtggggaatgtcggcgtcggtattgctgacggcattggcctggtcgcccgggaagaaggttgtgctgatgactttattctgacggtagaaacaggtccgattggcggtattacttcacaggggatcgcctttggcgcgaacgtgaatacccgcgccattctggatatgacgtcccagtttgatttttatcacggtggtggtctggatgtttgttatttgagttttgctgaagtcgaccagcacggtaacgtcggcgtgcataaattcaatggtaaaatcatgggcaccggtggatttattgatatcagtgccacttcgaagaaaatcgttttctgcggcacattaactgcgggcagtttaaaaacagaaattaccgacggcaaattaaatatcgtccaggaaggacgggtgaagaaatttattcgggaactaccggaaattactttcagtggaaaaatcgctctcaagcgagggctggatgttcgttatatcactgagcgcgccgtattcacgctaaaagaagacggcctgcatttaatcgaaatcgctcctggcgtcgatttacaaaaagatattctcgacaaaatggatttcaccccagtgatttcaccagaactgaaactgatggacgaaagattatttatcgatgcggcgatgggttttgtcctgcctgaagcggctcattaa

SEQ ID NO: 1367 - DNA, 1152 bp, Escherichia coli
atggatttttctttaactgaagaacaagaactgctgctggccagtattcgcgaactgattacgactaactttccggaagagtatttccgcacctgcgatcaaaacgggacatacccgcgtgagtttatgcgggcactggcggataacggtatttccatgcttggcgtgccggaagaatttggtggtatccctgcggattacgtcacccaaatgctggcgctgatggaagtgtcaaaatgcggtgctccggcatttttgattaccaacggtcaatgtattcacagtatgcgccgtttcggttctgcagagcagctacgtaaaacggcagagagcaccctggaaacgggtgatcccgcctatgccctggcattgacggagccaggcgcaggctcagacaacaacagtgccactaccacttacacgcgtaaaaacggcaaggtttacatcaacggacagaaaacctttattaccggtgcgaaagagtacccatatatgctggtgttggcgcgcgatccgcaaccgaaagatccgaaaaaggcctttactctgtggtgggtcgactccagtaaacccggcattaaaatcaatccactgcataaaatcggctggcatatgctcagcacctgcgaagtctatctcgacaacgtggaagttgaagagagcgacatggtgggcgaagaaggaatgggtttcctcaatgtgatgtacaactttgagatggagcgcctgatcaacgccgcgcgcagcaccggctttgccgaatgcgcattcgaagatgccgcccgctatgccaaccagcgtatcgcttttggtaagcccattggtcataaccagatgatccaggaaaaactggcgctgatggcgattaagatcgacaacatgcgcaacatggtgttgaaagtggcatggcaagccgatcagcatcagtcactgcgcaccagcgcggcgctggcaaaactgtactgcgcacgtaccgcaatggaagtcattgatgatgcgattcaaatcatgggcggtctgggctataccgatgaggcgcgcgtctcccgcttctggcgtgatgtccgttgtgaacgtatcggcggcggtacagacgaaattatgatttacgtagcaggtcggcagatcctgaaagattatcagaacaaataa

SEQ ID NO: 1368 - DNA, 912 bp, Escherichia coli
atgtatcaacgctgttttgataatgccagtgaaacgctgtttgtcgccggtaaaacgccacggctttcacgtttcgcatttagcgatgatccaaaatgggagtctggacatcacgttcatgacaatgaaaccgagctgatttacgtcaagaaaggggtagcaaggtttaccatcgattcttcgttatatgtcgcgcatgccgatgacattgtggtgatagaacgtggcaggctgcatgcggtggcctctgacgttaacgatccggcaacgacgtgtacctgtgcgctgtacggctttcagtttcagggggctgaggaaaatcagctactgcaaccgcattcttgcccggtaattgccgcagggcagggaaaagaagtcattaaaaccttatttaatgagctaagtgtgattttgccgcaaagtaaaaatagccaaacatcttcgttatgggacgcatttgcctatacgttagcaattctttactacgaaaactttaaaaatgcttatcgttcggagcagggatatattaaaaaagatgttctgataaaagatattcttttctatctgaataataactatcgcgaaaaaatcactttagagcagttatcgaaaaaatttcgtgccagcgtcagttatatctgccatgaatttaccaaagagtatcgtatttcccctattaactatgttattcaacggcgtatgacggaagcgaaatggtcactcactaatactgaattatcacaggcagagatttcctggcgtgtgggttatgaaaatgtcgatcactttgccaaactgtttttgcgccatgtcggctgttcgcccagcgattaccgcaggcaatttaaaaactgttttgcggaacaagaaatcctatctgaatttcctcaaccagtaagtcttgccggataa

SEQ ID NO: 1369 - DNA, 177 bp, Escherichia coli
atggaaggtaaaaatggcctgaaaatagtgtgcgatagcggtgcggggttttcgacggagcaagctgttttccttgccaacaatcttgcaaaaaaaatgcgatcgctaaaacaaaagtgcaatttgcggcaatatagttattccatgaccgtgcaatcttgcattcagtgtaaataa

SEQ ID NO: 1370 - DNA, 765 bp, Escherichia coli
atgaaaataataacctgctttaagctggtgcctgaagaacaggacattgttgtcactccagaatacaccctgaatttcgacaatgccgacgccaaaatcagccagttcgatctcaatgccattgaagctgcaagccagcttgcaacagatgacgatgagatagccgcgctgaccgtcggcggctctttgttgcagaactcgaaagtgcgcaaagacgtgctagcccgcgggccgcacagcctgtatatggtgcaggatgcacaacttgagcatgcactgcctctcgataccgcaaaggcgctggcgacagcagttgaaaagatcggcttcgatttactgatctttggtgaaggttccggcgacctttatgcccagcaggttggcttgctggtcggagaaattctgcaacttccggtgattaatgcagtgagtgccattcagcgtcagggcaatacactggtgattgaacgcacgcttgaagatgatgttgaagttattgaactctctgttccagccgtgctctgcgtcacctccgatattaacgtgccacgtattccttcgatgaaagccattctcggcgcgggtaaaaaaccggtaaatcagtggcaggcaagtgatattggctggagccagagcgcaccacttgctgaactgaccggcattcgcgtaccgccgcaaacagaacgtaagcacatcattctcgataacgattcgccggaggccattgccgagctggcggaacatctgaagaaagccctgaactga

SEQ ID NO: 1371 - DNA, 939 bp, Escherichia coli
atgagtcaattaaaaagcgtctgggtctttagcgataatcctgaacgttatgctgaactgtttggcggcgctcagcaatggggccaacaggtgtatgccattgtacaaaataccgagcaggcgcaggcagttatgccttatgggccaaaatgcatttatgttcttgagcaaaacgacgcgctgcaacgtactgaaaattacgccgaaagcattgctgccctgctgaaagataaacaccccgctatgttgctgttggccgcgacgaaacgtggtaaagctctggcagcacggttaagtgtgcaactgaatgcggcgctggtgaacgatgccacggcggtggatattgtcgatggtcacatttgcgccgaacaccggatgtatggcgggttagcgttcgctcaggaaaagatcaacagcccgctggcgatcattacccttgcacccggtgttcaggagccgtgcaccagtgatatctctcatcagtgcccgacagaaacggtaccttatgttgccccgcgtcatgaaattctctgtcgcgaacgccgtgcgaaagcggcaagcagcgtggacctgagcaaagcaaaacgtgtggttggcgtcggtcgtggtctggcggcgcaggatgacctgaaaatggtccacgaactggcggcggtactgaatgctgaagtcggctgttcacgtccaattgccgaaggcgagaactggatggagcgtgaacgttatatcggtgtctccggcgtgttgctgaaatccgatctctacctgacgctggggatctccgggcagatccagcatatggttggcggcaacggcgcaaaagtgattgtcgccattaataaagataaaaatgcgccaatcttcaactatgccgactacggtctggtgggcgatatctacaaagtcgtccctgccctgattagccagttgagtcgctaa

SEQ ID NO: 1372 - DNA, 1290 bp, Escherichia coli
atgtcggatgacaaatttgatgccattgtggtcggtgcgggcgttgccggtagcgttgccgcactggtcatggcgcgagccgggctggatgtcctggtgatagaacgcggcgacagtgccggatgtaaaaacatgaccggcgggcgtctttatgcccacacactcgaagcaattattccaggctttgcagcatcagcgccggtagaacgcaaggtcacacgcgagaaaatctccttcttaaccgaagaaagcgccgttaccctcgattttcaccgcgagcaaccagatgttccgcaacacgcgtcttataccgtattgcgtaatcgtctggacccgtggttgatggaacaagccgagcaggcgggcgcgcagtttatcccgggcgtacgcgtcgatgcgctggttcgtgaaggaaacaaggtcactggcgtccaggccggggatgatattctcgaagcgaatgtggtgattctggctgatggcgttaactcgatgcttggccgctcgctgggaatggtttccgcttccgatccgcatcattacgctgttggtgttaaagaggttataggcctgacaccagaacagatcaacgatcgctttaatgttacgggcgaggaaggtgccgcctggctgtttgccggttccccttctgacggcctgatgggcggcggattcctctataccaacaaggattccgtatcgttggggctggtttgtggattgggtgatatcgcccatgcgcaaaaaagcgtgccgcaaatgctggaagattttaaacaacaccccgccattcgcccgctgattagcggcggcaaactgcttgaatattccgcgcatatggtgccggagggcggtctggcaatggtgccgcagctggttaacgatggcgtgatgatcgttggtgacgccgcaggcttctgcctgaatttgggttttacagttcgcggcatggatttagccattgcatcagctcaggctgccgccacaacggtgatcgccgccaaagaacgcgcggatttctccgccagcagtctggcgcaatacaaacgtgagctggaacaaagttgtgttatgcgcgatatgcagcatttccgcaagctcccggcgctgatggaaaacccgcgcctgtttagccaatacccacgaatggtcgccgacatcatgaacgatatgttcaccattgacggcaaaccaaaccagccggtacgcaaaatgatcatgggacacgcgaagaaaattgggctgatcaacttgctgaaagatggcattaagggagcaaccgcgctatga

SEQ ID NO: 1373 - DNA, 294 bp, Escherichia coli
atgagccagaacgctacggttaacgtcgacatcaaattaggcgtcaataaattccatgttgatgagggccacccgcatatcattttggcggcaaatcccgatatcaatgaattccgtaaattaatgaaagcttgccctgccggactttataagcaggatgacgcaggaaacattcatttcgattccgccggttgtctggagtgcggcacctgtcgggtgctgtgcggcaacactattctcgaacagtggcaatatcccgcaggcaccttcggtattgaatttcgctacggctaa

SEQ ID NO: 1374 - DNA, 1647 bp, Escherichia coli
atgaaagtgacattaacgttcaacgaacaacgtcgtgcggcgtatcgtcagcaagggttatggggcgatgcttcactggccgattactggcagcagaccgctcgtgcgatgccagacaaaattgccgtggtcgacaatcatggtgcaacgtacacctatagcgcgctcgatcacgccgcgagctgtctggcaaactggatgttagcgaagggtattgaatcaggcgatcgcatcgcatttcaactgccaggctggtgtgaatttaccgttatctatcttgcctgcctgaaaaccggtgcggtttccgtgccgctgttaccttcctggcgggaagcagaactggtgtgggtgctcaataagtgtcaggcaaaaatgttctttgcaccgacgttgtttaaacaaacgcgtccggtagatttaatcctgccgctgcaaaatcagcttccacaactacaacaaattgtcggcgtggacaaactggctcccgccacctcttccctctcattaagtcagattctcgccgacaatactcctctgaccacggcgataacggtccacggcgatgaattagccgctgtgctatttacatccggaaccgagggtctgccaaagggtgtgatgctaacgcataacaatattctcgccagtgagcgggcttattgcgcgcggctaaatctgacctggcaggatgtctttatgatgcctgcgccacttggtcacgcaacgggctttctgcatggcgtaacagcaccttttttgattggtgctcgcagcgtgttgttagatattttcactcctgatgcgtgtctcgcgctgcttgagcagcagcgttgcacctgtatgctcggcgcaacgccgtttgtctatgatcttttgaatttactagagaaacaacccgcagacctttcagcgctgcgcttctttctttgcggaggtaccacaatccccaaaaaagtggcgcgagaatgccagcagcgcggcattaaattattaagtgtttatggttccacagaaagttcgccgcatgcggtggtgaatctcgacgatcctttgccgcgctttatgcacaccgacggttacgctgccgcaggtgtagagattaaagtggtcgatgacgcacgcaagactttaccgccaggttgcgaaggtgaagaagcctcgcgtggccccaatgtgtttatggggtattttgatgaacctgaattaaccgcccgtgccctggatgaagaaggctggtattacagcggcgatctctgccgcatggatgaggctggctatataaaaataaccgggcgcaagaaagatattattgtccgcggcggcgaaaatattagcagccgtgaagtggaagatattttattacagcatcctaaaattcacgatgcctgtgtggttgcgatgcccgatgaacgcttaggtgaacgatcatgcgcttatgtcgtgctgaaagcgccgcatcattcattatcgctggaagaggtggtggctttttttagccgtaaacgggtcgcgaaatataaatatcctgaacatatcgtggtaatcgaaaaactaccgcgcactgtctcaggtaaaatacaaaagtttttgttaaggaaagatattatgcggcgattaactcaggatgtctgtgaagagattgaataa

SEQ ID NO: 1375 - DNA, 2379 bp, Escherichia coli
atgtccaacaatggctcgtcaccgctggtgctttggtataaccaactcggcatgaatgatgtagacagggttgggggcaaaaatgcctccctgggtgaaatgattactaacctttccggaatgggtgtttccgttccgaatggtttcgccacaaccgccgacgcgtttaaccagtttctggaccaaagcggcgtaaaccagcgcatttatgaactgctggataaaacggatattgacgatgttacccagcttgcgaaagcgggcgcgcaaatccgccagtggattatcgacactcccttccagcctgagctggaaaacgccatccgcgaagcctatgcacagctttccgccgatgacgaaaacgcttcgtttgcggtgcgttcctccgctactgcagaagatatgccggacgcttcttttgccggtcagcaggaaactttcctcaacgttcagggttttgacgccgttctcgtggcagtgaagcatgtatttgcttctctgtttaacgatcgcgccatctcttatcgtgtgcaccagggttacgaccatcgtggcgtagcgctctccgccggtgttcagcggatggtgcgctccgacctcgcatcttctggcgtgatgttctccattgataccgaatctggctttgaccaggtggtgtttatcacttccgcatggggccttggtgaaatggtcgtgcagggtgcggttaacccggatgagttttatgtgcataaaccgacacttgcggcgaatcgcccggctatcgtgcgccgcaccatggggtcgaaaaaaatccgcatggtttacgcgccgacccaggagcacggcaagcaggttaaaatcgaagacgtaccgcaggaacagcgtgacatcttctcgctgaccaacgaagaagtgcaggaactggcaaaacaggccgtacaaattgagaaacactacggtcgcccgatggatattgagtgggcgaaagatggccacaccggcaaactgttcattgtgcaggcgcgtccggaaaccgtgcgctcacgcggtcaggtcatggagcgttatacgctgcattcacagggtaagattatcgccgaaggccgtgctatcggtcatcgcatcggcgcgggtccggtgaaagtcatccatgacatcagcgaaatgaaccgcatcgaacctggcgacgtgctggttactgacatgaccgacccggactgggaaccgatcatgaagaaagcatctgccatcgtcaccaaccgtggcggtcgtacctgtcacgcggcgatcatcgctcgtgaactcggcattccggcggtagtgggctgtggtgatgcaacagaacggatgaaagacggcgagaacgtcactgtttcttgtgccgaaggtgataccggttacgtctatgcggagttgctggaatttagcgtgaaaagctccagcgtagaaacgatgccggacctgccgttgaaggtgatgatgaacgtcggtaacccggaccgagctttcgacttcgcctgtctgccgaacgaaggcgtgggacttgcgcgtctggaatttatcatcaaccgtatgattggcgtccacccacgcgcgctgcttgagtttgacgatcaagaaccgcagttgcaaaacgaaatccgcgagatgatgaaaggttttgattctccgcgtgaattttacgttggtcgtctgactgaagggatcgcgacgctgggtgccgcgttttatccgaagcgcgtcattgtccgtctctctgattttaaatcgaacgaatatgccaacctggtcggtggtgagcgttacgagccagatgaagagaacccgatgctcggcttccgtggcgcgggccgctatgtttccgacagcttccgcgactgcttcgcgctggagtgtgaagcagtgaaacgtgtgcgcaacgacatggggctgaccaacgttgagatcatgatcccgttcgtgcgtaccgtagatcaggcgaaagcggtggttgaggaactggcgcgtcaggggctgaaacgtggcgagaacgggctgaaaatcatcatgatgtgtgaaatcccgtccaacgccttgctggccgagcagttcctggaatatttcgacggcttctcaattggctcaaacgacatgacgcagctggcgctcggtctggatcgtgactccggcgtggtatctgaactgttcgatgagcgcaacgatgcggtgaaagcactgctgtcgatggcgattcgtgccgcgaagaaacagggcaaatatgtcgggatttgcggtcagggtccgtccgaccacgaagactttgccgcatggttgatggaagaggggatcgatagcctgtctctgaacccggatactgtggtgcaaacctggttaagccttgctgaactgaagaaataa

SEQ ID NO: 1376 - DNA, 834 bp, Escherichia coli
atggataatgctgttgatcgccacgttttttatatttctgatggtacggcaataactgcggaggtattaggacacgcagtaatgtcacaatttcccgtcactatcagcagcattacgctgccgtttgtcgaaaatgagagccgtgcacgggcagtgaaggatcagattgacgcaatttatcaccagacaggtgtgcgcccgctggtcttctactccatcgtgttgccggagattcgcgctatcatcttgcaaagtgaaggcttttgccaggatatcgttcaggcgctggttgccccgctacaacaagagatgaaactggatccaacgccgattgctcatcgtacccatggccttaaccctaataatctcaataaatatgatgcgcgcattgcggcgattgattacacccttgcccacgatgacggtatttcgttgcgcaatctggaccaggctcaggtgatcctgctcggtgtttctcgctgtggtaaaacccccaccagtctgtatctggcaatgcaatttggtatccgcgcggcaaattacccctttattgccgacgatatggataatctggtgctacccgcgtcgctcaaaccacttcagcacaaattgttcggcctgactatcgacccggaacgtctggcggcgattcgcgaggaacgtcgggagaacagtcgctatgcctcgcttcgtcagtgcaggatggaagtcgcggaagtggaagcgttgtaccgtaaaaatcagatcccgtggattaacagtaccaattattcggtagaagagattgccaccaagatcctcgatatcatgggccttagccgccgaatgtactag

SEQ ID NO: 1377 - DNA, 1047 bp, Escherichia coli
atgaacagaactgacgaactccgtactgcgcgtattgagagcctggtaacgcccgccgaactcgcgctacggtatcccgtaacgcctggcgtcgccacccatgtcaccgactcccgccgtagaattgaaaaaatactgaatggtgaagataagcgactgttggtcattattggcccctgctcgatccacgatctcaccgctgcgatggagtacgccacccgtctgcaatcgctgcgcaaccagtaccagtcacggctggaaatcgtaatgcgcacctattttgaaaaaccacgaacggttgtcggctggaaaggactcatctccgatccagatttaaacggtagctatcgggtaaatcacggtctggagctggcgcgcaaattacttttacaggtaaatgagctgggcgtccctaccgcgactgagttcctcgatatggtgaccggtcagtttattgctgatttaatcagttggggtgcgattggcgcacgtactaccgaaagtcagatccaccgcgaaatggcttcggcactctcctgtccggtgggttttaaaaatggtaccgatggcaacacgcggattgccgtggatgctatccgcgcagcccgcgccagccatatgttcctctcgccagacaaaaatggtcagatgaccatctatcagaccagcggcaacccgtatggccacattattatgcgtggtggcaaaaaaacgaattatcatgccgatgatatcgccgcagcctgcgatacgctgcacgagtttgatttacctgaacatctggtggtggatttcagccacggtaactgccagaagcagcaccgtcgccagttagaagtttgtgaggatatttgtcagcaaatccgcaatggctctacggcgattgctggaattatggcggaaagtttcctgcgcgaaggaacgcaaaaaatcgtcggcggtcagccgctcacttacggtcaatccattaccgacccgtgtctgggctgggaagataccgaacgcctggtcgaaaaactcgcctctgcggtagatactcgcttctga

SEQ ID NO: 1378 - DNA, 192 bp, Escherichia coli
atgcgttatacggatagcagaaaactcacgcctgaaacggatgccaatcacaagaccgcttccccgcagcccatccggcgaattaccagccagacactgttaggtccggatggcaaactgattatcgatcatgacgggcaagaatatctgctccgtaaaactcaggctggcaagctgctgttgaccaagtaa

SEQ ID NO: 1379 - DNA, 1437 bp, Escherichia coli
atgaccctgtcttttattacccgctggcgcgatgaattgccagaaacctatacagcactttcccctacgcctttaaataatgcccggctgatttggcataataccgaactggctaacacgctgagtattccatcgtcgctgtttaaaaatggcgcaggtgtctggggcggcgaaaacctactgcctggtatgtcaccactggcgcaggtttacagtggtcatcagtttggcgtctgggcgggccaactgggtgatgggcgcggcattttactcggcgaacaactgcttgctgatggcactacaatggactggcatctgaaaggtgctggcctgacgccttattcgcgaatgggtgatggacgggcggttttacgttcgacgatacgagaaagtctcgccagtgaggcgatgcattatctgggcattccgacgacccgcgctttaagtatcgtcaccagcgattcgccagtgtatcgggaaacggtggagtcaggcgcgatgctgatgcgtgtggcaccaagtcatctgcgctttggtcatttcgaacatttttactatcgccgcgagccggaaaaggttcgtcagttagctgactttgccattcgtcattactggtcacatcttgatgatgaggaggacaaataccgtctctggtttaccgatgttgtcgcacgtaccgcctcgttaattgcccaatggcagacggtcggctttgctcatggggtgatgaataccgacaacatgtcgctgctggggctgacgcttgattacgggccgtttggttttcttgatgattacgaacccggttttatttgtaatcactcggatcatcaagggcgttacagctttgataatcaacctgccgtcgcgttgtggaatttacagcgtctggcgcagacattgtcgccatttgttgccgtagatggcctgaatgaggccctggacagctatcagcaggttttgttgacgcattatggacaacggatgcggcagaaactgggcttcatgacggagcaaaaagaggataacgcgctacttaatgaattattcagtctgatggcgcgagagcgcagcgattatacccgcacattccgcatgctgagtctgaccgagcagcacagcgcggcgtcaccgctacgtgatgagtttattgatcgtgcggcatttgatgactggtttgcccgttatcgggggcgtttgcaacaagacgagattaccgatagtgagcgtcagcaactgatgcaaagcgttaacccggctctggtgttgcgcaactggttggcgcaacgggcgattgaagcggcagaaaagggtgatatgacggaattgcaccgcctgcatgaggcgttgcgaaatcctttcagcgacagagatgatgactatgtcagtcgtccacccgactggggtaaacggctggaagtcagctgctcgagttaa

SEQ ID NO: 1380 - DNA, 714 bp, Escherichia coli
atgaagatttttttggagaatctttatcattctgattgctatttcctgccgataagagataaccagcaagaccttgtcggcgttgagttaattacccatttctccagtgaagatggtacggttcgtatcccgacgagtcgggttatagcgcaacttaccgtggagcaacattggcaattattttctgaacagttggaattactaaaatcatgccaacacttttttattcaacataaactctttgcctggcttaatttaacgccacaagtggctacattattattagacagggataatttcgcaggcgaactattaaaatatccgtttattgaactgttgattaatgagaattacccgcatttcaatgaaggaaaagataatcgcgatcttttatccttatcgcaaatgtatccccttgtgttaggtaatttgggagcaggtaatagcacaatgaaagcggtttttgatggtcttttcacccgcgtcatgctggataaaagttttattcagcaacaaatcacgcatcgctccttcgaaccgtttattcgtgcgatccaggcgcaaatttccccttgttgcaattgcatcatcgcggggggcattgatacgccagaaatattggcacagattatcccctttgatttccatgctctccagggatgcctgtggcctgcggttcctataaatcagataacgacgttagttcagcgataa

SEQ ID NO: 1381 - DNA, 465 bp, Escherichia coli
atgcgtttctgccttattttgatcacagcactgtttctggccgggtgtagccaccataaagcaccgccgccaaatgccagactttctgattcgattaccgttattgccggtttgaacgaccagctacaaagctggcatggcacgccgtatcgttatggtggcatgacgcggcgcggtgtggactgttcgggatttgtggttgtgacgatgcgcgatcgtttcgatttgcagctgccccgtgaaaccaagcaacaagccgctattggcacgcaaattgataaagacgagttgctgccaggtgacctggtctttttcaaaacgggttccggacaaaatggtttgcatgtaggtatttacgataccaacaaccaatttatccacgcctctaccagcaagggagtgatgcgttcctcacttgataatgtctattggcagaaaaatttctggcaggcgagacgaatctag

SEQ ID NO: 1382 - DNA, 750 bp, Escherichia coli
atgtctattgtgatgcagttacaggatgttgcggaatctacccgcctggggccgctttctggcgaggttcgggctggggagatcctgcacctggtggggccgaatggcgcgggtaagagtaccttactggcgcgaatggccggaatgaccagcggtaagggaagcattcagttcgcggggcaaccactggaagcatggtctgcaacaaagctcgcgctgcatcgcgcctatctttcacaacagcagacgccgccgtttgcaatgccggtctggcactacctgacactgcatcagcacgataaaacgcgtaccgaactactgaatgatgtcgcaggggcgctggctcttgatgacaaactcggacgtagcaccaatcaactttccggcggtgaatggcaacgcgtacgtcttgctgcggtggtgctgcaaatcacaccacaagccaatcccgcaggccaattgctgcttcttgatgagccgatgaacagtcttgatgttgcgcaacaaagtgccttagacaaaattctgagcgcgctgtgtcagcaaggactggcgattgtgatgagcagtcacgatctcaaccacacattgcgtcatgcgcatcgggcgtggttgctaaaaggtggaaaaatgctggccagtggacgcagagaagaggtgctcacgccggcaaatctggcgcaggcctatgggatgaattttcgccgtctggatatcgaaggtcacagaatgctgatttcgaccatctga

SEQ ID NO: 1383 - DNA, 552 bp, Escherichia coli
atgcaagattccattctgacgaccgtagtgaaagatattgacggtaaagtgaccacgctggagaagtacgccggtaatgtgctgttgattgtcaatgtcgcctcaaagtgtggcttaacgccgcaatatgagcagttggagaatattcagaaagcctgggctgatcgtggttttgtggtgctgggatacccgtgtaaccagtttctggagcaagaaccgggtagcgatgaagagattaaaacttattgcaccaccacatggggggtgacgttcccgatattcagtaagattgaagttaatggcgaaggacgtcatccgctgtatcaaaaattgattgccgcagcgccgactgcagtcgcgccggaagagagcggattctatgcccgaatggtcagcaaaggtcgtgcaccgctgtaccctgatgatattttatggaattttgagaaatttttagttggcagggacggattggtcatccagcgtttttccccggatatgatgccggaagatcccattgtgatggaaagcattaaactggcgttggcaaaataa

SEQ ID NO: 1384 - DNA, 981 bp, Escherichia coli
atgctgacacttgcccgccaacaacagcgacaaaattttcgctggttattatgcctgtcagttttgatgctactggcgcttctcttaagcctttgcgccggtgaactatggattttgccaggtgactggttttctcctcgtggcgaactgttcgtctggcaaattcgcctgccacgtacgctggctgtattgctggttggtgcggcgctggctatatccggcgctgtaatgcaggcgttgtttgaaaatcctctggcagaacctggactacttggcgtctctaacggcgcaggcgtggggcttatcgccgcggtattacttgggcaagggcaactccccaactgggcgctagggctgtgtgcgattgctggcgcgcttatcatcactttaatactcttacgtttcgcccgtcgtcatctttcgaccagtcggttattgctggctggcgttgcattagggattatctgtagcgcactaatgacgtgggctatctacttttccacctctgttgatttacgtcagctgatgtactggatgatgggcggttttggcggcgtagactggcggcaaagctggctgatgctggcattgatccccgtgttgttgtggatctgttgtcagtccaggccgatgaatatgttagcacttggcgagatctcggcgcggcaactgggtttacccctgtggttctggcgcaatgtgctggtggcagcgaccggctggatgattggcgtcagtgtggcgctggcgggtgctatcggctttattggtctggtgatcccacatattctccggctgtgtggtttaaccgatcatcgcgtattacttcccggctgcgcgctggcaggggcgagcgcattgctgctggccgatattgtagcgcgcctggcattagctgccgcagagctgccaattggcgtggtcaccgcaacgttgggtgcgccggtgtttatctggttattgttaaaagcaggacgttag

SEQ ID NO: 1385 - DNA, 300 bp, Escherichia coli
atggcgcttacaaaagctgaaatgtcagaatatctgtttgataagcttgggcttagcaagcgggatgccaaagaactggttgaactgtttttcgaagagatccgtcgcgctctggaaaacggcgaacaggtgaaactctctggttttggtaacttcgatctgcgtgataagaatcaacgcccgggacgtaacccgaaaacgggcgaggatattcccattacagcacggcgcgtggtgaccttcagacccgggcagaagttaaaaagccgggtcgaaaacgcttcgcccaaagacgagtaa

SEQ ID NO: 1386 - DNA, 2388 bp, Escherichia coli
atgaaattcagtgaactgtggttacgcgaatgggtgaacccggcgattgatagcgacgcgctggcaaatcaaatcacgatggcgggcctggaagttgatggtgtagaaccggttgccggtagcttccacggcgtggtcgttggtgaagtggttgagtgtgcgcagcatccgaacgctgacaaactgcgtgtgacaaaagtgaatgtcggcggcgatcgcctgctggacatcgtctgcggtgcgccaaactgccgtcagggcctgcgtgtggcggtagcgaccattggtgctgttctgccgggtgatttcaaaattaaagccgcgaaactgcgtggcgaaccgtctgaagggatgctgtgctccttctctgagctgggaatttctgacgatcataacggcattatcgagctgcctgcggatgcgccgattggcaccgacatccgcgaatacctgaaactcgatgacaacaccatcgaaattagcgtgacgccaaaccgtgccgactgcttaggtatcattggtgttgcgcgcgacgttgccgtgttgaaccagctgccgctggttgaaccggaaatcgttccggttggtgcgaccatcgacgacacgctgccgattgcagtagaagcgccggatgcctgcccgcgctatcttggccgagtggtaaaaggcattaacgttaaagcgccaactccactgtggatgaaagaaaaactgcgtcgttgcggaatccgttctatcgatgcagttgttgacgtcaccaactatgtgctgctcgaactgggccagccgatgcacgctttcgataaagatcgcattgaaggcggcattgtggtgcggatggcgaaagagggtgaaacgctggtattgctcgatggtactgaagcgaagctgaatgctgacaccctggtcatcgccgaccacaacaaggcgctggcgatgggcggcatctttggtggcgaacactctggcgtgaatgacgaaacgcaaaacgtcctgctggaatgcgctttcttcagcccgctgtctatcaccggtcgtgctcgtcgtcatggcctgcatactgatgcgtctcaccgttatgagcgtggcgttgatccggcactgcagcacaaagcgatggaacgtgcgacccgtctgctgatcgacatctgcggtggtgaagcgggtccggtaattgatatcactaacgaagcaacgctgccgaagcgtgcaaccatcactttacgtcgtagcaaactggatcgcctgatcggccatcatattgctgatgagcaggtaacagacattctgcgtcgtctcggctgcgaagtgaccgaaggcaaagacgagtggcaggcagttgcgccgagttggcgtttcgacatggagattgaagaagatctggtcgaagaagtcgcgcgtatttacggctacaacaacatcccggatgagccggtacaggcaagcctgattatggggactcaccgtgaagctgacctgtcgctcaagcgcgtaaaaacgctgctcaacgacaaaggctatcaggaagtgatcacctatagcttcgttgatccgaaagtgcagcagatgatccatcctggcgttgaagccttactgctgccaagcccgatctctgttgaaatgtcagcaatgcgtctttccctgtggaccggcctgctggcaaccgtggtgtacaaccagaaccgtcagcagaatcgtgtacgcattttcgaaagcggtctgcgcttcgtgccagatactcaggcaccgttgggtattcgtcaggatctgatgttagccggtgtgatttgcggtaaccgttacgaagagcactggaacctggcaaaagagaccgttgatttctatgatttgaaaggcgatcttgaatccgttctcgacctgaccggtaaactgaatgaggttgagttccgtgcagaagcgaatccggcactgcatccggggcaatccgcagcgatttatctgaaaggtgaacgtattggttttgttggggttgttcatcctgaactggaacgtaaactggatctcaacggtcgcactctggtgttcgaactggagtggaacaagctcgcagaccgcgtggtgcctcaggcgcgcgagatttctcgcttcccggcgaaccgtcgtgacatcgcggtggtggtcgcagaaaacgttcccgcagcggatattttatccgaatgtaagaaagttggcgtaaatcaggtagttggcgtaaacttatttgacgtgtaccgcggtaagggtgttgcggaggggtataagagcctcgccataagcctgatcctgcaagataccagccgtacactcgaagaagaggagattgccgctaccgtcgccaaatgtgtagaggcattaaaagagcgattccaggcatcattgagggattga

SEQ ID NO: 1387 - DNA, 984 bp, Escherichia coli
atgtcacatctcgcagaactggttgccagtgcgaaggcggccattagccaggcgtcagatgttgccgcgttagataatgtgcgcgtcgaatatttgggtaaaaaagggcacttaacccttcagatgacgaccctgcgtgagctgccgccagaagagcgtccggcagctggtgcggttatcaacgaagcgaaagagcaggttcagcaggcgcttaatgcgcgtaaagcggaactggaaagcgccgcactgaatgcgcgtctggcggcggaaacgattgatgtctccctgccgggtcgtcgcattgaaaacggtgggctgcatccggtgacccgtaccatcgaccgtatcgaaagtttcttcggtgagcttggctttaccgtggcaaccgggccggaaatcgaagacgattatcataacttcgatgctctgaacatccctggtcaccacccggcgcgcgctgaccacgacactttctggtttgacgctacccgcctgctgcgtacccagacctctggcgtacagatccgcaccatgaaagcccagcagccaccgattcgtatcatcgcgcctggccgcgtttatcgtaacgactacgaccagactcacacgccgatgttccatcagatggaaggtctgattgttgataccaacatcagctttaccaacctgaaaggcacgctgcacgacttcctgcgtaacttctttgaggaagatttgcagatccgcttccgtccttcctacttcccgtttaccgaaccttctgcagaagtggacgtcatggggaaaaacggtaaatggctggaagtactgggctgcgggatggtgcatccgaacgtgctgcgtaacgttggcatcgacccggaagtttactctggttttgccttcgggatggggatggagcgtctgaccatgttgcgttacggcgtcaccgacctgcgttcattcttcgaaaacgatctgcgtttcctcaaacagtttaaataa

SEQ ID NO: 1388 - DNA, 357 bp, Escherichia coli
atggctcgcgtaaaacgtggtgttattgcacgcgcacgtcacaagaaaattttgaaacaagctaaaggctactacggtgcgcgttctcgcgtataccgcgttgccttccaggctgttatcaaagctggtcagtatgcttaccgcgaccgtcgtcaacgtaagcgtcagttccgtcaactgtggattgcgcgtatcaacgcagcagcacgtcagaacggtatttcttacagcaaattcatcaatggcctgaaaaaagcctctgttgaaatcgaccgtaagatcctggctgatatcgcagtattcgacaaagtagcgttcaccgctctggttgaaaaagcgaaagcagctctggcataa

SEQ ID NO: 1389 - DNA, 198 bp, Escherichia coli
atgccaaaaattaagaccgtacgcggtgctgctaagcgcttcaaaaaaaccggtaaaggtggttttaagcacaagcacgctaacctgcgtcacattctgaccaaaaaagcgaccaaacgtaaacgtcacctgcgtccgaaagccatggtttccaaaggcgatctgggcctggtaatcgcgtgcctgccgtacgcataa

SEQ ID NO: 1390 - DNA, 435 bp, Escherichia coli
gtgagtctgagagaagctctggagaaagcagaagaagccggagtagacttagtcgagatcagccctaacgccgagccgccggtttgtcgtataatggattacggcaaattcctctatgaaaagagcaagtcttctaaggaacagaagaaaaagcaaaaagttatccaggttaaggaaattaaattccgtcctggtacagatgaaggcgactatcaggtaaaactccgcagcctgattcgctttctcgaagagggtgataaagccaaaatcacgctgcgtttccgcggtcgtgagatggcgcaccagcaaatcggtatggaagtgcttaatcgcgtgaaagacgatttgcaagaactggcagtggtcgaatccttcccaacgaagatcgaaggccgccagatgatcatggtgctcgctcctaagaagaaacagtaa

SEQ ID NO: 1391 - DNA, 1929 bp, Escherichia coli
atgcctgttataactcttcctgatggcagccaacgccattacgaccacgctgtaagccccatggatgttgcgctggacattggtccaggtctggcgaaagcctgtatcgcagggcgcgttaatggcgaactggttgatgcttgcgatctgattgaaaacgacgcacaactgtcgatcattaccgccaaagacgaagaaggtctggagatcattcgtcactcctgtgcgcacctgttagggcacgcgattaaacaactttggccgcataccaaaatggcaatcggcccggttattgacaacggtttttattacgacgttgatcttgaccgcacgttaacccaggaagatgtcgaagcactcgagaagcggatgcatgagcttgctgagaaaaactacgacgtcattaagaagaaagtcagctggcatgaagcgcgtgaaactttcgccaaccgtggggagagctacaaagtctccattcttgacgaaaacatcgcccatgatgacaagccaggtctgtacttccatgaagaatatgtcgatatgtgccgcggtccgcacgtaccgaacatgcgtttctgccatcatttcaaactaatgaaaacggcaggggcttactggcgtggcgacagcaataacaaaatgttgcaacgtatttacggtacggcgtgggcagacaaaaaagcgcttaacgcttacctgcaacgcctggaagaagccgcgaaacgcgaccaccgtaaaatcggtaaacagctcgacctgtaccatatgcaggaagaagcgccgggtatggtattctggcacaacgacggctggaccatcttccgtgaactggaagtgtttgttcgttctaaactgaaagagtaccagtatcaggaagttaaaggtccgttcatgatggaccgtgtcctgtgggaaaaaaccggtcactgggacaactacaaagatgcaatgttcaccacgtcttctgagaaccgtgaatactgcattaagccgatgaactgcccggggcacgtacaaattttcaaccaggggctgaagtcttatcgcgatctgccgctgcgtatggccgagtttggtagctgccaccgtaacgagccgtcaggttcgctgcatggcctgatgcgcgtgcgtggttttacccaggatgacgcgcatattttctgtactgaagaacaaattcgcgatgaagttaacggatgtatccgtttagtctatgatatgtacagcacttttggcttcgagaagatcgtcgtcaaactctccactcgtcctgaaaaacgtattggcagcgacgaaatgtgggatcgtgctgaggcggacctggcggttgcgctggaagaaaacaacatcccgtttgaatatcaactgggtgaaggcgctttctacggtccgaaaattgaatttaccctgtatgactgcctcgatcgtgcatggcagtgcggtacagtacagctggacttctctttgccttctcgtctgagcgcttcttatgtaggcgaagacaatgaacgtaaagtaccggtaatgattcaccgcgcaattctggggtcgatggaacgtttcatcggtatcctgaccgaagaatttgctggtttcttcccgacttggcttgcgccagttcaggttgttatcatgaatattaccgattctcagtctgaatacgttaacgaactgacgcaaaaactatcaaatgcgggcattcgtgttaaagcagacttgagaaatgagaagattggctttaaaatccgcgagcacactttgcgtcgcgtcccatatatgctggtctgtggtgataaagaggtggaatcaggcaaagttgccgttcgcacccgccgtggtaaagaccttggaagcatggacgtaaatgaagtgatcgagaagctgcaacaagagattcgcagccgcagtcttaaacaattggaggaataa

SEQ ID NO: 1392 - DNA, 549 bp, Escherichia coli
atgagtaaaaacgatatcattatcggaactcattataagtctcctcttagaatgcacatcgatagcgacatactaacgccttcatcagagcctattaatcaatttgcgcgccagctcatcaccctacttgatacctcttatttaagttcgatgctgtcatactgtgttactcaggaatttaccgcaagctgtcgaaaaatttcacaaaattgttattccactgccctttttatcattaactttgccacttcacccatccatgcagaaaatacactcattacattacactataaaaaagaaatcatttccttattcctggaaaccacgcctattaaagctaaccatttgcgaagcatactggattatattgaacaggaacagttaactgccgaaaaacgtaaccattgcatgaaactgtccaaaaaaattcatagagaaaaaaccatacagccaacagtaaatctcaatgatagtgcattttttcgcaatctccttctgacactattttttgtcgccatccgtcattacaatacgcccttgattcattga

SEQ ID NO: 1393 - DNA, 759 bp, Escherichia coli
atgaagcttttgaagacagttcctgccatcgttatgttggcggggggcatgtttgcgtcactgaatgcagctgccgatgattccgtttttactgtcatggacgatcctgccagcgctaaaaaacctttcgaaggtaatctgaacgcaggatatcttgcacaatcaggcaatacgaaaagctcctcacttacggctgacaccactatgacctggtatggacaaaccactgcctggtcgctgtgggggaacgccagtaatacttcttctaatgatgagcgttcttcagaaaaatatgcggcgggcgggcgtagccgttttaatttaactgattatgactatttatttggtcaggcaagctggctgacagaccgttataacggctatcgagagcgcgatgtgttgaccgcgggttatggtcgccagtttttgaatggcccggtacacagtttccgctttgaattcggccctggtgtgcgttacgacaaatataccgacaatgccagtgaaacccagccgctgggctatgcctccggggcttatgcatggcagttgactgacaacgctaaatttacgcagggtgtttcggtctttggcgcggaagacacaacgctgaactccgaaagcgcattaaatgttgctattaatgaacattttggactgaaggtggcttacaacgttacatggaactctgaacctccagagtctgcaccggaacataccgatcgtcggacaaccttatcgttgggttacagcatgtaa

SEQ ID NO: 1394 - DNA, 930 bp, Escherichia coli
atggtacgtatctatacgttgacacttgcgccctctcttgatagcgcaacaattaccccgcaaatttatcccgaaggaaaactgcgctgtaccgcaccggtgttcgaacccggtggcggcggcatcaatgtcgcccgcgccattgcccatcttggaggcactgccacagcgatcttcccggcgggtggcgcgaccggcgaacatctggtttcactgttggcgcatgaaaatgtccccgtcgctactgtagaagccaaagactggacccggcagaatttacacgtacatgtggaagcaagcggtgagcagtatcgttttgttatgccaggcgcggcattaaatgaagatgagtttcgccagctcgaagagcaagttctggaaattgaatccggggccatcctggtcataagcggaagcctgccgccaggtgtgaagctggaaaaattaacccaactgatttccgctgcgcaaaaacaagggatccgctgcatcgtcgacagttctggcgaagcgttaagtgcagcactggcgattggtaacatcgagttggttaagcctaaccaaaaagaactcagtgcgctggtaaatcgcgaactcacccagccagacgatgtccgcaaagccgcgcaggaaatcgttaatagcggcaaggccaaacgggttgtcgtttccctgggtccacaaggggcgctgggcgttgatagtgaaaactgcattcaggtggtgccaccaccggtgaaaagccagagtaccgttggcgctggtgacagcatggtcggcgcgatgacacttaaactggcagaaaatgcctctcttgaagagatggtccgttttggcgtagctgcggggagtgcagccacactcaaccagggaacacgcctgtgctcccatgacgatacgcaaaaaatttacgcgtacctttcccgctaa

SEQ ID NO: 1395 - DNA, 291 bp, Escherichia coli
atggccagtggcgatcttgtccgttatgtcataaccgtcatgttgcacgaagatacattgactgaaattaacgagttgaataattacctgactcgcgacggttttttgctcaccatgacggatgatgatggcaatatccatgagctggggactaacacttttggacttatcagtacccaaagtgaagaagaaattagagaactggtttcggggcttacccaaagtgcaaccggcaaagatcctgaaatcaccatcacgacctgggaggaatggaatagcaacagaaaataa

SEQ ID NO: 1396 - DNA, 861 bp, Escherichia coli
atgtggcaggcaatcagtcgtcttttgagcgagcagttaggtgaaggcgaaatcgaactgcgtaatgaactgcctggcggagaagtccatgccgcatggcatttgcgctatgcaggacgtgactttttcgtcaaatgtgatgaaagggaactgcttcccggttttaccgccgaagccgaccaactggagttactgtcgcgtagtaaaaccgtcaccgtgcctaaggtttgggcagttggcgctgaccgtgactacagttttctggtgatggattatctcccacctcgcccgctggatgcgcatagcgcatttattcttggtcagcaaattgcgcgtttacatcaatggagcgaccaaccgcaatttggcctcgatttcgataacgcgctctccacaactccccagcccaacacctggcaacgtcgctggtcaactttttttgctgaacaacggattggctggcagctggaactggcggcagaaaaagggatcgctttcggcaatatcgatgccatcgtcgagcatattcagcagcgtctggcctcgcatcaaccgcagccttctctgttgcacggcgatttatggtccggcaactgtgcgctgggtccggatggcccgtacattttcgacccggcctgctactggggtgaccgagagtgcgacctggcgatgttaccgctgcatacagaacagccgccacaaatctatgacggctatcagtcagtatccccgctacctgccgatttccttgaacgtcaaccggtttaccaactctacacgctgttaaatcgtgcaaggttatttggcggtcagcatttggttattgctcagcagtcactggatagattattagcagcatga

SEQ ID NO: 1397 - DNA, 537 bp, Escherichia coli
atgacgtatcaacaagctggacgcattgctgttttgaaaaggattttgggttgggtgatttttatacctgcattgatctctacattgatttctttgctgaaatttatgaatacccggcaggaaaaccaggaaggcattaatgcggtcatgctcgactttactcatgtcatgatcgatatgatgcaggcgaatacgccttttttgaatctgttctggtacaactctccgacgcccaattttaatggtggcgtgaacgttatgttctgggtgattttcatcctgatttttgtcggactggcgttgcaggattccggagcccggatgagtcgccaggcgcgcttcttgcgggaaggtgttgaagatcaactcattctggaaaaagccaaaggggaagaggggctaacgcgtgaacaaattgagtcacgtattgttgttccgcaccatactattttcctgcagtttttctcgctgtatatcctgccgcttatttgtattgctgcaggttatgtgttcttttctctgcttgggtttatttaa

SEQ ID NO: 1398 - DNA, 669 bp, Escherichia coli
atgtcaaccccgcgtcagattcttgctgcaatttttgatatggatggattacttatcgactcagaacctttatgggatcgagccgaactggatgtgatggcaagcctgggggtggatatctcccgtcgtaacgagctgccggacaccttaggtttacgcatcgatatggtggtcgatctttggtacgcccggcaaccatggaatgggccaagccgtcaggaagtagtagaacaagttattgcccgtgccatttcactgattgaagagacacgtccattattgccaggtgtgcgtgaagccgttgcgttatgcaaagaacaaggtttattggtggggctggcctccgcgtcaccgttgcatatgctggaaaaagtattgaccatgtttgatttacgcgacagtttcgatgccctcgcctcggctgaaaaattgccttacagcaagccgcatccgcaagtatatctcgactgcgcagcaaaactgggggttgaccctctgacctgcgtggcactggaagattcggtaaatggcatgatcgcctctaaagcagcccgcatgcattccatcgtcgttcctgcgccagaagcgcaaaatgatccacgttttgtattagcaaacgtcaaactctcatcgctgacagaactcaccgcaaaagaccttctcggttaa

SEQ ID NO: 1399 - DNA, 591 bp, Escherichia coli
atgacggcggaaggtcaccttctcttttctattgcttgtgcggtatttgccaaaaatgccgagctgacgcccgtgctggcacagggtgactggtggcatattgtcccttccgcaatcctgacgtgtttgttaccggacatcgatcacccaaagtcgtttcttgggcagcgattaaagtggatatcaaaaccgatcgcccgcgcttttgggcatcgtggttttacccacagtctgctggcggtatttgcgctgctggcaaccttttaccttaaggttcctgaaagctggttcattccggctgatgcgttgcagggtatggtgctgggttatttgagccacatacttgccgatatgctgacacccgccggtgttcccctgctctggccatgccgctggcgtttccgcttgcctatcctggtttcccaaaagggcaaccaacgggaacgttttatctgcatggcattatttgtctggtcggtatggatgccccattcattacccgaaaacagcgctgttcgttggtcatcgcaaatgatcaataccttacagatccagtttcatcggcttattaagcatcaggttgaatactaa

SEQ ID NO: 1400 - DNA, 1392 bp, Escherichia coli
atgaactttccattaattgcgaacatcgtggtgttcgttgtactgctgtttgcgctggctcaaacccgccacaaacagtggagtctggcgaaaaaagtgctggtgggtcttgtgatgggtgtggtttttggccttgccctgcataccatttatggttctgacagccaggtacttaaagattctgtacagtggtttaacattgttggtaacggctatgttcaactgctgcaaatgatcgttatgccgctagtcttcgcctctattctgagcgcggttgcccgtctgcataacgcatctcagttaggcaaaatcagttttctgaccatcggtacgcttttgtttaccacgctgattgcagcgctggtcggtgtgctggtcaccaacctgtttggtttgacggctgaaggtctggttcagggtggtgcagaaactgcacgtctgaacgccatcgaaagtaactatgttggtaaagtctctgacctgagcgttccgcagctggtcttgtcctttatcccgaaaaacccgtttgccgatctgaccggagccaatccgacgtcaattatcagcgtggtaatttttgccgcattcctcggcgtagctgcgctgaaactgctgaaggatgatgcgccgaaaggtgaacgcgtcttaaccgctatcgataccctgcaaagctgggtgatgaaactggttcgcctggtcatgcagttgaccccttacggtgttctggcgctgatgaccaaagtggttgcaggttctaacctgcaagacatcatcaaactgggaagtttcgttgtcgcgtcctacctcggtctgctgattatgtttgcagtgcatggccttctgctgggcattaatggcgtgagcccgctgaagtacttccgtaaggtatggccagtactgacgtttgcctttaccagccgttccagtgctgcttctatcccactgaatgtggaagcacaaacgcgtcgtctgggtgttcctgaatccatcgccagtttcgccgcctctttcggtgcgaccattggtcagaacggttgtgccggtttgtatccggcaatgctggcggtgatggttgcgcctacggtgggcattaacccgctggacccgatgtggattgcgacgctggtcggtattgtcaccgttagttccgcaggcgttgccggtgtcggtggtggtgcaactttcgccgcactgattgtgctgcctgcgatgggcctgccggtaacactggtggcattgttaatctccgttgaaccgcttatcgacatgggccgtacggcgctaaacgttagtggctcgatgaccgctggcacgctgaccagccagtggctgaagcaaaccgataaagccattctggatagcgaagacgacgccgaactggcacaccgttaa

SEQ ID NO: 1401 - DNA, 264 bp, Escherichia coli
atgcgtttagtgaagccagtaatgaagaaaccgctccgtcagcaaaaccgccagattattagctatgtcccacgcacggaacccgcgccgccagaacatgcgataaagatggattcgtttcgagatgtctggatgctgcgtggcaaatatgttgcgtttgtactgatgggggagtcatttctgcgctcaccggcgtttactgtgcctgaatccgcccagcgttgggcaaatcagatccgccaggaaaatgaggtcgaagaataa

SEQ ID NO: 1402 - DNA, 2262 bp, Escherichia coli
atgtcgcaacataacgaaaagaacccacatcagcaccagtcaccactacacgattccagcgaagcgaaaccggggatggactcactggcacctgaagacggatctcatcgtccagcggctgaaccaacaccgcctggtgcacaacctaccgccccagggagcctgaaagcccctgatacgcgtaacgaaaaacttaattctctggaagacgtacgcaaaggcagtgaaaattatgcgctgaccactaatcagggcgtgcgcatcgccgacgatcaaaactcactgcgtgccggtagccgtggtccaactctgctggaagattttattctgcgcgagaaaatcactcactttgaccatgagcgcatcccggaacgtattgttcatgcacgcggatcagcagctcacggttatttccagccatataaaagcttaagcgatatcaccaaagcggatttcctctcagatacgaacaaaatcaccccagtatttgttaggttctctaccgttcagggcggcgctggctctgccgataccgtacgtgatatccgtggctttgccaccaagttctatactgaagagggtatttttgacctcgttggcaataacacgccaatcttctttatccaggatgcacataaattccccgattttgttcatgcggtaaaaccagaaccgcactgggcaattccacaagggcaaagcgcccacgatactttctgggattatgtttctctgcaacctgaaactctgcacaacgtgatgtgggcaatgtcggatcgcggtatcccgcgcagttaccgcactatggaaggcttcggtattcataccttccgcctgattaatgccgaagggaaggcaacgttcgtacgtttccactggaaaccactggcaggtaaagcctcactcgtttgggatgaagcacaaaaattaaccggacgtgacccggacttccaccgccgcgagttgtgggaagcgattgaagcaggcgattttcctgaatacgaactgggcttccagttgattcctgaagaagacgaattcaagttcgacttcgatcttctcgatccaaccaaacttatcccggaagaattggtgcctgttcagcgtgtcggcaaaatggtgctcaatcgtaatccggataacttctttgctgaaaacgaacaggtggctttccatccagggcatattgtccccggtctggatttcaccaacgacccgttattgcaggggcgtttgttctcttataccgatacacaaatcagtcgtcttggtgggccgaatttccatgaaattccgattaaccgcccgacctgcccttaccataatttccagcgtgacggcatgcatcgtatggggatcgacactaaccctgcgaattacgaaccgaactcgatcaacgataactggccgcgcgaaacaccgccggggccgaaacgcggcggttttgaatcataccaggaacgcgtggaaggaaataaagttcgcgagcgcagtccatcgtttggcgaatattattcccatccgcgtctgttctggctaagtcagacgccattcgagcagcgccatattgtcgatggtttcagttttgagttaagcaaagtagttcgtccgtatattcgtgagcgcgttgttgaccagctggcgcatattgatctcactctggcccaggcggtggcgaaaaatctcggtatcgaactgactgatgaccagctgaatatcaccccgcctccgaacgtcaacggtctgaaaaaggatccatccttaagtctgtacgccattcctgacggtgatgtgaaaggtcgcgtggtagcaattttgcttaatgatgaagtgagatcggcagaccttctggccattctcaaggcgctgaaggccaaaggcgttcatgccaaactgctctactcccgaatgggggaagtgactgcggatgacggtacggtgttgcctatagctgctacctttgccggtgcgccttcgctgacggtcgatgcggttattgtcccttgcggcaatatcgcggatatcgctgacaacggcgatgccaactactacctgatggaagcctacaaacaccttaaaccgattgcgctggcgggagacgcgcgcaagtttaaagcaacaatcaaggtcgctgaccagggtgacgaagggattgtggaagctgacagcgccgatggtagttttatggatgaactgttaacgctgatggcagcacaccgcgtgtggtcacgcattcctaagattgacaaaattccggcgtaa

SEQ ID NO: 1403 - DNA, 750 bp, Escherichia coli
atggaacgcttactgattgttaatgccgatgattttggcttaagcaaaggtcagaactacggcattatcgaggcctgtcgcaatgggattgtcacgtcgacgacggcgctggtgaatgggcaggctattgaccatgcggtgcagttgagccgtgatgaaccgagtctggccatagggatgcactttgtccttactatgggcaagccactgacagctatgccggggttaacccgcgatggtgtgctgggaaaatggatctggcagttggcagaagaagatgctttaccgctggaagaaattactcaggagctcgccagtcagtatttgcgtttcattgagctatttggacgcaaacctacgcatcttgatagccatcatcatgtgcatatgttcccgcagattttcccgattgttgctaggtttgcggctgaagagggcattgcgttgcgggcggatcgtcagatggtgtttgatttgccggtcaacctgcgcactacccagggattcagcagtgcattctacggtgaagagatcagtgagtcgctgttcctgcaagtgcttgatgactccagtcatcgcggcgagcgctctctggaagtgatgtgccacccggcgtttatcgataatacgattcgccagagtgcttattgcttccctcggttaacggaactggatgtgctgacttcagcgtcgttgaaatatgcgattgctgagcgtggttatcggttgggtagttatcttgatgtgtaa

SEQ ID NO: 1404 - DNA, 1353 bp, Escherichia coli
atgagccagaaattaaaagtcgtcactattggtggcgggagcagctataccccggagttactggaaggatttattaagcgttatcacgaattgccggtcagcgaattatggctggtggatgtcgaaggtggtaaagcgaaactggatattatttttgatctctgccaacggatgattgataacgctggcgtcccgatgaagctttataaaacgctggatcgccgcgaagcattgaaagatgctgatttcgttactacccaactgcgcgttggccaattaccggcgcgggaactggatgaacgtattccattaagtcatggttatcttggtcaggaaactaacggcgcgggcggtctgtttaaaggtctgcgtaccattccggtgatttttgacatcgtaaaagatgtcgaagaactatgtccgaatgcatgggtgattaacttcactaacccggcgggaatggtcactgaagccgtttatcgtcataccggatttaaacgctttatcggcgtgtgtaatattccgatcggcatgaagatgtttattcgcgatgttctgatgctgaaagacagcgatgatttatctatcgatctgttcggcctcaaccatatggtgttcattaaggatgtgctggtaaatggcaaatcacgctttgccgaattgcttgatggtgtggcatccgggcagttaaaagcatctggcgttaaaaatattttcgatctgccatttagcgaaggcttaattcgttctatgaatctgttgccgtgttcttatttgctttattacttcaagcaaaaagagatgctggctattgaaatgggcgaatactacaaaggcggcgcacgagcgcaggtagtacagaaagtcgagaaacaactttttgagctatataaaaacccggagttgaacgttaagccgaaagaactggaacagcgcggtggggcttattattctgatgctgcgtgcgaagtgatcaacgctatctataacgacaagcaagcagaacattacgttaatatcccgcatcatgggcatattgataatattccggcagactgggcggtagaaatgacctgtacgctggggcgcgatggcgcgacgccacatccgcgcattacgcatttcgatgataaagtgatggggctgattcacaccatcaaaggcttcgagattgctgccagcaacgccgcacttagtggagaatttaacgatgtcttactggcgctaaaccttagtccgttggtgcattccgatcgcgatgctgagctgctggcacgcgagatgattctggcgcacgagaaatggctgccaaattttgccgactgcatcgcagagcttaaaaaagcacattaa

SEQ ID NO: 1405 - DNA, 840 bp, Escherichia coli
atgcagccagtgattaacgcgccggaaattgccactgcccgggaacagcagttgtttaatggcaaaaacttccatgtgtttatctacaataaaactgagagtatcagcggactgcatcagcacgactattatgaatttactctggtattaaccgggcgttatttccaggagattaacggtaagcgcgtgttactggaacggggcgattttgtttttattccgttaggttcgcaccatcaaagtttttatgaatttggtgccacgcgtatattgaacgttgggatcagtaaacgcttttttgagcagcattacctgccgttgttgccttattgctttgtagcttcgcaggtataccggaccaataacgcttttctcacctatgtggaaacagtgatttcttcattgaatttccgcgaaacagggctggaagagtttgttgagatggttactttttatgtcattaaccgtttacgtcattaccgcgaagaacaggtgattgatgatataccgcagtggctgaaaagtacggtagaaaaaatgcatgataaagagcagtttagtgaatcggcgctggagaatatggtgacgttgtcagccaaatcacaggaatatttgacgcgagcgactcaacgatattatggtaaaacgccaatgcagattattaatgaaatccgtattaattttgccaaaaaacaactggaaatgaccaactattcagtgacggatattgcgtttgaggccggttatagtagcccgagcttgtttattaaaacgtttaagaaattaacgtcctttacgcctaagagctatcgtaagaaattgactgaatttaatcagtaa

SEQ ID NO: 1406 - DNA, 351 bp, Escherichia coli
atgatggatctcgataatattcccgatacgcaaacggaagctgaagagctggaagaagtggtgatggggcttatcatcaactccggacaagcgcgtagcctggcgtatgcggcactgaaacaggcgaagcagggcgattttgccgcagcaaaagcgatgatggatcagtcacggatggcattgaatgaagcgcatctggtacagacgaaactgattgaaggcgatgctggcgaaggtaagatgaaagtgagtctggtgctggtccacgctcaggatcatttaatgacgtccatgcttgcgcgtgaactgattactgaattaattgagcttcatgaaaaactgaaggcataa

SEQ ID NO: 1407 - DNA, 1359 bp, Escherichia coli
atgagtaatgttattgcatcgcttgaaaaggtactcctcccttttgcagttaaaataggaaagcagccacacgttaatgcaatcaaaaatggctttattcgcttaatgccgttaacccttgcgggggccatgtttgtattaattaacaacgtttttctaagctttggggaggggtcgtttttttattccttaggtattcgcctggatgcctcaaccattgaaacacttaatggtctgaaaggtattggcggcaacgtatataacggaacattagggataatgtctttaatggccccgttctttattggcatggcgctggcagaagagcgtaaagtcgatgcgctggcggccgggttgttatccgttgcagcatttatgaccgtcaccccatatagtgtcggtgaggcctatgcggttggcgcaaactggttaggtggggcgaatatcatctccgggattattattggcctggtggtggcagaaatgtttacctttattgttcatcgtaactgggtcattaagttatctgatagcgttccgacatcggtttcgcgctctttctcagcattaattcccggttttattattctttccgtgatggggattattgcctgggcgttgaatacctggggcaccaacttccatcagatcattatggataccatctcaaccccactggcatcgttgggtagcgtggtaggctgggcctatgtgatctttgttccactgctctggttcttcggtattcatggcgcgctggcgctgaccgcactggacaacggcattatgacgccgtgggcgctggaaaatatcgcgacctatcagcaatatggttccgtcgaagcggcgctggcagccggtaagaccttccatatctgggccaagccgatgctggactcctttattttccttggtggcagtggtgcgactttaggcctgatcctggctatctttatcgcttctcgccgtgctgattatcgtcaggtggcaaaactggcgctgccgtccggcatcttccagattaacgaaccgattctgtttggtctgccaattatcatgaacccggtgatgtttatcccgtttgtactggtacaaccgattctggcggcaatcaccctggcagcgtactacatgggcattattccaccggtgaccaatattgcaccgtggaccatgccaaccggtctgggagccttctttaacaccaacggtagcgtcgccgcattgctggtcgcactcttcaatcttggtatcgcaacgttaatttatctgccctttgttgtggtcgctaacaaagcacaaaacgcgattgataaagaagagagcgaagaagatatcgccaacgccctgaaattttaa

SEQ ID NO: 1408 - DNA, 321 bp, Escherichia coli
atggaaaagaaacacatttatctgttttgttctgcgggcatgtctacctctttactggtatcaaaaatgcgcgcacaggcagaaaaatatgaagttccggtcattattgaagcatttccggaaacactggctggtgaaaaaggtcagaatgccgatgtcgtgttattagggccgcagattgcttatatgttgcccgaaatccagcgtttgttacccaacaaaccggttgaagtaattgactcgctgctttatggcaaagtcgatggtttaggcgtgcttaaggctgcggttgcagcgattaaaaaagccgcagcaaattaa

SEQ ID NO: 1409 - DNA, 339 bp, Escherichia coli
atgaacaagaatatggcaggaattctgagtgcagcggcggtattaaccatgctggcgggttgtacggcttatgatcgtaccaaagaccagtttgtacagcctgtggtgaaagacgtcaaaaaaggcatgagccgggcgcaggttgcacaaattgcgggtaaaccttcgtctgaagtgagcatgatccatgctcgtggtacttgccagacctacatcctgggtcaacgtgatggtaaagcagaaacctactttgtcgcgttagatgataccggacatgtcatcaactccggttatcagacctgtgctgaatacgacactgatccacaggctgcgaagtaa

SEQ ID NO: 1410 - DNA, 828 bp, Escherichia coli
atgacattgcaacaacaaataataaaggcgctgggcgcaaaaccgcagattaatgctgaagaggaaattcgtcgtagtatcgattttctgaaaatctacctgcaaacttatccgttcattaaatcactggtgctcgggatcagcggcggtcaggactccacgcttgccggtaagctgtgccagatggcgattaatgagctgcgccaggaaaccggcaacgaatcactgcaatttattgccgtacgcctgccctatggtgttcaggccgacgaacaagattgccaggatgccatcgcctttattcaaccggatcgcgtattaaccgttaatatcaagggcgcggtactcgccagcgaacaggcattgcgggaagcaggcattgaactgagcgattttgtccgtggcaatgaaaaagcgcgtgagcggatgaaagcacaatatagcattgcgggtatgaccagcggtgtcgtggtgggcaccgatcatgcagcagaagccattaccggattcttcactaaatatggtgacggcggtacggacattaatccgctgtatcgtctcaacaaacgtcagggtaaacagttactggcggcattaggttgcccggaacacctttataagaaagcgccaacggccgatctggaagatgatcgcccttctctaccagatgaagtggcactcggcgtgacctatgacaatatcgacgactatctggaagggaaaaacgtacctgaacaggtcgccagaacaatagagaactggtatctgaaaaccgaacataaacgccgtccgccaattaccgttttcgatgatttctggaaaaagtaa

SEQ ID NO: 1411 - DNA, 888 bp, Escherichia coli
gtggtacggcgtttaacttctccgcggctcgaatttgaagctgcggcaatttatgaatatcccgaacatttacgttcattccttaatgacttacccacccgaccaggggtgtatctgtttcatggcgaaagtgacaccatgccgctctatatcggcaaaagcattaacatccgcagccgcgtcctttctcatttacgtaccccggatgaagccgccatgctacggcaatcccgacgcatcagctggatatgtaccgccggtgaaatcggcgctctgctccttgaagcgcgattaatcaaagaacaacagccactgtttaataaacgcttgcggcgcaatcgccagctctgtgccctgcaattaaatgaaaagcgcgtcgatgtggtgtatgccaaagaggtggatttttcacgagcccccaacctgtttggcctgtttgccaataggcgcgcagctttgcaagcattgcagaccatcgctgatgaacaaaaactttgttatggcctgttgggactggagccgttaagtcgcggtcgtgcatgttttcgttcagcgctaaaacgttgcgccggagcatgctgcggtaaagagagccatgacgatcatgcgctacgtttgcgccagtctctggaacgtttacgagtcgtttgttggccgtggaaaggtgcggtagcgctgaaagaacagcacccggaaatgactcaatatcatattattcaaaactggctgtggctgggggcggttaattcgctgaaagaagcgacaacgttaattcgggcacccgccgggtttgatcacgacggttataaaattctttgtaagccgctgctttccggtaactatgaaattactgaacttgatccggtgaatgaccagcaagccagttga

SEQ ID NO: 1412 - DNA, 576 bp, Escherichia coli
atggaatactttgatatgcgtaaaatgtcggtgaatctgtggcgaaacgctgccggtgaaacgcgcgaaatttgcactttcccaccggcaaaacgtgatttttactggcgtgccagcattacatccatcgcggcgaatggggagttttctttgtttcccggtatggaaaggatagtgacgttgctggaaggcggcgagatgttccttgaaagcgcagaccgctttaaccataccttaaaaccgttacaacctttttcctttgcagcggacctggtggtaaaagcgaaactgacggcagggcagatgtcgatggatttcaacatcatgacacgcctggatgtctgtaaggcgaaagtcagaattgccgaacgtacgtttactacctttggttcacgcggcggggtggtgtttgtaataaacggggcgtggcaattgggcgacaaactgctcactaccgaccagggcgcgtgctggttcgatggcaggcacaccctgcggcttttgcaaccgcaaggtaaactgttgttcagtgaaatcaactggcttgctggtcattcaccggatcaagttcagtaa

SEQ ID NO: 1413 - DNA, 486 bp, Escherichia coli
atgcgtaaattaactgcactgtttgttgcctctaccctggctcttggcgcggctaacctggcccatgccgcagacaccactaccgcagcaccggctgacgcgaagccgatgatgcaccataaaggcaagttcggtccgcatgaggacatgatgttcaaagacctgaacctgaccgacgcgcagaaacagcagatcagcgaaatcatgaaaggccagcgtgaccagatgaaacgtccgccgctggaagaacgccgcgcaatgcatgacatcattgccagcgataccttcgataaagcaaaagctgaagcgcagatcgcaaaaatggaagaacagcgcaaagctaacatgctggcgcacatggaaacccagaacaagatttacaacatcctgacgccggaacagaaaaagcaatttaatgctaattttgagaagcgtctgacagaacgtccagcggcaaaaggtaaaatgcctgcaactgctgaataa

SEQ ID NO: 1414 - DNA, 969 bp, Escherichia coli
atggataattttcttgctctaaccttaacgggtaaaaaaccggttatcaccgagcgagaaatcaacggcgttcgctggcgctggctgggcgatggtgtgctggaactgacgccattaacgccaccgcaaggcgcgctggtgatttcagcggggatccacggtaatgagacggcacctgtggaaatgctggacgcgttgcttggcgcgatatctcacggcgagatcccgttacgttggcggttactggtgatcctcgggaatcctcctgcgctgaagcaagggaaacgttattgccatagcgatatgaatcgaatgtttggcggtcgttggcaactgtttgctgaaagcggggaaacctgtcgggcgcgcgaactggagcagtgcctggaagatttttatgaccagggcaaagaatctgtgcgctggcaccttgatctacataccgcaattcgtggctccttgcatccgcagttcggtgtattaccgcaacgcgacattccctgggacgagaaatttctgacgtggctgggtgcggcggggctggaggcgctggtgttccatcaggagcctggtggtacgtttacccatttcagcgccagacattttggcgcgctggcctgtacgctggaacttggcaaagcgttgccctttgggcaaaacgatcttcgccagtttgcagtaactgccagcgcaattgctgcgctgctatctggtgagagtgtcggtatcgtgagaacaccgccgctccgttatcgggtggtttcgcaaattactcgtcactcgccgtccttcgaaatgcatatggcaaatgacacgctgaattttatgccgtttgagaaaggaacattgctggcgcaggacggggaggaacgttttaccgtaacccatgatgtagagtatgtgttattccctaatccgttggtagcgttgggattacgtgcgggattaatgctcgaaaaaataagctaa

SEQ ID NO: 1415 - DNA, 1344 bp, Escherichia coli
atgaacgcctgggaagtcaatttcgacgggctggtagggctgacgcaccattacgcgggcctgtcgtttggtaatgaagcctctacccgtcaccgttttcaggtgtctaacccgcgactggcggcaaaacagggcttactgaaaatgaaaaaacttgccgatgcgggattcccccaggccgtgatcccgccgcacgagcgtccgtttattccggtgctgcgtcagttgggattcagtggtagcgatgagcaggtactggaaaaagttgcacgccaggcaccgcactggctttccagcgtcagttccgcttcgccaatgtgggtagccaatgcggcaacgatcgcgccatccgccgatacgctggatggcaaagtgcatctcactgttgctaacctgaacaataaatttcaccgttcgctggaagcccccgccaccgaatcgctgttaaaagcgatttttaacgatgaagagaaattcgctgtccattcggcgttgccgcaggtggctttgctcggtgatgagggggcggcaaaccacaatcgtctcggcggtcattacggtgaaccgggtatgcaactttttgtttacgggcgagaggagggcaatgatacccggccttcccgttatccggcgcggcagacccgtgaagccagcgaggcggtggcaaggttgaatcaggtgaatccccaacaggtgattttcgcccagcaaaacccggacgttatcgaccagggcgtttttcataatgacgtgattgccgtgagtaaccgccaggtgctgttttgccatcaacaggcgttcgctcgccagtcacagttactggcaaatctgcgtgcacgggtcagtggttttatggcaatagaggtgcccacggcgcaggtttccgtgtcagatgcggtgtctacttatctgtttaacagccaactgctgagccgcgatgatggttccatgatgttggtgctgcctcaggaatgtcgggaacatgctggagtatggcgttatctcaatgaattgcttgctgctgacaacccaataagctcactaaaagtttttaatttacgtgaaagcatggcgaatggcggtggcccggcgtgcctgcggttgcgcgtggtgttgacagaagaagaacgccgggcggtgaatccggcggtgatgatgaacgatacgctgtttaatgcgctcaatgactgggtggatcgttactaccgcgatcgtcttactgcggcggatcttgccgatccacaattgctgcgcgaaggaagggaagcgctggatacactgactcaattattggatcttggttcggtttatccattccagcgcgagggagggggcaatggataa

SEQ ID NO: 1416 - DNA, 1479 bp, Escherichia coli
atgactttatggatcaacggtgactgggtaacgggccagggcgcattgcgtgtgaagcgtaatccggtatcgggcgaggtgttatggcagggcaatgatgccgatgccgctcaggtcgggcaggcttgtcgggctgcccgtgcggcgtttccgcgctgggctcggctctcatttggcgatcgtcaggtaagagttgaacgctttgccggattgctggaaagcaataaagccgaattaaccgcgattattgccagagaaaccggcaagccgcgctgggaagcggcaaccgaagtgacggcgatgatcaataaaatcgcgatatcaattaaggcgtatcacgttcgtaccggtgagcagcgtagcgaaatgccggacggcgcggcgagcctgcgacatcgcccgcacggcgtgctggcggtgtttgggccgtataatttccctggtcatttgccgaacggacatatcgttccggcattgctggcaggtaacaccattatctttaaacccagcgaactgacaccgtggagtggcgacgcggtaatgcgtttatggcagcaggctggcttgccgccgggcgtgctgaacctggtgcagggcgggcgtgcaacgggtcaggcgctgagtgcgctggaggatctcgacggcttgctgtttaccggcagcgccaataccggctaccagctgcatcgccagctttccggtcagccggagaaaattctcgcccttgagatgggcggtaataacccgctaattatcgatgaggtggcggatatcgatgccgctgtccatctgaccattcagtcggcgtttgtcactgccgggcaacgctgcacctgcgcccgccgtttatttctgaaaagtggaacgcagggcgatgcatttcttgctcgcctggttgccgtcagccagcggttaacgccgggcacttgggatgacgaaccgcagccatttattggtgggctgatttctgagcaggccgcacagcaggtggttactgcctggcaggaactggaggcgatgggcggacggaccctgcttgcgccgcgcttattacaagcagggacatcgttgctgacgccggggatcattgaaatgacaggcgttactggcttgccggatgaagaagtgttcggaccgttattgcgcgtctggcgttatgatactttcgatgaagcgattcgaatggcgaataacactcgctttggcctctcttgcggtctggtttcccccgagcgggaaaaattcgatcaactgttgctggaggcgcgggcggggattgttaactggaacaaaccgcttaccggcgctgccagtaccgcgccattcggcggcattggcgcttccggtaaccatcgccccagcgcctggtatgccgcagattattgtgcctggccgatggcgagcctggagtcggactcgttaacattgcccgccacgcttaaccctgggctggatttttccgatgaggtggtgcgatga

SEQ ID NO: 1417 - DNA, 1035 bp, Escherichia coli
atgatggtcattcgtcccgttgagcgctcagatgtctcggcgctgatgcagcttgccagcaaaacgggcggcggcctgacgtcgcttcccgccaatgaagccacgctttcggtgcgtattgaaagggcaatcaaaacctggcaaggcgaactgcccaaaagtgagcagggttatgtgtttgtactggaagatagtgagacaggcactgtggcggggatttgcgccattgaggtggcggttgggctgaacgatccctggtacaactatcgtgtcggcacgctggttcacgcttcgaaagagctgaatgtctataacgcattgccgacgctgtttctcagtaacgatcacaccggcagcagcgagctgtgcacgctgtttctcgacccggagtggcgcaaagagggcaacggctatttgctgtcgaaatcgcgctttatgtttatggcggcttttcgcgacaagtttaatgacaaagtggtcgccgaaatgcgcggggtgattgacgaacacggctattcaccgttctggcaaagcctcggtaaacgcttcttttcgatggattttagccgcgctgattttctctgcggcaccgggcaaaaggcatttattgcagaactgatgccgaaacatccgatctatacccactttttatcccaggaagcccaggacgtcatcggtcaggtacatccgcaaaccgcgcctgcccgtgcggtgctggagaaagaaggttttcgctaccgtaactatatcgacatctttgacggcgggccgacacttgaatgtgatatcgaccgcgtgcgcgccatccgtaaaagtcggctggtggaagtggccgaagggcagcctgcgcagggcgattttccggcctgcctggtcgccaatgaaaattatcaccatttccgcgtggtgctggtgcgtaccgatccagcgaccgagcgtttgattttaaccgccgcacaactggatgccctcaaatgccacgcaggggatcgcgttcgtctggtgcgcctgtgcgcagaggagaaaacagcatga

SEQ ID NO: 1418 - DNA, 1221 bp, Escherichia coli
atgtctcagccaattacgcgtgaaaactttgatgaatggatgatacctgtttacgctccggcaccgtttataccggtacgtggcgaaggttcgcgcttgtgggatcagcaggggaaagagtatatcgacttcgcgggtggcattgcggtgaacgcgctgggccatgcgcatccggaactgcgtgaggcgctgaacgaacaggcgagtaagttctggcataccggcaacggttacaccaacgagccggtactgcgactggcgaaaaaattgatcgacgccacgtttgccgatcgcgtcttcttttgtaactccggtgcggaagccaacgaagcggcgctaaaactggcgcgtaaattcgctcacgaccgctacggcagccataagagcggcatcgtggcgttcaaaaatgcgtttcatggtcgcacgctgtttactgtcagtgcgggtgggcagccagcctattcacaggattttgcgccactgccgccggatattcatcatgctgcatataacgatattaactctgccagtgcgctgattgacgacgccacctgtgcggtgattgtcgaacccatccagggggaaggcggtgtggtgccagccagcaacgcatttttacaaggtctgcgtgaattgtgtgaccgccacaatgcgttgctgatctttgatgaagtacaaaccggtgtcgggcgcaccggggaactgtatgcctatatgcactacggcgtgacgcctgatctgttaactaccgccaaagcgctgggcggcggtttcccggttggtgcgttgttggcaaccgaagagtgcgccagcgtgatgaccgttggcactcacggcaccacctatggcggcaatccgctggcctcggcggtggcaggcaaagtgctggatctcatcaacacgccagagatgcttaacggggttaaacagcgtcacgactggtttgttgagcgtctaaattccattaatcaccactacagtttgttcagtgaagttcgcggcttaggtcttttgattggctgtgtactgaatgccgattacgccgggcaagcgaaacagatctctcaggaagcggtgaaagcaggcgtgatggtgctgattgcgggtggcaacgtggtgcgctttgcgcctgcgctcaatgtcagcgaagaagaggtgacgaccggactggatcgctttgcagctgcttgcgaacactttgttagccgaggttcatcatga

SEQ ID NO: 1419 - DNA, 807 bp, Escherichia coli
atgaaatttgtctcttttaatatcaacggcctgcgcgccagacctcaccagcttgaagccatcgtcgaaaagcaccagccggatgtgattggcctgcaggagacaaaagttcatgacgatatgtttccactcgaagaggtggcgaagctcggctacaacgtgttttatcacgggcagaaaggccattacggcgtggcattgttgaccaaagagacgccgattgctgtgcgtcgcggcttccctgacgacggcgaagaggcacaacggcgaattattatggcggaaatcccctcgccgctgggtaatgtcaccgtgatcaacggttacttcccacagggcgaaagtcgcgaccatccgattaaattcccggcgaaagcgcagttttatcagaacctgcaaaactatctcgaaaccgaacttaagcgtgaaaatccggtactgattatgggcgatatgaatatcagccctacagatctggatatcggcattggcgaagaaaaccgtaagcgctggctgcgtaccggaaaatgctctttccttccggaagaacgcgaatggatggagagactgatgagctgggggttggtcgataccttccgccatgcgaatccgcaaacagccgatcgtttctcatggtttgattaccgctcaaaaggttttgacgataaccgcggtctgcgtatcgacctgcttctcgccagccaaccgctggcagaatgttgcgtagaaactggcatcgactatgaaatccgcagcatggaaaaaccgtccgatcacgcccccgtctgggcgaccttccgccgctaa

SEQ ID NO: 1420 - DNA, 711 bp, Escherichia coli
atgaacgctgagcgtaaatttctttttgcctgtcttatttttgcgctgctcatttacgctatccacgctttcggtttattcgatctgctcaccgatttacctcacttacaaacactcatccgccagagcggattgttcggttatagcctctatattttgttattcatcattgccaccctctttctgttaccaggaagcatactggtgatcgctggaggaatagtttttggcccgttcttagggacactactctcattaattgccgccacgctggcctcctcgtgctcattcctgctggcgcgctggctggggcgtgatttactgctgaaatatgtgggccatagccatacttttaaggccattgaaaaaggcattgcgcgtaacggtattgattttcttattctgacccgcttaatcccgttgtttccttacaatattcaaaattacgcttacggattaaccacaatcgccttctggccttatacccttatttcagcactcacgactctgcccggtattgttatttataccgtgatggcaagcgatctcgccaatgaaggcattacgctgcgctttattttacaactctgtctggcgggcctggcgctgtttattctcgtccagctcgccaaactctacgcccgacacaaacatgtggatctgtctgcttctcgccgcagcccactttctcacccaaaaaataaaggatag

SEQ ID NO: 1421 - DNA, 678 bp, Escherichia coli
atgttgcaacattattcagtgtcatggaaaaaaggactggctgcactctgcttactggctgttgctgggcttagcggctgcgatcaaaaagagaatgcggcggcaaaagtggaatacgacggactttcgaacagccaaccgctgcgtgtcgatgccaataaccatacggtaaccatgctggtgcaaattaatggtcgtttcctcaccgacgacactcgtcacggtattgtgtttaaagatggctccaacggacataaatcgctgtttatgggttatgcgaccccgaaagcattttatgaagccctgaaagaggcaggtggtacgccgggcgaaaacatgacgatggataataaagaaacgactcatgtcacaggcagcaaactggatatttcggtcaactggcaaggggcggcaaaagcgtattccttcgatgaagtgattgttgacagtaatggcaagaaactggacatgcgctttggcggtaatttaacggcagcagaagagaagaaaacgggttgcctggtgtgtctggatagctgcccggtcggcatcgtcagcaatgcaacatacacttatggtgcggtggaaaaacgcggcgaagtgaaattcaaaggcaatgcctcagttcttccggcggataacacgctggcaacggttacctttaaaatcaccgaataa

SEQ ID NO: 1422 - DNA, 705 bp, Escherichia coli
atgaagatgcaatcgcgtaaaatctggtactaccgtataaccctcatcatcctgttgttcgctgtgctgctggcatgggcgctgcttcccggcgtccatgagtttatcaatcgcagcgttgcggcgtttgccgccgtggaccaacagggtatagaacgctttattcagtcttacggcgcactagcggcagttgtctcgttcttgttgatgattttacaggccattgctgcaccgctacctgcgtttttgatcacctttgccaatgcgtcgctgtttggtgcgttctggggcggcttactgtcgtggaccagttcgatggccggcgcggcactgtgcttttttatcgccagagtgatgggccgcgaagtggtggaaaaattaaccggcaaaaccgtacttgacagtatggacggctttttcactcgttacggcaaacacaccatcctggtatgtcggttattgccttttgtccctttcgatccaatcagctatgctgccggtttgacttcaatacgttttcgctcgttttttatcgccaccgggcttggtcaattaccggcgactattgtttattcctgggcgggcagcatgttaacaggcggtactttctggtttgtcaccggactgtttattctgtttgccctgaccgtggtgatttttatggcgaagaaaatatggcttgagcgccagaagaggaatgcctga

SEQ ID NO: 1423 - DNA, 549 bp, Escherichia coli
atgggtttaccgccgcttagcaaaattcctttcattttacgtccgcaggcgtggctgcatcgtcgccattacggcgaggtgctaagcccgattcgctggtgggggcggatcccgtttatcttttatctggtgtcgatgtttgtcggctggctggagcgcaaacgctcaccgctcgatccggtagtacgatcgcttgtcagcgcgcgcattgcgcaaatgtgcctgtgtgagttttgcgtggatatcaccagtatgaaagtcgccgagcgtaccggcagcaccgataaactgctggcagtggctgactggcggcaaagcccgctctttagcgatgaagaacggctggcgctggagtacgccgaagccgcaagcgtaacgccgccaacggtcgatgatgccctgcgcgcccgactggctacgcattttgacgctcaggcgctcaccgaactgacggcattgataggcctgcaaaatctgtcagcccgttttaattctgccatggacattcccgctcaggggctgtgccgtattcctgaaaaacgttcttaa

SEQ ID NO: 1424 - DNA, 1167 bp, Escherichia coli
atgcgccattgtgggtggttgctgggattgttatcgctgttttctttggcaacacatgccagtgactggcaggaaataaaaaatgaggccaaaggacaaaccgtctggtttaacgcctggggcggcgataccgcaattaaccgctatctcgactgggttagcggcgagatgaaaacccattacgctataaacctgaagattgttcgtctcgcggatgccgcagacgcggtgaagcgcattcagaccgaagctgctgccggacgcaaaacaggcggttcggtggatctgctctgggtgaacggcgaaaacttccgcaccttaaaagaggccaatttattacaaacgggctgggcggagactctgcccaactggcgctatgtcgacacacagcttccggtgcgggaagatttttcagtgcctacagaaggggctgaatcgccctggggcggcgcacaactgacgtttatcgcccgccgcgatgttacgccacagccaccacaaacgccgcaagccttactggagtttgctaaagccaatcccggcacggttacctatccgcgcccaccggactttaccggtacggcgtttcttgaacagttgctgattatgctaacgccagatcccacagcattaaaagaagcgccggacgatgcgactttcgcccgcgtcactgcgcccttgtggcaatatcttgatgcactgcatccgtatttgtggcgcgaaggaaaggatttcccgccttcgcccgcgcggatggatgctctgctgaaagctaacacattgcgcctgtcgctgacctttaaccctgcacatgcgcagcaaaaaatcgccagcggcgatttgcctgcaagcagttacagttttggttttcgcgaggggatgattggcaacgtccatttcgtcaccattcctgccaacgcgaatgccagtgctgcggcgaaggtagttgccaatttcctgctctcacccgatgcgcaactgcgtaaagcagatcccgctgtctggggcgatccttctgttctcgatccgcaaaaactgcctgacgggcagcgcgaaacattgcaatcgagaatgccgcaggatctgccgccggtactggctgaaccgcacgcaggttgggtaaatgcgctggaacaagaatggctacaccgttacggtacgcattaa

SEQ ID NO: 1425 - DNA, 1536 bp, Escherichia coli
atggctacaccgttacggtacgcattaatctttttgctgtgggcgatgatagcggtgatttatgcaccgctgatcccggcagctctgacgctgatatcgcctgctttgtcgttgacgcactggcaggcgttatttgccgatccacagttaccgcaggcattactggcaacgctggtgtcgacaaccattgcggcggtcggggcgttgttgattgccctgctggtgattgtggcgctgtggccagggccgaaatggcagcgtatgtgcgcccgtctgccgtggctgctcgccattccccatgtggcttttgccaccagcgcccttctgatctttgctgacggagggctgctttatgactatttcccgtatttcactccgccaatggacaaattgggtattgggctgggcctcaccctggcggtaaaagaaagcgcatttctgctgtggatcttagcggcagtattgagcgaaaaacggctgttgcagcaactcattgtgctggattcgctgggctacagccgctggcaatgcctgaactggttgctgttgccctccgtcgcgtctgcgctggcaatggcgatgctggcgattgtcgcctggtcgctgtcggtcgtggatgtggcgattattcttgggccaggtaatcccccgacgctggcggtaattagctggcagtggttaactcagggcgacgccgatcaacaaacgaaaggtgcactcgccagcctgctgctgatgctgttactcgccgcctacgttttgctgggctatctgctatggcgtggctggcgacgtactattccccgcgtagatggcgttcgtaagcctgccacgcctttattgccaggcaatacgctggcgagttttttacccttaaccggtgtgctgtgtgtggttctgctggcgatcctcgcggatcagtcgacgatcaatagtgaagcgctcatcaacagcctgacaatggggctggtggcggcattcatcgctttgctcctgttactgctgtggcaggaatgggggccacagcgtcgccagttgtggctatggttgcccattttattacccgctctgcctctggtggcgggccagtacacgctggcgctatggctgaacctggatggaagctggacggcggtggtctgggggcatctgctgtgggtaatgccgtggatgctgtttatcctgcaacccgcctggcagcgcattgattcacggttaattttgattgcgcaaacactgggctggtcgcgggccaaaatcttcttttacgtaaaatgtccacttatgttgcgccctgcgctgattgccttcgcggtgggattttcagtcagtattgcgcagtatatgccgacgctgtggctgggcgcggggcgttttccgacgctcaccactgaagcggtggcattaagcagcggcggcagcaacggtattctcgccgcccaggctttatggcaactgctgttaccgcttattatttttgccctgaccgcgttagtcgcaaaatgggtaggttatgtcagacaaggactccgctaa

SEQ ID NO: 1426 - DNA, 654 bp, Escherichia coli
atgctctgcgtgaaaaatgtttcgctacgtttaccagaaagccgcttgctgacaaacgttaactttacagtagataaaggtgacattgtcacgttaatgggaccatccggctgcgggaaatccactctgttttcgtggatgattggtgcgctggccggacagttttcttgtacaggggagctatggcttaatgagcaacggattgacatgctacccaccgcacagcgtcagattggcattcttttccaggatgcactgttatttgaccagttcagcgtcgggcaaaatttactgctggcgctaccggcgacacttaaggggaatgcccgacgtaatgccgtgaatgatgcacttgagcgttcaggccttgacggagcgttccatcaggatcctgccactttgtctggcggtcagcgagcgcgcgttgctctgctgcgcgcccttctcgctcagccaaaagcgttgctactggatgagcccttcagccgtcttgatgtggccctgcgcgataattttcgccattgggtgttcagcgaaattcgcgccatggcgatccctgttgtgcaggtgacgcacgatcttcaggatgttcctcctgatagccccattctggatatggcgcagtggtcagaaaattacaacaaactgcgataa

SEQ ID NO: 1427 - DNA, 1308 bp, Escherichia coli
atgaaacgtgtttctcaaatgaccgcgctggcaatggctttagggctggcttgcgcttcttcgtgggccgctgaactggcgaagcctcttacacttgaccagcttcaacaacaaaatggcaaagcgattgatactcgccccagcgcgttttataacggctggccacaaaccttaaatggcccttccggtcatgaacctgccgccttaaacctctctgctaggtggctcgacaaaatgagcaccgaacagctcaacgagtggatcaagcaacataacctgaaagccgatgccccggtggcgctgtacggtaatgacaaagatgtcgacgccgtcaaaacgcgactgcaaaaagcaggttttacgcatatctccatcctgagtgacgcgctaagcgaaccttcccgtctgcaaaaactgccgcactttgaacagctggtatatccgcagtggctgcatgacctgcaacaaggtaaagaggttacggcgaaacctgccggtgactggaaagtcattgaagcggcctggggcgctccaaaattttaccttatcagccatattcccggcgctgactacatcgacaccaacgaagtggaaagcgaaccgctgtggaacaaagtttctgatgaacaactgaaagcgatgctggcaaaacacggcattcgccatgacaccacggtcattctgtacgggcgtgacgtatacgctgcagcgcgtgtggcgcaaattatgctttatgccggcgtgaaagatgtgcgcctgctggacggaggctggcaaacctggtccgacgcgggtctgcccgttgagcgcggtacgccaccgaaagtgaaagcggaaccggatttcggcgtgaagatcccggcacaaccgcaactgatgcttgatatggaacaagcgcgtggactgctgcatcgccaggatgcatcgctggtgagcattcgttcgtggccagaatttatcggtacgaccagcggttacagctatattaaaccaaaaggtgaaatagccggagcacgttggggacacgcaggtagcgactcgacgcatatggaagatttccataacccggatggcaccatgcgcagcgccgatgatattaccgccatgtggaaagcatggaatatcaaaccagatcagcaagtttcattctactgcggcactggctggcgcgcgtcagaaacctttatgtacgcacgcgcaatgggctggaataacgtctccgtttacgacggtggctggtacgaatggagcagcgatccaaaaaatccggtagcaaccggtgaacgcggcccggacagcagtaaataa

SEQ ID NO: 1428 - DNA, 621 bp, Escherichia coli
gtgctagaccgccatcttcatccccggattaaaccgttgttgcatcagtgcgtgcgggttcttgataaaccgggcattacgccagatggtttaacattagtgggatttgctatcggcgtgctggcactgccgtttctggcgctgggctggtatctggcggcgctaatcgtcattttgttaaacaggctgcttgatggtctggacggtgcgctggcgcggcgcagagggcttaccgacgcgggcggctttctcgatatttctctcgattttcttttttacgcgctggtgccttttgggtttatcctcgccgcaccggagcaaaacgccctggcaggcggctggctgctgtttgcgtttatcggcacgggaagcagttttctcgcttttgctgcgctggcggcgaaacatcagattgataatcccggttatgcgcataaatcgttttattatctgggcgggttaaccgaaggcagcgagacgattttgctgtttgttctgagttgcctctttccggcctgttttccgtggtttgcgtgggtatttggtgcgttgtgctggatgacgacctttacgcgggtgtggagtgggtatctgacgctgaagtcgctccagcgtcagtaa

SEQ ID NO: 1429 - DNA, 408 bp, Escherichia coli
atgaaaatgattgaagttgttgccgccatcatcgaacgtgatggcaaaattttactcgcgcaacgccctgcccagagcgatcaggcgggattatgggagtttgccggtggtaaagtcgagccggatgaaagccagcggcaggcgctggtgcgtgagttaaacgaagaactgggcatcgaagcaactgttggtgactatgttgccagccatcagcgagaagtttcggggcggattatccatcttcatgcctggcacgtacccgacttccacgggacgttacaggcacatgaacatcaggcgctggtctggtgctcacctgaagaggcgctgcaatatccgctggcccctgctgacattccattattagaggcgtttatggcttcacgcgccgccagaccagcggattag

SEQ ID NO: 1430 - DNA, 273 bp, Escherichia coli
gtgagtcgagcattgatcgccgtagtattagcatttccattaattacactggctaacccgcattatcatccggacgtggaggtaaacgtaccgccagaagtgttcagttcaggcgggcagtcagcgcagccctgtactcagtgctgcgtttatcaggatcaaaattattctgaaggggcagtaattaaagccgaaggaatactgctgcaatgccaacgggatgacaaaaccctaagcactaatccgctggtctggcggcgcgtgaagccataa

SEQ ID NO: 1431 - DNA, 1344 bp, Escherichia coli
atggatcagacatattctctggagtcattcctcaaccatgtccaaaagcgcgacccgaatcaaaccgagttcgcgcaagccgttcgtgaagtaatgaccacactctggccttttcttgaacaaaatcccaaatatcgtcagatgtcattactggagcgtctggttgaaccggagcgcgtgatccaatttcgcgtagtatgggttgatgatcgcaaccaggtgcaggtcaaccgtgcatggcgtgtgcagttcagctctgccatcggcccgtacaaaggcggtatgcgcttccatccgtcagttaacctctccattctcaaattcctcggcttcgaacaaaccttcaaaaatgccctgactactctaccgatgggcggtggtaaaggcggcagcgatttcgacccgaaaggaaaaagcgaaggcgaagttatgcgtttctgccaggcgctgatgactgaactgtatcgccacctgggcgcggatactgacgttccggcaggtgatatcggcgttggtggtcgtgaagtcggctttatggcggggatgatgaaaaagctctccaacaataccgcctgcgtcttcaccggtaagggcctttcatttggcggcagtcttattcgcccggaagctaccggctacggtctggtttatttcacagaagcaatgctaaaacgccacggtatgggttttgaaggaatgcgcgtttccgtttctggctccggcaacgtcgcccagtacgctatcgaaaaagcgatggaatttggtgctcgagtgatcactgcgtcagactccagcggcactgtagttgatgaaagcggattcacgaaagaaaaactggcgcgtcttatcgaaatcaaagccagccgcgatggtcgagtggcagattacgccaaagaatttggtctggtctatctcgaaggccaacagccgtggtctgtaccggttgatatcgccctgccttgcgccacccagaacgaactggatgttgacgccgcgcatcagcttatcgccaatggcgttaaagccgtcgccgaaggggcaaatatgccgaccaccatcgaagcgactgaactgttccagcaggcaggcgtactgtttgcaccgggtaaagcggctaatgctggcggtgtagcaacatcgggcctggaaatggcgcaaaacgctgcgcgcctgggctggaaagccgagaaagttgacgcacgtttgcatcacatcatgctggatatccaccatgcctgtgttgagcatggtggtgaaggtgagcaaaccaactacgtgcagggcgcgaacattgccggttttgtgaaggttgcggatgcgatgttaagccagggcgtgatttaa

SEQ ID NO: 1432 - DNA, 1944 bp, Escherichia coli
atgaactgctgggaaatattaggtttacaatctggtgcggaagaacgagatattaagcgtcgttatgcgcaactggtaaaaaattgccgcccggaagatgatcccgcagcctggcaacaattgcacgatgcttatgaacaggctttacgttatgacgacgaagagcagtggcaagaagaggaagaagagcaaccgatcaatatgtccaggggtattgttcatcctcgtcctgtgatgacatttcgcgcactcaacaccttttctggtcatccacttcctgatgtcactattaaatcagagggggaagtcacctggcaagccgtgctggatatgctctgtgaggagaatgaagctattcccgaacacgcccccatgcaacttgctaaggcgttatctttccttgagaaaaaagatctcagctcacgaatgtgctttgaagaagcgttattactgcatcttcatcgggtattccggccattattaactctcgctgcagcacaaacgttcagatggcatttagtcgcaggcagtcgtcaacccgtaatccagacagaaattaacgaaagttgtcttctttattatcgcatcgaaaaacaaattacccctttctttgccagtaacttgtctccactggaagaaatggaaaacgggaaggaaatggctacgatttatcaatcattaaaggataatgaagagagcctgaaatggtttgatatcgcagtattaaataaagttgctgaatttgaactatcagacaactatatggcattgttaatagagtgtttatcatattccttgcgaaaagaaaaaatgattcgcaagtggaaattaacagaacgcttcaataatttagcaatgcaacatcatagtggatataaaaagctgctaaatgccataaaattaaaaggtcttttttattatccatcttctgtataccagtcctgcttacatgctgcagagcaaggctattcgctagcctggtattctcttggcaaaatgtattacgaaggtgatgaggtttcacaggatctaaaattagcctttaactggtttacccgcgccgcgcagcataatgttatcgatgctctgtatgcgctgggtatcatgtatagcgatggaaggggcacggataagaatatttgtgaggcacgaaaatggtttttacttgctgcccaaaatggcaacacatctgcgcaatatgagcttgcccgtatctcacgctttgctgttgagccattacgaaattatgaagaagcattgcagtggtatttatctgccgccacacaaggacatgaggttgcccagtatgagttgggacaaatgtatatacaagggattggcgtggagcgcgatgaggttcaggcccatcgttggtttttgcaatcagcagaacagggatatttacatgcgcaatatcatactgccaggttgtatagcggaagtgagagtatttcacaggaccaggaaaaagcgctgtactggtttaccaaagcagcaaaaaatggggcagatggggcaggggatgccatgtatgaattggggaaatattatttaaccaacaatgatgatcctgaaaataacgcagaggctactcaatggcttactggtgcagcgcagcgtggtcgaatagaggcgatatttttgttagctgaaatgtatctgtacggtacaaaagataccataaaagatgaaaatcatgcgctgcactggtacgaaaaagcggcgcgtttagggtcgaccgaggcgcagcaccagactgcggcaatgtatgctcaggggacgggcactaaaattgataataaacaagcatggatgtggctaacaattgccggaaataacaacccctggattgaaaaagatgcgttgcgatgcttaatgtctgaacaggatattcaggatgcagaacaaacggctgcaaattgcaaacgtctgctaaggatttaa

SEQ ID NO: 1433 - DNA, 1950 bp, Escherichia coli
atgaactgctgggaaatattagctttacaaccaggtgcggaagaacgagatattaagcgtcgttatgcgcaactggtaaaaaattgccgcccggaagatgatcctgcagcctggcaacaattgcacgatgcttatgaacaggctttacgttatgacgacgaagatcagtggcaagaagaggaagaagagcagccaatcaatatgcccaggggtattgtttatcctcgtcctgtgatgacatttcgcgcacccaacaccttttctggtcatccacttcctgatgtcgctgttaaatcagagggggaagtcacctggcaagccgtgctggatatgctctgtgaggagaatgaagctacccccgaacacgcccccatgcaactttctaaggcgttatctttccttgagaaaaaagatctcagctcacgaatgtgctttgaagaagcgttattactgtatcttcatcgggtatttcggccattattaactctcgctgctgcacaaacttttagatggcatttagttgcaggcagtcgtcaacccgtaatccagacagaaattaacgaaagttgtcttctttattatcgcatcgaaaaagaaatagccagttatttttacagtacgatgtcaccttctgaagagttagaaaatggcaaggcgctgttgtcttcttatcagcaactacaagaagatgacagaagtcataaatggttcaaagtggctttattaaacctcatcaataaatatgatttatctgatgattatttaagtttaattattgagttaatagggtggtcatttcaatctgacccacaccagttctgctggcaggtatcagaacagttttatgtattgtttaatctacataaaacaggatatgaaaaaatacttttcgccttaaatcttgagcaagggaaatatcaacaatcaaaaaaattaacaagttataaacgtgccgcgcagcaaggaaattcggtgtttcaaaatgatttaggtgcaatgtattatattggcgagattatcaaaaaagactttgtgcaggcaaaatattggttcgagaaatccgcagggcaaggcaataatgatgcgttattaaatttggcgttaatgtatcgtgatggtaaaggtgtaaataaaaatccacaaaaagctatttcattatatctaaacgcggctaataaaaatcatcctctggcgcagcatagtttggcatgtatgtatcgggatggtgaaggtgtggaagttgacgatgaacaggcctttaaatggtgtcaaaaatcggcagaacaagggtacgctgaagcacaatatcaccttgccacaatgtacatagacggtcggggcgttgatgtggattatcaacaagttgtttactggctaaatttatcagcagatcagaaatatagtaaggcagagtgtacgttgggatatatgtattataaaggaacagagatccctcaagatatgacaatggcaattaatctattaaaatctgccgctgatcatggagatattgatgcagccttagttttaggtcaactttatgttcatggcagggaaggatacttgcctaaagatatccaccaggccattgcgtatttaaatcaagcccaggaaggaggcgaggaacagtccgccgagatattaggtatgatctattaccagggatttgaagaaattgcagaaaactcagctttaagttttaacatgttttttaaagcggcgtacgctggaattaaaagagcgcaaagaatgctttctattatgtatatggaaggggatggcacagataaaaattacattttgtcatgggcgtgggggataatttctgaagcatatcatgatttggagagcaatgactggttgccagaagtcagagaaagtttgtcgttgcaagatttaagccgggcgcaacggatggcgaggattctgaaaaaacgttatcaattataa

SEQ ID NO: 1434 - DNA, 1701 bp, Escherichia coli
atgattatcggtatcgacctgggtacaactaacagtttggcagctgtctggcgaaatggacaaagtgaactgatccccaatgcgttaggtaagtttttaacacccagcgtagtttgtgttgacgaagatggtatggttttgacaggggaggcagctcgtgacctgcaactcatcaaaccacaaaactgcgcatcaaattttaaacgcattatgggcacatcaaagacgttaaaactgggcggacgggaatttcgtgcggaagaactctcatcgttgatattacgtcagctaaaagaagatgcagaaaactatttgggcgaagaagtcactgaagcggtgattagtgttcccgcatattttggtgatatgcaacgtaaagcaacaaaagccgctgcgacaatggcaggcttaaatgtcgaacgtttaattaacgaaccaaccgccgctgcactggcgtatggtttgcataataaggatgatgaacatcaatttctggtattcgatttaggtggtggtacgtttgatgtctccatactggagttgtttgacaatattatggaagtacgtgccagtgccggggataactttttaggtggtgaagatattgtcgatatcctgatcgatgcatattgctcacgtcgggatcttcctgaaaatattgaatggcgtgaaccgacattccagcggcatttacgcatcgaggctgagcgtgtcaaacgcgtgctgagtgtgcgagatgaagccactttcagtgtggagattgaaggaaggcgatattactggcatctgactacagaaaaatttgaatttttattacagacctttttcgaacgagtccatatgccactggagcgggcaattcgcgatgccaaaattaatattagccaattagaccaggttgttcttgtgggtggcactacacgtatgccactgattcgcaaacttgtgacacgattatttggtcgtataccggcaatgcatttaaacccggatgaagtcattgcccagggcgcggctattcaggctgcacttaaagcgcggcacagcgaattacgagatgttgtagtgactgatgtttgcccttatacgcttggcgttgatacctctaaatcgctggggcatacccgcgaatcaggctattttgcacccgttattgagcgtaacaggagtattccttgtagtcgcgttcgtgccttttacacggcacatgatcaacaaacagaggttaattttaaaatctaccagggtgaaagcaggatggtggctgataatattttccttgcggagttgtcagtgaatgttccgccaaaaccggccggtgatgtgcgtattgatgttcgttttacgtacgacattaacggtattcttgatgtcgatatcagcgtgccactgacaggtgctaaaaatagtctggttattgaacagaatccaggggcattaacggcagaacaaatacagcagtcgttgtccaaattaagcctgttaaaaattcacccacgcgatgaacagataaaccaggcctttattgcccgtcttgataatctctatcaactcaccctggcggaaacgcgagactggataagcaattgctcccgtcatttcagttatctactcgagaagcaggatcctgatcaacttgctgattttcggactaaagttgaacctacattagactctctggaaagagaacgtctgcaatga

SEQ ID NO: 1435 - DNA, 801 bp, Escherichia coli
atgaaaaaaacattcatggtaattattgttttatcgtcactgtcacactttgcggcggctgaaagttacactgaaaaattttatcgtaaattaacaactgcagaattatcatgggctcaaaaacaagaagccttaaaggaagtcaattgcagtgagtatttaattaaaaaaacaattaccaccattgatggttttaccattttgtcggaggatatgttattcaccaaaagaccaatttttcctcaaggaaagatagtttgttctatcagtccgtataatgaagaaaataaagaattcagtttttcttcagaagagcaaggcactgttgacggcgttgcataccatttaagtcatggacgcgtagttgcaggttacatcggagacggactattttcatgggaaatggaatgcgaaaaccgtaaatcgaagaataatgatagtagtgcaaaattttgctatgtgaaagatttacagttttatgttcagtatattcctgagctgaaagaaattaacgttccgaaaggctatgttataagtcatggggagactcatttctctgctattaccaggtttatggtcgataaacaagaaatctctattaattcaaagttacctttcatctatggtgaatctgcaaaggaagtttttaaaataattaagccaacatcaacgatttcctacgttgctgttaatccattaaacaacaaagaaagcgattatgaagtttctggtaaaatgattgagcagttacctgctgcattaaaaatactggaacgtacctggtctttatacaaaaattaa

SEQ ID NO: 1436 - DNA, 1947 bp, Escherichia coli
atgcggttgtttattgccgaaaaaccgagtctggcgcgcgccattgctgatgtcctgcctaaaccgcaccggaaaggcgatggctttatcgagtgcggtaatggtcaggtggtgacctggtgtatcggtcacctgcttgagcaggcgcagccagacgcctacgacagccgctatgcgcgctggaatcttgcggatttgccaattgtcccggaaaagtggcaattacagccccgaccctccgtgactaaacaacttaatgtcatcaaacgattcctgcatgaagccagcgaaatcgttcacgccggagacccggatcgcgaagggcaactgctggtggatgaagtgctggactacctgcaactggcaccggaaaagcgccagcaggtacagcgttgtttgataaacgacctgaacccgcaggcggttgagcgggcgatcgatcgtcttcgctccaatagcgagtttgtaccgctgtgcgtttctgcactggcgcgagcccgagctgactggctgtacggcatcaatatgacccgcgcttacaccattctcggtcgcaatgccggttatcagggcgtactttccgtgggacgcgtgcagacgcccgtactcggactggtggtgcgccgcgacgaagagattgaaaacttcgtggcgaaagacttctttgaagtcaaagcacatatcgtgacacctgcagatgagcggtttaccgctatctggcaaccgagcgaagcgtgtgaaccgtaccaggatgaagaagggcgcttgttacatcgtccactggcggagcatgtggttaaccgcattagtggtcaaccagctattgtcaccagctataacgataaacgggaatcagaatccgcgccgctgcctttttcgctttcggcgttgcagattgaagcggctaaacgttttggtctgagcgcgcagaacgtgcttgatatctgccagaagctgtacgaaacgcacaagctaatcacttatccgcgttccgattgccgctatttgccagaagaacattttgccggacgccacgcggtgatgaatgctatcagcgttcatgcaccggatctgttgccgcagccagtggtagatccagatatacgcaaccgctgttgggatgacaaaaaggtcgatgcgcaccacgccatcattccgaccgcacggagttctgcgatcaacctgacggagaacgaagcgaaggtctataacctgattgcccgtcagtatttgatgcagttctgcccggatgcggtgttccgcaagtgtgttatcgaactggacattgccaaaggcaaatttgtcgctaaagcccgttttcttgctgaagcaggctggcgcacgctgttaggcagcaaagagcgcgatgaagaaaacgacggcacgccgctgcctgtggtggcgaaaggcgatgaattgttgtgcgaaaaaggcgaagtggtagagcggcaaacccagccgccacgccattttaccgatgcaacactgctttcggcgatgaccgggatcgcacgctttgtgcaggacaaagatctgaaaaagatccttcgtgcgaccgatggtctggggacagaagcaacccgtgccgggattattgaactgttgttcaagcgtggtttcctgaccaaaaaagggcgctatatccactccaccgacgccggaaaagcgctattccattcgctgccagaaatggcgacgcgaccggacatgaccgcgcactgggaatcggtgctgacgcaaatcagcgaaaagcagtgtcgctatcaggactttatgcagccgttggtggggacgctttaccaactgattgatcaggctcgtagcactccggtcagacggtttaaaggaattgtggtaccaaggaacggagacgagaaaaataaagacgtgaaaaaaagggtcaaaaaaactgcgcagaaaaaggatgctacagttaagcgtgactga

SEQ ID NO: 1437 - DNA, 1044 bp, Escherichia coli
atgagcgagaactcgattcgtttgacccaatacagccacggcgctggttgcggctgtaaaatttccccaaaagtgttggaaaccatcctgcacagtgagcaggcgaagtttgttgatccgaatttgcttgtgggtaatgaaacccgcgacgatgcggcggtgtacgatctgggcaatggcaccagcgttatcagcaccaccgacttctttatgccgatcgttgataatcctttcgattttggccgcattgcggcgactaacgccatcagcgatatcttcgcaatgggcggcaaaccgattatggcgattgcgatcctcggctggccgattaacaaactttccccggaaattgcccgcgaagtgaccgaaggtggacgctatgcatgccgtcaggcggggattgcgctggctggcggtcactccatcgatgcgccggagccgatttttggtctggcggtaacggggatcgtaccgaccgagcgggtgaagaaaaacagtaccgcacaagccggatgcaaactgttcctgacgaaaccgctggggattggcgttcttaccacggctgagaaaaaatcactgctgaaaccagaacatcagggactggcgacggaagtgatgtgccggatgaacatcgcaggcgcgtcctttgccaacatcgaaggcgtaaaagcgatgaccgacgttacgggttttggtttactggggcatttaagcgaaatgtgtcagggcgcaggtgtgcaggcgcgcgtcgactatgacgcgatcccgaaattgccgggggttgaagagtacattaagttgggcgcagtgcctggcggcaccgaacgtaactttgccagctacggtcatctgatgggtgaaatgccgcgtgaagtgcgcgatctgctgtgcgatccgcaaacttctggcggtttgctgctggcggtcatgccggaagcagaaaatgaggtcaaagctacagccgccgagtttggcattgaactgacggcgattggcgaactggtgccagcgcgcggcggtcgtgccatggttgagatccgttaa

SEQ ID NO: 1438 - DNA, 552 bp, Escherichia coli
atggatgcactcgaactattgatcaatcgccgtagcgcctcccgcctggctgaacccgcgccaacgggtgaacaactgcaaaacatcctgcgtgcgggtatgcgtgcgccggaccataagtccatgcaaccgtggcatttctttgtgattgaaggggaagggcgcgagcgtttcagcgccgtactggagcagggggcgattgctgccggtagtgataacaaagcaatcgacaaagcgcgtaatgcgccgttccgcgcaccgctcatcataacggtggtggcgaaatgcgaagaaaatcataaagtcccgcgctgggaacaggaaatgtctgcgggatgcgcggtcatggcgatgcaaatggcagcagttgcccaggggtttggcggcatctggcgcagtggtgcattaactgaaagtccggtagtgcgtgaagcattcggttgccgtgagcaggataaaattgtcggttttctctacctcggtacgccgcagttgaaagcatctacgtcgataaacgtcccggacccgacgccgtttgtgacttatttctga

SEQ ID NO: 1439 - DNA, 1857 bp, Escherichia coli
atgcgaaccctttggcgatttattgccggattttttaaatggacgtggcgtctgctgaatttcgtccgtgaaatggtacttaacctgttctttatttttctcgtgctggttggtgtggggatctggatgcaggtcagtggtggtgattcgaaagaaacggccagtcgtgccgcactgctgctggacatttctggtgtgatcgtcgataaacccgacagttctcagcggtttagtaaattaagccgccagctgcttggtgccagttccgatcgtctgcaggaaaactcactgtttgatatcgtcaacaccattcgccaggcgaaggacgaccgcaatatcaccggtattgtgatggatctgaaaaacttcgcaggcggcgaccagccgtctatgcagtacatcggcaaagctctgaaagagtttcgtgatagcgggaaaccggtttatgccgttggcgagaactacagccaggggcaatattatctcgccagtttcgccaataaaatttggctgtctccgcaaggcgtggttgatctgcacggctttgccaccaacggtctgtactacaaatcgttactggataagctgaaagtttccacccatgtgttccgcgtgggtacgtataaatctgccgttgaaccgtttattcgtgatgatatgtcgccggcagcccgcgaagctgacagccgctggattggtgagctgtggcaaaactatctgaatactgttgccgctaaccgccagatccctgctcagcaggtattccctggcgcgcaagggttgcttgagggtttaaccaaaaccggtggcgataccgcgaaatatgcgctggaaaacaagctggtcgatgcactggcatcgagtgccgaaatcgaaaaaactctgaccaaagagttcggctggagtaaaactgataaaaattatcgcgccatcagttattacgattacgcattgaaaacgccggcagataccggtgacagtatcggtgtcgtcttcgctaatggcgcaattatggatggcgaggaaactcaggggaatgttggcggtgataccactgcggcacaaatccgcgacgctcgccttgacccgaaagtgaaagcgattgttctgcgtgttaatagtcccggcggcagcgttaccgcgtctgaagtgattcgcgctgaactggcagcagcccgggcagcgggtaagcctgtggttgtatcgatgggcggcatggcggcatctggtggttactggatttccacaccagctaattacattgtggctaaccccagcaccctgacaggttctatcggtatcttcggcgtgatcaccaccgtagaaaatagtctggattcgattggtgttcatactgatggtgtctcaacttcaccgctggcagatgtttctatcaccagggcactgccgccggaagcgcagcagatgatgcagttaagcattgagaatggctataaacgctttatcacgctggttgctgatgcgcgtcattcaacgccggagcagattgataaaatcgcccagggccacgtctggaccggccaggatgcaaaagctaacgggctggtcgatagtctcggggatttcgatgatgcggtcgccaaagcagcagagctggcaaaagtgaaacagtggcatctggaatactacgttgatgaaccgaccttcttcgacaaagtgatggacaacatgtctggttctgtccgggcaatgttgccagatgcgttccaggccatgttacctgcaccgctggcctcggtagcctctaccgttaaaagtgaaagcgacaagctggccgcgtttaacgacccacaaaaccgttatgcgttttgcctgacctgcgccaacgtgcgttaa

SEQ ID NO: 1440 - DNA, 1017 bp, Escherichia coli
atgcaaaagaaatcaatttacgtcgcctacacgggcgggaccatcgggatgcagcgttccgagcagggttatattccggtgtcaggtcatctacagcgccaactggcgctgatgccggaattccatcgcccggagatgccagatttcaccattcatgaatatacgccattgatggattcttctgatatgacgccagaagactggcagcatattgctgaagatattaaagcgcactatgacgattatgatggttttgtcattctgcacggtacagacacgatggcgtataccgcctctgcactgtcgttcatgctcgagaatctcggtaaaccggtcattgtgacagggtcacaaatcccgctggctgagttacgctctgacggacaaattaatctgctgaatgcgttgtacgttgcggcgaattatcctatcaacgaagtaactctcttttttaataatcgactgtatcgtggcaaccgaaccaccaaagcacatgccgatggttttgatgcgtttgcctctccaaaccttcctccgttactggaagcaggtatccatattcgtcgtttgaatacgccacccgtcccgcacggtgaaggggcattgatcgttcatccaatcacgccgcaaccaattggcgtagtgacgatttatccggggatttctgctgacgtcgtgcgcaattttctgcgccaacctgtgaaagcattgattctgcgctcatatggcgtgggtaatgcgccacaaaacaaagccttcctgcaggaattacaagaagccagcgatcgcggtattgtggtggtcaacctgacacaatgtatgtccggtaaagtgaacatgggtggttatgccaccggtaacgccctcgcccatgccggcgttattggcggtgcagatatgactgtagaagccacgctaaccaaactgcattacctgcttagccaggaacttgatactgaaaccattcgcaaggccatgagccaaaacctgcgtggcgaactgacgccggatgattaa

SEQ ID NO: 1441 - DNA, 642 bp, Escherichia coli
atgcccccccgcgccctgttactggtcgatttacaaaatgatttctgtgctggtggcgcgctcgccgtgccggaaggtgacagtacggtggatgtcgctaaccgcctgattgactggtgccagtcgcgcggtgaagcggttatcgccagtcaggactggcacccggcgaatcacggcagttttgccagtcagcacggtgtagagccttatacgccgggccaactcgacggtttgccacaaaccttctggcccgatcactgtgtgcagaacagtgaaggcgcacaattacatccgttactgaagcaaaaagcgatcgcagcggtgttccataaaggcgaaaatcctttagttgacagttacagtgccttttttgataacggccgtcggcagaaaactgcgctcgatgactggttgcgcgctcatgtaatcaatgaattgatcgttatgggtctggctactgactattgcgttaagtttaccgtgctggacgcgttacagttaggttataaggtgaacgtgattaccgatggttgtcgtggcgtgaatatccagccacaggacagtgcgcacgcgtttatggagatgtcagcagctggggcaacgctatatacgctggcagactgggaagaaacgcaggagtaa

SEQ ID NO: 1442 - DNA, 1359 bp, Escherichia coli
atggaacaatatgatcaaattggcgcaagactggaccgcttgcctttggcccggtttcattatcgtatatttggtataataagctttagtctgttattaacgggttttttgagttactccggtaatgtcgtcttagcaaagctggtaagcaatggatggtcaaataatttcctcaatgccgcctttacctcggcattaatgtttggttatttcatcggctctcttaccggtgggtttattggtgactactttgggcggcgcagggcgtttcgcataaatcttctcatcgtcggtattgcggcaacaggggccgcttttgtccctgatatgcactggctcatcttctttcgcttcctgatgggaacaggaatgggggcgctgattatggttggctacgcctcatttacggagtttatccccgcgacggtgcgtggaaaatggtccgcgcggctctcatttgttggtaactggtcgcccatgctctctgcggcgataggcgtggtggttatcgctttttttagttggcggataatgtttctgctgggcggtattggcatactgttagcctggtttctctcaggtaaatattttattgagtcgccacgatggctggcagggaaagggcaaatcgcaggtgcagaaagccaacttcgtgaagtagagcagcaaattgaaagagagaagagtattcgtttacccccgcttactttgaaccagagcaacagcaaggttaaggtaatcaagggtaccttctggctgttgtttaaaggggaaatgttacgacgtacattagtcgcgattactgttttaattgcaatgaacatttcgctttataccatcaccgtatggataccgaccatatttgttaactccggcattgatgtcgataaatcaatattaatgactgctgttattatgattggcgctccggtaggaatatttattgcggcattaattattgatcgttttcctcgtcgattatttggctccgccttgcttattattattgccatgttaggctacatctattcaattcagactacagagtgggcgattttaatctatggtctggtgatgatcttctttttatacatgtatgtttgcttcgcgtcggcggtttatatcccggagctttggccaacgcatttacgcttgcgcggttcgggtttcgttaatgccgtcggacggatcgtcgcagtcttcacgccctatggcgttgcggcattattaacacattatgggtcgatcacggtgtttatggtgcttggtgtcatgttagtgctctgtgcgctggttctctccatttttggcatcgaaacgcggaaggtgtcgctggaagagatttctgaggtgaattaa

SEQ ID NO: 1443 - DNA, 759 bp, Escherichia coli
gtggcggcaaaagacaggattcaggcaattaagcaaatggttgccaacgataaaaaggtgacagtctcaaatttgagtgggatttttcaggtaaccgaagaaaccattcgccgcgatcttgagaagttggaagatgaaggctttttgaccagaacctatggtggtgctgttttaaatacagcgatgttgacggagaatatccatttttataagcgcgcttcatcgttttatgaagagaagcagcttattgcacgcaaggcactaccctttatcgacaataaaaccaccatggcagccgattccagtagtaccgtaatggaattgctcaaattgttacaggaccgtagtgacctgacgttgctaaccaactcggcggaagcgattcatgttctggctcagtcagaaattaaagtcgtttcaacgggtggggaactaaacaaaaatacactttcactgcaaggaagaattactaaagagatcatcagccgctaccatgtcgatatcatggtaatgagttgtaaaggtcttgatattaacagcggcgcgctggactctaatgaagcggaagctgaaatcaaaaagacaatgatccgtcaggcgacagaagttgcgttattggttgatcactctaagtttgatcgcaaagcttttgtccagttagctgactttagtcatattaattacataataactgataaatcaccgggtgcagagtggatagcattttgcaaagacaataatatccagctggtgtggtaa

SEQ ID NO: 1444 - DNA, 981 bp, Escherichia coli
atgaaaaagatacctttaggcacaacggatataacgctttcgcgaatggggttggggacatgggccattggcggcggtcctgcatggaatggcgatctcgatcgacaaatatgcattgatacgattcttgaagcccatcgttgcggcattaacctgattgatactgcgccaggatataactttggcaatagtgaagttatcgttggtcaggcgttaaaaaaactgccccgtgaacaggttgtagtagaaaccaaatgcggcattgtctgggaacgaaaagggagtttattcaacaaagttggcgatcggcagttgtataaaaacctttctccggaatctatccgcgaagaggtagaagccagcttgcaacgtctgggtattgattacatcgatatctacatgacgcactggcagtcggtgccgccattttttacgccgatagctgaaactgtcgcagtgcttaatgcgttaaaggccgaagggaaaattcgcgctataggcgctgctaacgtcgatgctgaccatatccgcgagtatctgcaacatggtgaactggatattattcaggcgaaatacagtatcctcgaccgggcaatggaaaacgaactgctgccgctatgtcgtgataatggcattgtggtacaggtctactctccgctagagcagggattgttgaccgggaccatcacgcgtgattacgttccgggcggcgctcgggcaaataaagtctggttccagcgtgaaaacatgctgaaagtgattgatatgcttgaacagtggcagccactctgtgctcgttatcagtgcacaattcccactctggcactggcgtggatattaaaacagagtgatttaatctccattcttagtggggctactgcgccggaacaggtacgtgaaaatgtcgcggcactgaatatcaacttatcggatgcagacgcaacattgatgagggaaatggcagaggccctggagcgttaa

SEQ ID NO: 1445 - DNA, 948 bp, Escherichia coli
atggataatctcgacgttatttgtataggtgccgctattgttgatattccattgcaaccggtcagtaaaaatatctttgatgtggattcttatcctcttgaaagaatcgcaatgaccaccgggggtgatgcaataaatgaagcaacaattatttctcgtctgggccatcgcacagcattaatgagtcgtattggtaaagatgccgcagggcaatttattctcgaccattgccgcaaagagaatattgatattcaaagcctgaagcaggacgtcagcatagatacctctattaacgttggactggtgacggaggatggcgagcggacctttgtcacaaaccgtaacggcagtctgtggaaattgaatattgacgatgttgattttgcgcggttttctcaggcgaaattattatcactggccagtattttcaacagtcctctattggatggtagagcgctaacagaaatttttacgcaagctaaaacccggcagatgattatctgtgccgatatgatcaaaccgcggttgaatgaaacgctgaatgatatttgcgaagcattgagttatgtcgattatctgtttcctaattttgccgaggcaaaattactcaccgggaaagagacactggatgaaattgctggctgctttcttgcgtgcggcgtaaaaacggtggtgattaaaacgggtaaagacggctgctttatcaagcgtggtgacatgacgatgaaggtgccggcggtcgcaggaataaccgctatcgacaccattggtgcgggcgataactttgcttcaggttttattgcagcactgttagaaggtaaaaatctgcgtgaatgcgcacgctttgccaatgcaacggcggctatctcggttctaagcatcggcgccaccaccggtgtaaaaaacagaaagctggtcgaacaattgctggaagaatacgaaggataa

SEQ ID NO: 1446 - DNA, 837 bp, Escherichia coli
atgctcgcagatatcagatattgggaaaacgatgccacaaataaacattatgcaattgcccattttaacgtatggaatgcagaaatgttgatgggcgttatcgacgcagccgaagaagcgaaatcaccggttattatttcttttggcacaggttttgtcggcaacacctcatttgaagatttctctcacatgatggtatcaatggcacaaaaagcaacggtgccggtaataactcattgggatcatggtcggagtatggagattattcataacgcctggactcatggtatgaattcattaatgcgtgatgcttctgcatttgatttcgaagaaaatattcgtttaaccaaagaggctgttgatttcttccatccgctgggtattccggtagaggcggaattagggcatgtcggtaatgaaaccgtttatgaggaagcgctggcaggctatcactataccgatcctgaccaggcggctgaatttgttgaacgtacgggctgtgactcattggctgtcgccatcggcaaccagcatggggtttatacgtcagagccacaattgaactttgaggtcgtcaaacgcgtacgcgatgctgtttctgttccgctggttttgcatggcgcatcagggatcagtgatgccgacattaaaactgcaatttcgttgggtattgcgaaaatcaacattcatacggagctctgtcaggccgcaatggtagcagtgaaagaaaaccaggatcagcctttcctgcatttagaacgtgaagtgcgtaaagctataaaagaacgggcattggataaaattaaactgttcggttctgatggcaaagcggaataa

SEQ ID NO: 1447 - DNA, 1044 bp, Escherichia coli
atgaaaaattcaaaagcaatattgcaggtgccgggcacaatgaaaattatttcagcagaaatacctgtgcctaaagaagatgaagttttgattaaagtggaatatgtcggtatttgtggttcagatgtacatggttttgaatcaggcccgtttattcctcctaaagacccaaatcaagaaattggcctgggtcatgaatgtgccgggacggttgtggctgtgggaagccgcgtgcgcaaatttaaaccgggggatcgggtaaatatcgaacctggcgttccttgcggtcactgtcgttactgtctggaaggcaaatataacatttgcccggacgttgattttatggcgacacaacccaactaccgcggcgcattaacgcactatctgtgtcatccggagagctttacttacaaactgccagacaatatggacacgatggaaggggcgctggtggagcctgccgcagtcgggatgcatgccgcgatgctggcagatgttaaacctggtaagaagataattattctgggagcgggttgtattggtttgatgacgttgcaagcgtgcaaatgcctgggagcaacggaaattgccgtcgttgatgtgctggaaaaacgtctgacaatggcggaacagctcggcgcgacagtggttattaacggcgcaaaagaagacactattgcacgctgtcagcaatttaccgaagacatgggcgcagatattgtttttgaaacagcgggttctgcggtcaccgttaaacaggcaccttatctggtcatgcgcggcggtaaaattatgattgttggtactgtacccggcgattcggcaatcaatttcctcaaaatcaatcgcgaagtcactatccagacggtattccgctatgccaatcgttatccggtcacgattgaagctatttcttcagggcgattcgatgtgaaatcgatggtgacgcatatttacgattatcgggatgtacaacaggcatttgaagagtcagttaacaacaaacgcgacattattaaaggcgttattaaaattagcgattaa

SEQ ID NO: 1448 - DNA, 1380 bp, Escherichia coli
atggaacagataacaaaaccgcattgtggtgcacggctggatcgcttaccggattgccgctggcattcgtcaatgtttgccatcgtcgcgtttggcttgcttgtctgctggagtaatgccgttggtggcttgatcctcgcgcagctgaaagcgttgggctggacagataattccaccactgccacattctcagcaatcacgaccgccggaatgtttctcggtgcgctggtgggcggcatcatcggtgacaaaaccggtcgcagaaatgcgtttatcctctatgaggccattcatattgcttcgatggttgtcggtgctttctcaccgaatatggatttccttattgcctgccgttttgtgatgggcgttgggctgggagctttactggttacactgtttgctggtttcaccgaatatatgcccggaagaaatcgcggaacgtggtccagtcgggtttcctttattggtaactggtcatatccgctctgttcattgattgcgatgggactcacgccgctgattagtgcagagtggaactggcgggtacaactgcttatccctgcaatattgtcacttatcgctacggcgctggcctggcgctactttcctgaatccccgcgctggctggaatcgcgcggacggtatcaggaagccgagaaagtcatgcggagtatagaagaaggcgtcatacgccagacgggtaaacctttgccgcctgtggttattgctgatgacggtaaagcaccacaagcggtgccgtattcagccttactgacaggagtattactgaaacgcgtgatattaggctcttgtgtgctgattgccatgaacgttgtgcagtacacactaattaactggttgccaacgatattcatgacccagggaattaatttaaaagactcgattgttttaaataccatgagtatgtttggcgcgccatttggtatttttattgccatgctggtgatggataaaattccgcgtaaaacaatgggtgtggggctattaatcctgattgcggtgctcggatatatctattcactgcaaaccagtatgttgctcataacgctgattggtttcttcctgattactttcgtctatatgtacgtttgctatgcctcggcagtgtatgtccctgagatctggccgacagaggccaaactccgtggctccggtctggcgaatgcggtagggcgaatcagtggtattgccgcgccttatgccgttgcagtgctgctcagtagttatggcgtaacgggagtctttattcttctgggggctgtttcaattattgtcgcaattgctatcgccaccattggaattgaaaccaaaggtgtctccgttgaaagtttaagtattgatgcagtagccaataaataa

SEQ ID NO: 1449 - DNA, 1077 bp, Escherichia coli
atgaaagcactggctcggtttggcaaggcctttggcggctacaagatgattgatgtcccacaacccattagtggcccggaagatgtcgtgattgaaattaaagccgcggcaatctgcggcgcagacatgaagcactacaatgtcgatagcggttctgatgagtttaactctatccgcggccatgagttcgcaggttgtattgcgcaggttggtgaaaaagtcaaagactggaaagtggggcaacgcgtcgtgtcggataacagcggtcacgtttgcggtgtttgcccggcctgtgaacaaggtgattttctgtgttgtacagaaaaagtaaaccttggtctggataacaatacctggggcggtggtttttccaaatattgtcttgttcctggtgaaattctcaaaattcatcgtcatgcgttgtgggaaatccctgatggtgttgattatgaggacgcagccgtacttgaccctatctgtaatgcctacaaatccatcgcgcagcaatcgaaattcctccctggtcaggatgtggtcgtcatcggcactggcccactcgggctgttctccgtacaaatggcgcggattatgggggcggtaaatatcgtcgtcgttggtctacaagaagatgtggcggtccgcttcccggttgcaaaagaactgggtgcgacggcagtagtaaatggttctaccgaagatgtggtggcgcgctgccagcaaatttgtggcaaagacaatctgggactggtgattgaatgctccggtgccaatatcgcactgaaacaagccatcgaaatgctccgtccgaacggggaagtggtacgcgttggaatgggcttcaaacctcttgatttctcgattaatgacattaccgcctggaacaaaagcatcattgggcatatggcctatgactccacctcatggcgtaacgctatcaggctattagccagcggcgcgatcaaagtcaaaccgatgatcacgcatcgtatcggcctgtcgcaatggcgcgaagggtttgatgcgatggtcgataaaactgcaatcaaagtgatcatgacttacgactttgatgaataa

SEQ ID NO: 1450 - DNA, 273 bp, Escherichia coli
atgaatcttgatgacattatcaacagcatgacgcctgaggtataccagcgtttgtcgaccgccgttgaactggggaaatggcctgatggcgttacgttgaccgaggaacaaaaagagaactgcctgcaactggtgatgctgtggcaagcccgccataataccgaagcacagcatatgacaattgacacaaatggtcagatggtcatgaagagcaaacagcagttaaaagaagattttggtatctcagcaaagcctattgccatgtttaagtaa

SEQ ID NO: 1451 - DNA, 414 bp, Escherichia coli
atggctaataaaccttcggcagaagaactgaaaaaaaatttgtccgagatgcagttctacgtgacgcagaatcatgggacagaaccgccatttacgggtcgtttactgcataacaagcgtgacggcgtatatcactgtttgatctgcgatgccccgctgtttcattcccaaaccaagtatgattccggctgtggctggcccagcttctacgaaccggtgagtgaagaatctattcgttatatcaaagacttgtcgcatggaatgcagcgcatagaaattcgttgcggtaactgcgatgcccatctgggccatgtctttcctgacgggccgcagccaacgggcgaacgttattgtgttaactctgcttctttacgcttcactgatggcgaaaacggcgaagaaatcaacggttga

SEQ ID NO: 1452 - DNA, 996 bp, Escherichia coli
atgactatcaaagtaggtatcaacggttttggccgtatcggtcgcattgttttccgtgctgctcagaaacgttctgacatcgagatcgttgcaatcaacgacctgttagacgctgattacatggcatacatgctgaaatatgactccactcacggccgtttcgacggtaccgttgaagtgaaagacggtcatctgatcgttaacggtaaaaaaatccgtgttaccgctgaacgtgatccggctaacctgaaatgggacgaagttggtgttgacgttgtcgctgaagcaactggtctgttcctgactgacgaaactgctcgtaaacacatcaccgctggtgcgaagaaagtggttatgactggtccgtctaaagacaacactccgatgttcgttaaaggcgctaacttcgacaaatatgctggccaggacatcgtttccaacgcttcctgcaccaccaactgcctggctccgctggctaaagttatcaacgataacttcggcatcatcgaaggtctgatgaccaccgttcacgctactaccgctactcagaaaaccgttgatggcccgtctcacaaagactggcgcggcggccgcggcgcttcccagaacattatcccgtcttctaccggtgctgctaaagctgtaggtaaagtactgccagaactgaatggcaaactgactggtatggcgttccgcgttccgaccccgaacgtatccgtagttgacctgaccgttcgtctggaaaaagctgcaacttacgagcagatcaaagctgccgttaaagctgctgctgaaggcgaaatgaaaggcgttctgggctacaccgaagatgacgtagtatctaccgatttcaacggcgaagtttgcacttccgtgttcgatgctaaagcgggtatcgctctgaacgacaacttcgtgaaactggtatcctggtacgacaacgaaaccggttactccaacaaagttctggacctgatcgctcacatctccaaataa

SEQ ID NO: 1453 - DNA, 885 bp, Escherichia coli
atgattaagaaaatttttgcccttccggtcatcgaacaaatctcccctgtcctctcccgtcgtaaactggatgaactggacctcattgtggtcgatcatccccaggtaaaagcctcttttgcattacagggcgcacaccttctctcgtggaaacctgcgggtgaagaagaagttctgtggttgagtaacaacacaccgttcaaaaatggcgtcgccattcgcggtggcataccggtttgctggccgtggtttggtccggctgcacaacaaggtctgcctgcgcacggttttgcccgcaacctgccgtggacgctgaaatcacatcgtgaagatgctgatggtgtagcgctgacttttgaattgacacaaagcgaagagacgaaaaaattctggccgcacgactttacgctgttagcgcatttccacgtgggtaaaacctgtgaaatcgatcttgaagcacacggcgaatttgaaactacctctgctctgcatacctactttaacgtgggtgatatcgctaaggtaagcgtcagtggactaggcgatcgcttcattgataaagtaaatgacgcgaaagaagatgtactgaccgacggtattcagaccttccctgaccgtaccgatcgcgtgtatctgaatccgcaagattgcagcgtaattaatgacgaagcgctgaatcgtattatcgccgtaggccaccagcatcatctgaacgttgtaggctggaacccaggaccggcgctttcagttagcatgggcgatatgccggatgatggctacaagacctttgtttgtgtagaaacggcttacgcttcagaaacgcaaaaagtcaccaaagagaaacctgcacatctggcgcaatccattcgcgttgcgaaacgttaa

SEQ ID NO: 1454 - DNA, 855 bp, Escherichia coli
atgcaacaaaaaatgattcaatttagtggcgatgtctcactgccagccatagggcagggaacatggtatatgggcgaagatgccagtcagcgtaaaacagaagttgctgcactacgcgcgggcattgaactcggtttaaccctcattgataccgccgaaatgtatgccgatggcggtgccgaaaaagtggttggggaagcattaatcggtctgcgtgagaacgtctttctcgtctctaaagtctatccgtggaatgctggcgggcaaaaagcgataaatgcatgcgaagccagtttacgccgtctcaatactgattatctcgatctctacttattacactggtctggcagtttcgctctcgaagagactgtcgcagcgatggaaaaattgatcgcccagggaaaaatccgccgctggggcgtttctaaccttgattatgccgatatgcaggaactctggcagctgccggggggaaatcagtgtgccactaatcaggtgctttaccatctcggttcacgagggattgagtacgatctacttccctggtgccagaaacagcagatgccggtgatggcttacagtccattagctcaggccgggcggttgcgcaatggactgttaaaaaacgcggtagtcaacgaaattgcacatgctcacaatatcagtgcggcacaagtattgttggcgtgggtaatcagccatcagggtgtgatggcgattccaaaagcggcaactgtcgcacatgtccaacaaaatgcagctgtgcttgaggttgaactttcgtcagcggaattagttatgctggataaagcgtatccggcaccaaaaggaaaaactgcgctggatatggtgtga

SEQ ID NO: 1455 - DNA, 747 bp, Escherichia coli
gtgaccaaactcaaacttctggcacttggagtgcttatcgcaacgtctgcaggcgtagcgcacgctgaaggtaaattttccctgggcgcaggcgtaggtgtcgttgaacacccatataaagattacgataccgatgtttacccagtaccggtaatcaactatgaaggcgataacttctggttccgtggcttaggtggtggttactacctgtggaatgacgcaacggacaaactttcaattaccgcttactggtcgccgctttacttcaaagctaaagacagtggcgatcaccaaatgcgtcacctggatgaccgtaagagcaccatgatggctggtctgtcttatgctcactttacccagtacggttacctgcgtaccactctggctggcgataccctggataacagcaacggcatcgtctgggatatggcctggttgtatcgttacaccaacggtggcctgaccgtgactccgggtattggtgtgcagtggaacagcgaaaaccagaacgaatactattatggcgtatcgcgcaaagagtccgctcgcagcggtctgcgtggctataacccgaacgacagctggagcccttacctggagctgagcgccagctacaacttcctcggtgactggagtgtttacggtaccgcgcgctacacccgtctgtctgatgaagttactgacagcccaatggtggataaatcctggactggcctgatttctaccgggatcacctacaaattctga

SEQ ID NO: 1456 - DNA, 1935 bp, Escherichia coli
atgaatatattcgatcactatcgccagcgatatgaagctgccaaggacgaagagttcacactgcaggagtttcttaccacttgtcggcaagatcgcagtgcttatgccaacgcggctgagcggctattgatggctattggtgagcctgtcatggtcgatacagcccaggaacccagactttctcgactcttttctaaccgggtcattgcacgttatccggcgtttgaagagttttacggcatggaagacgcgattgaacagattgtctcttatctgaaacacgcggctcaggggctggaagagaagaaacaaatcctgtatctgctggggcctgtgggtgggggtaaatcatcgcttgctgagcgactgaaatcattaatgcagctcgtaccgatttatgtattgagcgccaacggtgagcgtagcccggtcaacgatcatccgttctgtcttttcaatccgcaggaagatgcgcagattctggaaaaagagtatggcattcctcgccgttatctcggcaccatcatgtcgccatgggcggcaaaacgcctgcatgaatttggtggcgatatcactaagttccgggtagtgaaggtctggccgtcaattctgcaacaaattgctatcgccaaaacagaacccggcgatgagaacaaccaggacatctccgccctggtagggaaagtcgatattcgtaaactcgaacactacgcgcagaatgacccggacgcctacggctattccggtgcgctgtgccgcgccaatcaggggatcatggaatttgtcgagatgtttaaagcaccgataaaagtgctgcatcccttgttaaccgccacccaggaaggtaactacaacgggacggaaggtatctccgccctgccgttcaacgggattattctcgcccactcgaacgaatccgaatgggtcactttccgtaataacaaaaacaacgaagccttcctcgaccgtgtttacatcgtgaaggtgccgtattgcttgcgcatttccgaagagatcaaaatctacgagaaattgcttaatcacagtgaattgactcacgccccctgcgcccctggcacgctggaaacgctgtcacgtttttctattctttcgcgtctgaaagagccagaaaactccagcatttattcaaagatgcgggtttatgatggtgaaagtttgaaagacactgatcccaaagccaagtcgtatcaggaatatcgtgactacgccggtgtcgatgaagggatgaacggtctgtcgacgcgttttgcgtttaagatcctctcccgcgtgttcaacttcgatcatgtagaagtggcggcaaacccggtccatctgttctacgtcctggaacagcagatcgagcgcgagcagttcccgcaagagcaggcagaacgctatctggagttcctgaaaggttatctgatcccgaaatatgccgagtttatcggcaaagagatccagacggcctaccttgaatcctattcagaatatgggcagaacatttttgaccgttatgttacctacgcggatttctggattcaggatcaggagtatcgcgatccggataccgggcagttgtttgaccgcgagtctcttaacgccgagctggagaaaatcgagaaaccggcggggatcagtaatccaaaagatttccgcaacgagattgttaacttcgtactgcgagccagagccaataacagcggacgtaatccgaactggaccagctatgaaaaactgcgcacggttattgagaagaaaatgttctctaataccgaggagctgttgccggttatttcgtttaacgccaaaacgtcaaccgacgagcagaagaaacacgacgactttgtcgaccgtatgatggaaaaaggctacacccgtaaacaggtgcgtttactgtgcgaatggtatttgcgcgtacgtaaatcgtcttaa

SEQ ID NO: 1457 - DNA, 1284 bp, Escherichia coli
atgacctggtttattgaccggcgtctgaacggcaaaaataaaagcatggtgaatcgccagcgtttcttacgccgttataaagcgcaaattaaacagtcgatctccgaggccattaataagcgttcggtgactgacgtcgacagcggcgagtccgtatccattcccacggaagatattagcgaaccgatgtttcatcaggggcgtggaggcctgcgccaccgcgtgcatccgggcaatgaccatttcgtccagaacgaccgaattgaacgtccccagggtggtggcggaggttccggcagtggtcagggccaggccagccaggatggtgaaggtcaggatgaatttgtctttcagatttcgaaagatgagtatcttgatctgctctttgaagatttggccttaccgaatctgaaacaaaaccaacaacgccagctgaccgaatataaaacgcatcgggcgggttataccgctaacggcgttccggccaatatcagcgttgtacgttcattgcagaactcactggcgcggcgcacagccatgacggcgggcaagcggcgggaacttcatgcactggaagagaatttggccatcatcagcaacagtgaacctgcgcaactgctggaagaggaacggctgcgcaaagagattgctgaattgcgcgccaaaattgaacgcgttcctttcattgacactttcgatttacgttacaagaactacgaaaaacggcccgatccctccagccaggcagtgatgttttgcctgatggacgtttccggttcaatggatcagtccactaaagatatggctaaacgtttttatattctgctgtatctgttcctcagcagaacgtataagaacgtggaagtcgtatacatccgccatcatacccaggcgaaagaagtcgatgaacatgagtttttctactcgcaggaaactggcggcaccattgtttccagcgccctaaaactgatggatgaggtagtgaaagagcgttataacccggcacagtggaatatttacgcagcccaagcatcagacggcgataactgggccgatgactctccgctttgccatgaaattctggcgaaaaaaatattacccgttgttcgttattacagctatatcgaaattacacgtcgcgcgcatcagacactgtggcgagaatatgagcatctgcaatctactttcgacaactttgcgatgcagcatatccgcgaccaggatgatatttatccggtattccgtgaactgtttcataaacaaaatgcaacagctaaagactaa

SEQ ID NO: 1458 - DNA, 1476 bp, Escherichia coli
atgattcggtcaacacgtatttccctggggttattctttaattattttttatcgttaacgaaaattgatcttggtcaaaactatatatctctgccatcaataaaatccagcactcacattgctctcctttttatgatttctatgggtacacaaaaattaaaagctcaaggcttttttattttcagcttattgctgacgttaattttattttgcattactaccttatataacgaaaacacaaatgtaaaactcatcccacagatgaattacctgatggttgttgtggctttgtttttccttaacgccgtcattttccttttcatgttaatgaagtatttcactaacaaacaaattttaccaacactcattttaagccttgcatttttaagtggccttatctatttagttgaaaccattgtaattatccataaaccaatcaacggcagtacactgatccagacaaagtcgaatgatgtttctattttctatattttccgccaactcagtttcatttgtttaacctcgctggcgctcttttgttatgggaaagacaacatccttgacaacaataagaaaaaaactggcattctgttgctggcgctgattccttttttagtttttccccttctggcacacaatctgagcagttataacgctgactattctttgtatgtcgtcgattactgtccggacaaccatactgcgacctggggaatcaactatacaaaaatattggtttgtttgtgggcatttttactgttctttattatcatgcgtacacgattagccagcgaactatggccgttaatagcattattatgtctggcatcgctatgctgcaacttacttctactgactctggatgagtataattacaccatctggtatatcagtcgcgggattgaagtttccagtaaactgtttgttgtgtcttttctgatttataacatttttcaggaactgcaactctccagcaaactggcagttcatgatgtactgaccaatatttataatcggcgctactttttcaacagcgtagagtcattattgtcgcgacctgttgttaaggacttttgtgttatgctggttgatattaatcagttcaaacgcatcaatgcccaatggggacatcgtgtgggtgataaagtgctggtatcaattgtcgatattatccagcaaagcatccgccccgatgatattttagcgcgactggagggtgaggtgtttggcttgctatttaccgaactcaatagtgcccaggcaaaaatcattgcggaacgtatgcgtaaaaatgtcgaactcctgaccggctttagtaacagatatgatgttcctgaacaaatgaccatcagtattggcacggttttttcaacgggtgacacgcataatatctcgcttgtcatgactgaagcagataaagccttacgcgaagcgaaaagcgaggggggcaacaaagtgattattcatcatatttaa

SEQ ID NO: 1459 - DNA, 1491 bp, Escherichia coli
atgaaattgcaccatagaatgctccggcattttatcgccgcaagtgtcattgtgctgacatcttccttccttatttttgaacttgtcgccagcgacagagcaatgagtgcctatctgcgctatatcgtgcagagagcagactcttcctttctttatgataagtatcagaatcagagtattgccgcgcatgtgatgcgcgctctcgctgctgagcagtcggaagtgccgccagaacagcggcgcgccatctgcgaggcttttgagtctgccaataatacccatggcttaaacctgactgcccataaatacccgggcttacgcggcacactacaaaccgcatccactgactgcgacacaattgtggaagctgctgcactattacccgcttttgatcaggcagtggaaggcaaccgccaccaggatgattacggttcaggtcttgggatggccgaagagaaatttcactattatctcgatctcaatgaccgctatgtctatttttatgagccggttaatgttgagtactttgcgatgaataactggtccttcctgcagtcaggaagtattggcatcgatcgcaaagatattgaaaaagtatttaccgggcgtaccgtattatcgagcatttaccaggatcagcgtactaaacagaacgtgatgagtttactgacgccggtatatgtcgcagggcagctaaaagggattgtgctgctggatattaacaaaaacaatctgcggaatatcttttacactcatgaccgccctctcctctggcgttttctcaatgtcacgctaactgatacagattcggggcgcgacattatcatcaaccagagcgaagataatctgttccagtatgtcagttacgtccatgacttaccgggcggcattcgtgtctcgttatccattgatattctttactttatcacgtcttcgtggaaaagcgttctgttctggattttgacggcgttaattttgctgaatatggtgcggatgcacttccgtttataccaaaatgtgtcgcgagaaaatattagtgatgcgatgactggactgtataatcgcaaaattttaacccctgaactggagcagcggttgcagaaactggtgcaatccggttcttcggtgatgtttattgcaattgacatggacaagttaaagcaaataaatgacacccttggtcatcaggagggggatttagcgattacgttattagctcaggcgattaaacaatcgattcgtaaaagtgattatgccatccgactcggtggcgatgaattctgcatcattcttgtcgattcgacgccgcaaattgcagcacaactgcctgaacgtatcgaaaaacgtcttcaacatatcgcgccgcagaaagagatcggcttctcttccggtatttacgcgatgaaagaaaacgatacgttacatgatgcgtataaagcttccgatgagcgtttatatgtcaataagcagaacaaaaacagccgttcatga

SEQ ID NO: 1460 - DNA, 504 bp, Escherichia coli
atgactgaaatggctaaaggaagcgtgacgcatcagcggttaatcgctttattatcacaagaaggtgctaacttccgcgtcgttacccatgaagcggtaggtaaatgtgaagcggtgtcagaaattcgtggcaccgctttaggccagggggctaaggcactggtatgcaaagtcaaaggcaatggcgtaaatcaacatgttctggcgatcctcgctgccgatcaacaggccgatctgagccaactcgccagccatataggcggattacgcgcttcgttggccagcccggcggaagtcgatgaactcacaggctgtgtcttcggcgcgatcccccctttcagcttccatccaaaactcaaactggttgccgaccccctactcttcgaacgatttgatgaaatcgccttcaatgcaggcatgctggataaatctgttattttgaaaaccgcggattatttgcgtattgcgcaaccagaactggtcaatttccgccgcactgcgtaa

SEQ ID NO: 1461 - DNA, 447 bp, Escherichia coli
atgtttgatgtcactttgctgatcctgctcgggttagctgcgctgggctttatcagtcataacaccactgtcgccgtttcaattctggtgttgatcattgtccgcgtcacaccgttaagcacctttttcccgtggattgaaaaacaggggctaagtatcgggataatcattctgacgattggcgttatggctcccatcgccagcgggacgctaccgccctcaaccctgattcactcgtttctgaactggaaatcgctggtggcaattgcagtcggcgttattgtctcctggctgggggggcgcggcgtgacgttaatgggcagccagccgcaactggtcgccgggctgctggtgggcactgttttaggcgtggcgctgtttcgcggcgtaccggttggcccgcttattgccgcgggtctggtttcgctgattgtggggaaacagtag

SEQ ID NO: 1462 - DNA, 819 bp, Escherichia coli
atgcacaggttgaatctcaatggctatgaacccgaccgacaccatgaagccgcggtcgcattttgtattcacgccggaacggatgagttaaccagtcctgtacatcagcaccgcaaagggcagttgatactggcactacatggtgcaattacctgtacggtggaaaatgctttgtggatggtgccgccacaatatgcggtttggataccgggcggggtgaaacatagcaatcaagtgacagctaacgctgaactctgttttctgtttatcgagcccagcgcagtgacaatgccgacaacatgttgcacattgaaaatatcgcccttatgccgggaattaattttaaccctggcaaacaggacgacgactcagcgtgctgagccgatgacccgcagattaattcaggtcctgtttgatgaactccctcagcagccacaacaacagctgcacctgcccgtttcttctcatcctaaaatccgcacgatggtggagatgatggcgaaagagcccgtcgagtggggctcattggggcaatgggctggcttttttgcgatgagtgaacgcaatcttgcccggctgatagtgaaagagacggggttgagttttcgccagtggcgtcagcagttacagctgattatggcgcttcagggattagtgaaaggcgatactgtacagaaagttgctcatacgctggggtatgattcaacaacggcctttattactatgtttaagaaaggcctggggcaaacgccaggccgatatattgcgggattaactactgtttccccacaatcagcgaaaccagacccgcggcaataa

SEQ ID NO: 1463 - DNA, 1182 bp, Escherichia coli
atgacctgttcaacttcattaagcggcaaaaataggattgtccttatcgctggcattctgatgattgccacaacattacgcgtcacctttaccggcgcagcaccgttactggatacgattcgttccgcttactcgctaacgacggcgcaaaccggcttattgaccaccctgccattattagcctttgcgctaatctcaccgctggccgccccggtggcgcgacgttttggtatggaacgtagcctgtttgccgcgttacttttgatctgtgcaggtatcgcaattcgctctctcccttcgccttacttattatttggcggtacagcgatcattggcggtgggattgcattaggcaatgtcttactgccaggattaattaaacgcgatttccctcattccgtcgccagacttaccggcgcatattccctgacaatgggagctgcagcggcactgggatcggcgatggtagtgccgctggctttgaacggttttggctggcgaggcgcgttgctcatgctgatgtgttttcctctgctggctctttttttatggctgccacagtggcgaagccaacaacatgcaaatttgagcacctcacgcgccttacatactcggggtatctggcgttcgccgcttgcctggcaggtaacattgtttcttgggatcaactcactggtatattacgtgattattggctggcttccggcgatcctcatcagtcacggctatagcgaagcacaggcgggttcactgcatggtttgctgcaactagccacagcagctcccggtttgctgatcccacttttcttgcatcatgtgaaagatcagcgtggtattgcagcgttcgttgccttgatgtgcgcagtgggcgcggttgggctctgctttatgccagcacacgcgatcacctggactctgcttttcggttttggttccggcgcaacaatgatactggggttgacgttcattggtctgcgggcaagttctgcgcatcaggcggcggcactctcggggatggcacaatccgtcgggtatttgctggcagcctgtgggccgccgctgatgggtaaaatacacgatgctaacggtgactggtccgtaccactgctgggtgttgcaatactttcactactgatggcgattttcggactttgcgccgggagagacaaagaaattcgctaa

SEQ ID NO: 1464 - DNA, 348 bp, Escherichia coli
atgaatattcagtgcaaacgcgtttatgatccggctgaacagagcgatggttatcgcgtactggtcgaccgcctctggccacgcggtatcaaaaaaaccgatttagcccttgatgaatgggataaagaaatcacaccgtcaacggagctgcgcaaagcctttcacggcgaagtcgtcgattttgcaacctttcgcgagcaatatcttgcagaactggcgcaacacgagcaagaaggaaagcggctggcagacatcgccaaaaaacagccgctgaccctgctctactcagcaaaaaacaccacacagaaccatgcgctggtgctggcagactggctacgtagcttgtga

SEQ ID NO: 1465 - DNA, 255 bp, Escherichia coli
atgaaaattatcagttttgttctgccttgcttgctggtcctggctggttgttcaaccccttctcagccagaagcacctaaaccgccgcagattggtatggcaaatccggcgtcggtctattgccagcagaagggcgggacgctcattcctgtgcagacagcgcaaggggtcagcaacaattgcaaattaccgggcggtgaaacgattgatgaatgggcattgtggcgacgggaccatccggctggtgaaaaataa

SEQ ID NO: 1466 - DNA, 1026 bp, Escherichia coli
gtgtcagatcagattatcgcccgcgtctcgcaatcccttgccaaagaacagtcactggaaagtctggttcgacagcttctggagatgctggaaatggtcactgatatggagtcaacctacctgaccaaagtggatgtcgaagcgcgcctgcagcatataatgtttgcccgtaatagccagaaaatgcacatcccggagaattttaccgtctcgtgggattactcgttatgcaaacgcgccattgatgaaaactgttttttcagcgatgaagtccccgaccgttggggcgactgtgttgcggcacgcaatcttggcatcaccacatttctgagcacgccaattcacttaccggatggatcattctatggcacgctttgcgccgccagcagtgagaagcgccagtggagtgaacgcgcggaacaggtcttacagttgttcgccggactgattgcacaatatattcaaaaagaggcactggttgaacagctgcgcgaagctaatgctgcgctgattgcgcaatcgtataccgactcgttaaccgggctaccgaatcggcgggcgatttttgaaaatctgacgacgctgttttctctcgcccggcatcttaaccataagataatgatcgcgtttatcgatctggataacttcaaattaatcaatgatcgttttggtcataatagtggcgatctgtttctcattcaggttggcgagcgccttaatacgctccagcaaaatggcgaagttattggtcgtctcggcggtgatgagtttttggttgtttcactgaacaacgagaatgcggatatttcgtcgctgcgagaacgtattcaacaacaaatacgcggagaatatcacttaggtgatgttgatttgtattatcctggtgccagtcttggcatagtagaagtcgatcctgaaacgaccgatgcagacagtgccctgcatgctgccgatatcgcgatgtatcaggagaaaaaacataaacagaaaacaccttttgtcacgcattcagcgctacattcctga

SEQ ID NO: 1467 - DNA, 249 bp, Escherichia coli
atgggcattctgtcatggattatttttgggcttattgccggtattctggcgaagtggatcatgccaggtaaagatggtggtggattctttatgactatcctgctggggatagtcggtgccgtagtcggcggatggatcagcacgctgtttggctttggtaaagtcgatggcttcaattttggcagcttcgtggttgccgttattggtgcgattgttgtgctatttatctacaggaagattaaaagttaa

SEQ ID NO: 1468 - DNA, 183 bp, Escherichia coli
atgggcaaagcaacgtataccgtgaccgtcaccaataacagcaatggcgtttctgtcgattatgaaacagagacgccgatgactttgctggtgccagaagtggcggctgaagtgataaaagatctggtgaataccgtgcgttcttatgacacggaaaacgaacatgatgtttgtggttggtaa

SEQ ID NO: 1469 - DNA, 360 bp, Escherichia coli
atgctgcaaatcccacagaattatattcatacgcgctcaacgcctttctggaataaacaaactgcgcctgccggaatattcgaacgtcatcttgataaaggaacgcgcccaggggtttacccacgcctttccgttatgcatggggcggtcaaatatctcggctacgctgatgaacacagtgcagagcctgatcaggtgatccttatcgaagcggggcagtttgcggtgttccctccagaaaagtggcacaacattgaagccatgactgacgatacttatttcaacattgacttcttcgttgctcctgaagtcctgatggaaggtgcgcaacaacggaaagtcattcataacgggaaatga

SEQ ID NO: 1470 - DNA, 639 bp, Escherichia coli
gtgttcgctgaatacggggttctgaattactggacctatctggttggggccatttttattgtgttggtgccagggccaaataccctgtttgtactcaaaaatagcgtcagtagcggtatgaaaggcggttatcttgcggcctgtggtgtatttattggcgatgcggtattgatgtttctggcatgggctggagtggcgacattaattaagaccaccccgatattattcaacattgtacgttatcttggtgcgttttatttgctctatctggggagtaaaattctctacgcgaccctgaaaggtaaaaatagcgagaccaaatccgatgagccccaatacggtgccatttttaaacgcgcgttaattttgagcctgactaatccgaaagccattttgttctatgtgtcgtttttcgtacagtttatcgatgttaatgccccacatacgggaatttcattctttattctggcgacgacgctggaactggtgagtttctgctatttgagcttcctgattatttctggggcttttgtcacgcagtacatacgtaccaaaaagaaactggctaaagtgggcaactcactgattggtttgatgttcgtgggtttcgccgcccgactggcgacgctgcaatcctga

SEQ ID NO: 1471 - DNA, 1116 bp, Escherichia coli
atgattaccacggacgatgcgctggcttctttgtgtgaagccgtccgtgcctttccggcgatagccctggatactgaatttgttcgtacgcgcacctattacccgcaactgggtctaattcaactttttgatggtgagcatctggcgctaattgatcctctcgggatctccgactggtcaccactgaaagcgatcctgcgcgatccgtccatcacaaaatttctccatgcaggcagtgaagatctggaagtgttcctcaatgtctttggcgaattaccacaacccctgattgacacgcaaatccttgctgccttctgcggacgcccgatgtcatggggtttcgcttccatggtggaagagtattccggcgttacgctggacaagagtgaatcgcgcaccgactggctggccagaccgctgaccgaacgtcagtgtgaatatgcagcggcggatgtctggtatctgttaccgatcaccgccaagcttatggtagaaacggaggcctccggctggctacctgcggcgctggatgaatgccgcctgatgcaaatgcgtcgtcaggaagtcgttgcgccggaagacgcctggcgtgatatcaccaatgcctggcagttacgcacacgccaactggcctgtctgcaactgttagccgactggcgattgcgcaaggcgcgagagcgcgatctggcggtgaactttgtcgtgcgtgaagagcatttgtggtcggtagcgcgttatatgccgggaagtctgggcgaactggacagcctgggcttatccggtagcgaaatccgcttccacggtaaaacgttgctggcgctggtggaaaaagcgcaggcattgccagaagaggccttaccgcagccgatgcttaacctgatggacatgccgggttatcgtaaagcgtttaaagcgattaagtcgctgattactgacgtcagcgaaacgcacaagatcagcgccgaattgctggcgtcgcgtcggcaaatcaaccaactgctgaactggcactggaaactgaaaccgcagaacaatttgccggagctgatttccggctggcgtggtgagttgatggcggaagcattacacaatttattgcaggaatatccacagtaa

SEQ ID NO: 1472 - DNA, 1752 bp, Escherichia coli
atgttaacagcatgtctatcacttggggttgcgatgacgacgaacacgcattttagaggtgaagaattgaagaaggtttggcttaaccgttatcccgcggacgttccgacggagatcaaccctgaccgttatcaatctctggtagatatgtttgagcagtcggtcgcgcgctatgccgatcaacccgcgtttgtgaatatgggggaggtgatgaccttccgcaaactggaagaacgcagtcgcgcgtttgccgcttatttgcaacaagggttggggctgaagaaaggcgatcgcgttgcgttgatgatgcctaacttattgcaatatccggtggcgctgtttggcattttgcgtgccgggatgatcgtcgtaaacgttaacccgttgtataccccgcgtgagcttgagcatcagcttaacgatagcggcgcatcggcgattgttatcgtgtctaactttgcccacactctggaaaaagtggttgataaaaccgccgttcagcacgttattctgacccgtatgggcgatcagctatctacggcaaaaggcacggtagtcaatttcgttgttaaatacatcaagcgtcttgtgccgaaataccatctgccagatgccatttcatttcgtagcgccctgcacaacggctaccggatgcagtacgtcaaaccagaactggtgccggaagatttagctttcctgcaatacaccggcggcaccactggtgtggcgaaaggcgcgatgctgactcaccgcaatatgctggcgaacctggaacaggttaacgcgacctatggtccgctgttgaatccgggcaaagagctggtggtgacggcgctgccgctgtatcacatttttgcactgaccattaactgcctgctgtttatcgaactgggggggcagaacctgcttatcactaacccgcgcgatattccagggttggtaaaagagttagcgaaatatccgtttaccgctatcactggtgttaacaccttgttcaatgcgttgctgaacaataaagagttccagcagctggatttctccagtctgcatctttccgcaggcggagggatgcctgttcagcaagtggtggcagaacgttgggttaaactgactggacagtatctgctggaaggttatggcctgaccgagtgcgcgccgctggtcagcgttaacccgtatgatattgattatcatagtggtagcatcggtttgccggtgccgtcgacggaagccaaactggtggatgatgatgataatgaagtaccacctggtcaaccaggtgagctttgtgtcaaaggaccgcaggtgatgctgggttactggcagcgtccggatgctaccgatgaaatcatcaaaaatggctggttacacaccggcgacatcgcggtgatggatgaagaaggattcctgcgcattgtcgatcgtaaaaaagacatgattctggtttccggttttaacgtttatcccaacgagattgaagatgtcgtcatgcagcatcctggcgtacaggaagtcgcggctgttggcgtaccttccggctccagtggtgaagcggtgaaaatcttcgtagtgaaaaaagatccatcgcttaccgaagagtcactggtgaccttttgccgccgtcagctcacgggctacaaagtaccgaagctggtggagtttcgtgatgagttaccgaaatctaacgtcggaaaaattttgcgacgagaattacgtgacgaagcgcgcggcaaagtggacaataaagcctga

SEQ ID NO: 1473 - DNA, 582 bp, Escherichia coli
atggcggttcaaaagaatgttatcaaaggcatactggcaggtacgtttgcgctaatgctgagcggttgtgttactgtgccggacgccattaaaggcagcagtcccacgccgcaacaagatttagttcgggtgatgagtgcgccgcagctgtacgttggtcaggaggcacgctttggcggcaaagtggttgcggtacaaaaccagcaagggaaaacccgcctggaaattgctaccgtaccgctggacagcggtgccagaccgacgctgggagaaccttctcgcggtcgcatttatgccgatgtgaatggttttcttgatccggtcgatttccgtgggcagctggtgacagttgtcgggccaatcaccggtacggttgacggaaaaatcggcaacacgccctataaatttatggtgatgcaggcaacaggttacaaacgttggcatttaacccagcaggtgattatgccgcctcagccgattgatccatggttttatggcggtcgtggctggccctatggctacggtggatggggctggtataatcccggccccgcgagagtacaaacagttgtaactgaataa

SEQ ID NO: 1474 - DNA, 696 bp, Escherichia coli
atgcgaattctggctatcgataccgcgacagaggcctgctctgtcgccctgtggaacgacggtactgtcaacgctcattttgagctttgccctcgtgaacatactcaacgaatcttaccgatggtgcaggatatcctgaccaccagcggaacttctctgactgacataaacgctctggcttacgggcgcggccccggtagctttaccggcgtgcgcattggtattggcattgcgcaagggctggcacttggcgcagagctgccgatgattggcgtctccacgctaatgacgatggcgcaaggggcgtggcgcaaaaacggcgcaacccgcgtgctggcagctattgacgcgcgaatgggcgaagtttactgggccgaatatcagcgtgatgaaaacggtatctggcatggtgaagaaaccgaagccgtactcaaacccgaactggttcatgaacgaatgcaacagctttccggcgaatgggtgacggtagggacgggctggcaagcctggccggatctcggtaaagagagcgggctggttttgcgcgatggcgaagtgttactgcccgctgcagaagatatgctgccgattgcgtgccagatgtttgccgagggtaaaacggtggcggtggaacatgctgaaccagtttatttacgtaacaacgtcgcatggaagaaacttccgggcaaagaatga

SEQ ID NO: 1475 - DNA, 1911 bp, Escherichia coli
gtgacggacgattttgcaccagacggtcagttagcgaaagcgataccaggctttaagccgcgagaaccacagcgacagatggcggtcgccgtcacccaggcgatagaaaaaggccagccgctggtggtggaagcaggaaccggtacgggcaaaacctacgcttacctggcccctgcgctgcgggcgaaaaagaaagtcataatctcgaccggctcaaaagcgttgcaggatcagctctacagccgcgatttgccaacggtctcaaaggcattgaaatacacgggcaatgtggcgctgctgaaagggcgctcaaactacctctgcctcgaacgtctcgaacagcaggcgctggcggggggcgatctgccggtacaaatcttaagcgatgtgatcctgctgcgctcctggtctaatcaaacagtcgatggcgatatcagcacctgcgtcagcgtggcggaagattcacaggcgtggccgctggtcaccagcaccaacgataactgcctcggcagtgactgcccgatgtataaagattgctttgtggtcaaagcacgcaaaaaagcgatggacgccgatgtggtggtggtgaatcatcatctgtttctggcggatatggtggtgaaagagagcggttttggcgaattgatcccggaagcggacgtcatgatcttcgacgaagcccaccagctgcccgacattgccagccagtattttggtcagtcactctccagtcgacaactgctcgacctggcaaaagacatcaccatcgcctaccgcaccgaattaaaagacacccagcagttacaaaagtgcgcggaccgtcttgcccagagtgcgcaggattttcgcctgcaactcggtgagccaggttatcgcggtaacctgcgtgagctgttagctaatccgcaaattcagcgggcatttttactgctcgatgacactctggaactttgttatgacgtggcgaaactgtcgctggggcgttccgccttgctggatgcggcatttgaacgcgccacgttatatcgcacacggctgaaacggctaaaagagatcaatcagccgggctacagctactggtacgaatgcacttcgcgccattttactctggctctcacgccgctcagcgtggcggataaattcaaagagttaatggcgcaaaaaaccggtagctggatctttacctcagcaacgctgtcggtaaacgacgatctgcatcatttcacctcgcggcttggcattgaacaggcagagtcgttgctgttacccagcccctttgattacagccgccaggcgttactctgtgtgccgcgcaacctgccgcaaaccaatcaaccgggttccgcacggcaactggcggcaatgctgcgaccgatcatcgaagctaacaacggtcgttgttttatgctttgtacctcgcacgccatgatgcgcgatctggccgagcagttccgcgctaccatgacgcttcccgttttgttgcagggggaaaccagcaaagggcaactgttgcagcaatttgtcagcgccggtaacgcgcttcttgtggcaaccagcagtttctgggaaggggtggacgtgcgtggcgatacattgtcattggtgattatcgacaaattgccgtttacctcgccggatgatccactattaaaagcacgcatggaagattgccgtttgcgcggtggtgatccgttcgatgaagtacaactgccggatgcggtcattactctcaagcagggggtagggcgattgattcgcgacgccgacgatcgcggcgtgttagtgatttgcgacaatcggctggtgatgcgcccttacggcgcgacgtttctcgccagtctgccgccagcgccgcgcacccgtgacattgcccgtgcggttcgtttccttgcgataccatcctccaggtaa

SEQ ID NO: 1476 - DNA, 345 bp, Escherichia coli
atgactatcgttcgtatcgatgccgaagcccgctggtctgatgtggtaatccacaacaacacgctctactacactggtgtaccggaaaacctcgacgccgatgcctttgagcaaaccgccaacacgctggcgcagattgacgccgtgctggaaaaacagggcagcaataaatcgagcattctggatgccaccattttcctggccgataaaaacgacttcgcggcgatgaataaagcgtgggatgcctgggttgtcgcgggtcatgcgccggtgcgctgcacggtacaagcaggtttgatgaacccgaagtataaagttgaaattaagattgtggctgcggtgtaa

SEQ ID NO: 1477 - DNA, 300 bp, Escherichia coli
atgcctgctgtaatagataaagccctggatttcattggtgccatggatgtatcagcgccaacaccaagttcgatgaatgaaagtacggcgaagggaatctttaaatatttaaaagaactgggagtacccgcgagtgccgctgatattacggcgcgagctgaccaggaaggctggaaccctggtttcacggaaaaaatggttggatgggcaaaaaaaatggagtctggtgaacgctctgtgattaaaaatcctgaatacttttcaacatatatgcaggaagaactaaaagcactggtttga

SEQ ID NO: 1478 - DNA, 180 bp, Escherichia coli
atgtttgcaggtttaccttcactcacccatgaacagcagcaaaaagccgtcgagcggatccaggaactgatggcacaagggatgagcagcggccaggcaatcgcgctggtggcagaagagctgcgtgccaaccattccggcgagcgaatcgtggcgcgttttgaggatgaagacgagtaa

SEQ ID NO: 1479 - DNA, 1362 bp, Escherichia coli
atgaagacgttatctcccgctgtgattactttaccctggcgtcaggacgccgctgaattttatttctcacgcttaagccacctgccgtgggcgatgcttttacactccggctatgccgatcatccatatagccgctttgatattgtggtcgccgagccgatttgcactttaaccactttcggtaaagaaaccgttgttagtgaaagcgaaaaacgcacaacgaccactgatgacccgctacaggtgctccagcaggtgctggatcgcgcagacattcgcccagcgcataacgaagatttgccatttcagggcggcgcgctggggttgtttggctacgatctgggccgccgttttgagtcactgccagaaattgcgcagcaagatatcgttctgccggatatggcagtgggtatctacgactgggcgctggttgtcgaccaccagcgtcaaacagtttctttgctgagtcataatgatgtcaatgcccgtcgggcctggctggaaagccagcaattctcgccgcaggaagatttcacgctcacttccgactggcaatccaatatgacccgcgagcagtacggcgaaaaatttcgccaggtacaggaatatctgcacagcggtgattgctatcaggtgaatctcgcccagcgttttcatgcgacctattctggcgatgaatggcaggcattccttcagcttaatcaggccaaccgcgcgccgtttagcgcttttttacgccttgagcagggcgcgattttaagcctttcaccagagcggtttatcctttgtgataatggtgaaattcagacccgcccgattaaaggcacgctaccacgcctgcccgatcctcaggaagatagcaaacaagcagagaaactggcgaactcagcgaaagatcgtgccgaaaatctgatgattgtcgatttaatgcgtaatgatatcggtcgtgttgccgtagcaggttcggtaaaagtaccagagctcttcgtggtggaacccttccctgccgtgcatcatctggtcagcaccataacggcgcaactaccagaacagttacacgccagcgatctgttgcgcgcggcttttcctggtggctcaataaccggggcaccgaaagtacgggctatggaaattatcgacgaactggaaccgcagcgacgcaatgcctggtgcggcagcattggctatttgagcttttgcggcaacatggacaccagcattactatccgcacgctgactgccattaacggacaaatttactgctctgcgggcggtggaattgttgccgatagccaggaagaagcggaatatcaggaaacttttgataaagttaataagatattacgccaactggagaagtaa

SEQ ID NO: 1480 - DNA, 579 bp, Escherichia coli
gtggaataccgtagcctgacgcttgatgattttttatcgcgctttcaacttttgcgcccgcaaattaaccgggaaaccttaaatcatcgtcaggctgccgtgttaatccccatcgtccgccgaccgcaaccggggttgttgctgactcagcgttcgattcatctgcgtaaacacgctggacaagtggcattccctggaggcgcagtcgatgacacggacgcatcagttatcgccgctgcgctgcgcgaagctgaagaagaggtcgctataccgccttccgccgttgaggttatcggcgtgctgccgcccgtcgatagcgtcactggctatcaggtaaccccagtggtcggcattatcccgcccgatctgccgtatcgcgccagtgaagatgaagtctccgccgtctttgaaatgccgctcgcccaggcattacatctgggtcgttatcatcctttagatatctaccgccgtggcgattcacatcgggtatggctgtcctggtacgaacagtattttgtatggggaatgaccgcaggcataattcgtgagctggcgctgcaaattggtgtgaaaccctga

SEQ ID NO: 1481 - DNA, 1365 bp, Escherichia coli
gtgattagtctattcgacatgtttaaggtggggattggtccctcatcttcccataccgtagggcctatgaaggcgggtaaacagttcgtcgatgatctggtcgaaaaaggcttactggatagcgttactcgcgttgccgtggacgtttatggttcactgtcgctgacgggtaaaggccaccacaccgatatcgccattattatgggtcttgcaggtaacgaacctgccaccgtggatatcgacagtattcccggttttattcgcgacgtagaagagcgcgaacgtctgctgctggcacagggacggcatgaagtggatttcccgcgcgacaacgggatgcgttttcataacggtaacctgccgctgcatgaaaacggtatgcaaatccacgcctataacggcgatgaagtcgtctacagcaaaacttattattccatcggcggcggttttatcgtcgatgaagaacactttggtcaggatgctgccaacgaagtgagcgtgccgtatccgttcaaatctgccaccgaacttctcgcgtactgtaatgaaaccggctattcgctgtctggtctcgctatgcaaaacgaactggcactgcacagcaagaaagagatcgacgagtatttcgcgcatgtctggcaaaccatgcaggcatgtatcgatcgcgggatgaataccgaaggcgtactgccaggcccgctgcgcgtgccacgtcgtgcgtcggccctgcgccggatgctggtttccagcgataaactgtctaacgatccgatgaatgtcattgactgggtaaacatgtttgcgctggcagttaacgaagaaaacgccgccggtggccgtgtggtaactgcgccaactaacggtgcctgcggtatcgttccggcagtgctggcttactatgaccactttattgaatcagttagcccagacatctatacccgttactttatggcagcgggcgcgattggtgcactgtataaaatgaacgcgtctatttccggtgcggaagtcggttgccagggcgaagtaggtgttgcctgttcaatggctgctgcgggccttgccgagctgttgggcggtagcccggaacaggtttgtgtggcagcggaaattggcatggagcacaacctcggtctgacctgcgaccctgttgcagggcaagttcaggtgccgtgcattgaacgtaacgccattgcgtcagtcaaggcgattaacgccgcgcggatggccctgcgtcgcaccagtgcaccgcgcgtctcgctggataaggtcatcgaaacgatgtacgaaaccggtaaggacatgaacgctaaataccgcgaaacctcacgcggtggtctggcaatcaaagtccagtgtgactaa

SEQ ID NO: 1482 - DNA, 1599 bp, Escherichia coli
atgcaaaaagcacaacggatcattaaaacctatcgccgtaatcgaatgattgtttgtacgatttgcgcactcgttacgctcgcttcgaccctgagcgtgcgatttatttcacagcgtaacttaaatcaacaacgggtagtacaattcgccaatcacgctgtagaggaattagataaagtactgcttcccctacaggcaggtagcgaagtcttgcttccgctgattggtctgccctgctctgtcgcccatttgccattacgtaaacaggcggcaaaactccaaactgtgcgatccattggcctggtgcaagacggcacactttattgctccagcatttttggttatcgcaatgtgcccgtcgtggacattctggctgaacttcctgcaccgcaaccacttttacgactgacgaccgaccgtgccctgataaaaggcagtccggttttgattcaatggacgcctgcagcgggcagtagcaatgctggggtcatggagatgattaacatcgacttactgacggcaatgctccttgaaccacaactgccgcaaatcagtagcgccagcctgacggtggacagtcggcatttgctctatggtaatgggctggtagattcccttccgcaacctgaaaacaatgaaaactatcaggtttcttcgcaacgctttccttttaccattaacgttaatggtccgggggctacggcgctggcatggcactatcttccaacacaattaccgctggcggtgctgctaagtttacttgtgggctatatcgcctggctggcgaccgcttaccgaatgagtttttcccgcgaaatcaatctgggcctggcgcaacatgagttcgaattgttctgccagcctttgcttaatgcgcgcagccagcaatgtattggcgtagagattttgctgcgctggaacaatccgcgtcagggctggatttcgccggatgtgtttattcctatcgcggaagaacatcatttaattgtgccactgacccgctatgtgatggcagaaaccattcgtcagcgccatgttttcccgatgagtagtcagtttcatgttggcattaacgtcgcacccagccattttcgccgtggtgtgctgataaaagatctcaatcagtactggtttagcgctcacccgattcagcaactgatcctcgaaatcaccgaacgcgatgccttactggatgttgattatcggattgcccgcgagctacatcgtaaaaacgtcaaactggcgattgatgacttcggcaccggcaatagttcattttcctggcttgaaacattacgtcctgacgtgctgaaaattgataagtcatttaccgcagctataggttctgacgcggttaactcgacggtgaccgatatcatcatcgcactggggcaaagactgaatattgaactggtggcggagggtgtggaaacgcaagaacaggcgaaatatttgcgccgtcatggcgtccatattttgcaagggtatttgtacgcacagccgatgccactacgtgattttcccaaatggctggcgggcagccaaccgccgcccgcccggcataatggacatatcacccccattatgccgttacgttaa

SEQ ID NO: 1483 - DNA, 1557 bp, Escherichia coli
atggaattcttaatggacccctcgatttgggcggggctactcacgcttgttgttctcgaaattgtgctgggtatcgataacctggtcttcatcgccattcttgctgacaaactgccgccaaaacaacgcgataaagcgcgtttgctgggattatcactggcgctgattatgcgtctggggctgctgtcgctgatttcatggatggtcacgctgaccaaaccgctatttaccgtcatggatttctccttctccggacgcgacctgattatgttgttcgggggcatattcttgctgttcaaagcaacaactgaactgcatgaacggctggaaaaccgcgatcatgattccggccacggtaaaggctacgccagtttctgggtggtcgtcacacagattgtcatccttgacgccgtcttctcgttggatgcggtaattactgcagtagggatggttaaccatttgccggtgatgatggcggcggtagtgattgcgatggcggttatgctgctggcatcaaaaccgctgacgcgattcgttaaccagcaccccacggtggtggtgctctgtctgagcttcctgttaatgattggtctgagtctggtggcagaaggtttcggtttccacattccgaaaggttacctgtatgccgcgattggcttctcgatcatcatcgaagtgtttaaccagattgcgcgtcgcaactttattcgtcaccagtcgactttgccgctgcgagcgcgtactgccgatgccatcctgcgtttgatgggcgggaaacgtcaggccaatgttcagcacgatgccgataacccgatgccgatgccgatcccggaaggtgcgtttgccgaagaagaacgttacatgattaacggcgtactgacgctggcgtcgcgttctctgcgcgggatcatgacgccgcgcggtgaaataagctgggttgatgctaatctcggggtcgatgaaatccgcgagcaactgctctcctcaccgcacagtttgttcccggtatgtcgcggtgaactggatgaaattatcggcatcgtacgtgctaaagaactgctggtggcgctggaagagggagttgatgtggcggcgatagcttcggcgtctccggcgattatcgtcccggaaaccctcgatccgatcaacctgctgggcgtgctgcgtcgtgctcgcgggagctttgttatcgtgaccaacgagtttggtgtggtacaaggtctggtcacgccgctggatgtgctggaagccattgcgggtgaattcccggacgctgacgaaacgccggaaatcattaccgacggtgacggctggctggtaaaaggcggtacagatttgcatgccttgcagcaggcgcttgatgttgagcaccttgccgatgacgatgatatcgcgacggtcgcgggcctcgtgatctcggcaaatggtcacattccccgtgtgggcgatgtgattgatgtagggccactgcatatcaccatcattgaagccaatgattatcgtgttgatctggttcgcattgttaaagagcaaccggcgcacgatgaagatgagtaa

SEQ ID NO: 1484 - DNA, 972 bp, Escherichia coli
gtgaccattgctattgttataggcacacatggttgggctgcagagcagttgcttaaaacggcagaaatgctgttaggcgagcaggaaaacgtcggctggatcgatttcgttccaggtgaaaatgccgaaacgctgattgaaaagtacaacgctcagttggcaaaactcgacaccactaaaggcgtgctgtttctcgttgatacatggggaggcagcccattcaatgctgccagccgcattgtcgtcgacaaagagcattatgaagtcattgcaggcgttaacattccaatgctcgtggaaacgttaatggcccgagatgatgaccctagctttgatgaactggtggcactggcagtagaaacaggccgtgaaggcgtgaaagcactgaaagccaaaccgattgaaaaagccgcgccagcacccgctgccgcagcacccaaagtggctccaactccggcaaaaccaatgggaccgaacgactacatggttattggccttgcgcgtatcgacgaccgtctgattcacggtcaggtcgccacccgctggaccaaagaaaccaatgtctcccgtattattgttgttagtgatgaagtggctgcggataccgttcgtaagacactgctcacccaggttgcacctccgggcgtaacagcacacgtagttgatgttgccaaaatgattcgcgtctacaacaacccgaaatatgctggcgaacgcgtaatgctgttatttaccaacccaacagatgtagagcgtctcgttgaaggcggcgtgaaaatcacctctgttaacgtcggtggtatggcattccgtcagggtaaaacccaggtgaataacgcggtttcggttgatgaaaaagatatcgaggcgttcaagaaactgaatgcgcgcggtattgagctggaagtccgtaaggtttccaccgatccgaaactgaaaatgatggatctgatcagcaaaatcgataagtaa

SEQ ID NO: 1485 - DNA, 801 bp, Escherichia coli
atggagattaccactcttcaaattgtgctggtatttatcgtagcctgtatcgcaggtatgggatcaatcctcgatgaatttcagtttcaccgtccgctaatcgcgtgtaccctggtgggtatcgttcttggggatatgaaaaccggtattattatcggtggtacgctggaaatgatcgcgctgggctggatgaacatcggtgctgccgttgcgcctgacgccgccctggcttctatcatttctaccattctggttatcgcaggtcatcagagcattggtgcaggtatcgcactggcaatccctctggccgctgcaggccaggtactgaccatcatcgttcgtactattaccgttgctttccagcacgctgcggataaggcagctgataacggcaacctgacagcaatttcctggatccacgtttcttctctgttcctgcaagcaatgcgtgtggctattccggccgtcatcgttgcgctgtctgttggtaccagcgaagtccagaacatgctgaatgcgattccggaagtggtgaccaatggtctgaatatcgccggtggcatgatcgtggtggttggttatgcgatggttatcaacatgatgcgtgctggctacctgatgccgttcttctacctcggcttcgtaaccgcagcattcaccaactttaacctggttgctctgggtgtgattggtactgttatggcagtgctctacatccaacttagcccgaaatacaaccgcgtagccggtgcgcctgctcaggctgctggtaacaacgatctcgataacgaactggactaa

SEQ ID NO: 1486 - DNA, 852 bp, Escherichia coli
atggttgatacaactcaaactaccaccgagaaaaaactcactcaaagtgatattcgtggcgtcttcctgcgttctaacctctttcagggttcatggaacttcgaacgtatgcaggcactgggtttctgcttctctatggtaccggcaattcgtcgcctctaccctgagaacaacgaagctcgtaaacaggctattcgccgtcacctggagttctttaacacccagccattcgtggctgcgccgattctcggcgtaaccctggcactggaagaacagcgtgctaatggcgcagagatcgatgacggtgctatcaacggcatcaaagtcggtttgatggggccgctggctggtgtaggcgacccgatcttctggggaacggtacgtccggtatttgcagcgctgggggctggtatcgcgatgagcggcagcctgttaggtccgctgctgttcttcatcctgtttaacctggtgcgtctggcaacccgttactacggcgtagcgtatggttactccaaaggtatcgatatcgttaaagatatgggtggtggcttcctgcaaaaactgacggaaggggcgtctatcctcggcctgtttgtcatgggggcgttggttaataagtggacacatgtcaacatcccactggtggtctctcgcattactgaccagacgggcaaagaacacgttaccactgtccagactattctggaccagttaatgccgggcctggtaccactgctgctgacctttgcttgtatgtggctgttgcgcaaaaaagttaacccgctgtggatcatcgttggcttcttcgtcatcggtatcgctggttacgcttgcggcctgctgggactgtaa

SEQ ID NO: 1487 - DNA, 459 bp, Escherichia coli
atgacaatcacggacctggtactgattcttttcatcgccgcacttctggccttcgcgatctacgatcagttcatcatgccccgccgtaacggccccaccctgctggcaattcctttgctccggcgtggtcgcatcgatagtgttatcttcgtcggattgattgtcattcttatctataacaacgtcacgaatcatggcgcgctaataacaacatggttattaagtgcactggctctgatgggtttttatatattctggatccgcgttccgaagatcatctttaaacaaaaaggttttttcttcgccaatgtctggattgaatatagccgaatcaaagcgatgaacttgtcggaagatggcgtgttggtgatgcaattagaacagcgccggctgttaatccgcgttcgaaatatcgacgatttggaaaaagtttataagcttctcgtttcaactcaataa

SEQ ID NO: 1488 - DNA, 567 bp, Escherichia coli
atgaatatcactgctactgttcttcttgcgtttggtatgtcgatggatgcctttgctgcatcaatcggtaaaggtgccaccctccataaaccgaaattttctgaagcattgcgaaccggccttatttttggtgccgtcgaaaccctgacgccgctgatcggctggggaatgggcatgttagccagtcggtttgtccttgaatggaaccactggattgcgtttgtgctgctgatatttctcggcgggcgaatgattattgagggttttcgtggcgcagatgatgaagatgaagaaccgcgccgtcgacacggtttctggctactggtaaccaccgcgattgccaccagcctggatgccatggctgtgggtgttggtcttgctttcctgcaggttaacattatcgcgaccgcattggccattggttgtgcaaccttgattatgtcgacattagggatgatggttggtcgctttatcggctcaattattgggaaaaaagcggaaattctcggcgggctggtactgatcggtattggcgtccagatcctctggacgcacttccacggttaa

SEQ ID NO: 1489 - DNA, 810 bp, Escherichia coli
atgtcgttttcctgtccactttgccatcagcctctttcgcgtgaaaaaaacagctatatctgtccccagcgacatcagtttgatatggcgaaagaagggtatgtcaatctgctgcccgttcagcataaacggtctcgtgatccgggcgacagcgcggaaatgatgcaagcacgccgcgcattcttagatgccggacattatcagccgctgcgtgatgcaattgtcggccaactgcgggaacggcttgatgaaaaggccgcggcggtgctggatattggctgtggtgaagggtattacacacacgcatttgctgatgcgttgcccgaaatcaccacgtttggcctggatgtctcgaaggtagcgataaaagcggcggcgaaacgctatccgcaggtcactttttgtgtcgcttccagccaccgtttgccgttctccgataccagtatggacgccataatacgtatttacgcgccgtgtaaagcagaagaattagtgcgagtagtgaagcccggcggttgggtcattactgccacgccgggaccgagacacttaattgagctgaaggggctgatttacaatgaagtacatcttcatgcacctcatgcagaacaactgaaaggttttacattacagcagagtgatgagttgtgttatctgatgcgtcttcgcggtgatgaagccgtcgcattattgcagatgacgccgtttgcctggcgtgcgaagcctgaagtctggcaagcactggcagcaaaagaagtgttcgactgccagacggactttaatattcacctctggcagcgttcttattaa

SEQ ID NO: 1490 - DNA, 210 bp, Escherichia coli
atggcaaagattaaaggtcaggttaagtggttcaacgagtctaaaggttttggcttcattactccggctgatggcagcaaagatgtgttcgtacacttctccgctatccagggtaatggtttcaaaactctggctgaaggtcagaacgttgagttcgaaattcaggacggtcagaaaggtccggcagctgttaacgtaacagctatctga

SEQ ID NO: 1491 - DNA, 288 bp, Escherichia coli
atgaacgaagttgtaaattcaggcgtgatgaacattgcgtctttggttgtatcggtggtggttcttcttatcgggctcatcttgtggttttttatcaatcgtgccagttcacggactaacgaacagattgaactgcttgaggcgttgctggatcagcaaaaacgtcaaaatgcactgttacgtcgtttgtgcgaagcaaacgaacctgagaaagcagataaaaagacagttgagagtcaaaaatcggttgaagacgaagatattattcgtctggtcgccgaacgataa

SEQ ID NO: 1492 - DNA, 240 bp, Escherichia coli
atgcgattcatcattcgcacagttatgctgatagcgctggtatggataggattattactcagcggatatggcgttttgattggaagcaaagagaatgccgcgggattaggtttacaatgtacctatctgaccgccagaggcaccagcacggtacaatacctgcacactaaaagtggttttctggggataacagattgcccgttgttacgtaaaagcaatattgtggtcgataatggttaa

SEQ ID NO: 1493 - DNA, 792 bp, Escherichia coli
atggctaacgcagatctggataaacagcctgattctgtatcttccgtgctaaaagtttttggcattttgcaggcgctgggtgaagagcgcgaaatagggataaccgagttgtcgcagcgcgtcatgatgtcaaaaagcaccgtttatcgctttttacagaccatgaaaaccttaggttatgtggcgcaggaaggggagtcggagaaatattcgctgaccctgaaattgtttgaactgggcgctcgcgcgttgcaaaacgtcgatttaattcgtagcgcagatatccagatgcgtgagatctcccgcctgaccaaagaaactatccacctcggcgcactggacgaagacagtattgtttacatccacaaaattgactcaatgtacaatttgcgcatgtattcacggattgggcgtcgtaatccgctgtacagcaccgcgattggtaaggtactgctggcatggcgcgatcgcgatgaagtgatgcaaattcttgagggcgtggagtataaacgcagtaccgagcggaccatcaccagtacagaagcgttattacccgttctggaccaggtgcgcgagcaggggtatggcgaagataatgaagagcaggaagaaggactgcgttgcattgcggttccggtatttgatcgctttggcgtggtcattgccggtctgagcatctccttcccgacgttgcgtttctctgaagagcgtttacaggaatatgtcgcaatgttgcataccgcggcgcgcaaaatttctgcccaaatgggttatcacgactatccgttctga

SEQ ID NO: 1494 - DNA, 1374 bp, Escherichia coli
atgccaaaagttcaggccgacggcctgccattgcccctgcgatacggtgcgatattaaccattgtgattggtatttcgatggctgtccttgacggcgcaatcgccaacgtcgccttgccaacaatcgctacggaccttcatgccacgccggccagttccatctgggtagtgaacgcctatcaaatcgccattgtcatctccctgctctcgttttcgtttctgggcgatatgtttggctatcgacgtatttataaatgcggtctggtcgtttttctgttgtcttcactgttctgcgccctttctgattcgctgcaaatgctcacccttgcgcgtgtcatacaaggtttcggcggtgcagcgttgatgagcgttaataccgcacttatccgcctgatctatccacaacgttttctgggtagagggatgggcataaactcgtttattgttgccgtctcttctgctgccgggccgacaattgctgcagcaatcctctccatcgcatcctggaaatggttatttttaatcaacgtaccgttgggtattatcgccctgcttctggcgatgcgttttctgccacccaatggttctcgcgccagtaaaccccgtttcgacctgcccagcgccgtgatgaacgcgttaaccttcggcctgcttatcactgcgttgagtggtttcgctcaggggcaatcgctgacattgattggtgcggaactggtggtaatggttgtcgttggtattttctttattcgccgccagctttctcttcccgtaccgctgctaccggtggatttactgcgtatcccgctgttttcactttctatttgcacatctgtttgctctttctgcgcacaaatgctggcaatggtttccctgcccttttacctgcaaaccgtgctcgggcgtagtgaagtcgaaacaggtttacttctgacaccgtggccgttagcaacgatggtgatggctccactggcaggctatttgattgaacgcgtacatgcaggattgctgggtgctttagggttattcatcatggctgcggggcttttttccctggttctgctgccagcgtcacctgcggatatcaatattatctggccgatgatcttatgtggtgctggatttggcttgttccagtcacccaataaccacaccattattacctccgctcctcgcgaacgtagcggtggagccagtggcatgttagggacagctcgtcttctgggtcagagtagcggtgcggctctggtagcgctgatgctaaatcagtttggtgataatggtacgcacgtctcgctgatagctgcggctattctggcagtgattgctgcctgtgtcagtggtttacgtatcactcagccacgatccagggcataa

SEQ ID NO: 1495 - DNA, 882 bp, Escherichia coli
atgatgcgaatcgcgctcttcctgctaacgaacctggccgtaatggtcgttttcgggctggtactgagcctgacagggatacagtcgagcagcgttcaggggctgatgatcatggccttgctgttcggttttggtggttccttcgtttcgcttctgatgtccaaatggatggcattacgatctgttggcggggaagtgatcgagcaaccgcgtaacgaaagggaacgttggctggtcaatactgtagcaacccaggctcgtcaggcggggatcgctatgccgcaagtggctatctaccatgcgccggacatcaatgcttttgcaaccggtgcgcgccgtgatgcctctctggttgctgtcagcaccggtttgctgcagaacatgagcccggatgaagccgaggcggtaattgctcacgaaatcagccacatcgccaatggtgatatggtcaccatgacgctgattcagggcgtggtgaacaccttcgttatctttatttcccgtattctggcgcagcttgccgcgggttttatgggcggaaaccgtgatgaaggtgaagagagcaacggcaacccgctgatctactttgcggttgcaacggttctggaactggtgtttggtattctggcgagcattataaccatgtggttctcgcgtcatcgtgaattccacgccgatgcgggttcagcaaaactggttggtcgcgagaaaatgattgccgcgctgcaacgcctgaaaaccagctatgaaccgcaagaagcaaccagcatgatggctttctgcattaacgggaagtcgaaatcgctcagtgagttgttcatgactcacccgccgctggataaacgtattgaagctctgcgtacgggtgaatacctgaagtaa

SEQ ID NO: 1496 - DNA, 2049 bp, Escherichia coli
atgaacatgttttttaggcttaccgcgttagctggcctgcttgcaatagcaggccagaccttcgctgtagaagatatcacgcgtgctgatcaaattccggtattaaaggaagagacgcagcatgcgacggtgagtgagcgcgtaacgtcgcgcttcacccgttctcattatcgccagttcgacctcgatcaggcattttcggccaaaatctttgaccgctacctgaatctgctcgattacagccacaatgtgctgctggaaagcgatgttgaacagttcgcgaaaaagaaaactgagttaggcgatgaactgcgttcaggtaaactcgacgttttctacgatctctacaatctggcgcaaaagcgccgttttgaacgttaccagtacgctttgtcggtactggaaaagccgatggatttcaccggcaacgacacttataaccttgaccgcagcaaagcgccctggccgaaaaacgaggctgagttgaacgcgctgtgggacagtaaagtcaaattcgacgagttaagcctgaagctgacaggaaaaacggataaggaaattcgtgaaaccctgactcgccgctacaaatttgccattcgtcgtctggcgcaaaccaacagcgaagatgttttctcgctggcaatgacggcgtttgcgcgtgaaatcgacccgcataccaactatctttccccgcgtaataccgaacagttcaacactgaaatgagtttgtcgctggaaggtattggcgcagtgctgcaaatggatgatgactacaccgttatcaattcgatggtggcaggaggtccggcagcgaagagcaaagctatcagcgttggtgacaaaattgtcggtgttggtcaaacaggcaagccgatggttgacgtgattggctggcgtcttgatgatgtggtggccttaattaaagggcctaagggcagtaaagttcgtctggaaattttacctgctggtaaagggaccaagacgcgtactgtaacgttgacccgtgaacgtattcgtctcgaagaccgcgcggttaaaatgtcggtgaagaccgtcggtaaagagaaagtcggcgtgctggatattccgggcttctatgtaggtttgacagacgatgtcaaagtgcaactgcagaaactggaaaaacagaatgtcagcagtgtgattatcgacctgcgtagcaatggtggtggggcgttgactgaagccgtatcgctctccggtctgttcattccatccggcccgattgttcaggtccgcgataacaacggcaaggttcgtgaagacagcgacaccgacggacaggtcttctataaaggcccgctggtggtgctggttgaccgcttcagtgcttcggcttcagaaatctttgccgcggcaatgcaggattacggtcgtgccctggttgtgggtgaaccgacatttggtaaaggcaccgttcagcagtaccgttcattgaaccgtatttacgatcagatgttacgtcctgaatggccagcgctgggttctgtgcagtacacgatccagaaattctatcgcgttaacggcggcagtacgcaacgtaaaggcgtaacgccagacatcatcatgccgacgggtaatgaagaaacggaaacgggtgagaaattcgaagataacgcgctgccgtgggatagcattgatgccgcgacttatgtgaaatcaggagatttaacggcctttgaaccggagctgctgaaggaacataatgcgcgtatcgcgaaagatcctgagttccagaacatcatgaaggatatcgcgcgcttcaacgctatgaaggacaagcgcaatatcgtttctctgaattacgctgtgcgtgagaaagagaataatgaagatgatgcgacgcgtctggcgcgtttgaacgaacgctttaaacgcgaaggtaaaccggagttgaagaaactggatgatctaccgaaagattaccaggagccagatccttatctggatgagacggtgaatatcgcactcgatctggcgaagcttgaaaaagccagacccgcggaacaacccgctcccgtcaagtaa

SEQ ID NO: 1497 - DNA, 699 bp, Escherichia coli
atggaaaatcaacctaagttgaatagcagtaaagaagtaatcgcgtttctggccgaacgttttccccactgtttcagtgcggaaggtgaagcgcgtccgctgaaaatcggtatttttcaggatttggtcgatcgtgttgccggggaaatgaacctgagcaaaacgcaattgcgatccgctttacgtctctacacttcgagctggcgttatctttacggtgttaaacccggcgcaacacgtgtcgatcttgacggcaacccatgcggtgagctggacgagcaacatgtcgagcatgctcgcaagcagcttgaagaagcgaaagcgcgtgttcaggcacagcgtgctgaacagcaagcgaaaaaacgcgaagctgccgcagctgctggtgagaaagaagacgcaccgcgccgcgaacgcaagccacgtccgaccacgccacgccgcaaagaaggcgctgaacgtaaacctcgttcgcaaaagccggtagagaaagcgccaaaaacagtaaaagcacctcgcgaagaacagcacaccccggtttctgacatttcagctctgactgtcggacaagccctgaaggtgaaagcgggtcaaaacgcgatggatgccaccgtattagaaatcaccaaagacggcgtccgcgtccagctgaattcgggtatgtctttgattgtgcgcgcagaacacctggtgttctga

SEQ ID NO: 1498 - DNA, 552 bp, Escherichia coli
atgcttattttaataggctggcagttccaggtaagacaaccaagtgattatataatgaacaaagcagaattttacgcggatttaaatcgcgactttaacgcgctgatggcgggagaaaccagttttctggcaacgcttgcgaacaccagtgcgttgttatatgagcgtctcactgacgtaaactgggcaggtttttatttgcttgaggacgatacactggtgctcggaccatttcagggcaaaattgcctgtgtccggatacccgttgggcgcggtgtatgcggcactgcggttgcccgcaatcaagtgcagcgtatcgaggatgttcacgcgtttgacgggcatattgcctgtgatgcggcgagtaattctgaaattgttctgccgctggtggtgaaaaatcagattattggtgttctcgacatcgatagtaccgtcttcggtcgctttacagacgaggacgagcaaggcttacgtcagcttgtggcacagcttgaaaaagtgcttgcaacgacggattacaaaaaattctttgcgagcgtcgcaggataa

SEQ ID NO: 1499 - DNA, 1284 bp, Escherichia coli
atggctcttaacacaccacaaattacgccgacaaagaagataacagtgagggctatcggcgaggaactgccgcgtggtgattaccaacgttgcccgcaatgtgacatgctgtttagcctgcccgagataaattctcatcaaagtgcctattgtccgcgctgtcaggcaaaaattcgtgacgggcgcgactggtcgctaacgcgcctggcggcaatggccttcaccatgctgttgcttatgccgtttgcctggggcgaaccgctgttgcatatctggctgttaggcattcgtattgacgccaacgttatgcaaggcatctggcaaatgaccaaacagggcgatgcgataacgggggcgatggtctttttctgcgttatcggtgcccccctcattctggtgacctccatagcttatttatggtttggtaaccgattgggaatgaatttacgcccggtactgctgatgcttgagcggctgaaagagtgggtgatgctggatatctacctggtcggcattggcgttgcttctataaaggtacaggattatgcccatatccaggcgggtgtcggcttgttctcttttgtggcgttggtgattttaacgacggtgacgttgtcacatcttaatgttgaagaactgtgggagcgattttatccgcagcgccccgctacgcgtagggacgagaaactccgtgtctgtcttgggtgccattttaccggctatcctgatcagcgtggtcgctgcccgcgttgccatatcccgctacgcctgcgtcgccgtcatagtctgcaaaaatgctgggcggcgctgttagcgtcaatcgttttgttgttacctgccaacctgttgcctatctctatcatttatctgaatggtggtcggcaggaagatacgattctttccggaattatgtcgctggcaagtagcaacattgcagttgcgggaatcgtgtttatcgccagtattctggtaccgtttactaaagtgatcgtcatgttcactttactgttgagtattcattttaaatgccagcaaggtttacgcacacgcattctgttactgcggatggtgacctggattggtcgctggtcgatgctcgacctgtttgtcatatctttaaccatgtcgctgattaatcgcgatcagatcctcgcttttactatgggaccggctgcgttttatttcggcgcagcggtaattttgactattcttgctgtggaatggctggacagccgcttactttgggatgcacatgagtcaggaaacgcccgcttcgacgactga

SEQ ID NO: 1500 - DNA, 2634 bp, Escherichia coli
atgagtcaggaaacgcccgcttcgacgactgaagcgcagattaaaaataaacgccgtatctcacctttctggctgctgccgttcatcgcgctaatgattgctggttggctgatttgggacagttatcaggaccggggcaatactgtcaccatcgactttatgtcggcggatggtattgttccaggccgtacgcctgttcgttatcagggcgttgaagttggaacagtgcaggatatcagcctcagcgacgatcttcgtaagattgaagtcaaggtcagcatcaagtccgatatgaaagatgcgctgcgcgaagagacacagttctggttggtgacgccaaaggcctcgttggcaggtgtctccgggctggacgccctcgtcggtggtaattatatcggcatgatgccgggtaaaggtaaagagcaggatcactttgtcgcactcgacacccaaccgaaatatcggctggacaatggcgatctgatgatccacctgcaagcccccgatctcggttcactgagcagtggttcattggtctatttccgcaagatcccggtgggtaaagtctacgactatgccatcaatcccaacaagcaaggcgtggtgattgatgtcctgatcgagcggcgttttaccgatctggtgaaaaaaggtagccgtttctggaacgtttccggcgttgatgccaacgtcagtatcagtggcgcgaaggtgaaactggaaagtctggcggcactggttaacggtgcgattgccttcgattcacctgaagagtcgaaacctgccgaagcggaagatacctttggtctgtatgaagacctggcccatagccaacgtggcgtaataataaaactggaactgccaggcggtgccggattaaccgccgactcgacgccgttaatgtatcaggggctggaagtcggacagctgactaaactggatttaaatcctggtggtaaagtcactggggaaatgaccgttgatcccagcgtcgtcaccctgcttcgtgaaaatacccgcatcgaattacgcaacccgaaattatcccttagcgatgccaatctcagcgccctgctgaccggaaaaacctttgagttggtgcccggcgatggcgagccacgcaaagagtttgttgttgtgccaggcgaaaaagccctgctgcaagagccggatgttctgacactgaccctgacagcaccagaaagttacggtattgatgctggtcagccgctcattcttcacggcgtgcaggtaggccaggttatcgatcgtaaactcaccagcaaaggcgtcacctttaccgtcgccatcgagcctcagcatcgcgaactggtaaaaggcgatagcaaatttgtcgtcaacagccgtgtcgacgtgaaggtggggctggatggcgttgagtttctcggtgccagcgcctcagaatggatcaatggcggaatacgtattctgccgggcgataaaggcgagatgaaagccagctatccactgtatgccaatctggaaaaagcgctggagaacagccttagcgatttacccaccacaaccgtgagtttgagtgcagagacgctgccggatgtgcaggcaggatcggtagtgctgtaccgtaaatttgaagttggtgaagttattactgtgcgtccgcgagctaacgcgtttgatatcgatctgcatattaagccggagtatcgcaaccttctgaccagcaacagcgtgttctgggcagaaggtggggcgaaagttcagctgaatggtagtggtctgactgtacaggcatccccgctctccagggcattaaagggggctattagcttcgataacctcagcggtgccagcgccagtcagcgtaaaggcgacaagcgtattctgtatgcttccgaaacagcggcccgtgcggttggcgggcaaattacgcttcacgctttcgatgccggaaaactggcggtcgggatgccaattcgctatctcggtattgatatcgggcaaatccagacgctggatctgattaccgcgcgcaatgaagtacaggcaaaggcggtgctctatccggaatatgtccagacctttgctcgcggtggtacgcgcttctcagtggtcacaccgcaaatttcggcagctggcgttgagcatcttgatactatcctccagccgtatatcaacgtcgaaccaggccggggcaatcctcgccgcgactttgaattacaagaggccaccattactgattcgcgttacctggatggcttaagcattattgttgaagcgccggaagccggttcgttaggtatcggtacaccggtgctgttccgtggtctggaagtaggtacggttaccggaatgacgctggggacattgtcagatcgcgtgatgattgcgatgcgcatcagtaaacgctatcaacacctggtgcgtaacaattccgtcttctggttggcatcgggttacagtctggactttggtctgacgggcggcgtagtgaaaaccggtacctttaaccagtttatccgtggcggcatcgccttcgccacgcctccgggtacgccactggcaccgaaagcccaggaaggcaagcacttcctgttgcaggaaagtgaaccgaaagagtggcgtgaatggggaactgcgcttcccaaataa

SEQ ID NO: 1501 - DNA, 1446 bp, Escherichia coli
atgctcgtggcccaacacaccgtttatttcccggacgcctttctgacacaaatgcgcgaagcgatgccttcgacgctctcttttgatgattttcttgccgcctgtcagcgcccgttgcgccgcagcattcgcgttaatacgctgaaaacctccgttgctgatttcctgcaattaactgctccttatggctggacgcttacgccaattccgtggtgtgaagaaggtttctggattgaacgcgacaatgaagatgcattgccgttgggtagtaccgccgagcatttaagcggcctgttttatattcaggaagccagttcaatgttgcctgttgccgccttgtttgctgacggtaatgcaccacagcgggtgatggatgtcgctgctgcaccaggttccaaaacgacgcaaattgctgcgcggatgaataacgaaggggcaatccttgccaatgagttttccgccagtcgggtaaaagtgttacatgccaatatcagccgctgtggcatcagtaatgttgcgctcacgcattttgatggccgcgtatttggtgcggcagtgccagaaatgttcgatgccattttgctggacgctccctgctccggcgaaggcgtggtgcgtaaagatcccgatgcgctaaaaaactggtcaccagaaagcaatcaggaaatcgcagcgacccaacgagagctgatcgacagcgcctttcatgcattacgtcctggcggtacgctggtttactcgacctgtaccttaaaccgggaagaaaacgaagccgtttgcctgtggctgaaagagacttatcccgacgcagtagagtttttaccgcttggcgatctcttccctggtgcaaacaaggcgctgaccgaggaaggctttttgcatgttttcccacaaatttacgactgcgaaggcttcttcgttgctcgtctgcgtaaaactcaggcgattcccgccttacccaccccaaaatacaaagtgggcaatttcccgttcagcccggtgaaagatcgcgaagccggacaaattcgtcaggcggctgcaagtgttggcttaaactgggatgaaaacctgcgactctggcagcgtgacaaagaactgtggttgttcccggtgggcattgaagccctgatcggtaaagtccgattttctcgcttggggattaaacttgccgaaacgcacaacaaaggttatcgctggcagcatgaagccgttattgcccttgcctcccccgacaatgtgaacgcttttgaactgacaccgcaggaagcggaggagtggtatcgcgggcgcgatgtatacccgcatgccgcgccagtggcggatgatgtattggttaccttccagcatcagccgattggtttagccaaacggattggttcacgactgaaaaacagctacccgcgtgaactggtgcgcgacgggaaactttttaccggtaacgcctga

SEQ ID NO: 1502 - DNA, 237 bp, Escherichia coli
atgaaaaccagtgtgcgcataggcgcttttgaaatcgacgacggcgaattacacggcgaatcgccgggtgatcgaacgttaaccattccttgtaaatcagaccccgatttatgtatgcaactggatgcctgggatgctgaaaccagtatccctgccctgctaaatggcgaacactctgtcctttaccgtacccgttacgatcaacaatctgatgcctggattatgcgtcttgcctga

SEQ ID NO: 1503 - DNA, 276 bp, Escherichia coli
atggcgggttatttgtcctggttattcccccgttgtaaaatctctcctaaacttaacggtacggcaccacacttcggggatgaaatgttcgcgctggtactttttgtttgctacctggatggcggttgtgaagatattgttgtggatatctacaacacggaacagcagtgtctctattctatgagcgatcaacggatccgtcatggcggttgttttccgattgaggattttatagatggtttctggcgacctgcacaggagtacggtgatttttaa

SEQ ID NO: 1504 - DNA, 657 bp, Escherichia coli
atgaaacagcctgcgcccgtttatcagagaattgcgggtcatcaatggcgacatatctggctttcaggcgatatacacggttgtcttgagcagttgcgccgcaaattatggcattgtcgttttgatccgtggcgagatttacttatctcagtgggagacgttatcgatcgtgggccgcaaagtttacgttgcctgcagttactggaacaacattgggttcgtgcggtaagaggcaatcatgaacagatggcgatggatgcgctggcatcccggcagatgtctttatggttgatgaatggcggcgactggtttattgcgctggcagataatcaccagaaacaagcgaaaacggcgctggaaaaatgtcagcatttgccctttattcttgaagtacacagtcgcaccggcaaacatgttattgctcatgccgattatccagatgatgtttatgaatggcaaaaggacgtcgatttgcatcagatcttgtggagccgctcgcgattaggtgaacaccaaaaagggcagggaattgcaggtgctgatcatttctggtttggtcatacacctttgcgccatcgcgtggatattggcaacctgcattatattgataccggtgctgtctttgggggagaactgactcttgtgcaattgcaataa

SEQ ID NO: 1505 - DNA, 342 bp, Escherichia coli
atgatgaaaaaaagtattctggcgtttctgttactcaccagttctgcagctgcgctggcggcaccgcaggtgattaccgtcagccgttttgaagtgggtaaagacaaatgggcgtttaatcgcgaagaggtgatgctgacttgccgaccaggtgatgctttgtatgtcattaacccaagtactctcgtgcagtatcctttaaacgatatcgcacaaaaggaagttgccagtgggaagactaaagcccaacccatttcggtgattcagattgatgatcctaacaatcccggcgaaaaaatgagtctggcaccgtttatagagcgagctgaaaaactctgttaa

SEQ ID NO: 1506 - DNA, 873 bp, Escherichia coli
atgctggcgtttacctggatcgcgctgcgatttatccatttcacctcgctgatgctggtttttggcttcgcaatgtacggtgcctggctggcccccttaacgattcgtcgcttgctgacgaagcgttttctgcgtttacaacagcacgctgccgtctggagtttgatcagtgccactgcaatgctcgccgttcagggcgggttgatgggagcgggatggtcagatgtattttcgccaaacatttggttggctgttttgcaaacgcagtttggtggcgtctggttatggcaaattgttctcgccctcgtaacgttgatcgtcgcccttatgcaaccgcggaatatgccacgtttgctgtttatgctcactaccgcgcaatttattctgctggcgggagtcgggcatgcgacgttgaatgaaggggtaacggcgaaaatccatcagactaatcacgcaattcacctgatctgtgcggcggcgtggtttgggggattactgccggtgctctggtgtatgcaactcatcaaaggccgttggcgacaccaggctattcaggcgctgatgcgtttttcctggtgcgggcattttgcggtgatcggcgtactggtaagcggcgtgcttaatgcattgttgattaccggatttccccccacgcttacgacttactggggccaactcttattgctcaaagccatcctggtgatgattatggtggtcatcgcgctggctaatcgttatgttcttgtaccgcgcatgaggcaggatgaagatcgtgcggctccctggtttgtctggatgactaaactcgaatgggcgataggtgcggtagtgctggtgatcatcagcctgcttgcgactctcgaacctttttga

SEQ ID NO: 1507 - DNA, 375 bp, Escherichia coli
atggcttcaactgcacgctcccttcgctacgcgctggcaatcctgaccacttcgttggtgacaccttccgtctgggcacatgcgcatttaacgcatcagtatcctgcggcaaatgcacaagtgacagcagctccgcaggcaatcactttaaacttctcggaaggcgttgaaacaggattcagtggtgcaaaaatcacggggccaaaaaacgaaaatattaaaacattaccggcgaagcggaatgagcaggaccaaaagcaactgattgttccactggccgattcgctgaaacccggaacctacaccgttgactggcatgttgtttcggtggatgggcataaaacgaaaggacattacacctttagtgtgaaataa

SEQ ID NO: 1508 - DNA, 231 bp, Escherichia coli
atgctgaagaatctggctaaactggatcaaacagaaatggataaagtgaatgtcgatttggcggcggcaggggtggcatttaaagaacgctacaatatgccagtgatcgctgaagcggttgaacgtgaacagcctgaacatttgcgcagctggtttcgcgagcggcttatcgcccaccgtttggcttcggtcaatctgtcacgtttaccttacgagcccaaacttaaataa

SEQ ID NO: 1509 - DNA, 657 bp, Escherichia coli
atgtcgttctggaaagttgcagcagcgcaatatgagcctcgtaaaacctcactcaccgaacaggtagctcatcatctggagtttgtgagggccgccgccaggcaacaatgtcagctgttagtttttccatcgctttctttactggggtgtgattattcgcgacgtgcccttcctgccccacccgatctctcgctattagacccgctttgttatgccgcaacgacctggcgaatgaccatcattgccggccttcccgttgaatataacgatcgctttattcgtggaattgcggtattcgcaccgtggcgaaaaacgccagggatctaccatcagagttatggtgcatgtctgggccgtcgttccagaaccatcacggtggtcgatgaacaaccgcaaggtatggatatggacccgacctgttcactgtttacgacagggcaatgtctgggagaacccgacctgctggcgtcggcccgtcgcttacaatttttttcacatcagtactcgattgctgtgctgatggcaaatgcccgtggtaacagtgcactatgggatgaacatggtcgtctcatcgttcgcgccgatcgtggttcattattgttagtcggtcagcgttcatcacagggttggcaaggcgatatcattccattacgctag

SEQ ID NO: 1510 - DNA, 663 bp, Escherichia coli
atgttgcgcattatcgatacagaaacctgcggtttgcagggagggatcgttgagattgcctctgttgatgtcattgacggaaaaatcgtcaatcccatgagccacctggtgcgtcccgatcgtcctattagtccacaggcgatggcgattcatcgcatcaccgaagccatggtcgccgataaaccgtggattgaagatgtgatcccgcactattacggtagtgaatggtatgtcgcgcataacgccagctttgaccgccgcgtactgcctgaaatgcccggtgagtggatttgcactatgaaactggcccgtcgtttgtggccagggatcaagtacagcaatatggcgttatataaaacacggaagctcaatgtacagacgccgccgggcctgcatcatcaccgcgcgttgtatgactgttatatcaccgctgcgttgcttatcgatattatgaacacctccggctggacggcagaacagatggccgatatcaccggacgtccatcgttgatgacgactttcacctttggcaaataccgtggcaaagcggtttccgacgttgccgaacgcgatccgggctatctgcgctggttatttaataacctggacagcatgagcccggagctgcgtttaacactgaaacattatctggaaaatacttaa

SEQ ID NO: 1511 - DNA, 2061 bp, Escherichia coli
atgctaccaaaagccgcccgcattccccacgccatgacgcttcatggcgatacgcgcatcgataattactactggctgcgggacgatacgcgttctcagccggaagtcctggactatctgcaacaagaaaatagttacggtcatcgggtgatggcctcgcaacaagccttgcaggatcgcatcttaaaggaaatcatcgaccgcattccgcaacgagaagtttctgcgccctacatcaaaaatggctaccgctatcggcatatttatgaaccaggctgtgaatatgctatctaccagcgtcaatcggcgttcagtgaagagtgggacgagtgggaaacattgctcgatgccaacaagcgcgcggctcatagtgagttttattcgatgggcggaatggcgattacgccagataacaccattatggcactggcagaagattttctttcccgacggcagtacggcattcgttttcgtaatctggaaacaggtaactggtacccggaactgctggataacgttgaacccagctttgtctgggcaaatgactcctggactttctactatgttcgcaagcatccagtgacgctgctcccttatcaggtctggcgtcacgccatcggtacgccagcatcgcaagataaactgatttacgaagaaaaagacgatacctattacgtcagcctgcataaaacgacctcgaagcattatgtggtcattcatctggccagcgccaccaccagtgaagttcgcctgctggacgcggaaatggccgatgccgagccgtttgtttttctgcctcgccgcaaagatcacgaatacagccttgatcactaccagcatcggttttatctgcgtttcaaccgccacggtaaaaactttggcttataccgtacccgtatgcgtgatgagcaacagtgggaagagttaattccgccacgtgataacattatgctggaagggtttacgctgtttaccgactggctggtggttgaagagcgtcagcgcgggttaaccagtttgcggcaaattaaccgcaagacccgggaagtcattggcattgcctttgatgatccggcctatgtgacctggattgcctacaatccagaacctgaaaccgcgcgattgcgttatggttattcttccatgaccacaccagatactttgtttgaactggatatggataccggtgagcgtcgtgtattaaaacaaacggaagttcctggttttgatgcggcgaattaccgcagtgaacacctgtggatagtcgcccgtgatggcgtcgaagttccggtttcgctggtctatcatcgcaaacattttcgcaaaggacacaacccgctgctggtgtatggctacggttcttacggcgcaagtattgatgccgatttcagttttagccgcttgagtttgttggatcgtggatttgtctacgccattgtccatgttcgtggcggcggtgagctggggcaacaatggtacgaggacggtaaatttctgaagaagaaaaatacgtttaatgattatcttgatgcctgcgatgcattgttaaaactgggctatggctctccttcgctctgttatgcgatgggcgggagtgcggggggtatgttgatgggcgttgcgattaatcaacgcccggaattgttccacggcgttatcgcccaggtaccgtttgttgatgttgtaacaacaatgctggatgaatcaattcctcttaccaccggcgaatttgaagagtgggggaatccgcaggatccgcaatattacgagtatatgaaaagctacagcccgtatgacaacgtcaccgcacaggcttatccgcatttactggtaacgaccggtttacacgattctcaggtgcaatattgggaaccggcaaaatgggtcgctaaattgcgcgagctgaaaaccgatgaccatcttttattgctctgtaccgacatggactcaggtcatggcggtaaatctggtcgctttaaatcgtacgaaggcgtagcgatggaatatgcttttctggtcgcgctggcgcagggaacattacccgctacgcctgcggattaa

SEQ ID NO: 1512 - DNA, 660 bp, Escherichia coli
atggctaactggttaaatcaactgcaatctctgcttgggcaaagccgttcttctacctcctcgtctgcggatcagggattgggcaaacttttagtgcctggcgcattaggcggactggctgggctgctggtcgcaaataaatcagcacgtaaacttcttacgaaatatggcacaaacgcgttactggttggcggcggagcggtagcgggtacggtgctgtggaataaatacaaagataaaattcgcgcggcgcatcaggatgaaccgcagtttggcgcgcaaagtacgccgctggatgagcgtacggaacgtttgatccttgcgctggtctttgccgctaaaagtgatggccatatcgatgccaaagaacgtgcggcaatcgaccagcaattgcgagaagccggtgtggaagagaaggggcgtgtactcattgagcaggcaatcgaacaaccgctggatccacaacgcctggctaccggggtccgcaatgaagaagaggcgctggaaatctatttcctgagctgcgcggctattgatattgaccattttatggaacgcagttacctgaatgcactgggtgatgcgctgaaaatcccccaggacgttcgtgaaggcattgaacgcgatctcgaacagcaaaaacgtactttggcggagtaa

SEQ ID NO: 1513 - DNA, 357 bp, Escherichia coli
atgaaaaaaagaggggcgtttttagggctgttgttggtttctgcctgcgcatcagttttcgctgccaataatgaaaccagcaagtcggtcactttcccaaagtgtgaaggtctggatgctgccggaattgccgcgagcgtaaaacgtgattaccaacaaaatcgcgtggcgcgctgggctgatgatcaaaaaattgtcggtcaggccgaccccgtggcatgggtcagtttgcaggacattcaggggaaagatgataaatggtcagtaccgctaaccgtgcgtggtaaaagtgccgatattcattaccaggtcagcgtggactgcaaagcgggaatggcggaatatcagcggcgttaa

SEQ ID NO: 1514 - DNA, 291 bp, Escherichia coli
atggcggttgaagttaaatacgtagtcattcgtgagggcgaagagaaaatgtcgtttaccagcaaaaaggaagccgatgcttatgacaagatgcttgatacggccgatctgcttgacacctggctgacaaattctccagtgcaaatggaagatgagcaacgtgaagccctttcgctatggctggcagaacaaaaagatgtgctgagcaccattctgaaaaccggcaaattaccgtccccacaggtcgtcggtgctgaatccgaagaggaagatgcctcacacgcggcctga

SEQ ID NO: 1515 - DNA, 1179 bp, Escherichia coli
atgacgttattaggcactgcgctgcgtccggcagcaactcgcgtgatgttattaggctccggtgaactgggtaaagaagtggcaatcgagtgtcagcgtctcggcgtagaggtgattgccgtcgatcgctatgccgacgcaccagccatgcatgtcgcgcatcgctcccatgtcattaatatgcttgatggtgatgcattacgccgtgtggttgaactggaaaaaccacattatatcgtgccggagatcgaagctattgccaccgatatgctgatccaacttgaagaggaaggactgaatgttgtcccctgcgctcgcgcaacgaaattaacgatgaatcgcgagggtatccgtcgcctggcggcagaagagctgcagctgcccacttccacttatcgttttgccgatagcgaaaaccttttccgcgaagcggttgccgccattggctacccctgtattgttaaaccggtgatgagttcttccggtaaagggcagacgtttattcgttctgcagagcaacttgctcatgcatgggagtacgctcagcaaggtggtcgcgccggagcgggccgcgtaattgttgaaggcgtcgttaagtttgacttcgaaattaccctgctaaccgtcagcgcggtggatggcgtccatttctgtgcaccggtaggtcatcgccaggaagatggcgactatcgtgaatcctggcaaccacagcaaatgagcccgcttgcccttgaacgtgcgcaggagattgcccgtaaagtggtgctggcactgggcggttatgggctgtttggtgtcgagctgtttgtctgtggtgatgaggtgattttcagtgaagtctcccctcgcccgcatgacaccgggatggtgacgctaatttctcaggatctctcggagtttgccctgcatgtacgtgccttcctcggacttccggttggcgggatccgccagtatggtcctgctgcttctgccgttatcctgccgcaactgaccagtcagaatgtcacgtttgataatgtgcagaatgccgtaggcgcagatttgcagattcgtttatttggtaagccggaaattgatggcagccgtcgtctgggggtagcactggctactgcagagagtgttgttgacgccattgaacgcgcgaagcacgccgccggacaggtaaaagtacagggttaa

SEQ ID NO: 1516 - DNA, 642 bp, Escherichia coli
atgaaaaactggaaaacaagtgcagaatcaatcctgaccaccggcccggttgtaccggttatcgtggtaaaaaaactggaacacgcggtgccgatggcaaaagcgttggttgctggtggggtgcgcgttctggaagtgactctgcgtaccgagtgcgcagttgacgctatccgtgctatcgccaaagaagtgcctgaagcgattgtgggtgccggtacggtgctgaatccacagcagctggcagaagtcactgaagcaggtgcacagtttgcaattagcccgggtctgaccgagccgctgctgaaagctgctaccgaagggactattcctctgattccggggatcagcactgtttccgaactgatgctgggtatggactacggtttgaaagagttcaaattcttcccggctgaagctaacggcggtgtgaaagccctgcaggcgatcgcgggtccgttctctcaggtccgtttctgcccgacaggtggtatttctccggctaactaccgtgactacctggcgctgaaaagcgtgctgtgcatcggtggttcctggctggttccggcagatgcgctggaagcgggcgattacgaccgcattactaagctggcgcgtgaagctgtagaaggcgctaagctgtaa

SEQ ID NO: 1517 - DNA, 1812 bp, Escherichia coli
atgaatccacaattgttacgcgtaacaaatcgaatcattgaacgttcgcgcgagactcgctctgcttacctcgcccggatagaacaagcgaaaacttcgaccgttcatcgttcgcagttggcatgcggtaacctggcacacggtttcgctgcctgccagccagaagacaaagcctctttgaaaagcatgttgcgtaacaatatcgccatcatcacctcctataacgacatgctctccgctcaccagccttatgaacactatccggaaatcattcgtaaagccctgcatgaagcgaatgcggttggtcaggttgcgggcggtgttccggcgatgtgtgatggtgtcacccaggggcaggatggaatggaattgtcgctgttaagccgcgaagtgattgcgatgtctgcggcggtggggctgtcccataacatgtttgatggtgctctgtttctcggtgtgtgcgacaagattgtcccgggtctgaccatggcagccctgtcgtttggtcatttgcctgcggtgtttgtgccgtctggaccgatggcaagcggtttgccaaataaagaaaaagtgcgtattcgccagctttatgccgaaggtaaagtggaccgcatggcattactggagtcagaagccgcgtcttatcatgcgccgggaacatgtactttctacggtactgccaacaccaaccagatggtggtggagtttatggggatgcagttgccaggctcttcttttgttcatccggattctccgctgcgcgatgctttgaccgctgcagctgcgcgccaggttacacgcatgactggcaacggtaatgaatggatgccgatcggtaagatgatcgatgagaaagtggtggtgaacggtatcgttgcactgctggcgaccggtggttccactaaccacaccatgcacctggtggcgatggcgcgcgcagccggtattcagattaactgggatgacttctctgacctttctgatgttgtaccgctgatggcacgtctctacccgaacggtccggccgatattaaccacttccaggcggcaggtggcgtaccggttctggtacgtgaactgctcaaagcaggcctgctgcatgaagatgtcaatacggtggcaggctttggtctgtctcgttatacccttgaaccatggctgaataatggtgaactggactggcgggaaggggcagaaaaatcactcgacaacaatgtgatcgcgtccttcgaacaacctttctctcatcatggtgggacaaaagtgttaagcggtaacctgggccgagcggttatgaaaacctctgccgtgccggtagagaaccaggtgattgaagcgccagcggttgtttttgaaagccagcatgacgttatgccggcctttgaagcgggtttactggaccgcgattgtgtcgttgttgtccgtcatcaggggccaaaagcgaacggaatgccagaattacataaactcatgccgccacttggtgtattattggaccggtgtttcaaaattgcgttagttaccgatggacgactctccggcgcttcaggtaaagtgccgtcagctatccacgtaacaccagaagcctacgatggcgggctgctggcaaaagtgcgcgacggggacatcattcgtgtgaatggacagacaggcgaactgacgctgctggtagacgaagcggaactggctgctcgcgaaccgcacattcctgacctgagcgcgtcacgcgtgggaacaggacgtgaattattcagcgccttgcgtgaaaaactgtccggtgccgaacagggcgcaacctgtatcactttttaa

SEQ ID NO: 1518 - DNA, 1476 bp, Escherichia coli
atggcggtaacgcaaacagcccaggcctgtgacctggtcattttcggcgcgaaaggcgaccttgcgcgtcgtaaattgctgccttccctgtatcaactggaaaaagccggtcagctcaacccggacacccggattatcggcgtagggcgtgctgactgggataaagcggcttataccaaagttgtccgcgaggcgctcgaaactttcatgaaagaaaccattgatgaaggtttatgggacaccctgagtgcacgtctggatttttgtaatcttgatgtcaatgacactgctgcattcagccgtctcggcgcgatgctggatcaaaaaaatcgtatcaccattaactactttgccatgccgcccagcacttttggcgcaatttgcaaagggcttggtgaggcaaaactgaatgctaaaccggcacgcgtagtcatggaaaaaccgctggggacgtcgctggcgacctcgcaggaaatcaacgatcaggttggcgaatacttcgaggagtgccaggtttaccgtatcgaccactatcttggtaaagaaacagtgctgaacctgttggcgctgcgttttgctaactctctgtttgtgaacaactgggacaatcgcaccattgatcatgttgagattaccgtggcagaagaagtggggatcgaagggcgctggggctattttgataaagccggtcagatgcgcgacatgatccagaaccacctgctgcaaattctttgcatgattgcgatgtctccgccgtctgacctgagcgcagacagcatccgcgatgaaaaagtgaaagtactgaagtctctgcgccgcatcgaccgctccaacgtgcgcgaaaaaaccgtacgcgggcaatatactgcgggcttcgctcagggcaaaaaagtgccgggctatctggaagaagagggcgcgaacaagagcagcaatacagaaaccttcgtggcgatccgcgtcgacattgataactggcgctgggccggtgtgccattctacctgcgtactggtaaacgtctgccgaccaaatgttctgaagtcgtggtctatttcaaaacacctgaactgaatctgtttaaagagtcgtggcaggatctgccgcagaataaactgactatccgtctgcaacctgatgaaggcgtggatatccaggtactgaataaagttcctggccttgaccacaaacataacctgcaaatcaccaagctggatctgagctattcagaaacctttaatcaaacgcatctggcagatgcctatgaacgtctgctgctggaaaccatgcgtggtattcaggcactgtttgtacgtcgtgatgaagtggaagaagcctggaaatgggtagactccattactgaggcgtgggcgatggacaatgatgcgccgaaaccgtatcaggccggaacctggggccccgttgcctcggtggcgatgattacccgtgacggtcgttcctggaatgagtttgagtaa

SEQ ID NO: 1519 - DNA, 150 bp, Escherichia coli
atgacgatttccgctctgaaagaaatcgaaatgcagttttgtcagatattacgcctgtgtgctgtgttaatgacaaaagcagataaaaaagttgttattttttttcataacatgatcagtgtcagatttttacccaatggaaaacgatga

SEQ ID NO: 1520 - DNA, 870 bp, Escherichia coli
atgaatatgctggaaaaaatccagtctcagctggaacatttgagcaaatctgagcgcaaagttgccgaggtcattctggcttcgcccgataacgcgatccattcgagtattgctgctctggcgctggaagccaatgttagcgaaccgacggtgaatcgtttctgtcgcagcatggacacacgcggttttcctgattttaaacttcatctggcacaaagtctggcgaatggcactccctatgttaatcgcaacgtcaatgaagatgacagcgttgaatcatacacggggaaaatatttgagtccgcaatggcaacgctcgatcatgtccgtcattcactggataaatctgccatcaaccgcgccgtcgacttgctcactcaggcaaaaaaaatcgcctttttcggattaggttcttcagccgccgttgcccacgatgcgatgaataagttctttcgttttaatgttccggtggtgtactccgatgatatcgtgctgcaacgcatgagttgtatgaattgtagcgacggagacgtggtggtgctgatttctcacacgggaagaacaaaaaatctggtcgagctggcgcagctggcacgcgaaaacgacgctatggtaattgccctcacctctgcgggcaccccactcgcccgggaagcaacgctggcaattaccctcgacgtaccggaagatactgacatttatatgcccatggtttctcgacttgcacagctgaccgtgatagatgtgctggcgacaggatttactttgcggcgcggtacaaaattcagagataacttgaagcgggtcaaggaagcgctgaaggaatcgcgttttgataagcagttacttaatttaagtgacgatcgctaa

SEQ ID NO: 1521 - DNA, 1443 bp, Escherichia coli
atgtccagaaggcttcgcagaactaaaatcgttaccacgttaggcccggcaacagatcgcgataataaccttgaaaaagttatcgcggcgggtgccaacgttgtacgtatgaatttttctcacggctcgcctgaagatcacaaaatgcgcgcggataaagttcgtgagattgccgcaaaactggggcgtcatgtggctattctgggtgacctccaggggcccaaaatccgtgtatccacctttaaagaaggcaaagttttcctcaatattggggataaattcctgctcgacgccaacctgggtaaaggtgaaggcgacaaagaaaaagtcggtatcgactacaaaggcctgcctgctgacgttgtgcctggtgacatcctgctgctggacgatggtcgcgtccagttaaaagtactggaagtccagggcatgaaagtgttcaccgaagtgaccgtcggtggtcccctctccaacaataaaggtatcaacaaacttggcggcggtttgtcggctgaagcgctgaccgaaaaagacaaagcagacattaagactgcggcgttgattggcgtagattacctggctgtctccttcccacgctgcggcgaagatctgaactatgcccgtcgtctggcacgcgatgcaggatgtgatgcgaaaattgttgccaaggttgaacgtgcggaagccgtttgcagccaggaggcaatggatgacatcatcctcgcctctgacgtggtaatggttgctcgcggcgacctcggtgtggaaattggcgatccggaactggtcggcattcagaaagcgttgatccgtcgtgcgcgtcagcttaaccgcgcagtaatcactgcgacccagatgatggagtcaatgattactaacccgatgccgacgcgtgcagaagtcatggacgtagcaaacgccgttctggatggtactgacgctgtgatgctgtcggcagaaactgctgctggtcaatacccgtcagaaactgttgcagccatggcgcgcgtttgcctgggggcggaaaaaatcccgagcatcaacgtttctaaacaccgtctggatgttcagttcgacaatgtggaagaagccattgccatgtcagcaatgtacgcggctaaccacctgaaaggcgttacggcgatcatcaccatgaccgaatcgggtcgtaccgcgctgatgacctcccgtatcagctctggtctgccaattttcgccatgtcacgccatgaacgtacgctgaacctgacagctctctatcgcggcgttacgccggtgcactttgatagcgctaatgacggcgtagcagctgccagcgaagcggttaatctgctgcgcgataaaggttacttgatgtctggtgacctggtgattgtcacccagggcgacgtgatgagtaccgtgggttctactaataccacgcgtattttaacggtagagtaa

SEQ ID NO: 1522 - DNA, 972 bp, Escherichia coli
atggaaacgaaaaaaaataatagcgaatacattcctgagtttgataaatcctttcgccatccgcgctactggggagcatggctgggcgtagcagcgatggcgggtatcgctttaacgccgccaaagttccgtgatcccattctggcacggctgggacgttttgccggacgactgggaaaaagctcacgccgtcgtgcgttaatcaatctgtcgctctgctttccagaacgtagtgaagctgaacgcgaagcgattgtagatgagatgtttgccaccgcgccgcaagcgatggtaatgatggctgagttggcaatacgcgggccggagaaaattcagccgcgcgttgactggcaagggctggagatcatcgaagagatgcggcgtaataacgagaaagtgatttttctggtgccgcacggttgggccgtcgatattcctgccatgctgatggcctcgcaagggcagaaaatggcagcgatgttccataatcagggcaacccggtttttgattatgtctggaacacggtgcgccgtcgctttggtggtcgtctgcatgcgagaaatgatggtattaaaccattcatccagtcggtacgtcagggttactggggatattatttacccgatcaggatcatggcccagaacacagcgaatttgttgatttctttgccacctataaagcgacgttgcccgcgattggtcgtttgatgaaagtgtgccgtgcgcgcgttgtaccgctatttccgatttatgatggcaagacgcatcgtctgacgattcaggtgcgcccaccgatggatgatctgttagaggcggatgatcatacgattgcgcggcggatgaatgaagaagtcgagatttttgttggtccgcgaccagaacaatacacctggatattaaaattgctgaaaactcgcaaaccgggcgaaatccaaccgtataagcgcaaagatctttatcccatcaaataa

SEQ ID NO: 1523 - DNA, 1323 bp, Escherichia coli
gtgcaacagatagcccgctctgtcgccctggcgtttaataatttaccgcgaccacaccgcgttatgttggggtcgctcaccgttcttactctggccgtcgctgtctggcggccctatgtttatcaccgcgatgccacgccaattgtcaaaaccattgagctggaacagaacgaaattcgttcgctcttacctgaagccagtgagccgattgatcaagctgcacaagaagatgaagccattccccaggacgaactggatgacaaaatcgccggtgaagcgggcgtgcatgaatatgttgtttccactggcgatacgctaagcagcattctcaatcagtatggtattgatatgggtgatatcacccaactggctgctgccgacaaagaattgcgtaacctgaaaatcggtcaacaactctcctggacattaaccgcggacggcgaactgcagcgcctcacctgggaagtgtctcgtcgtgaaacccgaacctatgaccgtactgccgctaacggttttaaaatgaccagcgaaatgcagcaaggagagtgggtcaacaatctgctgaaaggtaccgtcgggggaagctttgttgctagcgccagaaacgccggtttaaccagcgccgaagtgagcgcagtgattaaagccatgcagtggcaaatggatttccgcaaactgaaaaaaggcgatgaatttgcggtgttaatgtcacgagaaatgcttgatggtaaacgtgagcaaagccagctgctgggcgtacgtttgcgttcagaaggtaaagattattacgcaatccgcgctgaagatggcaaattctatgatcgtaacggtactggtctggcgaagggattcttgcgattcccgacggcgaaacagttccgtatctcatctaactttaacccgcgtcgtactaatccggtgaccggtcgcgttgcgccacacagaggtgttgattttgccatgccacaaggtacgccagtgctttcagtgggtgacggtgaagtggtggttgccaaacgtagtggcgcagcaggttattatgtggctattcgtcatggtcgcagctacaccacgcgttatatgcacttgcgcaagatcctggtgaaaccgggacagaaggtgaaacgtggcgaccgtatcgcgctttccggtaataccggacgttcaaccgggccgcatctgcactatgaagtatggataaaccagcaggccgtaaacccgctgacggcaaaactgccgcgtaccgaagggctgaccggctccgatcgtcgcgaattcctggcacaggccaaagagattgtgccgcagctacggtttgattaa

SEQ ID NO: 1524 - DNA, 987 bp, Escherichia coli
atgaaatgttataatatcacagttctcacattcattacgatgattggtcgcattatgttacataaaaaaacgcttcttttcgcagcattatccgccgctctctggggcggtgcaacacaggccgcagatgccgccgttgtcgcttcgcttaaacccgttgggttcatcgcttctgccattgctgatggggtaacagaaacgcaggttttactgcctgacggcgcttcagaacatgattattcactgcgtccatcggatgtaaaacgcttacagaacgcggacttagtcgtttgggttggcccggagatggaagcgttcatgcaaaaaccggtaagtaaattaccagaagcgaaacaggtaacgattgcgcagctagaagatgtgaaaccgctgctgatgaaaagtattcacgacgatgatgatgatcacgatcacgcggaaaaaagtgacgaagatcaccatcacggcgatttcaacatgcatctttggctttccccagagatagcgcgggctacagcggttgcaatccatggaaaattagtggaacttatgccgcaaagtcgagccaaacttgacgccaacctgaaggattttgaggcacaattagcctcaaccgaaacgcaggttggtaacgagctcgcgccgctcaaggggaaaggttatttcgtttttcacgatgcttacggctacttcgaaaaacagttcggactgacaccgcttggtcattttaccgttaaccctgagattcaacctggcgcgcagcgtttacatgaaataagaacacagttggttgagcaaaaagcaacctgcgtttttgctgagccacagttcaggccagcggtcgttgagagcgtcgcacgagggacatccgttcgtatgggaacgttggatcccctggggacgaatatcaaactgggtaaaacaagctattcagaattcctgaatcaattagccaaccagtatgcgagctgcctgaaaggagattaa

SEQ ID NO: 1525 - DNA, 756 bp, Escherichia coli
atgacaagtctggtttccctggaaaatgtctcggtttcttttggccaacgccgcgtcctctctgatgtgtcgctggaacttaaacctggaaaaattttgactttacttgggccaaacggcgcaggtaagtcgacactggtacgggtagtgctcggactggtaacacccgatgaaggggttatcaagcgcaacggaaaactgcgcatcggctatgtaccgcagaagctgtatctcgacaccacgttgccactgaccgtaaaccgttttttacgcttacgccctggcacacataaagaagatattttgcctgcactgaaacgtgtccaggccgggcatctgattaacgcaccgatgcaaaagctctcgggtggcgaaacgcagcgtgtactgttagcgcgagcattgttaaatcgaccgcaattattagtgctggatgaacccactcagggcgtggatgtgaatggtcaggtggcgttatatgaccttattgaccaactgcgtcgtgaactggattgtggcgttttaatggtatctcacgatctgcatctggtaatggcaaaaaccgatgaagtgctttgcctgaatcaccacatttgttgttccggcacaccggaagttgtttccctgcatccggagtttatttctatgtttggtcctcgtggtgctgaacaactgggtatctatcgccatcatcataatcatcgtcacgatttacagggacgaattgttttgcgtcggggaaatgatcgctcatga

SEQ ID NO: 1526 - DNA, 786 bp, Escherichia coli
atgattgaattattatttcccggttggttagccgggatcatgctcgcctgtgccgcgggtccgctgggttcgtttgtagtctggcgtcgtatgtcttatttcggtgatacgctggctcatgcctcattacttggcgtcgcgtttggtttgttgctggacgtgaatccattctatgcggtgattgcagttacgctgctgctggcgggcggtctggtatggctggagaagcgtccacagctggcgatcgacacgttattagggattatggcgcacagtgccctgtcgctgggcctggtggtcgttagtctgatgtctaatattcgtgttgatttgatggcttacctgttcggtgatttactggcagtgacgccagaagatctcatctctattgcgattggcgtagtcatcgtggtggctattttgttctggcaatggcgcaatttgctgtcgatgacgattagcccggatctggcgtttgttgatggtgtgaaattacagcgcgtgaaattgttgttgatgctggtgacggcattgacgattggtgtagcgatgaaatttgtcggcgcgttgattattacttcactgctgattattcctgctgctactgcacgtcgctttgcccgcacgccggaacagatggctggtgtcgctgttttggtggggatggtggcagtgactggcggtttaaccttttccgcattttacgatacacctgcaggcccgtcggtggtgctatgcgcggcactgttatttattctcagtatgatgaaaaaacaggccagctaa

SEQ ID NO: 1527 - DNA, 1011 bp, Escherichia coli
atgattgaagcagaccgtctgatttctgccggtaccactttgccggaagatgtggcagatcgcgccattcgccctaaattactggaagagtatgttggtcagccgcaggttcgttcgcagatggagattttcatcaaagcagcgaaactgcgcggcgatgccctcgatcatctgttgatttttggtcctccggggttgggtaaaactacgcttgccaatattgtcgccaatgaaatgggcgttaatttacgcacgacttctggtccggtgctggaaaaggcgggcgatctggcagcaatgctcactaaccttgaaccacacgatgtactgtttattgatgagatccaccgtctttcaccagtggtggaagaggtgttgtatccggcaatggaagattaccaactggatatcatgattggtgaaggtccggcggcacgctccattaaaattgatttgccgccgtttaccctgattggtgcaaccacgcgcgcaggttcgctgacatcaccgttgcgcgatcgttttggtattgtgcaacgtctggagttttatcaggtgccggatctgcaatatatcgtcagtcgcagcgcacgctttatggggcttgagatgagtgatgacggcgcgctggaagttgctcgtcgtgcgcgcggtacgccacgtattgccaaccgtctgctgcgtcgagtgcgtgatttcgccgaagtgaagcacgatggcaccatctcggcagatatcgctgctcaggcgctggatatgttgaatgtcgatgctgaaggtttcgattatatggaccgcaaattgttgctggcggtaatcgataagttctttggtgggccggtaggtctggataacctggcggcagccattggcgaagaacgtgaaaccattgaggatgtactggaaccttatttgattcagcaaggctttttgcagcgtacaccgcgtgggcgtatggcgacagtgcgggcgtggaaccacttcggcatcacaccgccagaaatgccgtaa

SEQ ID NO: 1528 - DNA, 612 bp, Escherichia coli
gtgataggcagactcagaggcatcatcattgaaaaacaacccccgctggtgttaattgaagtgggcggcgtaggctatgaagtgcatatgccgatgacctgtttttatgaactccctgaagcgggtcaggaagcgatcgttttcacccactttgtggtgcgtgaagacgcgcaactgctgtacggttttaacaataaacaagagcgcacgttgttcaaagagttgatcaaaaccaacggcgtcggcccgaagttggcgctggcgatcctctccggaatgtcagcgcagcagttcgttaatgccgttgagcgtgaagaagtgggggcactggtgaaactgccgggtattggcaaaaaaaccgccgaacgcttgattgtcgaaatgaaagaccgatttaaaggtttgcatggcgatctctttacgccagccgccgacctggtactcacgtcacctgccagcccggcgactgacgatgctgaacaggaagcggttgctgcactggtggcgctgggctataaaccacaagaagcaagccgtatggtgagcaaaatcgctcgccctgacgccagcagtgaaacattaattcgcgaagccctacgcgccgcgttatga

SEQ ID NO: 1529 - DNA, 603 bp, Escherichia coli
gtgaatattaattatcctgctgaatatgaaattggtgatatcgtctttacatgtataggtgctaccttatttggtcaaatatcatctgcatcaaattgctggagtaatcacgtcgggatcattatcggtcataacggtgaagactttctggttgcagaaagccgtgttcccctctcaaccatcactacgctatcccgttttattaaacgctctgctaatcaacgctatgctataaagcgattagacgccggactaacagaacaacaaaaacaacgaattgttgaacaggttccttcccggctacgcaaactttaccacaccggttttaaatacgaatcttcgcgccagttctgttcaaaatttgtttttgatatttataaagaggcgctatgtattccggtgggtgaaatagagacgtttggagaattgttaaatagcaatccaaatgcaaaactcactttctggaaattctggttcttaggttctattccgtgggagcgtaaaaccgtcacgccagccagtttgtggcatcatccgggtttggtgttgattcacgcggtgggagttgaaacgcatcagcctgaactgaccgaggcggtataa

SEQ ID NO: 1530 - DNA, 522 bp, Escherichia coli
atggctattattctcggcattgacccgggttcgcgcgtgaccggctatggcgtcatccgccaggtaggcaggcaactgtcctacctgggtagcggatgcatacgcaccaaagtggatgatttaccgtctcgtctgaagctcatctatgcgggcgtgacggaaatcatcacccaattccagcctgattatttcgccattgaacaggtctttatggcgaagaacgctgactcagccctgaaactggggcaggcgcgcggcgtggcgattgtggcggcggtgaatcaggaattgccggtatttgaatatgcggcacgtcaggtaaagcaaacagtggtaggtattggtagtgccgaaaaaagccaggtgcagcacatggtccgcaccttgctgaaactgcccgctaatccacaggcggatgccgccgatgcgctggcgattgccatcacccactgccacgttagtcagaatgcgatgcaaatgagcgaatcgcgactgaacctggcgagagggcgactgcgttaa

SEQ ID NO: 1531 - DNA, 741 bp, Escherichia coli
atggcaggtcatagtaaatgggccaacaccagacatcgtaaagctgcgcaggatgctaagcgcggtaaaatcttcactaaaatcattcgtgagctggtaaccgcggctaagctgggcggtggtgatccggacgctaacccgcgtttgcgtgcagcaattgataaagcactgtctaacaacatgacccgtgacactctgaaccgcgcaattgcacgaggtgtgggcggtgatgatgatgcaaacatggaaaccatcatctacgaaggttacggtcctggcggcacggcaatcatgattgaatgtctgtctgacaaccgcaaccgtaccgttgctgaagtgcgtcatgcattcagcaaatgtggcggtaacctcggtactgatggttccgtagcttatttgttcagcaaaaaaggcgtgatctccttcgagaaaggcgatgaagacaccatcatggaagcagccctggaagccggtgctgaagacgttgtgacctatgatgacggcgcgattgatgtctacactgcatgggaagaaatgggcaaagtacgcgacgctctggaagcggcaggtctgaaagcagacagcgcggaagtttccatgatcccgtccaccaaagctgatatggatgcagaaaccgcaccgaaactgatgcgtctgatcgatatgctggaagattgcgacgacgtgcaggaagtttaccataacggtgaaatctctgatgaggttgcagcgactctctga

SEQ ID NO: 1532 - DNA, 444 bp, Escherichia coli
atggcttataagcgtcccgtttcgatcttagtggtcatctacgcacaagatacgaaacgggtgctgatgttgcagcggcgtgacgatcccgatttctggcagtcggtaaccggcagcgtggaagagggtgaaaccgcgccgcaagctgccatgcgcgaagtaaaggaagaggtcaccattgatgttgtcgctgaacaactgaccttaattgactgtcagcgcacggtagagtttgaaattttttcacatttacgtcatcgctatgcgccgggcgtgacgcgtaatacggaatcatggttctgtcttgcgcttccgcacgagcgccagatcgttttcactgaacatctggcttacaagtggcttgatgcgtctgctgcggcggcgctcactaagtcctggagcaaccggcaggcgattgaacagtttgtaattaacgctgcctga

SEQ ID NO: 1533 - DNA, 1773 bp, Escherichia coli
atgcgtacagaatattgtggacagctccgtttgtcccacgtggggcagcaggtgactctgtgtggttgggtcaaccgtcgtcgtgatcttggtagcctgatcttcatcgatatgcgcgaccgcgaaggtatcgtgcaggtatttttcgatccggatcgtgcggacgcgttaaagctggcctctgaactgcgtaatgagttctgcattcaggtcacgggcaccgtacgtgcgcgtgacgaaaaaaatattaaccgcgatatggcgactggcgaaatcgaagtactggcgtcctcgctgactatcatcaaccgtgcagatgttctgccgcttgactctaaccacgtcaacaccgaagaagcgcgtctgaaataccgctacctcgacctgcgtcgcccggaaatggctcagcgcctgaaaacccgcgctaaaatcaccagcctggtgcgccgttttatggatgaccacggcttcctcgacatcgaaactccgatgctgaccaaagccacgcctgaaggcgcgcgtgactacctggtgccttctcgtgtgcacaaaggtaaattctacgcgctgccgcaatccccgcagttgttcaaacagctactgatgatgtccggatttgaccgctactatcagatcgttaaatgcttccgtgacgaagacctgcgtgctgaccgtcagcctgaatttactcagatcgatgtggaaacctctttcatgaccgcgccgcaagtgcgtgaagtgatggaagcgctggtgcgtcatctgtggctggaagtgaagggcgtggatctgggcgatttcccggtaatgacctttgcagaagcagaacgccgttatggttctgataaaccggatctgcgtaacccgatggaactgaccgacgttgccgatctgctgaaatctgttgagtttgcagtatttgcaggtccggcgaatgatccgaaaggccgtgttgccgctctgcgcgttccgggcggcgcatcgttgacccgtaagcagatcgacgaatacggtaacttcgttaaaatctacggcgcgaaaggtctggcttacatcaaagttaacgaacgcgcgaaaggtctggaaggtatcaatagcccggtagcgaagtttcttaatgcagaaatcatcgaagccatcctggagcgtactggcgcgcaagatggcgatatgattttcttcggtgccgacaacaagaaaattgttgccgacgcgatgggcgcactgcgcctgaaagtgggtaaagaccttggtctgaccgacgaaagcaaatgggcaccgctgtgggttatcgacttcccgatgtttgaagacgacggtgaaggcggcctgacagcaatgcaccatccgttcacctcaccgaaagacatgacggcagcagaactgaaagctgcaccggaaaatgcggtggctaacgcttacgatatggtcatcaatggttacgaagtgggcggtggttctgtgcgtatccataatggtgatatgcagcagacggtgtttggtattctgggtatcaacgaagaggaacagcgcgagaaattcggcttcctgctcgacgccctgaaatacggtactccgccgcacgcaggtctggcattcggtcttgaccgtctgacgatgctgctgaccggcaccgacaatatccgtgacgttatcgccttcccgaaaaccacggcggcagcgtgtctgatgactgaagcaccgagctttgctaacccgactgcactggctgagctgagcattcaggttgtgaagaaggctgagaataactga

SEQ ID NO: 1534 - DNA, 567 bp, Escherichia coli
atgcttgaacttaatgctaaaaccaccgcgctggtggtgattgatttacaagaaggcatcttaccttttgccggaggtccatatactgccgatgaggtggttaatcgcgccgggaagctggcggcgaaatttcgcgcgaacggtcagcccgtgtttctggtgcgcgttggctggtctgccgattacgccgaagcattaaaacagtcggttgatgccccctcccccgcaaaagtgttgcccgaaaactggtggcaacatcctgctgcattaggtgcaaccgacagcgatatcgaaatcatcaaacgtcaatggggtgcgttttacggtacggatctggagttgcaattacgccgccggggtatcgatacaatagtgttatgtgggatctcgaccaatatcggtgttgaatccaccgcccgcaatgcctgggaactcggttttaatctggtgattgccgaagatgcctgtagcgccgctagcgccgagcagcacaataacagcattaatcatatctacccgcgcatcgcccgtgtgcgtagcgttgaagagatcctcaacgcgttatga

SEQ ID NO: 1535 - DNA, 819 bp, Escherichia coli
atgatttacatcggtttgccacaatggtcgcatcctaaatgggtgcggttggggatcaccagccttgaagagtatgcccgccactttaactgtgtggagggtaacaccacgctttatgccctgccgaaacccgaggttgtcctgcgctggcgtgagcagaccacagatgacttccgcttctgttttaagtttccggcgaccatttcgcatcaggcagcattacggcattgcgatgatttagtgactgaatttttgacccgcatgtcaccgttggctccgcgcattggacaatactggctgcaactgcctgccacattcggcccacgggagctgcctgcgctttggcattttctcgattctcttcccggtgaatttaattatggggtggaagtccgccatccacagtttttcgccaaaggggaagaggaacaaacgcttaatcgcggtttacatcagcgcggcgttaatcgggtgattttagacagccgcccggttcatgcagcacgtccacacagtgaagctattcgcgacgctcaacgaaaaaaacctaaagttccggtacatgctgtactgacggcgaaaaatccactgatccgttttatcggtagtgatgatatgacgcaaaaccgggaattatttcaggtctggttacaaaaattagcgcagtggcatcagaccactacgccttatctttttttacatacgccagatattgcccaggccccggaactggtacataccctgtgggaagacttacgtaaaacgcttccagagatcggagcagttccggctattccacagcaatcttctcttttctga

SEQ ID NO: 1536 - DNA, 396 bp, Escherichia coli
atggtaagcgcgctgtatgccgttttaagtgcgttgttattaatgaagttctcttttgatgtcgttcgcctgcgaatgcagtaccgcgttgcctatggcgacggcggttttagcgaactgcaaagcgctattcgcattcatggtaacgcggtggaatatattcccatcgcgattgtgttgatgctgtttatggaaatgaatggcgcagaaacctggatggtgcatatttgcggcatcgttttgcttgctggtcgtctgatgcattattacggttttcatcaccgtctgttccgctggcgacgttccggcatgagcgccacctggtgtgcgctgttgctgatggtgctggcgaatctttggtatatgccctgggagttggttttctccctgcgttag

SEQ ID NO: 1537 - DNA, 744 bp, Escherichia coli
atgtctcaccgcgacacgctattttctgcccctatcgccagactgggcgactggacctttgatgaacgggtagctgaagtcttcccggatatgatccagcgttccgttcccggctattccaatattatttccatgattggtatgttagccgagcgcttcgttcaacctggtacgcaggtttacgatctgggttgttctctgggcgcagcgacgctctcggtgcgtcgcaacattcatcatgataattgcaaaattattgccatcgacaactctccggcgatgattgaacgctgccgtcgtcatattgacgcctataaagcccctacgccagtagacgttattgaaggtgatattcgcgatatcgccattgaaaacgcatcgatggtggtgctgaattttaccctgcaattcctggaaccttccgagcgtcaggcgttactggataaaatttatcaagggctgaacccgggcggtgcgctggtgctttcggaaaaattcagtttcgaagatgccaaagttggtgaattgctgttcaacatgcaccacgactttaaacgtgccaacggttacagcgaactggagatcagccagaagcgcagcatgctggaaaacgtgatgctgaccgattccgtggaaacccataaagcacgcctgcatcaagctggttttgagcatagcgagctgtggttccagtgctttaactttggttccctggtggcattaaaagcagaggacgctgcatga

SEQ ID NO: 1538 - DNA, 972 bp, Escherichia coli
atgatcgactttggtaacttttattctctgattgccaaaaatcatctttcacactggctcgaaacgctgcccgcgcagattgctaactggcagcgcgagcagcagcacgggctgtttaagcagtggtccaacgcggtggaatttctgcctgaaattaaaccgtatcgtctggatttattgcatagcgtaaccgccgaaagcgaagagccactgagcgcagggcaaattaaacgcattgaaacgctgatgcgcaacctgatgccctggcgcaaagggccgttctcactgtatggcgtcaacatcgataccgaatggcgttccgactggaaatgggatcgcgttctgccccatctttctgatttaaccgggcgcaccattcttgatgtcggctgcggcagcggttatcacatgtggcgcatgattggcgcaggcgcgcacctcgcggtggggatcgaccctacacaactgtttctgtgccagtttgaagcggtgcgtaaactactgggtaacgatcagcgcgcacatttgttaccgttaggtattgaacaacttccggcactgaaagcctttgataccgtcttttcgatgggcgtgctttatcatcgtcgttcaccgctggagcatctctggcagttaaaagaccaactggtgaatgaaggtgaactggtgctggaaacgctggttattgatggtgatgagaacacggtgctggtgccgggcgatcgttacgcgcaaatgcgtaatgtctatttcatcccttccgcgctggcgctgaaaaactggctgaagaagtgtggttttgttgatattcgcattgcagatgtgagcgttaccaccacagaagagcagcgacgcaccgaatggatggtcaccgagtctctggccgattttctcgacccgcatgatccgggtaagacggtggaaggttatcctgcgcctaaacgcgcggtgctgattgcgcgcaagccgtaa

SEQ ID NO: 1539 - DNA, 2430 bp, Escherichia coli
atgacattaacaagacgtgaatttattaaacacagcggtattgccgctggggcgctggtggtgacatcggctgcaccgctacccgcatgggcagaagagaagggtggcaaaatcctcaccgcgggccgttggggagcgatgaacgtagaagtgaaggacggcaagattgtttcttcgacaggcgcgctggcgaaaaccataccgaactccttacagtctacggcggcggatcaggtacacaccacggcgcgtattcagcatccgatggtgagaaaaagctatctcgataatccacagcaaccggcgaaaggtcgtggcgaagatacctatgtacaggtgagctgggaacaagcattaaaactgattcatgagcaacatgatcgtattcgtaaagctaacggaccatcggccatttttgccggatcttacggctggcgatcttctggcgtgttgcataaagcgcaaaccttactgcaacgttatatgaacctggcgggcggttattccgggcatagcggcgattattcaaccggggcggcacaggtgatcatgccgcatgtggtcggttctgtagaggtgtatgaacagcagacctcctggccgctgattctggaaaacagccaggttgtggtgctgtgggggatgaacccgctgaataccttaaaaattgcctggagcagtaccgatgagcaagggctggaatacttccatcagctgaaaaaatctggcaaaccagtgattgccatagatcctattcgctccgaaaccatcgaattctttggcgataatgccacctggatcgcgccgaatatgggcaccgacgtggcactgatgttaggtatcgcgcataccctgatgacacaaagcaaacacgataaagtgttccttgaaaaatacaccaccgggtatccgcagtttgaagagtatctgacaggtaagagcgataataccccgaagagcgcggcctgggcggcggaaattactggcgtaccggaagcgcagatagtcaaactcgctgaactgatggcggcgaatcgcacaatgctgatggcaggctggggaattcagcgccagcaatatggtgaacagaaacactggatgctggtgacgctggcggcgatgttagggcagattggtacaccgggcggcgggtttggtttctcttatcattactccaatggtggcaacccgacgcgtgttggcggcgtgctgccggaaatgtctgcggcgattgccggacaggccagcgaggccgctgatgatggcggaatgacggcgattcctgttgcccgtatcgtcgatgcgctggaaaatcctggcggcaaatatcagcataacggtaaagaacaaacgtatccgaatatcaaaatgatctggtgggcgggtggcggtaactttacccatcaccaggatactaatcgtctgattaaagcatggcagaaaccggagatgatcgtcgtttctgaatgctactggaccgcagcagccaaacacgcagatatcgtattaccgatcaccacatcgtttgagcgcaatgacctgacgatgaccggtgattacagcaaccagcatattgtgccgatgaagcaggctgtcgctgcgcaatttgaagcgcgcaacgattttgacgtgtttgccgatcttgctgaattactcaaacctggcggaaaagagatctataccgaaggtaaagatgaaatggcgtggctgaaatttttctatgatgtcgctcagaaaggtgcccgtgcgcaacgcgtgactatgccgatgtttaatgccttctggcagcaaaataaactgatcgaaatgcgccgcagcgagaagaacgaacagtacattcgttatggtgatttccgcgccgatccggtgaaaaatgcgctgggtacaccaagcggcaaaattgagatttactccagaacgctggaaaaatttggctataaggattgcccggcacacccaacctggcttgcgcctgatgagtggaagggtaccgccgacgagaagcagttgcagcttctgaccgcacatccggcacaccgtttacacagtcagcttaactatgcggaactgcgtaaaaaatatgcggttgccgatcgtgaaccaatcactattcacaccgaagatgctgctcgctttggtattgcgaatggcgatctggtgcgtgtctggaacaagcgcggtcagatcctgacaggcgctgtggtgactgacgggatcaaaaaaggcgtggtatgcgtgcatgaaggtgcatggccggatctggaaaatggcttgtgtaaaaacggtagtgcgaacgtgttaacggcggatatctccagctcgcagctggcgaatgcctgtgccggtaactctgcgctggtgtatatcgaaaaatatacgggcaatgcgctgaagttaacggcgtttgatcagccaactgttcaggcataa

SEQ ID NO: 1540 - DNA, 1101 bp, Escherichia coli
atgcgagggaaaaaacgcattgggttattgtttttgctgatagcggttgtggttggtggcggcgggttattgctggcgcaaaaagccttacataaaacgtcggataccgcattttgcctttcctgccactcgatgagtaaaccttttgaggaatatcagggaactgtccacttttcaaaccagaaagggatacgtgcggaatgtgccgattgccatattccaaagtcagggatggattatttatttgctaaattaaaagcatctaaagatatttatcatgaatttgttagcggcaaaatagacagtgatgataagttcgaagctcatcgccaggaaatggccgaaacagtatggaaagaattaaaagcaactgactctgcaacctgccgtagttgccattcttttgatgccatggatattgactcgcaaagtgaatctgcgcagaaaatgcataataaagcgcaaaaggacggcgaaacctgtatcgattgccataaaggcattgcccattttccgccagaaataaaaatggatgacaacgcggcgcatgagctggaaagtcaggccgctacttcagttactaatggcgcacatatttatcctttcaaaacttctcgcataggcgaactggctaccgtgaatcctggtaccgatctcaccgtcgttgatgccagtggcaaacagccgatcgttctgttgcagggttatcaaatgcagggcagtgaaagcacgctctacctggcggcaggtcaacgtctggcgctagccacattaagtgatgaaggtatcaaggcgctgacggtaaacggggaatggcaggctgacgaatacggcaatcaatggcgtcaggcgtctttacagggtgtgcttaccgatcccgcattagcggaccgtaaaccgctatggcaatacgctgaaaaacttgacgatacctattgcgctggttgccatgcccctattgccgctgaccattacaccgtcaatgcttggccgtccattgccaaaggtatgggggcgcgaaccagcatgagcgaaaacgaactggacattttgacgcggtacttccagtacaacgccaaagatattaccgagaaacagtga

SEQ ID NO: 1541 - DNA, 747 bp, Escherichia coli
atggcattactggaaatttgctgttacagcatggaatgcgcgctaacggcgcagcaaaacggcgctgacagagttgaattatgcgcagctccaaaagaggggggcttaacgccgtcgttgggggtactgaaatccgtgcgccagcgggtgacgatcccagtgcatccgattatccgcccacgcggtggtgatttttgctacagcgacggtgagtttgccgccattcttgaagatgtgcgcacagtccgcgaattaggttttcctggactggtgacgggcgttctcgatgttgacgggaatgtcgatatgccacgaatggaaaaaataatggctgctgccggtccgctggcagtgacttttcatcgcgccttcgatatgtgcgctaaccctttaaatacactcaataatcttacggaattgggcattgcccgggtactgacatcagggcaaaaatcagacgcactgcaaggtttatcaaaaattatggaacttattgcccatcgtgatgctccaatcattatggccggagcaggagtccgtgcggaaaacctgcaccacttcctcgatgccggagtgctggaagtccatagctccgcgggagcgtggcaagcctcaccgatgcgttatcgtaatcaaggattgtccatgtcatcagatgcacacgcggacgagtattcgcgttatgtcgtagacggggcggcggttgctgaaatgaaaggaatcattgaacgccatcaggccaaatga

SEQ ID NO: 1542 - DNA, 567 bp, Escherichia coli
atggcgaactggcaatctatcgacgagctgcaggatattgcatcggatttaccgcgatttacccacgcattagatgaactttcccgccgtctggggttggatatcactccgctgactgccgatcacatttccttgcgttgccatcaaaacgtcaccgctgaacgctggcgtcgcgggtttgaacagtgcggcgagcttttgtcagaaaatatgatcaatggcagaccgatttgtctgtttaaattgcatgaaccggtacaggttgcgcactggcagttttccattgtggagctaccgtggcccggggaaaaacgttacccgcacgaaggttgggaacatattgaaatcgttctgccgggtgatccagaaacgctgaatgcccgtgcgctggcattgctttctgatgaaggactcagcctgccggggatctcagttaaaaccagttcgccaaaaggtgagcatgaacgattaccgaatccgacgctggcggtcaccgatggtaaaacaaccattaagtttcatccgtggtccattgaagagatcgttgccagcgagcagtcggcgtaa

SEQ ID NO: 1543 - DNA, 1734 bp, Escherichia coli
gtgaatattcaggctcttctctcagaaaaagtccgtcaggccatgattgcggcaggcgcgcctgcggattgcgaaccgcaggttcgtcagtcagcaaaagttcagttcggcgactatcaggctaacggcatgatggcagttgctaaaaaactgggtatggcaccgcgacaattagcagagcaggtgctgactcatctggatcttaacggtatcgccagcaaagttgagatcgccggtccaggctttatcaacattttccttgatccggcattcctggctgaacatgttcagcaggcgctggcgtccgatcgtctcggtgttgctacgccagaaaaacaaaccattgtggttgactactctgcgccaaacgtggcgaaagagatgcatgtcggtcacctgcgctctaccattattggtgacgcagcagttcgtactctggagttcctcggtcacaaagtgattcgcgcaaaccacgtcggcgactggggcactcagttcggtatgctgattgcgtggctggaaaagcagcagcaggaaaacgccggtgaaatggagctggctgaccttgaaggtttctaccgcgatgcgaaaaagcattacgacgaagatgaagagtttgccgagcgtgcacgtaactacgtggtaaaactgcaaagcggtgacgaatatttccgcgagatgtggcgcaaactggtcgacatcaccatgacgcagaaccagatcacctacgatcgtctgaacgtgacgctgacccgtgatgacgtgatgggtgaaagcctctacaacccaatgctgccgggtatcgtggcggacctgaaagccaaaggtctggcagtagaaagtgaaggcgcgaccgttgtattccttgatgagttcaaaaacaaggaaggcgaaccgatgggcgtgatcattcagaagaaagatggtggctatctctacaccaccactgatatcgcctgtgcgaaatatcgttatgaaacactgcatgccgatcgcgtgctgtattacatcgactcccgtcagcatcaacacctgatgcaggcgtgggctatcgtccgcaaagcaggctatgtaccggaatccgtaccgctggaacaccacatgttcggcatgatgctgggtaaagacggcaaaccgttcaaaacccgcgcgggtggtacagtgaaactggcagacctgctggatgaagccctggagcgtgcacgccgtctggtggcagaaaagaacccggatatgccagccgacgagctggaaaaactggctaacgcggttggtattggtgcggtgaaatatgcggatctctccaaaaaccgcaccacggactacatcttcgactgggacaacatgctggcgtttgagggtaataccgcgccatacatgcagtatgcttacacgcgtgtattatccgtgttccgtaaagcagaaattgacgaagagcaactggctgcagctccggtaatcatccgtgaagatcgtgaagcgcaactggcagctcgcctgctgcagtttgaagaaaccctcactgtggttgcccgtgaaggcacgccgcatgtgatgtgtgcttacctgtacgatctggccggtctgttctctggcttctacgagcactgcccgatcctcagcgcagaaaacgaagaagtgcgtaacagccgtctgaaactggcacaactgacggcgaagacgctgaagctgggtctggatacgctgggtattgagacagtagagcgtatgtaa

SEQ ID NO: 1544 - DNA, 393 bp, Escherichia coli
atgagagccttattagcaatattattgtttccgctgctggtgcaagccgccggggaggggatgtggcaggcgagtagcgtgggcgttacgctaaatcatcgcggtgaatcgatgtcgtcagcgcctctttctacgcgacaacctgcttcaggattgatgacgctggtggcgtggcgttatcagcttatcggtccgacacctgcaggactgcgggttcgcttgtgttcacaatctcgttgtgtcgaattagaggggcagagtggaaccaccgtggccttttccggtataccggcggcagaaccgttgcgctttatctgggaagtgcctggcggtgggcggttaattccgccgctaaagattcaacggaatgaagtgattgtaaattatcgttaa

SEQ ID NO: 1545 - DNA, 2079 bp, Escherichia coli
atgagtaatctggccgcgatgctgcgcctgcctgcaaacctgaaatcgacacaatggcagatccttgccggaccgattttgatcctgttgatcttgtcgatgatggtactgccactgcccgcattcatactcgacctgctgtttaccttcaatattgccttgtcgatcatggtgttgctggtggcgatgtttacccagcgcacgctcgagtttgctgcgtttccgaccatcctgttgtttaccacgctgttgcgtctggcacttaacgtggcttcaacccgtatcattttgatggaagggcataccggcgcggcggcggctggaaaggtggtcgaagcgttcggtcacttcctcgttggtggcaatttcgctatcggtatcgtggtgttcgtcattctcgtgatcatcaactttatggttatcaccaaaggtgccgggcgtattgcggaagtgggcgcgcgctttgttctcgatggtatgccgggtaagcagatggcgattgacgccgaccttaacgccggattgattggtgaagatgaagcgaaaaaacgccgctccgaagtgactcaggaagccgatttttacggctcgatggacggggcaagtaagtttgttcgcggcgatgccatcgccgggatcctcatcatggtcattaacgttgtcggcggattgctggtcggtgtgctgcaacatggcatgagcatggggcacgcggcggaaagttatacgctattgaccattggcgacggtctggtggcacaaatcccggcactggtgatttctaccgccgcgggcgtcatcgttacacgtgtcagcaccgatcaggatgttggcgagcagatggtgaatcagcttttcagtaatccgagcgttatgttattaagcgccgccgtgctcggtttactcggcctggtgcctggaatgccgaacctggtatttttgctgttcactgccggattgctggggctggcctggtggatccgcggacgtgaacaaaaagcgcctgctgaaccaaaaccggtaaaaatggcagagaataataccgttgtcgaagcgacgtggaacgatgtacaactggaagattctctgggaatggaagtgggttatcgactgatcccgatggtcgatttccagcaggatggtgagttgttgggccgtatacgcagtatccgcaagaaatttgcccaggagatggggtttctgccgccagtggtacacattcgcgacaatatggatttgcaaccagcccgctatcgtatcttgatgaaaggtgtcgaaatggggagtggtgatgcttatccggggcgctggctggcaattaatccaggcactgccgccggaacattacctggtgaagcgaccgttgatccggcatttggcctgaatgctatctggattgaaagtgcgcttaaagaacaggcgcagattcaggggtacaccgtggttgaggccagcacggtggtggcaacgcatcttaaccacctcattagccagcatgccgcagagctgtttggtcgtcaggaggcgcaacagctgctggatcgcgtcgcccaggagatgccaaagctgacggaagatctcgttcctggcgtcgtcacgcttaccacactgcataaagtgctgcaaaatctgctcgatgaaaaagtgccgattcgcgatatgcgcaccattctcgaaacgctggcggaacatgcgcccatccagagcgatccgcatgaattaaccgctgtcgtgcgcgtggcgttgggacgtgcgattacccagcagtggtttcctggcaaagatgaagtccatgttattggcctcgatacaccgctggaacgtttgttgctacaggcattgcagggcggggggggactggagccagggctggcggatcgcttgttggcgcaaactcaggaagcgctatcccgtcaggagatgttgggtgcgccgccggtactgttggtgaaccacgcgctgcgaccattattgtctcgcttcctgcgccgcagcttgccgcagttagtggtgctgtcgaatctggaactatcagataaccgacatatccgtatgacggcgacgattggcggcaaataa

SEQ ID NO: 1546 - DNA, 1149 bp, Escherichia coli
gtgtctgacgagagcgacgacaaaacagaagcccccacacctcaccgactagaaaaagcgcgggaagaggggcaaatcccgcgttcccgcgaactgacttcactgctgattttgctggtgggcgttagtgttatctggtttggcggtgtgtcgctggcccgtcgattgtcgggcatgctctccgcagggctgcattttgatcacagtattatcaatgacccgaatctgatcctcgggcagattattctgctgatcagagaagccatgctggcgctgctaccgctgattagcggcgtggtgctggtggcgattatttctccggttatgctgggggggctggtatttagcggaaaatccttgcagccgaagttttccaaactcaacccgctaccgggcattaaacggatgttctcggcacagactggcgcggagttgcttaaggcaattttgaaaaccatcctggttggcagcgtgacggggttttttctctggcatcactggccgcagatgatgcgcttaatggccgagtctccgattaccgccatgggtaatgcgatggatctggtagggctatgcgcgctgctggtggtgcttggtgtcattccaatggtgggatttgacgtctttttccaaatcttcagccacctgaaaaagctgcgaatgtcacggcaggatattcgtgatgagttcaaacaaagcgaaggcgacccccatgttaaagggcggatccgtcagatgcagcgagcggccgcacggcgtcggatgatggccgatgtgccgaaagcggatgtcattgtcaataacccgacccactattcggtagcgttgcagtatgacgaaaacaaaatgagcgcaccgaaagtggtcgctaaaggtgcagggctggtcgcgctgcgcattcgtgaaattggcgctgaaaataacgtcccgacgcttgaagcgccgccgctggcgcgtgcgctgtatcgacatgcggagatcggtcaacaaatcccgggtcaactgtacgccgcggtggcggaagtgctggcctgggtctggcaactgaaacgctggcgtctggctggtggacagcgccctgtacaacctactcatcttccggtgccggaagccctggattttattaacgagaaaccgacccatgagtaa

SEQ ID NO: 1547 - DNA, 645 bp, Escherichia coli
atgatgcaaccatcaatcaaacctgctgacgagcattcagctggcgatatcattgcgcgcatcggcagcctgacgcgtatgctgcgcgacagtttgcgggaactggggctggatcaggccattgccgaagccgcggaagctatccccgatgcgcgcgatcgtttgtactatgttgtgcagatgaccgcccaggctgcggagcgggcgctgaacagtgttgaggcgtcacaaccgcatcaggatcaaatggagaaatcagcaaaagcgttaacccaacgttgggatgactggtttgccgatccgattgaccttgccgacgcccgtgaactggtaacagacacgcggcaatttctggcagatgtccccgcacataccagctttactaacgcgcaactgctggaaatcatgatggcgcaggattttcaggatctcaccggacaggtcattaagcggatgatggatgtcattcaggagatcgaacgtcagttgctgatggtgctgttggaaaacatcccggaacaggagtcgcgtccaaaacgtgaaaaccagagtttgcttaatggacctcaggtcgataccagcaaagccggtgtggtagccagtcaggatcaggtggacgatttgttggatagtcttggattttga

SEQ ID NO: 1548 - DNA, 390 bp, Escherichia coli
atggcggataaagaacttaaatttttggttgtggatgacttttccaccatgcgacgcatagtgcgtaacctgctgaaagagctgggattcaataatgttgaggaagcggaagatggcctcgacgctctcaataagttgcaggcaggcggttatggatttgttatctccgactggaacatgcccaatatggatggcctggagttgctgaaaacgattcgtgcggatggcgcgatgtcggcattgccagtgttaatggtgactgcagaagcgaagaaagagaacatcattgctgcggcgcaagcgggggccagtggctatgtggtgaaaccatttaccgccgcgacgctggaggaaaaactcaacaaaatctttgagaaactgggcatgtga

SEQ ID NO: 1549 - DNA, 1050 bp, Escherichia coli
atgagcaaaatcagggtgttatctgtcgatgattcggcactgatgcgccagatcatgacagaaatcatcaacagccatagcgacatggaaatggtggcgaccgcccctgatccgctggttgcgcgtgatttgattaagaaattcaatcccgatgtattgacgctggatgttgaaatgccgcggatggacggactggatttcctcgaaaaattaatgcgtttgcgtccaatgcccgttgtgatggtttcttccctgaccggcaaagggtcagaagttacgctgcgcgcgctggagctgggggcgatagattttgtcaccaaaccgcaactgggtattcgcgaaggaatgctggcatatagcgaaatgattgctgaaaaggtgcgtacggcagcaaaggcgagccttgcagcacataagccattgtcggtaccgacaacgctgaaggcagggccgttgttgagttctgaaaaactgattgcgattggtgcttcaacgggtggaactgaggcaattcgtcacgtactgcaaccgttgccgctttccagtccggcactgttaattacccagcatatgccgcccggtttcacccgctcttttgccgacagacttaataagctttgccagatcggggttaaagaagccgaagacggagagcgcgtcttgccgggacatgcctatatcgcgccgggcgatcggcatatggagctggcgcgtagtggcgcaaattatcaaatcaaaattcacgatggcccggcggttaatcgccatcggccatcggtagatgtgttgttccattctgtggccaaacaggcggggcgtaatgcggttggggtaatcctaaccggtatgggcaacgacggcgcggcgggaatgttggcgatgcgtcaggcgggggcatggacccttgcgcaaaacgaagcaagttgcgtggtgttcggcatgccgcgcgaggccatcaatatgggtggtgtctgcgaagtggtcgatcttagccaggtaagtcagcaaatgctggcaaaaattagtgccggacaggcgatacgtatttaa

SEQ ID NO: 1550 - DNA, 861 bp, Escherichia coli
atgacttcatctctgccctgtgggcaaacgtctttattgttacagatgaccgagcgcctggcgctttccgacgcgcattttcggcggataagtcaattgatctatcaacgagccgggatcgttctggctgaccataaacgcgacatggtttacaaccgactggttcgtcgtttgcgtgcgctgggactggcggatttcggtcattacctgaacttgctggaatctaatcagcacagcggtgagtggcaggcgtttatcaattcgctgaccacgaatctgacggcatttttccgtgaggcacaccattttcctctgctcgcggatcacgcacgtcgccgttctggcgagtatcgcgtatggagcgcggcggcttcaaccggcgaagagccgtacagcatagcgatgacgctggctgatacattgggcaccgcgcccggacgctggaaagtgtttgccagcgatatcgacaccgaagtgctggaaaaagccagaagcggtatttatcgccatgaagagttgaaaaacctgacgccgcagcaactgcaacggtatttcatgcgagggacgggaccgcatgaagggctggtacgcgtgcgtcaggagctggcgaactatgttgattttgccccgctgaatttgctggcgaaacagtacaccgtgccggggccgtttgatgcgatcttctgtcgtaacgtcatgatctacttcgatcaaactacccagcaggagattttgcgccgctttgtttcgctccttaaacccgacggattgctgtttgcgggtcactctgaaaactttagccaccttgagcgccgcttcacgctgcgtggtcagacggtgtatgcgctaagtaaggattaa

SEQ ID NO: 1551 - DNA, 1662 bp, Escherichia coli
atgattaaccgtatccgcgtagtcacgctgttggtaatggtgctgggggtattcgcactgttacagcttatttccggcagtctgtttttttcttcccttcaccatagccagaagagctttgtggtttccaatcaattacgggaacagcagggcgagctgacgtcaacatgggatttaatgctacaaacgcgcattaacctgagtcgttcagcggtgcggatgatgatggattcatccaatcagcaaagtaatgccaaagttgaattgctcgatagcgccaggaaaacattggcccaggccgcgactcattataaaaaattcaaaagaatggcaccgttacctgaaatggtcgctaccagtcgtaatattgatgaaaaatataaaaactatcacacagcgttaactgaactgattgattatcttgattatggcaatactggagcttatttcgctcagccaacccagggaatgcaaaatgcaatgggcgaagcgtttgctcagtacgccctcagcagtgaaaaactgtatcgcgatatcgtcactgacaacgcagatgattaccgatttgcccagtggaaactggcggttatcgcgctggtggtggtattgattctgctggtggcgtggtacggcattcgccgtatgttgcttacaccgctggcaaaaattattgcgcatattcgcgaaattgccggtggtaacctggcgaataccctgaccattgacgggcgcagtgaaatgggcgacctggcgcagagcgtttcacatatgcaacgctctttgactgacaccgtcactcatgtgcgcgaaggttcagatgccatctatgccggtacccgtgaaattgcggcgggcaacaccgatctttcctcccgtactgaacagcaggcatccgcgctggaagaaactgccgccagcatggagcagctcaccgcgacagtgaagcaaaacgccgataacgcccgccaggcctcgcaactggcgcaaagtgcctccgacaccgcccagcacggcggcaaagtggtggatggcgtagtgaaaacgatgcatgagatcgccgatagttcgaagaaaattgccgacattatcagcgttattgatggtattgccttccagactaatatcctcgcgctgaatgccgctgttgaagccgcgcgagcgggtgaacagggccgtggttttgccgtggtggcgggtgaagtgcgtaatcttgccagtcgcagtgcacaggcggcaaaagagatcaaagccctcattgaagactccgtctcgcgcgttgataccggttcggtgctggtcgaaagcgctggggaaacaatgaacaatatcgtcaatgctgtcactcgcgtgactgacattatgggcgagattgcatcagcatcggatgaacagagccgtggcatcgatcaagtcgcattggcggtttcggaaatggatcgcgtcacgcaacagaacgcatcgctggtgcaggaatcagctgccgccgcagctgcgctggaagaacaggcgagtcgtttaacgcaagcggtttccgcgttccgtctggcagccagcccactcaccaataaaccgcaaacaccatcccgtcctgccagtgagcaaccaccggcacagccacgactgcgaattgctgaacaagatccaaactgggaaacattttga

SEQ ID NO: 1552 - DNA, 504 bp, Escherichia coli
atgaccggtatgacgaatgtaacaaagctggccagcgagccgtcaggccaggaatttctggtatttacccttggtgatgaagagtacggtattgatattctgaaagtgcaggagatccgtggctacgatcaggtgacacggattgcgaacacgccagcgtttatcaaaggcgtcacgaatctgcgcggcgttattgtgccgattgttgacttacgaattaagttcagccaggtggatgtggactataacgacaacacggtagttatcgtcctgaatctcggacagcgggtggtcggcatcgtggttgacggcgtctcagacgtgctttcattgacggcggagcaaattcgtccggcaccggaatttgccgtgacgctttcaaccgaatatcttacaggactgggcgcactgggcgaccgcatgttgattctggtgaacatcgaaaagctgctgaacagcgaagagatggcgctgttagatagcgcggcgtcagaagtggcgtaa

SEQ ID NO: 1553 - DNA, 1965 bp, Escherichia coli
gtgagcatggatataagcgatttttatcagacattttttgatgaagcggacgaactgttggctgatatggagcagcatttgctggttttgcagccggaagcgccagatgccgaacaattgaatgccatctttcgggctgcccactcgatcaaaggaggggcaggaacctttggcttcagcgttttgcaggaaaccacgcatctgatggaaaacctgctcgatgaagccagacgaggtgagatgcaactcaacaccgacattatcaatctgtttttggaaacgaaggacatcatgcaagaacagctcgacgcttataaacagtcgcaagagccggatgccgccagcttcgattatatctgccaggccttgcgtcaactggcattagaagcgaaaggcgaaacgccatctgcagtgacccgattaagtgtggttgccaaaagtgaaccgcaagatgagcagagtcgtagtcagtcaccgcgacgaattatcctttcgcgcctgaaggccggtgaagtcgacctgctggaagaagagctggggcatctgacaacgttaactgacgtggtgaaaggggcggattctctctcggcaatattaccgggcgacattgccgaagatgacatcacagcggtactctgttttgtgattgaagccgatcagattacctttgaaacagtagaagtctcgccaaaaatatccaccccaccagtgcttaaactggcagccgaacaagcgccaaccggtcgcgtggagcgggaaaaaacgacgcgcagcagtgaatccaccagcatccgtgtagcggtagaaaaggttgatcaattaattaacctcgtcggcgagctggtcatcacccagtccatgcttgctcagcgctccagtgaactggacccggttaatcatggtgatttgattaccagcatggggcagttacaacgtaacgctcgtgatttgcaggaatcagtgatgtcgattcgcatgatgccgatggaatatgtctttagtcgctatccccggctggtgcgtgatctggcgggaaaactcggcaagcaggtagaactgacgctggtgggcagttccactgaactcgacaagagcctgatagaacgcattatcgacccgctgacccacctggtacgcaatagcctcgatcacggtattgaactgccagaaaaacggctcgctgcaggtaaaaacagcgtcggaaatttaattctgtctgccgaacatcagggcggcaacatttgcattgaagtgaccgacgatggggcggggctaaaccgtgaacgaattctggcaaaagcggcctcgcaaggtctgaccgtcagcgaaaacatgagcgacgacgaagttgcaatgctgatatttgcacctggcttctccacggcggagcaggtcaccgacgtctccgggcgtggcgtcggcatggacgtcgttaaacgtaatatccaggagatgggcggtcatgtcgagatccagtcgaagcagggtactggcactacgatccgcattttactgccgctgacgctggcaattcttgacggcatgtccgtacgcgttgcggatgaagttttcattctgccgctgaatgctgtcatggaatcactgcaaccccgtgaagccgatctgcatccactggctggcggcgagcgggtgctggaagtgcggggtgaatatctgcctatcgtcgaactgtggaaagtgttcaacgtcgcgggcgcgaaaaccgaagccacccagggaattgtggtgatcttacaaagtggcggtcgccgctacgccttgctggtggatcaattaattggtcaacatcaggttgtggttaaaaaccttgaaagtaactatcgcaaagtccccggcatttctgctgcgaccattcttggcgacggcagcgtggcactgattgttgatgtctccgccttgcaggcgataaaccgcgaacaacgtatggcgaacaccgccgcctga

SEQ ID NO: 1554 - DNA, 927 bp, Escherichia coli
atgaagaatcaagcgcatccgattattgtcgtcaaacgacgcaaagccaaaagccacggggcagcacatggatcgtggaagattgcttatgccgactttatgaccgcgatgatggccttttttctggtgatgtggctaatctccatctccagcccaaaagagctgattcagattgcggagtacttccggactccactggcgactgcggttacgggcggcgatcgcatttctaatagtgaaagcccaattcccggtgggggtgatgattacacccaaagccagggggaagtgaataagcagccgaacatcgaagagctgaaaaaacgcatggagcaaagtcgattgcggaaattgcgtggcgatctcgaccagttgattgaatccgatccgaaactgcgggcgttacgtccacatctcaaaatcgatctggtccaggaaggtctacgtattcagatcatcgatagccagaatcgcccgatgtttagaactggcagtgccgacgtcgaaccctatatgcgcgacattctgcgcgccatcgcgcccgtactgaacggtattcccaaccgaattagcctctcgggtcataccgatgattttccctacgccagcggtgagaaaggttacagcaactgggagctttctgccgatcgtgccaatgcatcccgccgcgaactgatggttggtgggttgaatggcggcaaagtgttacgtgtcgtcggcatggcggcaacgatgcgcttaagcgatcgcggacctgatgatgccgtcaaccgtcgcatcagcctgctggtactgaacaaacacgccgaacaggccattttgcatgaaaacgccgaaagccagaatgagccagtaagcgccctggaaaaacctgaggttgcaccacaggtcagtgttcccacaatgccatcagccgaaccgaggtga

SEQ ID NO: 1555 - DNA, 888 bp, Escherichia coli
gtgcttatcttattcggttacctggttgttctcggtacagttttcggcggttatttgatgaccggtggaagccttggagcactctatcaacccgctgaactggtgattattgccggtgcagggattgggtcgtttatcgtcggcaataatggcaaagcgattaaaggcacgctgaaggcgctgccgttgctgtttcgtcgctccaaatacaccaaagcaatgtatatggatctgctggctctgctttatcggttgatggcgaaatcgcggcagatggggatgttttcgctggaacgcgatattgaaaatccccgtgagagcgagatcttcgccagctacccacgcatccttgcggatagcgtcatgcttgaatttatcgtcgattatctgcgcctgattatcagcggtcacatgaacaccttcgaaatcgaagccctgatggatgaagaaattgagacgcacgaaagcgaggcagaagtcccggcgaacagtctggcgctggtcggggattcccttccggcatttggtattgtcgcggctgtaatgggggtcgttcacgcgttaggttcagccgatcgtcctgccgccgagttgggggcgcttatcgcacatgcgatggtggggactttcctcggtattttattggcttacggatttatttccccattagcgagtgttttacgtcagaaaagcgccgaaaccagcaaaatgatgcagtgcgtcaaagtcactctgctttcaaatctgaacggttacgcaccgcctatcgccgttgagtttggtcgcaaaacgctctattccagcgaacgtccgtcgtttattgagctggaagagcatgtgcgtgcggtgaaaaatccgcaacaacagacgacaaccgaggaagcatga

SEQ ID NO: 1556 - DNA, 579 bp, Escherichia coli
atgagtgaaaaaagcattgttcaggaagcgcgggatattcagctggcaatggaattgatcaccctgggcgctcgtttgcagatgctggaaagcgaaacacagttaagtcgcggacgtctgataaaactctataaagaactgcgcggaagcccaccgccgaaaggcatgctgccattctcaaccgactggtttatgacctgggaacaaaacgttcatgcttcgatgttctgtaatgcatggcagtttttactgaaaactggcttgtgtaatggcgtcgatgcggtgatcaaagcctaccgtttataccttgaacagtgcccgcaagcagaagaaggaccgctgctggcattaacccgtgcctggacattggtgcggtttgttgaaagtggattactgcaactttccagctgcaactgctgcggcggcaattttattacccacgctcaccagcctgttggcagctttgcctgcagcttatgtcagccgccatcccgggcagtaaaaagacgtaaactttcccagaatcctgccgatattatcccacaactgctggatgaacagagagtacaggctgtttaa

SEQ ID NO: 1557 - DNA, 351 bp, Escherichia coli
atgcatacctccgagttgctgaaacacatttatgacatcaacttgtcatatttactacttgcacagcgtctgattgttcaggacaaagcgtccgctatgtttcgtctcggcataaatgaagaaatggcgacaacgttagcggcactgactcttccgcaaatggttaagctggcagaaaccaatcaactggtttgtcacttccgttttgacagccaccagacgattactcagttgacgcaagattcccgcgttgacgatctccagcaaattcataccggcatcatgctctcaactcgcttgctgaatgatgttaatcagcctgaagaagcgctgcgcaagaaaagggcctga

SEQ ID NO: 1558 - DNA, 429 bp, Escherichia coli
atgagctatagcaatattcttgtcgccgttgcggttacaccggaaagtcagcaactgctggcaaaagcggtatctatcgccaggccagtaaagggacacatcagtttaattactctcgcttccgacccggaaatgtacaatcaattagctgcgccgatgcttgaagatttacgcagcgtgatgcaggaagaaacgcaaagctttcttgataagttaattcaggatgcggggtatcccgttgacaagacgtttattgcctacggtgagttaagcgaacatattctggaagtttgtcgcaaacatcatttcgatttggtgatttgcggtaatcacaatcacagtttcttttcgcgagcatcctgctcggcgaaaagagtgattacctcaagtgaggtcgatgtgctgttagttccacttacgggagattaa

SEQ ID NO: 1559 - DNA, 1425 bp, Escherichia coli
atgagtcgtttagtcgtagtatctaaccggattgcaccaccagacgagcacgccgccagtgccggtggccttgccgttggcatactgggggcactgaaagccgcaggtggactgtggtttggctggagcggtgaaacagggaatgaggatcagccgctaaaaaaggtgaaaaagggtaacattacgtgggcctcttttaacctcagcgaacaggaccttgacgaatactacaacaaattctccaatgccgttctctggcccgcttttcattatcggctcgatctggtgcaatttcagcgtcctgcctgggatggctatctacgcgtaaatgcgttgctggcagataaattactgccgctgttgcaagacgatgacattatctggatccacgattatcacctgttgccctttgcgcatgaattacgcaaacggggcgtgaataatcgcattggtttctttctgcatattcctttcccgacaccggaaatcttcaacgcgctgccgacatatgacaccttgcttgaacagctttgtgattatgatttgctgggtttccagacggagaacgatcgtctggcgttcctggattgcctttctaacctgacccgcgtcacgacacgtagcgcaaaaagccatacggcctgcggcaaagcgtttcgaacggaagtttacccgatcggcattgagccgaaagaaatagcgaaacaggctgccggtccactgccgccaaaactggcgcaactcaaagcagaactgaaaaacgtacaaaatatcttttctgtcgaacgactggattattccaaaggtttgccggagcgttttctcgcctatgaagcgttactggaaaaatatccgcaacatcacggtaaaattcgttatacccagatcgcgccaacgtctcgtggtgatgtgcaagcctatcaggatattcgtcatcagctcgaaaatgaagccggacgaattaatggtaaatatgggcaattaggctggacgccgctttattatttgaatcagcattttgaccgtaaattactgatgaaaatattccgctactctgacgtgggcttagtgacgccactgcgtgacggaatgaacctggtggcaaaagagtatgttgccgctcaggacccagccaacccgggcgttcttgttctttcgcaatttgcgggagcggcaaacgagttaacgtcggcgttaattgttaatccctacgatcgtgacgaagttgcagctgcgctggatcgtgcattgactatgtcgctggcggaacgtatttcccgtcatgcagaaatgctggacgttatcgtgaaaaacgatattaaccactggcaggagtgcttcattagcgacctaaagcagatagttccgcggagcgcggaaagccagcagcgcgataaagttgctacctttcctaagcttgcgtag

SEQ ID NO: 1560 - DNA, 801 bp, Escherichia coli
gtgacagaaccgttaaccgaaacccctgaactatccgcgaaatatgcctggttttttgatctcgatggaacgctggcggaaatcaaaccgcatcccgatcaggtcgtcgtgcctgacactattctgcaaggacttcagctactggcaaccgcaagtgatggtgcattggcattgatttcagggcgctcaatggtggagcttgacgcactggcaaaaccttatcgcttcccgttagcgggcgtgcatggggcggagcgccgtgacatcaatggtaaaacgcatatcgttcatctgccggatgcgattgcgcgtgatattagcgtgcaactgcatacggtcatcgcccagtatcccggcgcggagctggaggcgaaagggatggcttttgcgctgcattatcgccaggctccgcagcatgaagacgcattgatgacattagcgcaacgtattactcagatctggccacaaatggcgttacagcagggaaagtgtgttgtcgagatcaaaccgaaaggtaccagtaaaggtgaggcgattgctgcctttatgcaggaagctccctttatcgggcgaacgcccgtatttctgggcgatgatctgaccgatgaatctggcttcgcagtcgttaaccggctgggcggaatgtcagtaaaaattggcacaggtgcaactcaggcatcatggcgactggcgggcgtgccggatgtctggagctggcttgaaatgataaccaccgcattacaacaaaaaagagaaaataacaggagtgatgactatgagtcgtttagtcgtagtatctaa

SEQ ID NO: 1561 - DNA, 987 bp, Escherichia coli
atgtcttctgtttctacatcgggttctggcgcacctaagtcgtcattcagcttcgggcgtatctgggatcagtacggcatgctggtggtgtttgcggtgctttttatcgcctgtgccatttttgtcccaaattttgccaccttcattaatatgaaagggttgggcctggcaatttccatgtcggggatggtggcttgtggcatgttgttctgccttgcttccggtgactttgacctttctgtcgcctccgtaattgcctgtgcgggtgtcaccacggcggtggttattaatctgactgaaagcctgtggattggcgtggcagcggggttgctgctgggcattctctgtggtctggtcaatggctttgttatcgccaaactcaaaataaatgccctgatcacgacactggcaacgatgcagattgttcgaggtctggcgtacatcatttcagacggtaaagcggtcggtatcgaagatgaaagcttctttgcccttggttacgccaactggtttggtctgcctgcgccaatctggctcaccgtcgcgtgtttgatcatctttggcttgctgctgaataaaaccacctttggtcgtaataccctggcgattggcgggaacgaagaggctgcgcgtctggcgggtgtaccggttgttcgcaccaaaattattatctttgttctctctggcctggtatcagcgatagccggaattattctggcttcacgtatgaccagtgggcagccaatgacgtcgattggctatgagctgattgtgatctccgcctgcgttttaggtggcgtttctctgaaaggcggcatcggaaaaatctcatatgtggtggcgggtatcttaattttaggcaccgtggaaaacgccatgaacctgcttaatatttctcctttcgcacagtacgtagttcgcggcttaatcctgctggcagcggtgattttcgaccgttacaagcaaaaagcgaaacgcactgtctga

SEQ ID NO: 1562 - DNA, 1515 bp, Escherichia coli
atgcaacagtctaccccgtatctctcatttcgcggcatcggtaaaacgtttcccggcgttaaggcgctgacggatattagttttgactgctatgccggtcaggttcatgcgttgatgggtgaaaatggcgcaggaaaatcaactctcttaaaaatcctcagcggaaactatgcgccaaccacgggttctgtagtgattaatgggcaggaaatgtccttttccgacacgaccgcagcacttaacgcgggggtggcgattatttaccaggaactgcatctcgtgccggaaatgaccgtcgcggaaaacatctatcttggccagctgccgcataaaggcggcattgtgaatcgttcattgctgaattatgaggcaggtttacaaattaaacatcttggtatggatattgacccggacacgccgctgaaatatctctccattggtcagtggcagatggttgaaatcgccaaagcgctggcgcgtaacgccaaaattatcgcctttgatgagccaaccagctccctctctgcccgcgaaatcgacaatcttttccgcgttattcgtgaactgcgaaaagaggggcgggtgatcttatacgtttctcaccgtatggaagaaatatttgccctcagcgatgccatcaccgtctttaaagatgggcgttatgtcaaaacctttaccgatatgcagcaggttgaccacgacgcactggtgcaggcgatggtcgggcgagacattggcgatatctacggctggcaaccgcgtagttatggcgaggagcggctgcgtcttgatgctgtgaaagcaccaggcgtgcgtacgccaataagtctggcggttcgcagtggagaaattgtcggtctgtttggtctggtcggggcagggcgtagcgaattaatgaaaggcatgtttggcgggacgcaaatcaccgccggtcaggtttatatcgaccaacagccgatcgatattcgtaaaccgagccacgccattgccgcaggcatgatgctctgcccggaagatcgcaaagcggaaggcattattcccgtgcactccgttcgcgacaatatcaacatcagtgccagacgtaaacatgtgcttggcggttgtgtaatcaacaacggttgggaagaaaacaatgccgatcaccacattcgttcgctcaacatcaaaacgccgggcgctgagcaactgatcatgaatctctcaggcggaaatcagcaaaaagctattctgggccgctggttatcggaagagatgaaggtcattttgctggatgaacctacgcgtggcattgatgttggtgctaagcatgaaatttacaacgtgatttatgcgctggcggcgcagggtgtggcggtgctgtttgcctccagcgacttacctgaagtcctcggcgttgccgaccggattgtggtgatgcgggaaggcgaaatcgccggtgaattgttacacgagcaggcagatgagcgtcaggcactgagccttgcgatgcctaaagtcagccaggcagttgcctga

SEQ ID NO: 1563 - DNA, 990 bp, Escherichia coli
atgcacaaatttactaaagccctggcagccattggtctggcagccgttatgtcacaatccgctatggcggagaacctgaagctcggtttcctggtgaagcaaccggaagagccgtggttccagaccgaatggaagtttgccgataaagccgggaaggatttagggtttgaagttattaagattgccgtgccggatggcgaaaaaacattgaacgctatcgacagcctggctgccagtggcgcgaaaggtttcgttatttgtactccggacccgaaactcggctctgccatcgtggcgaaagcgcgtggctacgatatgaaagtcattgccgtggatgaccagtttgttaacgccaaaggtaagccaatggataccgttccgctggtgatgatggctgcgaccaaaattggcgaacgtcagggccaggaactgtataaagagatgcagaaacgtggctgggatgtcaaagaaagcgcggtgatggcgattacctccaacgaactggatacggctcgtcgccgtactacggggtctatggatgcgctgaaagctgcaggattcccggaaaaacaaatttatcaggtacctaccaaatctaacgacatcccgggggcatttgacgctgccaactcaatgctggttcaacatccggaagttaaacattggctgattgtcggtatgaacgacagcaccgtgctgggcggcgtacgcgcgacggaaggtcagggctttaaagcgagcgatatcatcggtatcggtattaacggtgtggatgcggtgagtgaactgtctaaggcacaggcaaccggcttctacggttccctgctgccaagcccggacgtacatggttataagtccagcgaaatgctttacaactgggttgcaaaaggtgttgaaccgaccaaattcaccgaagttaccgacgtggtgctgatcacgcgtgacaactttaaagaagaactggagaaaaaaggtttaggcggtaagtaa

SEQ ID NO: 1564 - DNA, 504 bp, Escherichia coli
atggcaaccgctggaatgcttctcaaactcaactctcaaatgaaccgcgagttttacgcatccaatctctaccttcacctgagtaactggtgttctgaacagagtctgaacggcaccgccactttccttcgcgcccaggcacagagtaatgtgacccaaatgatgcgcatgtttaactttatgaagagtgtcggcgctacccccatcgttaaagccattgatgttcccggtgaaaaactgaactctctggaagaactgttccaaaaaacgatggaagaatacgagcaacgttcaagcacgctggcgcagttagccgatgaagcgaaagaactgaatgatgattcaaccgtcaatttcctgcgcgatctggaaaaagaacagcagcatgatggcctgttactgcaaaccattcttgatgaagtgcgcagtgcgaaacttgctggtatgtgtcctgtgcagaccgaccaacatgttctgaatgtcgtgtcgcatcagctgcattga

SEQ ID NO: 1565 - DNA, 252 bp, Escherichia coli
atgtccctgccgctgaatgccgatcaggaactggtttctgatgtggttgcttgccagttggttatcaaacaaattctggatgttctcgatgtgatcgcgcccgttgaagttcgcgaaaaaatgtccagccagctgaagaatatcgactttactaaccatcccgccgccgcagacccggtcaccatgcgggcaatccaaaaagccatcgcgttgattgaactcaagtttaccccacagggcgaatcccattaa

SEQ ID NO: 1566 - DNA, 324 bp, Escherichia coli
atgagacttctgattctgactctttccttaataacgctgacaggatgtacggttactcgccaggcccatgtgagcgaagttgacgcggcaacaggtattgttcggttggtttatgatcaggcttttttgcagcatgcccgtaccgatcgttatgtcagtcgcgggatcgccgatcgcgcatgccagcaggcaggctatacccacgctatcccctttggtcagccagtaggcaactgtagcctctttacgggttccttatgtttgaatacggaattcactttgtcatatcagtgccatcattccgccttccctgtctttctctaa

SEQ ID NO: 1567 - DNA, 498 bp, Escherichia coli
atgctgaaaccagaaatgattgaaaaacttaatgagcagatgaacctggaactgtactcttcactgctttatcagcaaatgagcgcctggtgcagctatcataccttcgaaggtgctgccgcgttcctgcgccgtcacgcccaggaagagatgacgcatatgcagcgtctgtttgattacctgactgataccggcaacttaccgcgtattaataccgttgaatctccgtttgctgaatattcctcacttgatgaattattccaggaaacctataaacacgaacaattaatcacgcagaaaattaacgaactggctcatgctgcaatgaccaatcaggactacccaacatttaatttcctgcaatggtatgtttctgagcagcatgaagaagagaaactgttcaaatcgattattgataaattaagccttgcaggcaaaagcggcgaaggtctgtattttatcgacaaagaactctctaccctcgacacacaaaactaa

SEQ ID NO: 1568 - DNA, 240 bp, Escherichia coli
atggactctattcacggtcacgaagtgttaaatatgatgattgaatcaggcgagcaatatacgcatgccagtctggaagcagcaattaaagcgcgttttggtgaacaggcacgttttcacacctgctcggcagaagggatgactgcgggagagttggtggcgtttctggcagcaaaaggcaaatttataccttcagaagaaggtttttcaaccgatcagagtaagatttgccgtcactga

SEQ ID NO: 1569 - DNA, 1212 bp, Escherichia coli
gtgaaaaacagaactctgggaagtgtttttatcgtggcgggaaccacaattggcgctggtatgctggcaatgccgctggctgcggcaggtgttggttttagcgtcacgttaatcttgttaattgggctttgggcattgatgtgctacacggcgctattactgctggaggtgtaccagcatgtcccggcagataccggtctgggcacgctggcaaaacgctatctgggacgctacggtcagtggctgacgggcttcagtatgatgttcttaatgtatgctctgactgcggcatacatcagcggtgccggtgaattgttggcctccagcatcagcgactggacaggtatttcaatgtcggcaaccgctggcgtgctgttgttcacttttgttgccggtggcgtggtttgtgtcggaacttcgctggtcgatttatttaaccgttttctgttcagcgccaaaattattttttttgtggtgatgctggtattgctgctaccgcatattcacaaagtgaatcttttaaccctgccgttgcaacagggactggcactgtctgcaatcccggtgatttttacgtcgtttggttttcacggtagcgtgccgagtattgtcagctatatggatggcaacattcgtaagctacgctgggtgtttataatcggtagtgcgatccccctggtggcatatattttctggcagctggcgacccttggcagcattgattcaacaacctttatgggattgctggctaatcatgccggattaaacgggctgttacaggcgttacgcgaaatggtggcctctccgcatgttgagctggcagtgcatttatttgctgatttagccctcgccacgtccttcctcggcgtagcgttaggcttatttgattatctggcagatttgtttcagcgttcaaataccgttggtggacgattgcaaactggtgcaattacctttctgccgccactggcgtttgcactgttttatccacgaggatttgtgatggcgctgggttacgccggtgtggcactggcggtactggcattgattatcccttcgctgttgacctggcaaagcaggaagcacaatcctcaggcgggttaccgggtgaaaggtggtcgtccggcgctggtggtggtgtttctctgtggtattgctgtgattggcgtgcaatttttgattgcggcaggcttgttaccagaagtgggatga

SEQ ID NO: 1570 - DNA, 666 bp, Escherichia coli
atgaaaacgggaccgttaaacgaaagtgagttggaatggctggacgatattctgaccaaatacaacactgaccacgccattcttgatgtggcggagctggacggtttattgacggcggtgttgagttctccgcaagagattgaaccggcacagtggctggttgccgtgtggggtggggctgactatgtgccgcgctgggcgtcagagaaagagatgacgcgctttatgaacctggcttttcaacatatggccgataccgcagagcgtctgaacgaattcccggagcagtttgagccgttattcggcttgcgagaagtcgatggcagcgagctgacgattgttgaggagtggtgctttggctatatgcggggcgtggcactttctgactggtcaacgttgcccgattcgttaaaaccagcgctggaggcgattgcgctgcacggtactgaggaaaacttcgagcgggtagagaagatgtcgccagaagcgtttgaagagagcgtagatgccattcgactggcggcgcttgatttacatgcatactggatggcgcatccgcaggaaaaagctgttcagcaaccgatcaaagcagaagagaaaccggggcgtaacgatccttgtccgtgcggtagtggtaagaaatttaagcagtgctgcctgcattaa

SEQ ID NO: 1571 - DNA, 549 bp, Escherichia coli
atgcaatttaatatccctacgttgcttacactgttccgtgtcatccttatcccattctttgtattggtcttttatttgcctgtcacctggtcgccgtttgccgccgcgctcattttctgcgtcgcggcggtgactgactggttcgatggttttctggcacgccgctggaatcagagtacccggtttggtgctttccttgaccctgtcgcagataaagttctcgtggctatcgccatggtgctggtaaccgagcattaccacagctggtgggtgaccttaccggcagcaacgatgatcgcccgtgaaattattatttctgcgctacgcgaatggatggcggagttgggtaaacgcagtagcgtggctgtctcctggattgggaaagtgaaaaccactgcccagatggtggcgttagcctggctgctgtggcgtccgaacatttgggttgagtacgccggtattgcacttttctttgtggctgcggtactgactctgtggtcaatgttgcaatatttgagcgctgcgcgtgcagatttgcttgatcagtga

SEQ ID NO: 1572 - DNA, 1833 bp, Escherichia coli
gtgagtgatcagtttgacgcaaaagcgtttttaaaaaccgtaaccagccagccaggcgtttatcgcatgtacgatgctggtggtacggttatctatgtcggcaaagcgaaagacctgaaaaaacggctttccagctatttccgtagcaacctcgcttcgcgcaaaaccgaagcgctggtcgcccagatccagcaaattgatgtaacggttactcatacagaaaccgaagcgctgttactggaacacaactacatcaaactttatcagccgcgttacaacgttttgctacgcgatgataaatcatatccttttatcttcctgagtggcgatacccacccgcgtctggcgatgcatcgtggagcgaagcatgccaaaggtgaatatttcggcccgttcccgaatggctatgccgtacgtgaaacactggcgctactgcaaaagattttccccattcgccagtgcgaaaacagtgtttatcgcaaccgctcgcgtccgtgtctgcaatatcagatagggcgctgtctggggccgtgcgttgaaggactggtgagtgaagaagaatacgctcagcaggtcgagtatgtgcgcctgtttttgtctggcaaagatgatcaggtgcttacgcaactcattagtcgtatggaaactgccagccagaatctggagtttgaagaagcggcgcggattcgcgaccaaattcaggcggtgcgacgtgtcaccgaaaaacagtttgtttccaataccggcgacgaccttgacgttattggagtggcgttcgatgcgggtatggcttgtgtccacgtattgttcattcgtcagggcaaagtgctcggcagccgcagctatttcccgaaagtgcctggcggtacggaactgagcgaggtggtggaaaccttcgtaggtcagttctatttacaaggcagccagatgcgcaccttaccgggtgagatcctgctcgattttaatcttagcgataaaacgctgctcgccgattccctttcagaactggcgggacgcaagattaatgttcaaaccaaacctcgtggcgatagagcgcgttatctgaaactcgcgcgtaccaatgcggcgacggccttaaccagcaaactttcgcagcaatctaccgttcaccagcggctgaccgcgcttgccagcgtgttgaaattgccggaagtgaagcggatggagtgctttgacatcagccataccatgggtgaacaaaccgtcgcttcctgtgtggtgtttgatgccaacggcccgctgcgtgcggagtatcggcgctataacattactggcatcacgccgggcgatgattacgcggcgatgaatcaggtgctgcgtcggcgttatggtaaagctatcgacgacagtaagatcccggatgtgatccttattgacggcggcaaaggccagcttgcgcaggcgaaaaatgttttcgccgaactggatgtctcatgggataaaaatcatccgctgctacttggcgttgccaaaggagcagatcgtaaggctgggctggaaacgctgttctttgagcctgaaggtgagggatttagtttgccgccagattctcccgcgctgcatgttatccagcatattcgcgatgaatcacacgatcacgcgattggcgggcaccgtaaaaaacgggcgaaggtcaaaaataccagttccctggaaaccattgaaggcgtcgggccaaaacgtcggcaaatgttgttgaaatatatgggcggtttgcaaggtttacgtaacgccagcgtcgaggaaattgcaaaagtgccgggtatttcgcaaggtctggcagaaaagatcttctggtcgttgaaacattga

SEQ ID NO: 1573 - DNA, 657 bp, Escherichia coli
ttgatcaacgttctacttgttgatgaccacgaactggtgcgcgcagggatacgacgcattctggaagatataaagggtataaaagtcgtcggtgaggcatcgtgcggtgaagacgccgttaaatggtgccgggcaaatgccgttgacgtggtgctaatggacatgagtatgccgggcattggcggtcttgaggcgacgcgtaaaatcgcgcgttccacagctgatgtcaaaatcatcatgcttaccgtccatacagaaaaccctttaccagcgaaagtcatgcaggccggagctgcgggctacctcagcaaaggcgcggctccgcaggaagtcgtgagtgcgattcgttctgtctattcagggcagcgttacattgcttctgatatcgctcaacaaatggcgttaagccagatcgaaccagaaaaaacagaaagcccatttgccagtttgtctgaacgtgaattgcagattatgctgatgatcaccaagggccagaaggtcaatgagatctcagaacagctcaatctcagtccgaaaacggtgaacagctaccgctatcgtatgttcagtaaactaaacattcatggcgatgttgagctgactcacctggcaattcgccatggtctgtgtaatgcggagacattatcaagtcagtga

SEQ ID NO: 1574 - DNA, 225 bp, Escherichia coli
atgagtacgcctgatttttctactgccgagaataatcaagaactggcaaatgaagtctcctgcctgaaagcgatgctgacgctgatgctgcaggcgatgggacaagctgacgcgggccgcgtgatgttaaagatggaaaaacagcttgcgctgatcgaagacgaaacccaggctgcagtattttccaaaacggttaagcaaattaaacaagcctaccgtcagtaa

SEQ ID NO: 1575 - DNA, 723 bp, Escherichia coli
atgcaggatacggattttttcagctggcttcgcacgatgttgttgcgttttcagaggatggaggccgcagaagaggtctaccatgaaatagagcttcaggctcagcagctggagtacgattactattcgttatgtgttcgccacccggtaccattcacgcgacctaaagtggctttctacaccaattaccctgagtcgtgggttagttattatcaggcaaaaaattttctcgcaattgatccggtgctgaaccctgaaaactttagtcagggccatttaatgtggaatgatgacttattcagcgaagcacagccgttatgggaagctgcgcgcgcacatggtttacgccgcggtgtcactcagtatttaatgttgccaaatcgggcgttgggctttttgtccttttcccgttgcagcacgcgcgaaatacccattcttagtgatgaactgcaattaaaaatgcagctactggtgcgcgaaagtctgatggctctgatgcgtttaaatgatgaaatagtgatgacgccagagatgaatttcagcaagcgcgaaaaagaaattctgaaatggacggcggaaggtaagacatcagcagagatagcgatgattttgtcaatctctgagaatacggtcaatttccatcagaaaaacatgcagaaaaaaatcaatgcaccgaataagacgcaggttgcctgttacgcggccgctactggcttaatttga

SEQ ID NO: 1576 - DNA, 753 bp, Escherichia coli
atgagtgccattgaagttaagaacctggtgaaaaaattccacggtcagacggtgctgcatggtatcgaccttgaggtgaagcctggcgaagtagtggctattatcggtccgagtggttccggcaaaaccacgttgctacgcagcataaatctgctggaacaaccggaagcgggaaccatcaccgttggcgatatcactattgatactgcacgttcattaagtcagcaaaaatcgctgattcgccagttgcgtcagcacgtcgggtttgtcttccagaactttaatctgtttccgcatcgtacggtgctggaaaacattattgaagggccggtgatcgtcaaaggcgaaccgaaagaagaggccacggcgcgcgctcgcgagctgctggcgaaagttgggctggccggtaaagaaaccagttatccacgtcgtttgtctggcggtcaacagcagcgcgttgcgattgcgcgtgctctggcaatgcgtcctgaagtgattttgtttgatgagccaacgtcggcgctggatccagagctggtgggcgaagtcctgaacaccattcgtcagctggcgcaggaaaagcgcacgatggtgattgtgacgcacgaaatgagctttgcccgggatgttgcggaccgggcgatttttatggaccaggggcggatagtcgagcagggggtagcaaaagcgttatttgctgatcctcagcagcctcgcacccgccagttcctggagaagtttctgctgcaataa

SEQ ID NO: 1577 - DNA, 669 bp, Escherichia coli
atgcaagaaagtatacaactggttattgattccttgccgttcctgctgaaaggggctgggtatacgctgcaactcagtatcggcggcatgttttttggcttactgctcgggtttattctcgcgctgatgcgcctgtcgccaatctggcccgtgcgctggctggcgcgtttttatatctctatttttcgtggtacgccgctcatcgcacaactgtttatgatctattacggactgccacagtttggtatcgaattagatcccattccgtcagcaatgattggtctgtcgctgaacactgccgcctatgctgccgaaacgctgcgcgccgccatttcttctattgataaaggtcagtgggaagctgcagccagtattggcatgacgccatggcagaccatgcgtcgcgcgattttgccacaggcggcgcgggtggcgttgccgccgctgtcgaacagctttatcagcctggtaaaagatacgtcgctggccgcgacaatccaggtgccggagctgttccgtcaggctcagttgattacctcgcgcacgctggaggtgttcaccatgtacctggcggcttcgctcatctactggattatggcgactgtgttatcgacgttgcagaaccattttgagaatcaacttaatcgccaggagagggaacccaaatga

SEQ ID NO: 1578 - DNA, 987 bp, Escherichia coli
atgccactgcataatttaacccgttttccacggctggagtttatcggcgcgccaacgccgctcgaatatctgccgcgcttttctgattatcttggacgggaaattttcatcaaacgggatgacgtcactcccatggcaatgggcggcaataaattacgtaagctggaatttctcgcggcagatgctctgcgtgaaggtgccgatacgctgattactgccggggcgatccagtctaaccatgtgcgccagactgccgcagtcgctgcgaaactcggtctgcactgcgtggcgctgctggaaaatcctattggcacaaccgcagaaaactatttaaccaacggcaatcgtttgttgctggatctgttcaatacccagattgaaatgtgcgacgcactgaccgatcccaatacccaactggaagagctggcgacgcgagtcgaagcacaaggctttcgcccgtatgtcattccggttggcggttctaatgctttgggcgcgctgggttatgtggagagtgcgctggaaatcgcgcaacagtgtgaaggggcggttaatatttcgtcggtggtggtcgcatcgggcagtgccggaactcacgccggactggctgttgggctggaacacctgatgcctgaaagcgaactgattggcgtgactgtgtcgcgttctgttgccgatcaattgccgaaagtggttaacctccaacaggcgattgcgaaagaactggagctgaccgcatcagcggaaattttactctgggatgactattttgcacctggctacggcgtgccgaacgacgaaggcatggaagcagtgaaattgctggcgcggctggaaggcattctgcttgatcctgtgtataccggaaaagcgatggcggggctgattgacggtatcagtcagaaacgcttcaaagatgaagggccgattttgtttattcataccggcggtgcgcctgcgctgttcgcctatcatccccacgtttag

SEQ ID NO: 1579 - DNA, 858 bp, Escherichia coli
gtgtttacaaacaatggctctacactgcaaacagacataacaacattcggggtgaatatgaaattagcacatctgggacgtcaggcattgatgggtgtgatggccgtggcgctggttgcgggcatgagcgttaaaagttttgcagatgaaggtctgcttaataaagtcaaagagcgcggcacgctgctggtagggctggaaggaacttatccgccgttcagttttcagggggatgacggcaaattaaccggttttgaagtggaatttgcccaacagctggcaaaacatcttggcgttgaggcgtcactaaaaccgaccaaatgggacggtatgctggcgtcgctggactctaaacgcattgatgtggtgattaaccaggtcaccatttctgacgagcgcaagaaaaaatacgatttctctaccccgtacaccatttctggtattcaggcgctggtgaaaaaaggcaacgaaggcaccattaaaacggctgatgatctgaaaggcaaaaaagtgggtgtcggtctgggcaccaactatgaagagtggctgcgtcagaatgttcagggcgtcgatgtgcgtacctatgatgatgacccgaccaaatatcaggatctgcgcgtaggccgtatcgatgcgatcctcgttgatcgtctggcggcgctggatctggtgaaaaaaaccaacgatacgctggcagtaaccggtgaagcattctcccgtcaggagtctggcgtggcgctgcgtaaaggaaatgaagacctgctgaaagcggtgaatgatgcaattgcggaaatgcaaaaagatggcactttgcaagccctttccgaaaaatggtttggtgctgatgtgaccaaataa

SEQ ID NO: 1580 - DNA, 552 bp, Escherichia coli
atgatggtgcagcacctgaaaagacggccattaagccgctatcttaaagactttaaacacagccagacccattgcgcgcattgccgtaaattactcgatcgcattaccttagttcgcgacggcaaaatagtgaataaaatcgagatttcctgcctggacatgctgcttgatgaaaatggctggcaagtggaacaaaaatcatgggcggcattgtgccgattttgcggtgatttacattgcaaaacgcagagtgattttttcgatattatcggctttaagcaatttctttttgagcaaactgaaatgagcccaggtacggtgcgtgaatatgtcgttcgtctgcgccgtttgggtaatcatctacacgagcaaaatatttccctcgaacagctgcaggacggtttccttgatgaaatcctcgccccgtggctgcccaccaccagcaccaacaattaccgcattgcgttacggaagtatcaacactatcagcgtcaaacgtgtaccggacttgtgcagaaatcctccagcctgcctgcttctgatatatattaa

SEQ ID NO: 1581 - DNA, 720 bp, Escherichia coli
gtgaattcactctataccgctgaaggtgtaatggataaacactcgctgtggcagcgttatgtcccgctggtgcgtcacgaagcattgcgcctgcaggttcgactgcccgcgagcgtggaacttgacgatctgctacaggcgggcggcattgggttacttaatgccgtcgaacgctatgacgccctacaaggaacggcatttacaacttacgcagtgcagcgtatacgtggcgctatgctggatgaacttcgcagccgtgactgggtgccgcgcagcgtgcgacgcaacgcgcgtgaagtggcacaggcaatagggcaactggagcaggaacttggccgcaacgccacggaaactgaggtagcggaacgtttagggatcgatattgccgactatcgccaaatgttgctcgacaccaataacagccagctcttctcctacgatgagtggcgcgaagagcacggcgatagcatcgaactggttactgatgatcatcagcgagaaaacccgctacaacaactgctggacagtaatctgcgccagcgggtgatggaagccatcgaaacgttgccggagcgcgaaaaactggtattaaccctctattatcaggaagagctgaatctcaaagagattggtgcggtgctggaggtcggggaatcgcgggtcagtcagttacacagccaggctattaaacggttacgcactaaactgggtaagttataa

SEQ ID NO: 1582 - DNA, 1758 bp, Escherichia coli
atggcacaagtcattaataccaacagcctctcgctgatcactcaaaataatatcaacaagaaccagtctgcgctgtcgagttctatcgagcgtctgtcttctggcttgcgtattaacagcgcgaaggatgacgccgcgggtcaggcgattgctaaccgttttacttctaacattaaaggcctgactcaggctgcacgtaacgccaacgacggtatttctgttgcacagaccaccgaaggcgcgctgtctgaaatcaacaacaacttacagcgtatccgtgagctgacggttcaggcttctaccggaactaactctgattcggatctggactccattcaggacgaaatcaaatcccgtcttgatgaaattgaccgcgtatccggccagacccagttcaacggcgtgaacgtactggcaaaagacggttcgatgaaaattcaggttggtgcgaatgacggtgaaactatcactatcgacctgaagaaaatcgattctgatactctgggtctgaatggttttaacgtaaatggtaaaggtactattaccaacaaagctgcaacggtaagtgatttaacttctgctggcgcgaagttaaacaccacgacaggtctttatgatctgaaaaccgaaaataccttgttaactaccgatgctgcattcgataaattagggaatggcgataaagtcaccgttggcggcgtagattatacttacaacgctaaatctggtgattttactaccaccaaatctactgctggtacgggtgtagacgccgcggcgcaggctactgattcagctaaaaaacgtgatgcgttagctgccacccttcatgctgatgtgggtaaatctgttaatggttcttacaccacaaaagatggtactgtttctttcgaaacggattcagcaggtaatatcaccatcggtggaagccaggcatacgtagacgatgcaggcaacttgacgactaacaacgctggtagcgcagctaaagctgatatgaaagcgctgcttaaagccgcgagcgaaggtagtgacggtgcctctctgacattcaatggcactgaatatactatcgcaaaagcaactcctgcgacaacctctccagtagctccgttaatccctggtgggattacttatcaggctacagtgagtaaagatgtagtattgagcgaaaccaaagcggctgccgcgacatcttcaattacctttaattccggtgtactgagcaaaactattgggtttaccgcgggtgaatccagtgatgctgcgaagtcttatgtggatgataaaggtggtattactaacgttgccgactatacagtctcttacagcgttaacaaggataacggctctgtgactgttgccgggtatgcttcagcgactgataccaataaagattatgctccagcaattggtactgctgtaaatgtgaactccgcgggtaaaatcactactgagactaccagtgctggttctgcaacgaccaacccgcttgctgccctggacgacgctatcagctccatcgacaaattccgttcttccctgggtgctatccagaaccgtctggattccgcagtaaccaacctgaacaacaccaccaccaacctgtctgaagcgcagtcccgtattcaggacgccgactatgctacagaagtgtccaacatgtcgaaagcgcagattatccagcaggccggtaactccgtgctggcaaaagccaaccaggtaccgcagcaggttctgtctctgctgcagggttaa

SEQ ID NO: 1583 - DNA, 1407 bp, Escherichia coli
atggcaagtatttcatcgctgggagtcgggtcaggtctggatttaagttcaatccttgatagcctcaccgccgcgcaaaaagcgacgctaacccctatttcaaatcagcaatcgtcgtttaccgctaaacttagcgcctacggtacgctgaaaagcgcgctgacaactttccagaccgccaatactgcattgtctaaagccgatcttttttccgctaccagcaccaccagcagcaccaccgcgttcagtgccaccaccgcgggtaacgccatcgccgggaaatacaccatcagcgtcacccatctggcgcaggcgcaaaccctgacaacgcgcaccaccagagacgatacgaaaacggcgatcgccaccagcgacagtaaactcaccattcaacaaggcggcgacaaagatccgattaccattgatatcagcgcggctaactcgtcgttaagcgggatccgtgatgccatcaacaacgcaaaaccgggcgtaagcgcaagcatcattaacgtgggtaacggtgaatatcgtctgtcagtcacatcaaatgacaccggccttgacaatgcgatgacgctctcggttagcggtgatgatgcgctacaaagttttatgggctatgacgccagtgccagcagcaacggcatggaggtctcggtcgccgcccagaatgcacagctgacggtcaataacgtcgccattgagaacagcagcaacaccatcagcgacgcgctggaaaacatcaccctgaacctgaacgatgtcaccacaggcaaccagacgctgaccatcactcaggacacctccaaagcgcaaacggcgattaaagactgggtgaatgcctataactcgctaatagataccttcagcagcctgaccaaatacaccgccgtagatgcgggagctgatagccagaattctagcaatggcgcactactcggcgactccacgctgcggacgattcagacgcagttgaaatcgatgctgagtaataccgtcagttcttccaactataaaacgctggcgcagattggtatcacgaccgatcccagcgatggcaaactggaactggatgccgacaaactcaccgctgcattgaaaaaagatgccagcggcgtaggtgcattaattgttggcgatggtaaaaaaaccggcatcacgaccaccatcggcagcaacctgaccagttggctttcgacaacgggcattattaaagccgctaccgatggcgttagtaagaccctgaataagttaactaaagactacaacgccgccagcgatcgcattgatgcgcaggtcgcgcgctataaagaacaatttacccaactggacgttttaatgacctcgttaaacagcaccagcagctacttaacgcagcagttcgaaaacaacagtaattccaagtaa

SEQ ID NO: 1584 - DNA, 411 bp, Escherichia coli
atgtacgcggcaaaaggcacccaggcctatgcacaaattggcgtcgaaagcgccgtaatgagcgccagccaacagcagttggtcaccatgctatttgatggagtgttgagcgcactggttagagcgcgcctgtttatgcaggacaacaatcagcaaggcaaaggcgtctctttgtcaaaagcgatcaacatcattgaaaacggactgcgggtgagtcttgatgaaaagagcaaagacgaattaacccaaaacttaattgctctttatagctatatggtcaggcgtttgctgcaagccaatttacgcaacgatgtctccgcagtcgaagaggtggaagcattaatgcgtaatattgccgatgcctggaaagcgtctttactctccccttctttgattcaggacccagtctga

SEQ ID NO: 1585 - DNA, 366 bp, Escherichia coli
atgaacaatgcaccgcatttgtatttcgcctggcaacaactcgtcgaaaaaagccagctcatgttacgcctggcaacggaagaacaatgggacgaactcatcgccagcgaaatggcgtatgtgaatgcggtgcaggagatcgcacacctgactgaagaggttgccccgtccactacgatgcaggagcagctccgcccgatgctgcacctgattctcgacaacgaaagcaaggtaaagcagttattacagattcggatggatgaactggcgaaactggtcggtcagtcatcggtgcaaaaatcggtgttaagtgcctatggcgatcagggcggctttgtgctggctccgcaggataacctcttttga

SEQ ID NO: 1586 - DNA, 1488 bp, Escherichia coli
atgcgtaatcccacgctgttacaatgttttcactggtattacccggaaggcggtaagctctggcctgaactggccgagcgcgcagacggttttaatgatattggtatcaatatggtctggttgccgcccgcctataaaggcgcatcgggcggctattcggtcggctacgactcctatgatttatttgatctaggtgagtttgatcagaaaggcagcatccctactaaatatggtgataaagcacaactgctggccgccattgacgctctgaaacgtaatgatattgcggtgctgttggacgtggtagtcaaccacaaaatgggcgcggatgaaaaagaagctattcgcgtgcagcgtgtaaatgctgacgaccgtacgcaaattgatgaagaaatcattgagtgcgaaggctggacgcgttacaccttccccgcccgtgccgggcaatactcgcagtttatctgggatttcaaatgttttagcggtatcgaccatatcgaaaatcctgatgaagatggcatatttaaaattgttaacgactacaccggcgaaggctggaacgatcaggttgatgatgaactcggtaatttcgattatctgatgggtgagaatatcgattttcgcaatcatgccgtgacggaagagattaaatactgggcgcgctgggtgatggaacaaacgcaatgcgacggctttcgtcttgatgcggtcaaacatattccggcatggttttataaagagtggatcgaacacgtacaggaagttgcgccaaagccgctgtttattgtagctgaatactggtcgcatgaagtcgataaactgcaaacgtatattgatcaggtggaaggcaaaaccatgctgtttgatgcgccgctgcagatgaaattccatgaagcatcgcgcatgggtcgcgactacgacatgacgcagatcttcactgggacgctggtggaagccgatccttttcacgccgtaaccctcgttgccaaccacgacacccaaccgttgcaagccctcgaagcaccggtcgaaccgtggtttaaaccgctggcgtatgccttaattttgttgcgggaaaatggcgttccttcggtgttctatccggacctctacggtgcacattacgaagatgtcggtggtgacgggcaaacctatccgatagatatgccaataatcgaacagcttgatgagttaattctcgcccgtcagcgtttcgcccacggtgtacagacgttatttttcgaccatccgaactgcattgcctttagccgcagtggcaccgacgaatatcccggctgcgtggtggtcatgtcgaacggagatgatggcgaaaaaaccattcatctgggagagaattacggcaataaaacctggcgtgattttctggggaaccggcaagagagcgtagtgacagacgaaaacggcgaagcgaccttcttttgcaacggcggcagcgttagcgtgtgggttatcgaagaggtgatttaa

SEQ ID NO: 1587 - DNA, 414 bp, Escherichia coli
atgaaaaaactcgcaattgcaggtgcgctcatgttgctggcgggctgtgccgaagtcgaaaactataacaatgtcgtgaaaacccccgcgccggactggctgacgggttactggcagaccaaagggccgcaacgtgcgctggtcagtccggaagcgataggcagcctcattgtcactaaagagggcgataccctggattgccgtcagtggcagcgggtgattgccgtgccgggtaagttgacattgatgtctgatgatctcactaacgttaccgtaaaacgtgagctgtacgaggttgagcgtgacggtaacaccattgagtacgatggtatgacgatggagcgtgtggatcgcccgacggcagagtgtgccgccgcgctggataaagcgccgttaccgacgccactgccgtaa

SEQ ID NO: 1588 - DNA, 1206 bp, Escherichia coli
atgtcatggcagcaattcaaacacgcctggttgattaaattctgggcgcccatccccgcggtcatcgcggcgggtattctctccacttactattttggcatcactggcaccttttgggctgtcacaggtgaatttacccgttggggcggtcagctcctgcagttgttcggcgtccatgctgaagagtggggttattttaaaattatccatctggaaggatcgccattaacccgcatcgacggaatgatgatcctcggtatgtttggcggctgttttgccgcagcgctgtgggccaacaatgtcaaactgcgcatgccgcgcagccgtatccgcattatgcaggccatcattggcggtattatcgccggttttggcgcacgtctggcaatgggctgtaacctggcggcgttctttaccggaattccacagttctcgctgcacgcctggttctttgccatcgccactgccattggttcatggtttggcgcgcgctttaccctgctgcccatcttccgtattcccgtgaaaatgcagaaagtttctgctgcctcaccgttgacgcaaaaaccggatcaggcgcggcgtcgttttcgtctcgggatgctggtctttttcggcatgctgggctgggcgctgctgacggcgatgaaccagcccaaactggggctggcaatgctgtttggcgtcggctttggtttactgattgaacgtgcgcaaatctgctttacttcggcgttccgcgatatgtggatcaccggacgtacccatatggcgaaagcaatcattatcggtatggcggtaagtgccatcgggatcttcagttacgtacagttaggcgttgaacccaaaatcatgtgggcaggaccaaacgcggtaattggtggtttactgtttggttttggcatcgtgctggcaggcggctgcgaaaccggctggatgtaccgcgcggtagaaggccaggtgcactactggtgggtcggtctgggcaacgtgatcggctcaacgattttggcgtactactgggatgatttcgctccggcgctggccaccgactgggacaaaatcaacctgctgaaaacctttggcccgatgggcggcctgctggtgacatatttgctgttgtttgcagctctaatgttgattatcggctgggaaaaacgcttcttccgccgtgcggcaccgcagattgctaaggagatcgcatga

SEQ ID NO: 1589 - DNA, 234 bp, Escherichia coli
atgaaaaatatcgttcctgattaccgtcttgatatggtgggtgaaccctgcccttatccggctgtcgcaacccttgaggcgatgccgcagttaaaaaaaggggagatcctggaagtggtgagcgactgtccgcagtcgatcaataatattccactggatgcgcgtaatcacggctatacggtgctggatattcagcaagacgggccgaccattcgttatttaattcagaagtaa

SEQ ID NO: 1590 - DNA, 498 bp, Escherichia coli
atgtgtggacgctttgctcaatcccaaacgcgtgaagattaccttgcgcttctcgcggaagatattgaacgcgatattccctacgatcccgaacctattggcagatacaacgtcgcgccgggaaccaaagtccttctgctcagtgaacgtgatgaacaccttcatctggatccggttttctggggatatgctcccggatggtgggataaaccgccgctgattaacgcccgcgtagaaactgccgcaaccagtcgcatgtttaaaccgctctggcaacatggtcgggcaatatgctttgccgatagctggtttgagtggaaaaaagaaggcgacaaaaaacagccttattttatctatcgtgctgacggaaaacctgtttttatggccgcgataggaagcacaccatttgagcgtggtgacgaagccggaagaagtttttgtaagcccgctcagggtctttcagtgactgttgcaatggctgtgagggcgaatctttaa

SEQ ID NO: 1591 - DNA, 270 bp, Escherichia coli
atgaggcgcttcgcaggcgcatgtcgtttcgttttcaatcgtgctctggcgcttcagaatgagaatcatgaggccggtaataaatacatcccttacgggaaaatggcttcctggttggttgagtggaaaaatgccactgaaacgcaatggcttaaagattcgccctcacagccattgcaacagtcactgaaagaccctgagcgggcttacaaaaacttcttccggcttcgtcaccacgctcaaatggtgtgcttcctatcgcggccataa

SEQ ID NO: 1592 - DNA, 549 bp, Escherichia coli
atgggccaaatcatactttggcctatgaaaaaagaaaccgatatccgacgcggaaggcattgtgttttcctgaagcatgttcacctggtcttcgttactaaataccgacgtcagatttttgaccatgacgcgacagaaaaactacgcacttacttttcaaatgtatgtgctgattttgaagctgaacgggttgaaatggatggcggaccagatcacgtccatttgttaattaactatcctcccaaactggcgatatccagtctggtaaacagcctcaaaggcgtatcgagtaggttactgcgacgagatcgaccagatattgcagtcaggcattacgacaaaggcgttttgtggagtcctggctattttgtcagtagctgcatcttaacgtatcaactagatttaataacaacgatatccgtacctaaccggatatctaatgtcataagcatccctttaattatcccctcaacctcttgtaactttcccactcttgaactccacatagtccaaacgccggatgcaaaaaaatcacacgtgcatttctga

SEQ ID NO: 1593 - DNA, 798 bp, Escherichia coli
atgctggcaaaagataagtctaacctaaagattgaagaaatacggatgcataaacatcatgagattcacagggttaagcctcttatgccagctttatgtcgtatccgtcagggaaaaaaagttatcaattgggagacgcatagtctaactgttgataataatcagataatattatttccctgtggatatgaattttatattgcgaattatccagaagcaggtctttatcttgcagaaatgctttattatcccattgatctaattgaaaagtttcaaaaattttatgcgataactgatcaaattcgtaacacgacaggtttctgcttacctcagaaccccgagttaatatattgttgggagcaactaaaaacatctattttccgaggcttctcaacgcaaattcaggaacacttagcaatgggcgttctactttcattaggagcacatcatgttaattgtttacttttatcagatagtaaacaatcattaataagtcgttgttataacctaatgctatccgaacctggaacaaaatggacagcaaacaaggtagcgagatatctctacatttctgtttccacattgcatcgccgtctggcaagcgagggaataagttttcaaagtatattggacgacgtgaggttaaataatgcgttgtctgctatacaaacgacagtaaaacccatcagcgagattgccagggaaaatggttacaagtgtccttctcgttttactgaaaggttccataatcgttttaagataacaccaagagagctaagaaaagcgtccagagagtaa

SEQ ID NO: 1594 - DNA, 552 bp, Escherichia coli
atgaaaaaacttatcgtttcaagtgtattggcattcataacattttctgcgcaggccgcagcatttcaggtcactagtaatgaaataaaaacaggagagcaacttacaacgtctcatgtattttctggatttgggtgtgaagggggtaatacatcgccctcattaacctggtctggtgctcctgaaggcaccaaaagctttgccgtaactgtgtatgatccagatgctcctacaggcagtggatggtggcactggactgttgctaatattccagcaactgtaacatatttgcccactgatgcaggaagacgtgatggtacaaaacttccgactggtgctgttcaaggccgaaatgattttggttatgcaggatttggtggagcatgtcctcccaaaggagataaaccccatcattaccagtttaaagtatgggctctaaaaactgataagattcctgtggattctaattccagcggagcgttagttggttatatgcttaatgccaataaaattgcaaccgctgagataacaccagtttatgagataaagtag

SEQ ID NO: 1595 - DNA, 333 bp, Escherichia coli
atgaacccttatatttatcttggtggcgcaatacttgcagaggtcattggtacaaccttaatgaagttttcagagggatttacacggttatggccctctgttggcacaattatttgctattgtgcatcattctggttattagctcagacgctggcttatatacctacagggattgcttatgctatctggtcaggagtcggtatcgttctgattagtttgctttcctggggattttttggtcaacgactggacctgccagctatcataggcatgatgttgatttgtgccggtgtgttagtcattaacttgttgtcacgaagtgcaccgcattaa

SEQ ID NO: 1596 - DNA, 315 bp, Escherichia coli
atgtcagcgatacaggggattgaaggggttatcagccagttacaggctacggcgatgagtgcgcgtgcgcaggaatcactgccgcaaccgaccattagttttgccgggcagctgcacgccgcgctcgatcgcataagcgatacacaaacagtcgcccgcacgcaggcagaaaaattcaccctcggtgaacccggcgtggcgctaaacgatgtgatgaccgatatgcaaaaagcctcagtttctatgcaaatggggattcaggtgcgtaataagctggtggcggcgtatcaggaagtgatgtccatgcaggtgtag

SEQ ID NO: 1597 - DNA, 1659 bp, Escherichia coli
atgaatgcgactgcagcccagacaaaatctcttgagtggcttaatcgcctgcgtgcgaatccgaaaattccattgattgttgccggttccgcagcagtggcggtcatggtcgcactgatcctgtgggcgaaagcccccgactaccgcacattattcagcaatctttccgatcaggatggtggcgcaattgtcagccaactgacgcaaatgaatattccttaccgcttcagcgaagccagcggcgctattgaggttccggcagataaagttcacgaactgcgcctgcgcctggcgcaacaaggtttgcccaaaggcggcgcggtcggtttcgaactgctcgatcaggaaaagtttggtatcagccagttcagcgaacaggtgaattatcagcgggcgctggaaggcgagctttctcgtaccatcgaaactatcggcccggtaaaaggggcgcgcgtacacttggcaatgccgaaaccgtctttattcgtccgtgaacaaaaatccccttctgcatcggtgacggtaaatctgttacccggccgcgcactcgatgaagggcaaattagcgctattgtacatctggtttccagcgcggttgctggtctgccgccgggaaacgtcacgctggtggatcagggcgggcatctgttaacccagtccaataccagcgggcgcgatcttaatgacgctcagttgaaatatgccagcgatgtcgaaggccgtattcagcggcgtattgaagcgatcctgtcgcctattgttggtaacggtaatattcacgcccaggtcacggcgcaactggacttcgccagtaaagaacaaacggaagaacagtatcgccctaacggtgatgaatctcatgcggcgcttcgttcacgccagcttaatgagagcgagcaaagcggttccggttatccgggcggcgtaccgggggcgttgtcgaatcaaccggcacctgcgaataacgcgccaatcagcacgcctccggcaaatcaaaataaccgccagcagcaggcgagcaccaccagcaatagtgggccgcgtagcacacagcggaatgaaaccagtaactacgaagtcgatcgcaccattcgtcataccaaaatgaacgtgggcgatgtgcaacgtctgtcagtcgcggtagtggtgaattacaaaaccttgccagacggtaaaccattgcctctcagcaacgaacagatgaagcaaattgaagctctgacccgcgaggcgatgggcttttctgaaaaacgcggtgattcgctcaatgttgttaactcgccgttcaatagcagtgacgaaagcggcggagcactgccgttctggcaacagcaagcgtttatcgatcagttgctggctgccggtcgctggttgctggtactgctggtggcgtggttgctgtggcggaaagcggtacgcccgcagctaacacgtcgcgccgaggcggtgaagactgtgcagcaacaggcacaggcccgcgaggaagtggaagatgcggtggaagtccgtctgagcaaagacgaacaactccaacaacggcgcgctaaccaacgactgggggcagaggtcatgagccagcgtatccgtgaaatgtctgataacgatccgcgcgtggtggcgctggtcattcgccagtggataaataacgatcatgagtaa

SEQ ID NO: 1598 - DNA, 996 bp, Escherichia coli
atgagtaacctgacaggcaccgataaaagcgtcatcctgctgatgaccattggcgaagaccgggcggcagaggtgttcaagcacctctcccagcgcgaagtgcaaaccctgagcgctgcaatggcgaacgtcacgcagatctccaacaagcagctaaccgatgtgctggcggagtttgagcaagaagctgaacagtttgccgcactgaatatcaacgccaacgattatctgcgttcggtattggtcaaagctctgggtgaagaacgtgccgccagcctgctggaagatattctcgaaacccgcgataccgccagcggtattgaaacgctcaactttatggagccgcagagcgccgccgatctgattcgcgatgagcatccgcaaattatcgccaccattctggtgcatctgaagcgcgcccaggccgccgatattctggcgttgttcgatgaacgtctgcgccacgacgtgatgttgcgtatcgccacctttggcggcgtgcagccagccgcgctggcggaactgaccgaagtactgaatggcttgctcgacggtcagaatctcaagcgcagcaaaatgggcggcgtgagaacggcagccgaaattatcaacctgatgaaaacgcagcaggaagaagccgttattaccgccgtgcgtgaattcgacggcgagctggcgcagaaaatcatcgacgagatgttcctgttcgagaatctggtggatgtcgatgatcgcagcattcagcgtctgttgcaggaagtggattccgaatcgctgctgatcgcgctgaaaggggccgagcagccactgcgcgagaaattcctgcgcaatatgtcgcagcgtgccgccgatattctgcgcgacgatctcgccaaccgtggtccggtgcgtctgtcgcaggtggaaaacgaacagaaagcgattctgctgattgtgcgccgtcttgccgaaactggcgagatggtgattggcagcggcgaggatacctatgtctga

SEQ ID NO: 1599 - DNA, 687 bp, Escherichia coli
atgtctgataatctgccgtggaaaacctggacgccggacgatctcgcgccaccaccggcagagtttgtgccaatggtcgagtcggaagaaaccattattgaagaggccgaacccagccttgagcagcaactggcgcaactgcaaatgcaggcccacgagcagggttatcaggcggggattgccgaaggtcgccagcaaggtcatgaacagggctatcaggaaggactggcccaggggctggaacaaggtctggcagaggcgaaggctcaacaagcgccaattcatgcccggatgcagcaactggtcagcgaatttcaaactacccttgatgcgcttgatagtgtgatagcttcgcgcctgatgcagatggcgctggaggcagcacgtcaggtcataggtcagacgccaacggtggataactcggcactgatcaaacagatccaacagttgttgcagcaagaaccgttattcagcgggaaaccacagctgcgcgtacacccggatgatctgcaacgtgtggatgatatgctcggcgcaaccttaagtttgcatggctggcgcttgcggggcgatcccaccctccatcctggcggctgtaaagtctccgccgatgaaggcgatctcgacgccagtgtcgccacccgctggcaagaactctgccgtctggcagcaccaggagtggtgtaa

SEQ ID NO: 1600 - DNA, 1374 bp, Escherichia coli
atgaccacgcgcctgactcgctggctaaccacgctggataactttgaagccaaaatggcgcagttgcctgcggtacgtcgctatgggcgattaacccgcgctaccgggctggtgctggaagccaccggattacaattgccgctcggcgcaacctgtgtcattgagcgccagaacggcagcgaaacgcacgaagtagaaagcgaagtcgttggctttaacggtcaacggctgtttttaatgccgctggaggaagtggaaggtgtcctgcccggcgcgcgtgtatatgccaaaaacatttcggcagaagggctgcaaagcggcaagcagttgccgctcggtccggcgttattaggtcgtgttctggacggtagcggtaaaccgctagatggcctgcccttccccgatacgacggaaaccggtgcgctgattaccccgccatttaacccgttgcaacgtacaccgattgaacatgtgctggacaccggcgtgcgcccaatcaatgccctgcttaccgtcggacgcgggcagcgtatggggctgtttgccgggtccggcgttggtaaaagtgtgctgctggggatgatggcccgttacacccgcgccgatgtcattgtcgtgggtttgattggtgaacgagggcgcgaagtaaaagattttattgagaatatcctcggtgccgaagggcgtgcacgctcagtggtgattgccgctccggcggatgtttctccgctcctgcgaatgcagggtgccgcctacgccacgcgcattgccgaagattttcgcgatcgtggtcagcatgtgttgctgattatggactccctcacccgctacgcgatggcccagcgtgaaattgcgctggcgattggcgaaccacctgccactaaaggttatccaccgtcggtgtttgccaaattaccggcactggtcgagcgtgccggtaatggcattagcggcggcggctcgattaccgcgttttatacggtgctcaccgaaggcgatgaccagcaggaccccattgccgactccgcgcgggcgatcctcgacggtcacattgtgctgtctcgccgactggcggaagccgggcactatccggctatcgatattgaagcgtcgatcagtcgcgcaatgacggcgttgatcagtgagcaacattacgcgcgagtgcgcaccttcaaacagctgttgtcgagttttcagcgtaaccgcgatctggttagcgtcggcgcgtatgccaaaggcagcgatccgatgctcgataaagccatcgccctgtggccgcagctggagggctatttgcaacaaggcatttttgaacgcgcggactgggaagcgtctctccaggggctggagcgtattttcccgacagtgtcataa

SEQ ID NO: 1601 - DNA, 444 bp, Escherichia coli
atggcggaacatggtgcgctggcgaccctgaaagatctggcagaaaaagaggtagaggatgctgctcgcctgctgggtgaaatgcgtcgcggatgtcagcaggcggaagaacagctcaaaatgctgatcgattatcagaatgaatatcgcaataacctcaatagcgatatgagtgccgggatgaccagcaaccgctggatcaactatcagcagtttatccagacgctggaaaaagccattactcagcatcgccagcaacttaatcagtggacgcagaaagttgacattgccctgaacagctggcgagaaaagaaacaacgtttgcaggcctggcagacactgcaggaacggcaatccacggcggcactgcttgcagaaaaccgcctcgatcagaaaaagatggatgagttcgcccagcgcgccgccatgaggaaacctgaatga

SEQ ID NO: 1602 - DNA, 1128 bp, Escherichia coli
atgattcgcttagcgcccttgattaccgccgacgttgacaccaccacattgcctggcggcaaagccagcgatgctgcacaagattttctcgcgttgttgagcgaagcattagcaggcgagacaacaaccgacaaagcggccccccagttgctggtggcaacagataagcccacgacaaaaggcgaaccgctggtcagcgatattgtttccgatgcgcaacaagcggatttactgattcctgtggatgaaacacttcctgtcatcaacgacgaacaatccacatcaacaccgttaaccaccgctcagacgatgacgttggctgcggtggctgacaaaaatacgacaaaagacgaaaaagcggatgaccttaatgaagacgtcaccgcaagtctgagcgccctttttgcgatgttgccgggttttgacaatacgcccaaagtgactgatgcaccgtcaaccgtgttaccggcagagaaaccaacgctcttcacaaaactgacttctgcgcaactcactacagcacagcctgatgacgcccccggcacaccagctcagccattaacaccgctggtagcagaagcccagagtaaagcggaagtcatcagcacgccttcgccggtgaccgctgacgccagcccgctaatcactccacaccagacacagccactgcccaccgtcgccgcgcctgttttgagtgcaccgctgggttctcacgaatggcaacaatcattaagccagcatatttcgctgttcacccgccaggggcaacaaagtgcagagttgcgtctgcacccacaggatttaggtgaagtgcaaatttccctcaaagtggatgataaccaggcgcagatccagatgatttcaccgcatcagcacgtacgcgccgccctggaagcagcgctgccggtactgcgtacgcagctggccgaaagtggcattcagttagggcaaagcaacattagtggcgaaagctttagtggtcagcagcaggccgcttcccagcaacagcaaagccaacgcacagcaaaccatgaacctctggcgggggaagacgacgatacgcttccggttcccgtctctttacaagggcgtgtaacaggtaacagcggcgttgatattttcgcctaa

SEQ ID NO: 1603 - DNA, 465 bp, Escherichia coli
atgactgattacgcgataagcaagaaaagcaagcgatcgctttggatcccgattctggtattcattaccctcgcggcctgtaccagcgcaggttacagctactggcattcgcatcaggttgccgctgacgacaaagcgcagcaacgcgtcgtgccctccccggtcttctatgcgctggatacctttacggtcaatttgggcgatgcggatcgcgtgctttatatcggcataaccctgcgactgaaagatgaagcaacccgctcgcggctgagtgagtatttgccggaagtccgtagtcgcttgctgttactgttttcacgtcaggatgctgccgtactggcgacagaagaaggcaagaaaaacctgattgccgagattaaaaccacactttccaccccgcttgttgccgggcaaccgaaacaggatgtcaccgacgtgctatataccgcttttattctgcgataa

SEQ ID NO: 1604 - DNA, 1005 bp, Escherichia coli
atgggcgatagtattctttctcaagctgaaattgatgcgctgttgaatggtgacagcgaagtcaaagacgaaccgacagccagtgttagcggcgaaagtgacattcgtccgtacgatccgaatacccaacgacgggttgtgcgcgaacgtttgcaggcgctggaaatcattaatgagcgctttgcccgccattttcgtatggggctgttcaacctgctgcgccgtagcccggatattaccgtcggggccatccgcattcagccgtaccatgaatttgcccgcaacctgccggtgccgaccaacctgaaccttattcatctgaaaccgctgcgcggcacagggctggtggtgttctcgccgagtctggtgtttatcgccgtggataacctgtttggcggcgatggacgcttcccgaccaaagtggaaggccgcgagtttacccataccgaacagcgcgtcatcaaccgcatgttgaaactggcgcttgaaggctatagcgacgcatggaaggcgattaatccgctggaagttgagtacgtgcgttcggaaatgcaggtgaaatttaccaatatcaccacctcgccaaacgacattgtggttaacacgccgttccatgtggagattggcaacctgaccggcgaatttaatatctgcctgccattcagcatgatcgagccgctacgggaattgttggttaacccgccgctggaaaactcgcgtaatgaagatcagaactggcgcgataacctggtgcgccaggtgcagcattcacagctggaactggtggccaactttgccgatatctcgctacgcctgtcgcagattttaaaactgaaacccggcgacgtcctgccgatagaaaaacccgatcgcatcatcgcccatgttgacggcgtcccggttctgaccagtcagtacggcactctcaacggtcagtatgcgttacggatagaacatttgattaacccgattttaaattctctgaacgaggaacagcccaaatga

SEQ ID NO: 1605 - DNA, 414 bp, Escherichia coli
atgagtgacatgaataatccggccgatgacaacaacggcgcaatggacgatctgtgggctgaagcgttgagcgagcaaaaatcaaccagcggaaaaagcgctaccgatgcggtgttccagcaatttggcggtggtgatgtcagcggaacgttgcaggatatcgacctgattatggatattccggtcaagctgaccgtcgagctgggccgtacgcggatgaccatcaaagagctgttgcgtctgacgcaagggtccgtcgtggcgctggacggtctggcgggcgaaccgctggatattctgatcaacggttatttaatcgcccagggcgaagtggtggttgttgccgataaatatggcgtgcggatcaccgatatcattaccccgtccgagcggatgcgccgcctgagccgttag

SEQ ID NO: 1606 - DNA, 366 bp, Escherichia coli
atgaataaccatgctactgtgcaatcttccgcgccggtttctgctgagccactgctgcaggtgagcggcgcactcatcgccattattgccctgatcctcgctgctgcctggctggtaaaacggctgggatttgcccctaaacgcactggcgttaacggtctgaaaattagcgccagtgcttcgctgggcgcgcgtgaacgggtcgtggtggtcgatgtggaagatgcacgactggtgctcggcgttaccgcagggcaaatcaatctgctgcataaacttcccccttcagcaccaacggaagagataccgcagaccgattttcagtcggtcatgaaaaatttgcttaagcgtggcgggagatcctga

SEQ ID NO: 1607 - DNA, 738 bp, Escherichia coli
atgcgtcgtttgttttctgtcgcaccggtccttctctggctgattacgcccctcgccttcgcgcaactgccgggtatcaccagccagccgctacctggcggtggacaaagctggtcgctcccggtgcagacgctggtgttcatcacctcgttgacgttcattccagcgattttactgatgatgaccagtttcacccgcatcattattgtttttggtttattgcgtaacgcgctgggaacgccctccgcgccacctaaccaggtattgctggggctggcactgtttttgaccttttttattatgtcgccagtgatcgacaaaatttatgtcgatgcgtaccagccattcagcgaagagaaaatctcaatgcaggaggcgctggaaaaaggggcgcagccgctgcgtgagtttatgctgcgtcagacccgcgaggcagatttagggttgtttgccagactggcgaataccggcccgttgcaggggcctgaagctgtgccgatgcgcattttgctcccggcctacgtgaccagcgagttgaaaaccgcatttcagataggcttcacgattttcatcccttttttgattatcgacctggtgattgccagcgtgttgatggcattggggatgatgatggttccccccgccaccattgctctgccctttaaactgatgctgtttgtactggtggatggctggcaattgctggtcggttcgctggcgcagagcttttacagctag

SEQ ID NO: 1608 - DNA, 270 bp, Escherichia coli
atgacacctgaatcggtcatgatgatgggaactgaagcgatgaaagtcgcgctggcactggcagccccgctgttgctggtggcgctggtcacgggccttatcatcagtattttgcaggcagccacgcagattaacgaaatgacgctgtcgtttattccgaaaatcatcgccgtatttatcgccattattattgccggaccgtggatgctcaatctgttgctggattacgtccgcaccttgttcactaacctgccgtatatcatcgggtag

SEQ ID NO: 1609 - DNA, 786 bp, Escherichia coli
atgatgcaggtgacaagcgatcaatggctttcctggttaagcctgtacttctggccgttactgcgcgtgctggcgctcatttctaccgcgccaattctgagcgaacgcagcgtgccgaaacgggtaaaactgggtctggcaatgatgatcacgttcgccattgccccatcattacctgccaacgatgttcctgttttttcgttctttgctctgtggctggccgtgcagcagatcctgatcggcattgcgcttggttttaccatgcaatttgcctttgccgctgtgcgaaccgctggcgaaattatcggtctgcaaatggggctgtcatttgcgacatttgtcgatcctggcagccatctcaatatgcccgttttagcgcgcatcatggatatgctggcattactgctgttcctgacatttaacggtcatttatggttgatttcactgctggtcgatacctttcacaccctgccgattggtagcgaaccgttgaacagcaatgcgtttctggcactcaccaaagcagggagtttgattttccttaacgggctgatgctggcgttaccgctcattactctgttgctgaccctgaatctggcattaggtttactgaatcgtatggccccgcaattatccatttttgttattggatttccattaactctgactgtcggcatctctttaatggcggcattaatgccgttaattgcgcctttttgcgaacatttattcagtgaaatttttaatttgctggctgatattattagtgaattaccattaatataa

SEQ ID NO: 1610 - DNA, 624 bp, Escherichia coli
atgtcaacgattattatggatttatgtagttacacccgactaggtttaaccgggtatctgttgagtagaggggttaaaaaaagagaaatcaacgacattgaaaccgttgatgaccttgccatagcttgtgattcacagcgcccttcagtggtgtttattaatgaggactgtttcatccacgatgcttctaacagtcagcgcatcaagcacatcattaatcaacatcccaatacgttatttatcgtttttatggcaattgccaatgttcattttgatgaatatctattggtcagaaaaaatttattgatcagttctaaatcgattaaaccggaatctctcgacgatatccttggcgatattctgaaaaaagagacaacgataacctcgtttttaaatatgccgacgttatcattgagccgaaccgaatcgagtatgttgcgaatgtggatggcaggtcagggaaccattcaaatctccgaccaaatgaatatcaaagccaagaccgtttcatcgcataaaggtaatattaaacgtaagatcaaaacgcataataaacaggttatctaccatgtcgtccgactgacggataatgtgactaatggtatttttgtcaacatgcgctaa

SEQ ID NO: 1611 - DNA, 189 bp, Escherichia coli
atgaaggtgaatgatcgggtaacagtcaaaacggatggcggtccgcgtcgtcctggcgtggtactggcagttgaggagtttagtgaaggcacaatgtacctggtttcgctggaagactacccgctaggcatctggttctttaatgaagcagggcatcaggacggtatctttgttgagaaagcagagtaa

SEQ ID NO: 1612 - DNA, 228 bp, Escherichia coli
atgaaaaccgcaaaagagtacagcgataccgcaaaacgtgaggtcagcgtcgatgtcgatgccctgctggcggcgatcaatgaaattagcgaaagcgaagttcatcgcagccagaacgattctgaacacgttagcgtcgatggacgtgaatatcatacatggcgtgaattggcggatgccttcgaactggatattcatgacttcagcgtctctgaagtgaatcgttga

SEQ ID NO: 1613 - DNA, 816 bp, Escherichia coli
atgttttcaattcaacaaccactactggtttttagcgatcttgatggcaccctgctggacagtcatagttatgactggcaaccggcagccccctggctcagccgtttacacgaagccaatattcccgtcattctctgtagcagtaaaacttcagcggaaatgctgtacttgcaaaaaatgttggggctacaaggcttaccgctgattgcagagaatggcgcagtgatccagcttgctgaacaatggcaggatatagacggttttccacgcatcatctcaggtattagccatggcgaaatctgccaggttttaaatacgctacgcgagaaagaacattttaaattcacgacttttgatgatgtcgacgatgcaaccattgccgaatggacgggattaagccgtagccaggcggcgctgacgcagctgcatgaggcgtcggtaacgctaatctggcgcgacagtgacgagcatatggcacaatttatcgctcgtctgaacgaactgggcttgcagtttatgcagggtgcgcgcttctggcacgtactggatgcctctgccggaaaagatcaggctgccaactggattatcgcgacctatcaacaattgtcaggcagacgcccaaccacacttggcctgggcgatgggccaaacgatgcgcctttactggaggtaatggattacgcggtgattgtgaaagggctaaaccgtgaaggggtccatctgcatgatgaggatccggcccgcgtctggcgaacgcagcgtgaaggaccggaaggctggcgtgaagggctggaccattttttctccgcccgttaa

SEQ ID NO: 1614 - DNA, 1695 bp, Escherichia coli
gtgcagcacgagacaaaaatggaaaaccagagctggttgaaaaaactcgcacgccgcctggggcccggtcatgtcgttaatctctgctttatcgtggtattgcttttttccaccttgctcacctggcgtgaagtggtggtgctggaagatgcctatatctccagccagcgtaatcatctggaaaacgtagccaacgcgctcgataagcatttgcagtataacgtcgacaaactgatctttttgcgtaatggcatgcgcgaagctctcgtggcgccactggatttcatctctctgcgtaatgccgtaaccgagttcgaacagcatcgcgacgagcacgcctggcaaatcgaactcaaccgacggcgcaccctgccagtcaatggcgtatcggatgcattagtcagcgaggggaatctcctgtctcgcgaaaatgaaagcctcgacaatgaaattaccgctgcactggaagttggttacttgctgcgactggcgcacaactcctcgtcgatggttgaacaggcggtgtatgtctcgcgtgctggattttacgtttcgacgctgccgaccttgtttacgcgcaatgtaccaacgcgttattacggctatgtcacccaaccctggtttatcggccattcacaacgagaaaatcgtcaccgcgcggtacgctggttcacttcgcaaccggaacacgccagcaatactgaaccgcaggttaccgtcagtgttccggtagacagtaataactactggtatggcgtgctggggatgagtattcccgtgcgtactatgcagcaatttttaagaaacgccatcgataaaaacctcgatggtgagtatcagctctatgacagtaagctgagatttttgacctcttcaaatcctgaccatccaacagggaatatttttgatcctcgtgaactggccttgctggcgcaggcaatggaacatgacacgcggggcggcattcgtatggagagtcgctatgttagctgggaacgtctggaccatttcgacggtgtgctggtgcgcgtccatacgctaagcgaaggcgtgcgcggcgatttcggcagtatcagcattgcattaaccctgctgtgggcgctctttaccaccatgttactcctctcctggtatgtgattcgccggatggtcagcaacatgtatgttctgcaaagctcgttgcagtggcaggcgtggcacgacaccttaacgcgtttatataaccgtggtgcactgttcgaaaaagcccgtccgctcgctaaattgtgtcagacgcaccaacatcctttttctgtcattcaggtcgatcttgaccattttaaagcgattaatgaccgctttggtcatcaggcgggcgaccgtgttctttctcatgctgccggattaattagcagttccttacgtgcgcaggacgttgccgggcgggtcggtggtgaggagttttgtgtgattctgccaggcgcgaatctgacgcaggctgcggaggtcgcagaacgtattcgcctgaagttaaatgaaaaagagatgctgatcgccaagagtacaacgatacgcatcagtgcctcgctgggggtaagtagcagcgaggaaaccggtgattatgattttgaacaactccagtcattggccgaccgtcggctttacctcgcaaaacaggccgggcgtaatcgggtattcgcgagcgataacgcttaa

SEQ ID NO: 1615 - DNA, 183 bp, Escherichia coli
atgagctttatggttagtgaggaagttacggttaaagagggcggcccgcggatgattgtcactggatactccagcggtatggttgagtgtcgttggtatgacggttacggggtcaagcgggaagcttttcatgaaaccgatcttgttccgggggaggggagtcgttctgcggaagaagtttga

SEQ ID NO: 1616 - DNA, 918 bp, Escherichia coli
atgcttttggccgggagtagtttactgacgttgctcgatgatatcgccacactgctggacgatatctctgtgatgggcaaactggcggcgaagaaaaccgccggtgtattaggggatgacttatcgctcaatgcgcaacaagtttcaggcgtgcgggccaaccgggaacttcccgtggtctggggcgtggcgaaaggatcgctgatcaataaagtgattctggtgccgctggcgctgatcatcagtgcgtttatcccgtgggcgattacgccactgttgatgattggtggcgcgtttctctgctttgaaggggtagagaaagtgctgcatatgctggaggcgcgtaaacataaagaagatccagcgcagagccagcagcgtctggagaagctggcggcgcaggatccgctgaagtttgaaaaggacaaaattaaaggggcgattcgtaccgattttattttgtctgcggaaatcgtcgccatcacgctggggattgtggcagaggcgccgttgcttaatcaggtgctggtgctttcaggcatcgcgctggtagtgaccgtgggcgtctacggtctggtaggggttatcgttaagattgatgacctggggtattggctggcggaaaaatccagcgcgctgatgcaggcattaggtaaagggttattgattatcgcgccctggctgatgaaagcattatcgattgtcggcacgctggcgatgttcctcgtcggcggcgggattgtggtacatggtattgcgccgctgcatcacgctattgaacatatcgccgggcagcaaagtgcagtggtggcgatgatattaccgactgttttaaatctgattcttggatttatcatcggcggcatcgtggtgctgggagtgaaagcagtagcgaaaatgcgcggtcaggcacattaa

SEQ ID NO: 1617 - DNA, 921 bp, Escherichia coli
atgcgtttccgccagttgttaccgctttttggcgcgctgtttgcgttgtatatcatttggggctcaacctattttgtcattcggattggcgtggaaagctggcctccgttaatgatggcgggcgttcgattcctggcagccggtattttattgctggcatttttgctactgcgcggacacaaacttcccccgctacgtccgctgctcaatgccgcgctgattggcctgttattgctggctgtcggtaatggcatggtgacggttgccgaacatcaaaatgttccttccggcatcgccgccgtagtggttgcaaccgtgcccctctttaccctgtgcttcagccgcctgtttggcattaaaacgcgcaaactggaatgggtgggtatcgccattgggcttgccggaatcatcatgctcaatagcggtggaaatttaagcggcaatccgtggggcgcgattctgattttaatcggctcgattagctgggcgtttggctcggtttatggctcgcgcattaccttacctgtagggatgatggcgggtgcgattgagatgctggcggctggcgtggtgttaatgattgcgtcgatgattgcgggtgaaaaactgacggcgctcccttccctttcaggcttccttgcggtcggctatctggcgctgtttggttcgattatcgccattaacgcttatatgtatttaatccgcaacgtcagtccggctctcgccaccagctacgcctacgttaacccagtggtcgcggtcttgctgggtacgggactgggcggagagacgctgtcgaagattgaatggctggcgctcggcgtaattgtcttcgcggtggtactggtcacgttgggaaaatatctcttcccggcaaaacccgtagttgcgccagttattcaggatgcatcaagcgagtaa

SEQ ID NO: 1618 - DNA, 471 bp, Escherichia coli
atggtcgacgttcacgataaggccacccgcagcaaaaatatgcgcgcgattgccacgcgtgatacggcgattgagaagcgcctcgccagtttgttaaccgggcagggccttgcgtttcgcgttcaggacgccagtctgcccggacgcccggattttgtcgttgatgaatatcgctgcgtgatatttacccacggctgcttctggcatcatcatcactgctatctgtttaaagtgcctgcgactcgaaccgagttctggctggagaagataggtaaaaatgttgaacgcgatcgccgcgatatcagccatttgcaggaactcggttggcgcgtactgattgtctgggagtgtgcgttacgtgggcgcgagaagctgacggatgcggcgcttaccgagcgtctggaagagtggatctgcggcgaaggtgccagcgcgcagatcgacacgcaggggattcatttactcgcttga

SEQ ID NO: 1619 - DNA, 1419 bp, Escherichia coli
atgcaggaaaatatatcagtaaccgattcatacagcaccgggaatgtcgttcaggcaatgctggagaaactgctgcaaatttatgatgttaaaacgctggtggcgcagcttaatggtgtgggtgagaatcactggagcgcggcaattttaaaacgtgcactggcgaatgactcggcatggcaccgtttaagtgagaaagagttcgcccatctgcaaacgttgttacccaaaccaccggcacatcatccgcattatgcgtttcgctttatcgatctatttgccggaattggcggcatccgtcgcggttttgaatcgattggcggacagtgcgtgtttaccagcgaatggaacaaacatgcggtacgcacttataaagccaaccattattgcgacccggcgacgcatcattttaatgaagatatccgcgacatcaccctcagccatcaagaaggcgtgagtgatgaggcggcggcggaacatattcgtcaacacattcctgaacacgatgtattactggcgggttttccttgtcagccattttcgctggctggcgtatcgaaaaagaactcgctcgggcgggcgcacggttttgcctgcgatacccagggcacgctgttctttgatgtggtgcgcattatcgacgcgcgtcgtccggcgatgtttgtgctcgaaaacgtcaaaaacctgaaaagtcacgaccagggtaaaacgttccgcatcatcatgcagacgctggacgaactgggctatgacgtggctgatgcagaagataacgggccggacgatccgaaaatcatcgatggcaaacatttcctgccgcagcaccgtgaacgcatcgtgctggtgggttttcgtcgcgatctgaatctgaaagccgattttaccctgcgtgatatcagcgaatgtttccctgcgcagcgagtgacgctggcccagctgctggacccgatggtcgaggcgaaatatatcctgacgccggtgctgtggaagtacctctatcgttatgcgaaaaaacatcaggcgcgcggtaatggcttcggttatggaatggtttatccgaacaatccgcaaagcgtcacgcgtacgttgtctgcgcgttattacaaagatggcgcggaaattttaatcgatcgcggctgggatatggcaacgggtgagaaagactttgacgatccgctgaatcagcaacatcgtccacgtcggttaacgcctcgtgaatgcgcgcgcttaatgggttttgaagcgccgggagaagcgaaattccgcattccggtttcggacactcaggcctatcgccagttcggtaactcggtggtcgtgccggtctttgccgcggtggcaaaactgcttgagccaaaaatcaaacaggcggtggcgttgcgtcagcaagaggcacaacatggtcgacgttcacgataa

SEQ ID NO: 1620 - DNA, 696 bp, Escherichia coli
atggacttacaacactggcagacacagttcgaaaactggttgaaaaaccatcatcagcaccaggacgcggcccatgacgtatgtcattttcgccgcgtctgggctacggcacagaagctggcggcagatgacgatgtcgatatgttggtgattttaaccgcttgttattttcacgatattgtgagcctggcgaaaaatcatccacaacggcagcgttcttcaatcctggcggcagaagagacgcgtcgcctgctgcgtgaagaattcgtgcaatttccggcggagaaaatcgaggccgtttgtcatgccattgccgctcacagtttcagcgcgcaaatcgcccccttaacaacggaagctaaaatcgtccaggatgcggatcggctggaagccttgggggcgattggcctggcgcgcgtgtttgccgtttcaggggcattgggcgtggcgctgtttgatggcgaagatccgttcgcacagcatcgcccgcttgatgataaacgctacgcgctggatcatttccagactaagttgctgaagctaccgcaaaccatgcaaaccgcaagaggcaagcagctggcgcagcacaacgcgcaatttttagtcgagtttatggcgaagctcagtgccgaactggcgggggagaatgaaggtgtcgatcacaaggtgatagatgcgttttcacccgcgggctga

SEQ ID NO: 1621 - DNA, 1116 bp, Escherichia coli
atgaaaagaaaagttctggcaatgctggtcccggcgttattagttgctggcgcagcaaatgcggctgaaatttataataaagatggcaataaagttgatttctacggcaagatggttggcgaacgcatctggtcaaatactgatgataataacagcgaaaacgaagatacctcctatgctcgtttcggtgttaaaggtgaaacccaaatcaccagcgaactgactggtttcggtcagtttgaatacaacctcgacgccagcaaacctgaaggtgaaaaccaggaaaaaacccgtttaaccttcgccggtttgaaatataacgagttaggatcatttgactatggtcgtaactacggtgttgcttatgatgccgcagcttataccgatatgttagttgaatggggtggcgattcctgggcttccgctgacaacttcatgaatggtcgtaccaacggtgttgcaacctaccgtaactatgatttctttggcctggttgatggtcttgattttgcgattcagtaccaaggcaaaaacagcaaccgtagcactaagaaacaaaatggtgacggctatgcgttgtctgtagactataacatcaatggttttggtatcgttggtgcatatagcaaatctgatcgcaccaacgatcaagttgccgatggaaacggttcaaatgctgaactgtggtcattggctgcaaagtatgacgcgaacaatgtctacgcagctgtaatgtacggtgaaactcgtaatatgactccgggttctattgatacaggtgttgccgatcgagaaggcaatacaataatgcgtgatcaacttatcaatgaaacccagaactttgaagcggttgttcagtatcaattcgactttggtctgcgtccgtccttaggttatgtgtattctaaaggtaaagatatcaaaggtgtacctggacatagatatgttgacgctgaccgtgtgaactacattgaagttggtacctggtactacttcaataagaacatgaacgtttatactgcatacaaattcaacatgctggataaagatgacgccgccattactggcgcagcagctgatgaccagtttgcagttggtatcgtctaccagttctaa

SEQ ID NO: 1622 - DNA, 852 bp, Escherichia coli
atgactgttcaaaaaagtaaaaatccgcaggtcgatattgctgaagataatgcattcttcccttcagaatattcgcttagccaatataccagtcctgtctctgatcttgatggcgtggactatccaaaaccgtatcgcggtaaacataaaattctggtgatcgccgcggacgaacgttatttgccgaccgataacggaaaactgttctcgaccggtaaccatccgattgaaacgttgctgccgttgtatcatctccatgctgcaggtttcgaattcgaagtggcgaccatttccggtctgatgaccaagtttgaatactgggctatgccgcacaaagatgaaaaagtaatgccattctttgagcagcataaatcgttgttccgcaatccgaagaaattagcggatgttgtcgccagcctgaacgcagacagcgaatatgcagcgatctttgttcccggtggtcatggtgcactcatcggtttgccagaaagtgaagacgtagccgccgctctgcagtgggctattgaaaatgaccgttttgttatctccctatgccatggtccggctgcttttctggcgcttcgccacggcgataacccactgaatggttattccatttgcgcattcccggacgccgcagacaaacaaacgccagagataggctatatgccgggtcatctcacctggtacttcggcgaagagctgaagaaaatgggcatgaacatcattaatgacgacatcaccgggcgagtacataaggaccgtaaagttctcaccggcgacagtcctttcgcagcgaatgcgttgggtaaactggcggcacaggaaatgctggcagcttacgcgggttaa

SEQ ID NO: 1623 - DNA, 1359 bp, Escherichia coli
atgaaaagattatctataaccgtccgtttaaccttgctttttatatttctgctgtctgttgctggcgctggaattgtatggactctctataatggcctggcaagtgagttgaaatggcgcgatgatacaacactcattaaccggacagcgcagatcaagcagttgttaattgatggggtaaatccagatacgttacctgtgtactttaaccggatgatggatgttagtcaggatattttgatcattcatggtgatggcatcaataaaattgttaaccggacaaatgtcagtgatgacatgttaaataacatacctgctagtgagacaatcagcgcagcaggcatttacagaagcattattaatgatacagagatagatgctttccgaattaatattgatgaagtttcgccatcattaacggttactgtggctaaattggcttcagccagacataacatgcttgaacagtataaaattaatagcattataatttgcattgtcgccattatattgtgctcagtattaagtccgttgttaatcagaacggggttgcgagagatcaaaaagttgagtggcgtaacggaagcgctgaattataacgatagccgagtgccggttgaggttaacgcattaccgagagaactaaaacctcttgggcaggcgttgaataaaatgcatcatgctttagtcaaagattttgagcgccttagtcaatttgctgacgatctcgctcatgaacttagaacaccaattaatgcattactgggtcagaatcaggttacgctcagtcaaaccagaagtatcgctgaatatcaaaaaacaattgccggaaacattgaagagctggaaaatatttcgcggttaacagagaacatactgtttcttgccagggcagataaaaataatgttttggtgaaactggactcgctttctctcaataaggaagtcgaaaatttgttggactatcttgaatacctttcagacgagaaagagatttgctttaaggtcgagtgcaatcagcacatctttgcggataaaattttactacaacgaatgttatcgaatcttattgttaacgctattcgatattcgccagaaaaatcgcgtattcagataaccagttttcttgataccaacggttctcttaatattgatatcgccagtcctggaacgaaaattcatgagcctgaaaaactcttccgtagattttggcggggagataattcgcgtcattccgtaggtcagggacttggtctttctttagtcaaagcgattgccgaattgcatgggggaagtgctacgtatcactatctcaataagcataatgtgttccggattacgttgccgcaaagaaattaa

SEQ ID NO: 1624 - DNA, 783 bp, Escherichia coli
atgagttttgaggatagcgaaaaaacgtccagggtaaccttacagcagcattacaattttgtaatgaaccaggttgtttctataacatatgatttatggcatattattttcatgaagattctacttattgaagataatcaaaggacccaggaatgggtaacgcaggggctttccgaagcgggttatgtcattgatgccgtttctgatggcagagatgggctttatcttgcgctgaaggatgattatgcattgatcattctggatattatgcttccgggtatggatggctggcagatcttacaaacgttaagaacggcaaagcaaacccctgttatttgccttactgcaagggattctgtcgatgacagagtcagagggttggacagtggggcaaatgattatctggtaaaacctttttcattttctgagttgctggcaagggttcgggcacaattaaggcaacatcacgctctgaattcaacattagaaatcagtggcttaaaaatggactctgtcagtcaaagtgtgagcagggacaatatcagtattacactgacgcgcaaggagtttcagttactttggctactggcctccagagctggcgagattatacccagaacggttattgcgagtgaaatttggggaatcaactttgatagtgataccaatacggtggatgtcgccattcgcaggctccgcgcaaaagttgatgatccttttcctgaaaagctaatcgccacaatccgggggatgggctattcattcgtagcggtaaaaaaataa

SEQ ID NO: 1625 - DNA, 414 bp, Escherichia coli
atgttaaagcgttatttagtactctcggtagcaacggcagcattttcattaccttctttggtttatgccgcacaacaaaacattcttagcgtgcacattttgaaccagcaaacaggaaaacccgctgccgacgtgacagtcactcttgaaaagaaagcggataacggctggttacaacttaataccgccaaaacagataaggatggacgaattaaggcactgtggcccgagcaaactgcgactactggcgattaccgtgtcgtatttaaaaccggggactatttcaagaaacaaaatcttgaaagtttcttccctgagatccccgttgaatttcatattaataaagtgaacgagcattatcatgtgcctttattactcagccaatatgggtattcaacctatcgtggcagttaa

SEQ ID NO: 1626 - DNA, 1005 bp, Escherichia coli
atgaaaaagaatcaatttttaaaagaatcagatgttacggccgagtcggtattctttatgaagcgtcggcaggtgttaaaagcactgggcatcagcgcagctgcattttctttgcctcacgctgcgcatgccgatctgcttagctggtttaaagggaacgatcgtccgcccgcccccgccggaaaaccgctggagttcagcaagcctgccgcctggcaaaataacctgccactgacgccagcagataaagtctccggttataacaacttctatgaattcgggctggataaagccgatcccgcggctaatgctggtagcctgaaaaccgatccatggacactgaaaatcagcggcgaagtggcaaaaccattgaccctcgatcatgatgatttaacccgtcgcttcccgctggaagagcgtatttatcgtatgcgctgcgtggaagcgtggtcgatggtggtgccgtggattggttttccgctacacaaattgctggcgcttgccgaacccaccagcaatgcgaagtatgtcgctttcgaaacgatttatgcgccggaacagatgccaggccagcaggaccgctttatcggcggcgggctgaaatatccttatgtcgaaggattgcgtctcgacgaagcaatgcatccgctcacactgatgaccgtaggtgtttatggcaaggcgttaccaccgcaaaatggcgcaccggtgcgactgattgtgccgtggaaatatggctttaaagggattaaatcgatcgtcagtattaagctgacccgcgagcgtccgccaaccacctggaatctggcagcgcctgacgaatacggtttttacgccaacgttaatccgcatgttgatcacccgcgctggtcacaggctaccgaacgatttattggttcaggcggcattctcgatgttcagcgccagccaacactactgtttaatggttacgccgaccaagtggcatcgctgtatcgtggcctggatttgcgggagaatttctaa

SEQ ID NO: 1627 - DNA, 636 bp, Escherichia coli
atgcgtctgacagcaaaacaggtgatatggctgaaagtttgcctgcatcttgccggattgttgccgtttctctggctggtctgggcgatcaatcacggtggactgggtgccgatccggtgaaagatattcagcattttactggtcgcactgcactgaaatttttgcttgcggccttgttaatcacacctctggcacgctatgcaaaacagccgttattgatacgcactcgccgcctgttaggcttatggtgctttgcctgggcgacactgcatttaaccagttacgcattgctggagttgggcgtgaataatctggcgttattaggtaaggagttaattacccggccttatttaacgttaggaattatcagctgggttattttgcttgctttagcgttcacttcaacccagtcgatgcagcgaaaactcggcaaacactggcaacagttgcataacttcgtctatcttgtcgcgatcctggccccaatacattatctgtggtcagtgaagattatttcaccgcagccactcatctacgctgggctggctgtactgcttttagccttacggtataagaagttgctttcccttttcaaccggttacgcaagcagacccacaacaaattatctctataa

SEQ ID NO: 1628 - DNA, 651 bp, Escherichia coli
ttggcgattcgtcttcataaactggctgttgctttaggtgtctttattgttagcgctcctgccttttcgcatggtcatcactcacacggcaaacccttaacagaggtcgaacaaaaagctgctaatggtgtttttgatgataccaatgtacaaaaccgaacgctcagtgactgggatggagtctggcaatccgtttaccctttactgcaaagtggcaaacttgaccccgtctttcagaagaaagcggatgcagataaaaccaaaacatttgctgaaattaaagattattatcgcaaaggttatgcgacagatatcgaaatgattggcattgaggacggcattgtcgaattccatagaaataatgaaacaacatcctgtaaatatgattacgatggatacaaaatactcacctataaatcaggcaagaaaggcgttcgttacttattcgaatgtaaagatcctgaaagcaaagcccctaaatatatacaatttagcgatcatataattgcaccacgaaaatcatctcattttcacatttttatgggtaatgattcccaacagtctttattgaatgaaatggaaaactggccaacgtattatccctatcagttgagtagcgaagaagtggtcgaggagatgatgtctcattga

SEQ ID NO: 1629 - DNA, 348 bp, Escherichia coli
atgcggcgtcttgtcgtgctggtggaggagttgcgtgaacgaggcatcaactttcgtagtctgactgattcaattgataccagcacaccaatgggacgctttttcttccatgtgatgggtgccctggctgaaatggagcgtgaactgattgttgaacgagcaaaagctggactggaagctgctcgcgcacaggaacgaattggcggtcgccgtcccagactttcaccagaacaatgggcgcaggccgggcgactaattgcatcaggagttcctcgccagcaggtggcgatcatttatgatgttggcgtatcgactttgtataagaagtttccggtcggagataaatga

SEQ ID NO: 1630 - DNA, 441 bp, Escherichia coli
atgcagaaatatattttcagtgccgataaaaatgcgtttttccctgtggagcttaaaatcgcttatcaggaatccggcgaatggcccggtgatggaatcgaaattgacggcactgttgccgccggatttatgaaggaagcaccagaaggaaaatacagaggtgtcatcgacggaatgcctgcatggattgatattccaccgccagctcatgaggaacaaattgtcgcagccgaactggaaaagcagcaattgattaatcaggtcaacgaatacataaacagtaagcaatggcctggtaaagcggcgactggtcgtctgaaaggtgaggaactggcgcaatataattcgtggctgaattatctggacgcactggaactggtcgacacttccggtgcgccagatattgaatggcctacgcctccggcagttcaggccagatga

SEQ ID NO: 1631 - DNA, 603 bp, Escherichia coli
atggatagcgctgtattaaacagtgagcttattgctaccgtagcgggtgaagttattgtttataactatgacagtgagacacgggagtatatttctgcatcaattgaatatcttgctgtgggtgtcggtatccccgcatattcctgtttagatgctcctggcacacataaggctggttatgcaatctgccgttcggcagattttaactcatgggaatatgtgtcagaccatcgcggtgaaatcgtctataacaccgaaacgggagatgccaaagaaatcacagcaccaggcgactatcccgaaaatacaaccactatcgtcccgttaacgccatacgataaatgggatggtgagaaatgggtgacagatactgaggcacagcatagcgccgcagtaggtgcggcagaagcacagcgccagtcactgattgatgcagcaatggcttccatcagtctgattcagctgaaattacaggccggacggaaactgactcaggcagaaacaacccgacttaacgccgtgctggattacattgacgcggtgacggcaacaaataccagcacagcgccggatgtcatctggcctgaactgccggaggcgtag

SEQ ID NO: 1632 - DNA, 1923 bp, Escherichia coli
atggcagtaaagatttcaggtgtactgaaagacggcacaggaaaaccggtacagaactgcacaatccagctgaaagcaaaacgtaacagcaccacggtggtggtgaacacgctggcctcagaaaatccggatgaagccgggcgttacagcatggacgttgagtacggtcagtacagcgttattctgttggtggagggattcccgccatcacatgccgggatcatcaccgtgtatgaagattcccgacccggcacgctgaatgattttctcggtgccatgacggaggatgatgcccgtccggaggctctgcgccgttttgaactgatggtggaagaggtggcgcgtaacgcgtccgcggtggcacagaacacggcagccgtgaagaagtcagccagcgatgccagcacatcagcccgtgaggcggcaacccatgcgactgatgctgcaggctcagcacgcgcagccagcacgtcagccggacaggccgcttcgtcggctcagtccgcgtcttccagcgcaggaacggcatctacaaaggccactgacgcggaaaaaagtgctgccgctgcagagtcctcaaaaagcgcggcggccaccagtgccagtgccgcgtcaacaagtgccgggcaggcctcagccagtgccactgccgccggaaaatcggcagaaagcgctgcatcgtccgcttcaacagccacaatgaaggctggcgaagccactgagcaggccactgcagcagcgaggtctgcttccgctgcgaagacatccgaaacgaacgcgaaagcctcggaaaccagcgcagaatcctcaaaaacggctgctgcatcgtccgccagttcggcggcgtcatcggcatcatcggcgtctgcttcaaaagatgaggcggctaaacaggcgtcagcagcgaagggcagtgccacgacggcatccaggaaggcgacagaagcagttggcagtgcgacggcggcagcacagagcaagagttcggcagaatccgcagcaacgcgcgccgagacagcagcaaaacgggcagaggatattgcatccgctgtagcgcttgaggatgcgagcacgacaaaaaaggggattgttcagctcagtagctccactaatagcacgtctgaaactcttgcggcaacaccgaaagcggttaaggcggtaatggatgaaacgaacaagaaagcgcccctgaacagtccggcgttgaccggaacaccaacaacgccaactgcgccaaaaggtactgacaatactcagatcgcaagcacggcctatgttatggctgcgatttccgcccttgtgaactcgtcgcctgcctcgctggacacactgaataaacttgctgcggcactggggaataaccctcattttgccacgacgatgctcagtgcgctggcaggcaaacaacctctggacgatacgcttactcgtctgagtggaaaagatgctgcaggcctgctcgcatacctcggtctggggaatggtgctgtactgccggttggtgttcccgttccctggccgtcagcgacgccacctgcagggtggatcaaatgtaatggtgctgtgttcgacgcctcccggtacccagggctggcacaagcctatccggcgcacagattgcctgatttacgcggggagtttatccgtggatgggatgacgggcgtggcgtggacaccggaagggggatactgagctctcaggctgatgatattaagaagcctgaacttaagtatcttgcgcctgaccgtactcaatacggaaatacgacaacatttgtgtttcagggaggggtgaatggtgtttattcatcggtgattaaacagtcaggaagttcacctaccgttgatgcctttcaggtttccgggggaactgaaaccagaccgcgtaatattgcatataactacattgtgaggggagcctga

SEQ ID NO: 1633 - DNA, 600 bp, Escherichia coli
atgcgtaaagtttgtgcagccattttgtccgcagccatctgtctggccgtatccggtgcgcctgcatgggcgtctgagcagcaggccacgctgagcgcggggtatcttcatgcccggacgaccgctcccggcagcgataatctgaacgggattaacgtgaaataccgttatgagtttacggacacactggggatggtgacgtctttcagctatgcaggagacaagaatcgccggcttacccgttacagcgatacccgctggcatgaagattccgtgcgtaaccgctggttcagcgtaatggcggggccgtctgtgcgcgtgaatgaatggttcagcgcgtatgcgatggctggcgtggcttacagccgtgtgtcgactttctccggggattatctccgcgtaactgacaacaaggggaaaacgcacgacgtgctgaccggaagtgatgacggtcgccacagcaacacgtctctggcgtggggagctggcgtgcagtttaacccgaccgaatccgtggccattgatattgcttatgaaggctccggcagtggtgactggcgcactgacggtttcatcgtgggtgtcggttataaattctga

SEQ ID NO: 1634 - DNA, 1398 bp, Escherichia coli
atgaaaatggtctcacgtattaccgcgatcggcctggctggcgtcgcgatttgctatttagggttatctggttatgtgtggtaccacgataataaacgcagtaaacaggccgatgttcaggcatctgctgtcagtgaaaataataaggttttaggctttctccgcgaaaaaggatgcgattattgccatacgccttcggcagaattacctgcctattattatattcccggcgcgaaacagttgatggattacgacataaagcttggatataaatcttttaacctcgaggccgtgcgtgcggctctgctggctaataaacccgtttcgcaaagcgatctgaataagattgaatgggtgatgcagtatgaaactatgccgccaacgcgttataccgcgctacactgggcgggtaaggtgagtgatgaagagcgggcggaaatactggcctggattgcaaaacagcgcgcggaatattacgccagcaatgatactgctccggagcatcgcaatgaaccggtgcagcccatcccgcaaaaactgcctaccgatgcgcaaaaagtggcgttgggctttgcgctgtatcacgatcctcgtttatcggctgatagcaccatttcatgcgctcattgccatgcgttgaatgcgggaggcgtcgatggtagaaaaacatcgattggtgttggtggcgcagttgggccgattaacgcgccgacggtatttaactcagtatttaacgttgagcagttctgggatggtcgtgcggcaacattgcaggatcaggctggtggaccgccgttgaacccgattgaaatggcgtcgaaatcctgggacgaaattattgctaagctggaaaaagatccgcagcttaaagcgcagttcctcgaagtctatccgcaaggtttcagtggcgaaaatattactgatgccattgctgaatttgagaaaacattaattacgccggattccccatttgataaatggttgcgtggagatgagaatgctctgacggcgcaacagaaaaaaggctatcaattatttaaagataataaatgtgcaacttgtcatagtggtattattctcggtggacgttcctttgaaccgttggggctgaaaaaagactttaactttggtgaaattacggcggcggatattggtcgtatgaatgttactaaagaagagcgtgataaattgcgtcagaaagtacccggtttacgtaacgttgctttaacggcaccgtacttccatcgcggtgacgtgccgacgctggacggggcggtgaaactgatgctgcgctatcaggtaggcaaagagctgccgcaggaagatgtggatgatatcgtagctttcctgcacagtctgaacggggtttacacgccgtatatgcaggataaacaataa

SEQ ID NO: 1635 - DNA, 1650 bp, Escherichia coli
atgctcaatcagaaaattcaaaaccctaatccagacgaactgatgatcgaggtcgatctctgctatgagctggacccgtatgaattaaaactggatgagatgatcgaggcagaaccggaacccgagatgattgaagggctgcccgcctctgatgcgctgacgcctgccgatcgctatctcgaactgttcgagcatgttcagtcggcgaaaattttccccgacagtaaaacctttcccgactgcgcacccaaaatggacccgctggatattttaatccgctaccgtaaagtgcgccgtcatcgtgattttgacttgcgcaagtttgttgaaaaccacttctggctgccggaggtctactccagcgagtatgtatcggacccgcaaaattccctgaaagagcatatcgaccagctgtggccggtgctaacccgtgaaccacaggatcacattccgtggtcttctctgctggcgctgccgcagtcatatattgtcccgggcggccgttttagcgaaacctactattgggattcctatttcaccatgctggggctggcggaaagtggtcgggaagatttgctgaaatgcatggccgataacttcgcctggatgatcgaaaactacggccatatccccaacggcaaccgcacctattatttgagccgctcgcaaccaccggtttttgcgctgatggtggagttgtttgaagaagatggtgtacgcggcgcgcgccgctatctcgaccacctgaaaatggaatatgccttctggatggacggtgcagaatcgttgatccctaatcaggcctatcgccatgttgtgcggatgccggacggctcgctgctcaaccgttactgggacgatcgcgacacgccgcgtgacgaatcctggcttgaggacgttgaaaccgcgaaacattctggtcgcccgcctaacgaggtgtaccgcgatttacgtgcgggggcggcctccggttgggattactcttcccgttggctgcgtgatactggtcgtctggcgagcattcgtaccacccagttcatccccatcgatctgaatgccttcctgtttaaactggagagcgccatcgccaacatctcggcgctgaaaggcgagaaagagacagaagcactgttccgccagaaggccagtgcccgtcgcgatgcggtaaaccgttacctctgggatgatgaaaacggcatctaccgcgattacgactggcgacgcgagcaactggcgctgttttccgctgccgccattgtgccgctctatgtcggtatggcgaaccatgaacaggccgatcgtctggcaaacgccgtgcgcagccggttactgacacctggcgggattctggcaagcgagtacgaaaccggtgaacagtgggataaacccaacggctgggcaccgttacaatggatggcaattcagggatttaagatgtacggcgatgaccttctgggtgatgaaatcgcgcgcaactggctgaagacggtgaatcagttctatctggaacagcacaaactgatcgagaaataccatattgccgatggtgttcctcgcgaaggcggcggtggcgagtatccgttgcaggatgggtttggctggactaacggtgtggtacgccgtttaattggtttgtacggcgaaccataa

SEQ ID NO: 1636 - DNA, 603 bp, Escherichia coli
atgcaaatagtcatgtttgacaggcagtcaatatttattcatggaatgaaaatcagtttacagcatcgtattccaggagtgagtattcagggggccagtcaggcagacgagttatggcaaaagctggaaagttaccctgaagccttagtgatgctcgatggcgatcaggatggtgagttttgctacaggttgctgcaaaaaaccgtggtgcaatttcctgaggttaaggtgttaattacggcgacggattgcaacaaacggtggttacaggaagttattcattttaatgtgctggccattgtgcctcgtgattcaaccgtcgagacatttgcgttggcggtcaatagtgcggcgatggggatgatgtttctgcctggagactggcgaacgacgccggaaaaggacattaaagatctcaaatcgttaagcgcccgccagcgggagattttaaccatgttagcggcgggcgaatcaaataaagagatcggcagggcgctgaatatcagtaccggaacggtaaaagcgcatctggaatcactgtatcgccgtctggaagtcaaaaatcgcacccaggcggcaatgatgttaaatatctcctcctga

SEQ ID NO: 1637 - DNA, 972 bp, Escherichia coli
atgttagaaaaaacaataaacaatgcgatatgcgcgctactgtttcgttgtgaacaacaatcggtcaaagaaatggataaaattcacgcaatgcagttgttcatcaaagtcgcggagctggaaagtttttcccgcgcggcggatttctttgctttgccaaagggaagtgtttcgcgccagatacaggcactggaacatcaacttggcacccagcttctccagcgcaccacgcgacgggtcaaactcacgccagaaggcatgacctattatcaacgggcaaaagatgtgttgagtaatctcagcgaactggacggtctgtttcaacaggatgccaccagtatcagcggtaaattacgcatcgacatcccgtcaggaatcgcgaaaagcctgttactgccgcgcttgtcggaatttctctatctgcatccgggaattgagctggaactgagtagccatgaccgtccggtagatattcttcatgatggttttgattgcgtgatacgcactggcgcattaccggaagatggcgttatcgcccgttctctcggcaaactgaccatggtcaactgtgccagtccacactatctgacgcgctttggttatccgcaaagccccgatgatctgacttcacacgcaatagtgcgttatacaccgcacctgggtgtacatccgttaggttttgaggttgccagcgttaatggcgtccagtggtttaagtctggcggcatgttgacggtaaacagtagcgaaaactatctcgccgccggtattgccggtctggggattattcagatcccgcgcattgccgtgcgcgaagccctgcgtgccgggcggcttattgaagtgttgcctggctaccgtgccgagccgctgtccctttcactggtttatccgcagcgtcgggagctttcccggcgtgtaaacctgtttatgcagtggctggctggcgtaatgaaagagcacctggactga

SEQ ID NO: 1638 - DNA, 1014 bp, Escherichia coli
atgacgcaggaaaacgagatcaaacgtcccacccaggatctggagcacgagccaattaagcagttggataatagcgagaaaggcggcaaagttagccaggcgctggaaaccgtcaccaccactgccgagaaagtccaacgccaaccggttattgcgcacctgattcgcgcgacagaacgctttaacgatcggctgggtaaccagtttggtgcggctatcacctatttctcatttttgtcgatgatccccattttgatggtgtcgtttgccgcagggggctttgtgctggcctcccatccgatgttgctacaggatatcttcgacaaaattctgcaaaacattagcgatccgacgctagccgccacgttgaaaaacaccatcaacaccgccgttcagcagcgtacgactgtagggcttgtcggtctggcagtggcgctttattccggcatcaactggatgggtaacctgcgtgaagcgattcgcgcccagtcacgcgatgtctgggaacgctcgccgcaagatcaggagaagttctgggtaaaatatctgcgtgattttatttcgctgattggtttgttgattgcgctgattgtgacgctttctatcacctcggttgccggttctgcgcagcaaatgattattagcgcccttcacctgaacagcattgagtggctgaaaccgacatggcggttgattggcctggcgatttccatcttcgccaactatctgcttttcttctggatcttctggcggttgccgcgccaccgtccgcgcaaaaaagccctgatccgcggaacatttctggctgctattggttttgaagtgattaaaatcgtgatgacctacaccctgccatcgttgatgaaatcaccctctggcgcagcatttggttccgtgctggggctgatggcatttttctacttcttcgcccgtttgacgctgttttgcgcggcgtggattgccaccgccgaatataaagacgacccgcgaatgccggggaaaacgcagccttaa

SEQ ID NO: 1639 - DNA, 1323 bp, Escherichia coli
atgcaagcaacagccacaacactcgaccacgagcaagaatacacgccgatcaactcgcgtaataaagtccttgtcgcctctctcattggcacggccattgagttcttcgacttttacatttacgccactgcggccgttattgtgtttccgcatatcttcttcccgcagggcgatccaacggcagcaacgctacagtcgctcgccaccttcgccatcgccttcgtcgcgcgccccattggctctgccgtttttggtcattttggcgatcgcgttgggcgtaaagcgacgctggtcgcctcgttgctaacgatggggatttcgaccgtggtgattggtctgctgccaggctatgccacgattggtattttcgccccgctgctgctggcgctggctcgatttggtcagggtctgggcttaggtggtgaatggggcggcgcggcgctgctggcgactgaaaacgccccaccgcgcaaacgtgcattgtacggctccttcccgcagctgggcgcaccgattggcttcttctttgccaacggcactttcttgctgctttcctggctactgaccgacgagcagtttatgagctggggctggcgtgtgccatttatcttctcggcggtgctggtcattatcggcctgtatgttcgcgtgtcgctgcatgagtcgccggtgtttgagaaagtcgctaaagcgaaaaaacaggtgaagatcccgctgggtacgctgctgaccaaacatgttcgcgtaaccgtactgggtacgttcattatgctggcaacctatacgctgttttacatcatgacggtctactctatgacctttagtaccgccgccgcgccagttgggcttggtttaccgcgtaacgaagtactgtggatgttgatgatggcggttatcggttttgcagtgatggttccgttggcgggtctgctggcagatgcttttggtcgccgtaaaagtatggtggtgatcactacgcttatcattctgtttgccctgtttgcctttaacccactgttgggttctggtaatccagcattggtgtttgttttcctgctgctgggcttgagtttgatgggcctgacctttggtccgatgggggcgctgctgccggagctgtttccgacggaagtccgttataccggagcatcgttctcctataacgtatcgtcgattctcggggcgtctgttgcgccgtatatcgcggcctggttgcagactaactatgggttaggcgcggtggggttatatctggcggcgatggccggactgacgttaattgccctgctgttaacgcatgagacgcggcaccagtcgttgtag

SEQ ID NO: 1640 - DNA, 2061 bp, Escherichia coli
atgagcaaggcaggcaaaataaccgctgcgatttcaggggctttcttgttgttgattgtcgtggcgatcattttgattgcaacttttgactggaatcgactcaaaccgaccatcaaccagaaagtctctgcggagttgaatcgtccgttcgctatccgtggcgatctgggcgtggtgtgggagcggcaaaaacaagaaactggctggcgcagctgggtgccgtggccccatgtacacgcggaagacatcattcttggcaatccaccggatattcccgaagtcacaatggtgcatttgccgcgagtagaagcgacgctggccccgctggcgctgctgaccaaaacggtctggttgccgtggatcaagctcgaaaagcccgacgcgcgcctgattcgcctctccgaaaagaacaataactggacgtttaatctcgccaacgatgacaacaaagacgcgaatgcaaagccgtcggcgtggtcgtttcagctggataatattcttttcgatcaagggcggatcgccattgatgacaaagtaagcaaagcggatctggaaatttttgtcgatccgttaggcaagccgctgccgttcagcgaagttaccggatcgaaaggtaaagcggataaagaaaaggtgggcgattacgtttttggcctgaaggcgcagggacgttataacggtgaaccgctcactggtacgggaaaaataggcggtatgctggcgctgcgtggcgaaggaacgccgtttccggtacaggctgatttccgctctggtaacacccgtgttgcttttgatggcgttgtgaatgacccaatgaagatggggggtgtcgatttacggcttaaattttctggcgattcgctgggtgatctctatgaactgacgggcgttctgctgcccgatacaccgccgtttgaaacggatggtcggctggtagcgaaaatcgacactgaaaaatcgtcggtctttgattatcgcggttttaatgggcgcagtggcgatagcgatatccacggttctctgatctataccaccggcaagccacgaccaaaactggaaggtgatgtcgagtcgcggcaattgcggctggcggacctgggaccgttgattggcgttgattccgggaaaggggcagaaaagtcgaaacggtctgaacagaagaagggcgaaaaaagcgttcagcctgcgggcaaagtgctgccttatgaccgcttcgaaaccgataaatgggacgttatggatgccgatgttcgcttcaaagggcggcgcattgagcatggcagcagcctgccgattagcgatctttctactcatatcatcctcaaaaatgctgacctgcgcctgcaaccgctgaaatttggcatagcgggcggcagcattgcggcgaatattcatctggaaggcgataaaaagccgatgcaggggcgggcagatattcaggctcgtcgactgaaactgaaagaactgatgccggatgtggaactgatgcagaagacgctgggggaaatgaacggtgacgcggaactacgcggtagcggtaactcggtggcggcgcttttaggcaacagtaatggcaacctgaaactgttgatgaatgacgggctggtgagccgcaacctgatggagattgtcgggctgaatgttggtaactacattgtcggtgcgatatttggtgacgatgaggtgcgggtgaactgcgcggcagcgaatctggatattgccaacggtgtggcgcgtccgcaggttttcgcttttgataccgagaatgcgttgatcaatgttaccggcacggcaagttttgcttcggaacagctggatttaactatcgatccagaaagtaaagggattcgcattatcacgctgcgttcgccgctgtatgtgcgtgggacgtttaaaaatccgcaggctggggtgaaagccgggccgttgattgcccgtggtgctgttgcggcggcactggcaacgctggttacgccagcggcagcattgctggcactgatctcaccttccgaaggggaggctaatcagtgccggacaattttgtcgcagatgaagaagtga

SEQ ID NO: 1641 - DNA, 768 bp, Escherichia coli
atgataaggcaggttatccagcgaataagcaaccctgaagcaagcatcgagagcttgcaggaacggcgtttttggttgcagtgtgagcgtgcttacacctggcagccgatctatcaaacctgcgggcggttaatggccgtggagctattaacggtggtcacgcatcccttgaacccttcgcaacgcctgccgccggatcgctattttactgaaatcaccgttagccatcggatggaggttgtgaaagagcagattgatttgctggcgcaaaaagccgacttctttgtagagcacggcctgctggcatcggtcaatattgatggccctacgctcatcgccctgcgtcagcaaccaaaaatcctgcgccagattgaggatcttccctggctgcgtttcgaactggtggaacacatccgcctgccgaaagattcaacctttgcctcgatgtgtgaatttggcccgctgtggctggatgattttggtaccgggatggcaaatttctctgcactaagtgaagtgcgttatgactacatcaaaatcgcgcgagaactgtttgtgatgctgcgtcagtcgccggaaggacgcacactcttttctcagcttttacatctaatgaatcgctattgtcgcggggtgattgtcgagggcgtagaaacaccggaagagtggcgtgatgttcagaactcgcccgcattcgccgcacaaggctggtttctttcacgcccggcaccgatagaaacgctgaatacggcggttctggcgctataa

SEQ ID NO: 1642 - DNA, 930 bp, Escherichia coli
atgtccaaaaagattgccgtgattggcgaatgcatgattgagctttccgagaaaggcgcggacgttaagcgcggtttcggcggcgataccctgaacacttccgtctatatcgcccgtcaggtcgatcctgcggcattaaccgttcattacgtaacggcgctgggaacggacagttttagccagcagatgctggacgcctggcacggcgagaacgttgatacttccctgacccaacggatggaaaaccgtctgccgggcctttactacattgaaaccgacagcaccggcgaacgtacgttctactactggcgtaacgaagccgccgccaaattctggttggagagtgagcaatccgcggcgatttgcgaagagctggcgaatttcgattatctctacctgagcgggattagcctggcgatcttaagcccgaccagccgcgaaaagctgctttccctgctgcgcgaatgccgcgccaacggcggaaaagtgattttcgacaataactatcgtccgcgcctgtgggccagcaaagaagagacacagcaggtgtaccaacaaatgctggaatgcacagatatcgccttcctgacgctggacgatgaagacgcgctgtggggtcaacagccagtggaagacgtcattgcgcgcacccataatgcgggcgtgaaagaagtggtggtgaaacgcggggcggattcttgcctggtgtccattgctggcgaagggttagtggatgttccggcggtaaaactgccgaaagaaaaagtgatcgataccaccgcagctggcgactctttcagtgccggttatctggcggtacgtttgacgggcggaattgcggaagacgcagcgaaacgcgggcacctgaccgcaagtaccgttattcagtatcgcggcgcgattatcccgcgtgaagcgatgccagcgtaa

SEQ ID NO: 1643 - DNA, 1497 bp, Escherichia coli
atgcagggcacaaaaattcgacttttagcgggcggtttgctgatgatggccactgctggctatgtgcaggcagatgcgctccagcctgatccagcatggcaacaggggacgctttccaacggtttacagtggcaagtgctgactacgccccaacgtcccagcgatcgtgttgaaattcgcctgctggttaataccggttcgctcgccgaaagtacacaacagagcggttacagtcacgccatccctcgtattgcgctaacgcaaagcggtggccttgacgcagcgcaggcgcgttcattgtggcagcaggggatcgaccctaaacgcccgatgccgccggtaattgtctcttatgacaccacgctgtttaatctgagtttgcccaataaccgtaacgacttgctgaaagaggcgctctcttatctggcaaatgccactggcaaactgactatcacgccagaaaccatcaaccatgcgttgcaaagtcaggacatggtggcaacctggcctgccgatactaaagagggctggtggcgttatcgtctgaaaggatcaaccttgttaggtcacgatcctgccgatccgctgaaacaacccgttgaagcggaaaagattaaagatttctatcagaaatggtacaccccggatgcaatgacgctgctggtggtgggaaacgtggatgcgcgctcggtcgtcgaccaaatcaataaaacgtttggcgaactgaaaggcaaacgtgaaacaccggctccggtgccgacgctttctccgctgcgtgcggaagcggtgagtattatgaccgacgcggtgcgtcaggaccggctatctatcatgtgggatacgccgtggcagccgattcgtgaatcagccgcactgctgcgctactggcgtgcggacctggcccgtgaggcgctgttctggcatgttcagcaagcgttaagcgccagtaacagtaaagacatcggtcttggatttgactgtcgtgtgctgtatctgcgtgcgcagtgtgccatcaacatcgaatcaccaaacgacaagctgaacagcaaccttaatctggtggcgcgtgaactggcgaaggttcgcgataaaggtctgccggaagaagagttcaatgcgttagtggcgcaaaagaaactggagctgcagaaactgtttgccgcctatgcgcgagctgataccgatattctgatggggcagcggatgcgttcgttgcaaaatcaggtcgtcgatatcgcgccggagcaatatcagaaactgcgtcaggatttccttaacagcctgacggtggagatgttaaatcaggatctgcgtcagcagttgtcgaatgatatggcgttaatactgctgcagccgaaaggcgagccggaatttaacatgaaagcgttgcaggcggcctgggatcaaatcatggccccatcgactgcggctgccgccacatctgtcgccacggatgacgtacatcctgaagtgacggatattccacctgtacagtaa

SEQ ID NO: 1644 - DNA, 1287 bp, Escherichia coli
atgaaaacctctctgtttaaaagcctttactttcaggtcctgacagcgatagccattggtattctccttggccatttctatcctgaaataggcgagcaaatgaaaccgcttggcgacggcttcgttaagctcattaagatgatcatcgctcctgtcatcttttgtaccgtcgtaacgggcattgcgggcatggaaagcatgaaggcggtcggtcgtaccggcgcagtcgcactgctttactttgaaattgtcagtaccatcgcgctgattattggtcttatcatcgttaacgtcgtgcagcctggtgccggaatgaacgtcgatccggcaacgcttgatgcgaaagcggtagcggtttacgccgatcaggcgaaagaccagggcattgtcgccttcattatggatgtcatcccggcgagcgtcattggcgcatttgccagcggtaacattctgcaggtactgctgtttgccgtactgtttggttttgcgctccaccgtctgggcagcaaaggccaactgatttttaacgtgatcgaaagtttctcgcaggtcattttcggcatcatcaatatgatcatgcgtctggcacctattggtgcattcggggcaatggcgtttaccatcggtaaatacggcgtcggcacactggtgcaactggggcagctgattatctgtttctacatcacctgtatcctgtttgtggtgctggtattgggttcaatcgctaaagcgactggtttcagtatcttcaaatttatccgttacatccgtgaagaactgctgattgtactggggacttcatcttccgagtcggcgctgccgcgtatgctcgacaagatggagaaactcggctgccgcaaatcggtggtggggctggtcatcccgacaggctactcgtttaaccttgatggcacatcgatatacctgacaatggcggcggtgtttatcgcccaggccactaacagtcagatggatatcgtccaccaaatcacgctgttaatcgtgttgctgctttcttctaaaggggcggcaggggtaacgggtagtggttttatcgtgctggcagcgacgctctctgcggtgggccatttgcctgtagcgggtctggcgctgatcctcggtatcgaccgctttatgtcagaagctcgtgcgctgactaacctggtcggtaacggcgtagcgaccattgtcgttgctaagtgggtgaaagaactggaccacaaaaaactggacgatgtgctgaataatcgtgcgccggatggcaaaacgcacgaattatcctcttaa

SEQ ID NO: 1645 - DNA, 1950 bp, Escherichia coli
atggtggcagccgttgtcctggtgttcgtttttattttttgcaccgttttgctgttccatctggtccagcagaatcgctataacacggctacgcaactggaaagcattgctcgctctgtccgcgaacccttatcttctgccattttgaaaggcgatattcccgaagcggaagctattcttgccagcattaaaccggcaggcgtggtcagccgtgccgatgtagtgctgcctaaccagttccaggcgctgcgtaaaagttttattccagagcgtccggtgccggtaatggttactcgcctgtttgagctaccggtgcaaatctcgctgggcgtttactcgctggaacgtccggcaaacccgcagccaattgcctatctggtgttacaggcggattccttccgcatgtataagttcgtgatgagcaccctctcaacgttagtgaccatttacttacttttgtcgttaatattgacggtggcgattagctggtgcattaaccgcctgattttgcatccgttacgcaatattgctcgcgaacttaacgccatcccaccccaggagcttgttggtcaccaactggcattaccgcgtctgcatcaggacgatgaaatcggtatgttggtgcgcagttacaacctcaaccagcaattgctgcagcgccattatgaagaacagaacgaaaatgcgatgcgcttcccggtgtcggatttgccgaacaaagccttgctgatggagatgctggagcaggtggtggcgcgtaaacaaactaccgcgctgatgatcatcacctgtgaaaccctgcgtgatactgcgggtgtgctgaaagaggcgcaacgagaaattctgctgctgacgctggtggaaaaactcaaatcggtactgtcgccacgcatgatcctcgcgcagattagcggttatgactttgctgtcattgccaacggtgtacaggaaccgtggcacgctatcacattaggtcagcaagtgctcactatcatgagcgagcgcctgccgattgaacgtattcaactccgtccgtactgtagcattggcgtggcgatgttctacggcgatctcaccgccgaacagctttacagtcgcgctatttctgcggcatttaccgctcgccataaaggcaaaaatcagattcagttctttgatccgcagcagatggaagccgcccagaagcggttgacggaagagagcgatatccttaatgcactggaaaatcatcagtttgcgatttggttacagccacaggtcgagatgaccagcggtaaactggtcagtgcggaagtgttactgcgtatccagcaaccggatggcagttgggacctgcccgatggcttaatcgatcgcattgagtgctgtgggctgatggttaccgtcggtcactgggtgctggaagagtcctgtcgattgcttgctgcctggcaagagcgcggcattatgctgcccttgtcggtaaacctctcagcgctgcaactgatgcatccaaatatggtggcggatatgctggaactgttaacccgctatcgcattcagccgggaacactgattctggaagtgacggaaagccgacgtattgacgatcctcatgctgcggtggcaatcctccgtccgctgcgcaatgccggagttcgggtggcgctggatgatttcggcatgggctacgcagggctgcgtcagctgcagcatatgaaatcgttgccaatcgacgtactgaaaatcgacaaaatgtttgttgaaggtttgccggaagatagcagcatgattgctgcaattatcatgctggcgcagagcctgaacttacaaatgattgccgaaggcgtggagactgaagcacaacgcgactggctggcaaaagcgggcgttggtattgcccagggcttcctttttgctcgcccactccctattgaaatcttcgaagagagttacctggaagaaaaatag

SEQ ID NO: 1646 - DNA, 3474 bp, Escherichia coli
atgcgcaaattcacactaaacatattcacgctttccctcggtctggccgttatgccgatggtcgaggcagcaccaaccgctcagcaacagttgctggagcaagttcggttaggcgaagcgacccatcgtgaagacctggtgcaacagtcgttgtatcggctggaacttattgatccgaataacccggatgtgattgctgcccgttttcgttctctgttacgtcagggcgatattgatggcgcacaaaaacagctcgatcggctgtcgcagttagcgccgagttcaaatgcgtataaatcgtcgcggactacgatgctgctttccacgtcggatggtcgtcaggcactgcaacaggcaagattgcaggcgacgactggtcatgcggaagaagctgtggcgagttacaacaaactgttcaacggtgcgccgccggaaggtgacattgctgtcgagtactggagtacggtggcgaaaattccggcccgccgtggcgaagcgattaatcagctaaaacgcattaatgcggatacgccgggcaacacaggcctgcaaaacaatctggcgctattactgtttagtagcgatcgccgtgatgaaggttttgccgtcctggaacagatggcgaaatcgaacgccgggcgcgaaggggcctctaaaatctggtacgggcagattaaagacatgcctgtcagcgatgccagcgttcaggcactgaaaaaatatctctcgatctttagcgatggcgatagcgtagctgctgcacaatcgcaactggcagaacagcaaaaacagctggccgaccctgctttccgcgctcgtgcgcaaggtttagcggcggtggactctggcatggcgggtaaagccattcccgaactacaacaggcggtgcgggcgaacccgaaagacagtgaggctctgggggcgctgggccaggcgtattcccagaaaggcgatcgcgccaatgcagtggcgaatctggaaaaagccctcgcgctggatccgcacaacagcaataacgacaaatggaacagtctgctgaaagtaaaccgctactggctggcgatccagcagggcgatgccgcgctgaaagccaataatcctgaccgggcagaacggctgttccagcaggcacgtaatgtcgataacaccgacagctatgcagtgcttgggctgggcgatgtggcgatggcgcgcaaagattatcccgccgccgaacgctattaccagcagaccttgcgtatggacagcggcaacactaacgccgtgcgcgggctggcgaatatttaccgccagcagtcgccagaaaaagccgaagcgtatatcgcctcgctctctgccagccagcggcgcagcattgatgatatcgaacgcagcctgcaaaacgaccgtctggcacagcaggcagaggcactggaaaaccaggggaaatgggcgcaggcggcagcacttcagcggcaacgactggcgctggaccccggcagtgtatggattacttaccgactttcgcaggatctctggcaagccggacaacgcagccaggccgatacgttaatgcgcaatctggcgcagcagaagctgaacgacccggagcaggtttacgcttacgggctgtacctctccggtcatgatcaggacagagcggcgctggcgcatatcaacagcctgccgcgcgcgcagtggaacagcaatattcaggagctggttaatcgactgcaaaacgatcaggtgctggaaaccgctaatcgcctgcgagaaaacggtaaagaggcagaagcggaagcgatgctgcgccagcaaccgccttcctcgcgtattgacctcacgctggctgactgggcgcagcagcgacgtgattacaccgccgcccgcgctgcatatcagaatgtcctgacgcgggagccagctaacgccgacgccattcttggtctgacggaagtggatattgctgccggtgacaaagcggcggcacgtagccagctggcgaaactgcctgccactgataacgcctcgctgaacacacagcggcgcgtggcgctggcacaggcgcagcttggcgataccgcagcggcgcagcagacatttaataagttgatcccgcaggcaaaatctcagccaccgtcgatggaaagcgcgatggtactgcgtgatggtgcgaagtttgaagcgcaggcgggcgatccaacgcaggcgctggaaacctacaaagacgccatggttgcatccggtgtgaccacgacgcgtccgcaggataacgacacctttacccggctgacccgtaacgacgagaaagatgactggctgaaacgcggcgtgcgcagcgatgcggcggacctctatcgccagcaggatcttaacgtcactctcgagcacgattactggggttcgagcggcaccggtggttactccgatctgaaagcgcacaccactatgttgcaggtggacgcgccctattctgacgggcggatgttctttcgcagtgatttcgtcaatatgaacgtcggcagtttctccactaatgccgatggcaaatgggatgacaactggggcacctgtacattacaggactgtagcggcaaccgcagccagtcggattccggtgccagcgtggcggtcggctggcgaaatgacgtctggagctgggatatcggtaccacgccgatgggcttcaacgtggtggatgtggtcggcggcatcagttacagcgatgatatcgggccgctgggttacaccgttaacgcccaccgtcggcccatctccagttctttgctggcctttggtgggcaaaaagactctccgagcaataccgggaaaaaatggggcggcgtgcgtgccgacggcgtggggctaagtctgagttacgataaaggtgaagcaaacggcgtctgggcatcgcttagcggtgatcagttaaccggtaaaaatgtcgaagataactggcgtgtgcgctggatgacgggctattactataaggtcatcaaccagaacaatcgccgcgtcacaatcggcctgaacaacatgatctggcattacgacaaagacctgagtggctactcactcggacagggcggttactacagtccgcaggaatacctgtcgtttgccataccggtgatgtggcgggagcgcacggaaaactggtcgtgggagctgggggcgtctggctcgtggtcgcattcacgcaccaaaaccatgccgcgttatccgctgatgaatctgatcccgaccgactggcaggaagaagctgcgcggcaatccaacgatggcggcagcagtcagggctttggctacacggcgcgggcattacttgaacgacgtgttacttccaactggtttgtcggcacggcaattgatatccagcaggcaaaagattacgcacccagccatttcctgctctacgtacgttattccgccgccggatggcagggtgacatggatttaccaccgcagccgctgataccttacgccgactggtaa

SEQ ID NO: 1647 - DNA, 1107 bp, Escherichia coli
atgaatgtgttgcgtagtggactcgtgacgatgctgctgctggctgcctttagtgttcaggcagcctgtacctggcctgcctgggagcagtttaaaaaggattacatcagtcaggaagggcgcgtcatcgaccccagcgacgcgcgcaaaatcaccacctccgaagggcaaagttacggcatgttctttgccctggcggctaacgaccgtgcagctttcgataatcttctcgactggacgcaaaacaatctcgctcagggttctttaacagaacatttgcccgcctggctgtggggcaagaaagagaacagtaagtgggaagtgctggacagcaattcggcctccgatggtgatgtctggatggcctggtcgttgctggaggcggggcgtttgtggaaagagcagcgttataccgacatcggcagcgcattgctaaaacgtatcgcgcgggaggaagtggtgacggtgcctgggctgggctccatgttgttaccgggcaaagtgggttttgctgaggataacagctggcgttttaaccccagctacctgccgccgacgctggcgcagtatttcacccgctttggcgcgccgtggaccacgctgcgcgaaaccaatcaacgtttattgctggaaaccgccccgaaaggcttttcgccagactgggtgcgctatgagaaagacaaaggctggcagctaaaagccgaaaaaacattgatcagcagctacgacgctatccgcgtttacatgtgggtaggcatgatgcctgacagcgatccgcaaaaagcgcggatgctcaaccggtttaaaccgatggcgacattcactgagaaaaacggttatccgccggaaaaagtggatgtggctacggggaaagcgcagggtaaaggaccggtcggtttttctgccgccatgctgccctttttacaaaaccgcgatgcgcaggccgttcagcgccagcgcgtggccgataactttcccggcagcgatgcctattacaactatgtgctgaccctgtttggacaaggctgggatcaacaccgtttccgcttctcgacaaaaggtgagttattacctgactggggccaggaatgcgcaaattcacactaa

SEQ ID NO: 1648 - DNA, 2310 bp, Escherichia coli
gtggctctggggatgagtgcgttcccctctttcatgacgcaggcgacgccagcaacgcaaccactgatcaatgctgagccagctgtagccgcccaggcggagcaaaatccgcaggtggggcaagtgatgccgggcgtgcagggcgcagatgcgccagtcgtggcgcagaacggtccttcccgtgatgtgaagctgacctttgcgcaaattgcgccgccgccgggcagcatggtgctacgtggcattaacccgaacggcagcattgagtttggtatgcgcagcgatgaagtggtgacgaaggcgatgctcaacctcgaatacacgccatcgccatcattactgcctgtccagtcgcagttaaaggtttatctcaatgatgaactgatgggcgtgctgccagtgaccaaagaacagttgggtaaaaaaacgctggcacaaatgcccattaacccgctgtttattactgatttcaaccgtgtgcggctggagtttgtcggccattatcaggacgtgtgcgaaaacccggccagcaccacgctttggctggatgttgggcggagcagtggactggatctgacctatcagaccctgaatgtgaagaatgacctgtcacacttcccggtgccattctttgacccgcgtgataaccgcaccaacaccttgccgatggtctttgcgggtgcgccggatgttgagctgcaacaagcatctgccattgtcgcctcgtggtttggttcgcgttctggctggcgtgggcagaacttcccggtgctctataaccaactgccggatcgcaatgccattgtctttgccaccaatgacaaacgcccggacttcctgcgcgatcatccggcggtaaaagccccggtgattgagatgattaaccatccgcagaatccttacgtcaaactgctggtggtgtttggtcgtgacgacaaagacttgttgcaggcagcgaaaggtatcgctcagggtaacattctgttccgtggtgaaagtgtggtagtgaatgaagtgaaaccgctgctaccacgtaagccgtacgatgcgccgaactgggtgcgtaccgatcgtccggtcacctttggtgaactgaaaacctatgaagaacaattacaatccagcggtcttgagccagcagcgattaacgtttcgctaaacctgccgccggatctctacctgatgcgcagtaccggcattgatatggatattaattaccgctacaccatgccgccggtgaaagacagttcgcggatggatatcagcctgaataaccagttcctgcaatccttcaacctgagcagcaaacaggaggcgaaccgcctgctgctgcggattccggtattacaaggtttgctggatggcaaaacggatgtctctattccggcgctgaaactgggcgcgaccaaccagttgcggttcgactttgagtatatgaacccgatgccgggcggttcggtggataactgtattaccttccagccggtgcagaatcatgtggtgattggtgacgactccaccatcgacttctcgaagtattaccacttcatcccgatgccggatctacgcgcctttgctaacgcgggcttcccgttcagccggatggcggatttgtcgcaaaccatcaccgtgatgccgaaaacgccaaacgaagcacagatggaaaccttgctgaataccgttggctttatcggtgcgcagacgggcttcccggcgattaacctgacggtgaccgatgatggcagcaccattcagggcaaagatgccgacatcatgatcgtcggtggtatcccggacaaactgaaagacgataagcagatcgacctgttggtgcaggcgaccgaaagctgggtgaaaacgccgatgcgccagaccccgttccccggtattgtgccggacgagagcgatcgcgcggcagaaactcagtcaacgctgacctcttccggtgcgatggcggcggtgattggcttccagtcgccgtataacgaccagcgcagcgtgattgcgctgctggcagatagcccacgcggttatgaaatgcttaacgatgcggtgaacgatagcggcaaacgcgccaccatgttcggttcggtcgcggtgatccgcgagtccggtatcaacagcctacgtgttggcgatgtttattacgtaggtcatctgccgtggttcgagcgcttgtggtatgcgctggcaaaccatccgattctgctggcggtgctggcggctatcagtgtgatattgctggcatgggtactgtggcgtctgctgcgtattattagtcgtcgtcgtcttaacccggataacgagtaa

SEQ ID NO: 1649 - DNA, 2619 bp, Escherichia coli
atgagtatcctgacccggtggttgcttatcccgccggtcaacgcacggcttatcgggcgttatcgcgattatcgtcgtcacggcgcgtcggctttcagcgcgacgctcggctgtttctggatgatcctggcctggatttttattccgctggagcacccgcgctggcagcgtattcgcgcagaacataaaaacctgtatccgcatatcaacgcctcgcgtccgcgtccgctggacccggtccgttatcttattcaaacatgctggttactgatcggtgcatcgcgcaaagaaacgccgaaaccgcgcaggcgggcattttcaggtctacaaaatattcgtggacgttaccatcaatggatgaacgagctgcctgagcgcgttagccataaaacacagcatcttgatgagaaaaaagagctcggtcatttgagtgccggggcgcggcggttgatccttggtatcatcgtcaccttctcgctgattctggcgttaatctgcgttactcagccgtttaacccgctagcgcagtttatcttcctgatgctgctgtggggggtagcgctgatcgtacggcggatgccggggcgcttctcggcgctgatgctgattgtgctgtcgctgaccgtttcttgccgttatatctggtggcgttacacctcgacgttaaactgggacgatccggtcagcctggtgtgcgggcttattctgctgttcgccgaaacgtacgcgtggattgtgctggtgctcggctatttccaggtcgtatggcctctgaatcgtcagccggtgccattgccgaaagatatgtcgctgtggccgtcggtggatatctttgtcccgacttacaacgaagatctcaacgtggtgaaaaataccatttacgcttcgctgggtatcgactggccgaaagacaagctgaacatctggatcctcgatgacggcggcagggaagagtttcgccagtttgcgcaaaacgtgggggtgaaatatatcgcccgtaccactcatgaacatgcgaaagcgggcaacatcaacaatgcgctgaaatatgccaaaggcgagttcgtgtcgatattcgactgcgaccacgtaccaacgcgatcgttcctgcaaatgaccatgggctggttcctgaaagagaaacagctggcgatgatgcagacgccgcaccacttcttctcgccggatccgtttgaacgcaacctggggcgtttccgtaaaacaccgaacgaaggcacgctgttctatggtctggtgcaggacggcaatgatatgtgggatgccactttcttctgcggctcatgtgcggtgattcgccgtaagccgctggatgagattggcggtattgctgtcgaaacggtaaccgaagatgcgcacacttctctgcgtctgcaccgtcgtggctacacctccgcgtatatgcgtattccgcaggcagcggggctggcgaccgaaagtctctcggcgcatatcggtcagcgtattcgctgggcgcgcgggatggtgcaaatcttccgtctcgataacccactcaccggtaaagggctgaagtttgctcagcggctgtgctatgtcaacgccatgttccatttcttgtcgggcattccacggctgatcttcctgactgcgccgctggcgttcctgctgtttcatgcctacatcatctacgcgccagcgttgatgatcgccctgttcgtgctaccgcatatgatccatgccagcctgactaactcgaagatccagggcaaatatcgccactctttctggagtgaaatctacgaaacagtgctggcgtggtatatcgcaccaccgacgctggtggcgctgattaacccgcacaaaggcaaatttaacgtcaccgccaaaggtggactggtggaagaagagtacgtcgactgggtgatctcgcggccctacatcttccttgttctgctcaacctggtgggcgtagcggttgggatctggcgctacttctatggtccgccaaccgagatgctcaccgtggtcgtcagtatggtgtgggtattctacaacctgattattctcggcggcgcagtcgcagtatcggtagaaagcaaacaggtacgccgatcgcaccgcgtggagatgacgatgcccgcagcaattgcccgcgaagatggtcacctcttctcgtgtaccgttcaggatttctccgacggtggtttggggatcaagatcaacggtcaggcgcagattctggaagggcagaaagtgaatctgttgcttaaacgcggtcagcaggaatacgtcttcccggctcaggtggcgcgcgtgatgggtaatgaagttgggctgaaattaatgccgctcactacccagcaacatatcgattttgtgcagtgtacgtttgcccgtgcggatacatgggcgctctggcaggacagctacccggaagataagccgctggaaagtctgctggatattctgaagctcggcttccgtggctaccgccatctggcggaatttgcgccttcttcggtgaagggcatattccgtgtgctgacttctctggtttcctgggttgtatcgtttattccgcgccgcccggagcggagcgaaacggcacaaccatcggatcaggctttggctcaacaatga

SEQ ID NO: 1650 - DNA, 753 bp, Escherichia coli
atggccgtactgggattgcagggggttcggggaggcgtggggacaacaaccatcaccgccgcattagcctggtcattacaaatgttgggagaaaatgtcctggtggtcgatgcctgcccggacaacttgttgcgcctgtcatttaacgttgattttacccaccgtcagggttgggccagagctatgctggatggccaggactggcgtgacgccgggttacgctatacctcgcagctcgatttgctgccttttggtcagttatccattgaagaacaagaaaatccacagcactggcaaacccggctgagcgatatttgctccggcttacagcaactaaaagccagcgggcgttaccagtggattttaattgacttaccgcgtgatgcctcgcagataacccaccagctgctgagtttgtgcgatcactcgctggcaatcgtcaatgtggatgccaactgccatatccgactgcatcagcaagcgctgccggatggtgcacatattttgattaatgacttccgtattggcagccaggttcaggacgatatttaccagctttggttgcaaagccagcgccgattgctgccgatgctcattcatcgtgatgaagcgatggctgaatgtctggcagctaagcaaccagtcggtgaatttcgcagtgatgcgctggcggctgaagaaatactgacgctggctaactggtgcctgttaaactattccgggctgaaaacgccagtcgggagtgcatcatga

SEQ ID NO: 1651 - DNA, 189 bp, Escherichia coli
atgaataacaatgaaccagatactctgcctgatcccgcgataggctatatcttccagaatgatattttggcgttaaagcaggcattttcactgcctgatattgattatgccgatatttcccaacgcgaacagttggccgcggcattaaaacgctggccgttgctggcagagtttgcgcaacaaaagtag

SEQ ID NO: 1652 - DNA, 1560 bp, Escherichia coli
gtggaccctgtattctctatcggtatctcatcattatgggatgagctgcgacatatgccagcaggcggcgtctggtggtttaacgtcgatcgccatgaagatgctatcagtctggcgaatcaaacaattgcatcccaggctgaaaccgcacacgtcgcggtcattagcatggacagcgatccagcgaaaatctttcaattagatgattctcaagggccgggaaaaataacattattttcaatgctaaatcatgaaaaaggtctatactatttggcccgtgatttgcagtgttctattgatccccataattacctttttattcttgtttgcgcaaataacgcatggcaaaacattcctgccgagcggcttcgctcatggttggataaaatgaataaatggagccggctaaaccattgttcgcttttggtaattaattccggaaataataacgataaacaattttcattgttacttgaggaataccgttcactttttggtcttgccagtttgcgttttcagggcgaccaacatttgctggatattgctttctggtgcaacgaaaaaggggtcagcgcccgtcagcagcttagcgttcagcaacaaaatggttgctggacattagttcaacaccaggaggcggaaatccaaccacgcagcgacgaaaaacgcattctgagtaatgttgctgtactggaaggtgcgccgccgctatcggaacactggcaactgttcaacaataacgaagtcctgttcaatgaagcccgtaccgctcaggcggcgacggtggtcttttctttacagcaaaatgcgcaaatcgagccactggcccgcagcattcatactctgcgtcgccagcgcggtagtgcgatgaaaatcctcgtacgggaaaataccgccagcctgcgcgccaccgatgaacgtttattattggcctgcggtgcaaatatggttatcccgtggaatgcgccactctcccgctgtctgacgatgatcgaaagcgtgcaagggcagaagtttagtcgctatgtgccggaagatatcactaccttgctgtcaatgacccagccgctcaaactgcgtggtttccagaagtgggatgtgttctgtaatgccgtcaacaacatgatgaataaccctctattacctgcccacggtaaaggcgttctggttgccctacgtccggtaccgggtatccgcgttgagcaagccctgacgctatgtcgccctaaccgtaccggcgatatcatgaccattggcggtaatcggctggtgctgtttctctcattctgtcggattaacgatctggataccgcgttgaatcatattttcccattgcctactggcgacattttctcaaaccgaatggtctggtttgaagatgatcaaatcagtgccgagctggtgcagatgcgcctgcttgccccagaacaatggggcatgccgctgcctttagcgcaaagttctaaaccggtcatcaatgccgagcacgatggtcgccactggcgacgaataccagaaccaatgcgactgttagatgatgctgtggagcgctcatcatga

SEQ ID NO: 1653 - DNA, 192 bp, Escherichia coli
atgatgaccatcagcgatatcattgaaattattgtcgtttgcgcactgatatttttcccgctgggctatctggcgcggcactctttgcgacgcattcgcgacaccttacgtttgttctttgctaaacctcgttatgttaaaccggccgggacgttacgccgcacggaaaaagccagggcaaccaaaaaatga

SEQ ID NO: 1654 - DNA, 1680 bp, Escherichia coli
atgactcaatttacgcaaaataccgccatgccttcttccctctggcaatactggcgcggcctttccggctggaacttctattttctggttaagttcggtctgttgtgggcgggatatcttaacttccatccgctcctcaatctggtgtttgccgcgtttctgctgatgcccattccgcgctacagcctgcatcgcttgcgccactggattgccctgccgatcggctttgctttgttctggcatgacacctggttgcctggcccggaaagcataatgagccagggttcgcaggtggcggggttcagtaccgattatttaatcgatcttgtcacacgctttattaactggcagatgattggggccatttttgttttattcgtggcctggttattcctgtcacaatggattcgcattaccgtttttgtggttgccattctgctatggctgaacgtacttaccctggcgggaccaagtttctccttgtggccagccggtcaaccgacgaccactgtaacaacgacgggtggtaacgcagcggcaaccgttgcggcgacgggtggcgcaccggtagtgggtgatatacccgcacaaactgcaccgccaacaacagcaaaccttaacgcctggctgaataatttctataacgcggaggcgaaacgtaaatcgatcttcccgtcttcgctgcccgctgatgctcagccatttgaactactggtgattaatatctgttcgctttcctggtcggatattgaagccgccggattgatgtcgcatccactgtggtcgcatttcgatattgagttcaagaactttaactccgccacctcctacagtggcccggcggcgatccgtttactgcgcgccagctgcgggcagacttcgcacactaatctgtatcaaccggcaaataacgactgctatctgtttgataacctgtcgaaactgggctttacccagcacctgatgatgggacataacggccagttcggtggttttttgaaggaagttcgcgaaaatggcggcatgcagagcgaattgatggatcaaacaaatctgccggttattttgctgggctttgatggttcgccggtttatgacgataccgccgtgcttaaccgttggctggacgttaccgaaaaagataaaaacagccgtagtgccacgttctacaacacgcttccactgcatgacggcaaccattatccgggcgtcagcaaaacagcggattacaaagcgcgggcgcaaaaattctttgatgaactggacgccttctttactgaactggagaaatcgggtcgtaaagtgatggtggtcgtggtgccggaacacggcggcgcgctgaagggcgacagaatgcaggtatctggtctacgtgatatccctagcccgtctatcacagacgtccccgttggggtgaaattcttcggcatgaaggcaccacatcagggggcaccgattgtcatcgaccaaccgagcagcttcctggctatctccgatctggtggttcgcgttcttgatggcaagattttctccgaagacaatgttgactggaaaaaactcaccagtgggttgccacaaacagcaccggtctccgagaactcaaatgcagtagttattcaataccaggataaaccgtacgttcgcctgaacggcggcgactgggtgccttacccgcaataa

SEQ ID NO: 1655 - DNA, 1272 bp, Escherichia coli
atgcagcacaacacactaccgaaacacgatcagaaattgccgtttacacgctacgacttcggctgggttttattatgcataggcatggcgattggtgccggaaccgtgctgatgccagtacaaattggcttgaagggaatttgggtatttattaccgcagcgatcattgcttatcctgccacctgggtagtgcaggacatttatttaaaaaccctttctgaaagcgattcctgtaatgactataccgatattatcagtcattacctggggaagaactggggaattttcctcggggttatctactttttgatgattatccacgggatttttatctactctctctccgtggttttcgacagcgcctcgtacctgaaaaccttcggtttaaccgatgccgatctttctcaatctctattttataaagtcgccattttcgccgtactggtggcgattgcgtctggtggtgaacgattactgtttaagatttccggaccaatggtggtggtcaaagtggggattattgtcgtgttcggttttgcgatgatcccgcactggaatttcgccaatataaccgccttcccgcaagcctccgactttttccgcgatgtcctgcttactattccattttgcttcttttccgcggtatttattcaggtacttaacccaatgaatattgcctatcgtaaacgggaagcggataaagtactggcaacccggctcgcgctgcgtacccaccggattagctatatcacgctcattgcggtgatcttgttttttgccttttcgtttaccttctcaattagccacgaagaagccgtttctgcctttgaacaaaatatctcggcactggcactggccgcgcaggtgatccctgggcatatcattcatatcacctctacggtactgaatatctttgccgtactgactgcattctttggcatttatctcggtttccacgaggccattaaaggcattattctcaatctgttaagccgaattattgataccaggaaaattaactcactcgtgctgactctggcgatctgcacttttatcgtcattacgttgacgatttgggtttcgtttcgtgtatcggtactggtgttctttcagttgggaagcccgttatatggcattgtgtcgtgcctcattccgtttttcctgatctataaagtctcacaactggaaaaacttcgcgggtttaaagcctggatgattctgctgtacggcattttgttatgcttgtcgccactgttgaagttgattgagtaa

SEQ ID NO: 1656 - DNA, 1005 bp, Escherichia coli
atgagtacgcatgaggccacctcgcaacaaccgctgttgcaggctatcgacctgaaaaaacattatccggtgaagaaaggcatgttcgcgccggaacgtctggtgaaggcgctggatggcgtttcgtttaaccttgaacgtggcaaaacgctggcagtagtaggtgaatctggctgcggtaaatcgaccctcggtcggttgctgacgatgattgaaacgcccaccggcggcgaactgtattaccaggggcaggatctgctcaagcacgatccgcaggcgcagaagctacgtcggcagaaaatccagattgtcttccagaacccttacggttcgctgaatccgcgtaaaaaagttgggcagattctcgaagagccgctgctgatcaacaccagcttaagcaaagaacagcgtcaggaaaaagccctgtcgatgatggcgaaagtcggcctgaaaaccgagcattacgaccgctatccgcatatgttctccggcggtcagcgtcagcgtatcgccattgcccgaggtctgatgctcgacccggatgtggtgattgccgatgagccggtttctgcgctggacgtctcagtgcgtgcgcaggtgctgaatctgatgatggatttgcagcaggaactggggctatcttatgtctttatctcgcacgatctgtcggtggtggagcacattgctgatgaagtgatggtgatgtacctgggccgctgcgtggagaaggggacgaaggaccaaatcttcaataacccgcgccacccgtacactcaggcattgctctccgcgacaccacgcctgaacccggacgatcgtcgcgaacgcatcaaacttaccggtgaactgccaagcccgctgaatccaccgccaggctgcgccttcaacgcccgctgtcgtcggcgcttcggcccctgcatccagttgcagccgcagctaaaagactacggcggtcaactggtagcctgttttgccgttgatcaggatgaaaatccgcagcgttaa

SEQ ID NO: 1657 - DNA, 984 bp, Escherichia coli
atggcgttattaaatgtagataaattatcggtgcatttcggcgacgaaagcgcaccgttccgcgccgtagaccgcatcagctacagcgtaaaacagggtgaagtggtcgggattgtgggtgagtccggctctggtaaatcggtcagttcgctggcaattatggggctgattgattatccgggccgcgtaatggcggaaaagctggagtttaacggtcaggatttgcagcgtatctcagaaaaagagcgccgcaacctggtgggtgccgaagtggcaatgatcttccaggacccgatgaccagccttaacccgtgctacaccgtgggtttccagattatggaagcgattaaggtgcatcaaggcggcaacaaaagtacccgccgtcagcgagcgattgacctgctgaatctggtcggtattcccgatccggcatcgcgtctggatgtttacccgcatcagctttccggcggcatgagccagcgcgtgatgatcgccatggcgattgcctgtcgaccaaaactgctgattgccgatgaaccgaccactgcgctggacgtgaccatccaggcgcaaatcatcgaactgctgctggagttgcagcagaaagagaacatggcgctggtgttgatcactcatgacctggcgctggtggcggaagcggcacataaaatcatcgtgatgtatgcaggccaggtagtagaaacgggcgatgcgcacgctatcttccatgcgccgcgtcacccgtatactcaggcattgctgcgtgcgctgccggaatttgctcaggacaaagaacgtctggcatcgttgccaggtgtcgttcccggcaagtacgaccgcccgaacggctgcctgcttaacccgcgctgcccctacgccactgacaaatgccgtgctgaagaaccggcgctgaatatgctcgctgacgggcgtcagtccaaatgccattacccacttgatgatgccgggaggccgacactatga

SEQ ID NO: 1658 - DNA, 903 bp, Escherichia coli
atgtcacaggttactgaaaataaagtgattagcgcaccggtgccgatgaccccgttacaggagttctggcactattttaaacgcaacaaaggcgcggttgtcgggctggtttacgtcgtcatcgtgctgtttatcgcgatctttgccaactggattgcaccctataacccagcggaacagttccgcgatgcactgctcgccccgccagcctggcaggaaggcggcagcatggcgcacttgctgggcactgatgacgtggggcgtgatgtgctgtcgcggctgatgtacggcgcgcgcttgtcgctgctggttggctgtctggtagtggtgttatcgctgattatgggcgttattctcggcctgatcgccggttactttggcggtctggtcgataacatcatcatgcgcgtggtcgatatcatgctggcgctgccaagtctactgctggcactggtgctggtggcgattttcggcccgtcgattggtaacgccgcgctggcgctaaccttcgttgcgctgccgcattatgtgcgcttaacccgcgccgccgtgctggtggaagttaaccgcgattacgtcaccgcgtctcgcgtggcgggtgccggggcaatgcgccagatgtttattaacatcttcccgaactgccttgcgccgctgattgttcaggcgtcgctcggtttctctaacgccattctcgatatggctgctcttggtttcctcggcatgggcgcgcagccgccaacgccggagtggggcaccatgctctctgacgtgttgcagttcgcgcaaagcgcctggtgggtcgtgaccttcccgggtctggcgatcctgctgacggtgctggcatttaacctgatgggtgacggtctgcgtgacgcgctcgatcccaaactgaagcagtaa

SEQ ID NO: 1659 - DNA, 1020 bp, Escherichia coli
atgttgcagtttattctccgacgtttgggactcgtcatccccacgtttatcggtattacccttctcacatttgcctttgtccacatgatcccgggcgatccggtgatgatcatggcgggcgaacgtgggatctccccagagcgtcacgcgcaattgctggctgaactcggcttagataaaccgatgtggcagcagtatctccattacatttggggcgtaatgcacggtgatttaggcatttcgatgaaaagccgaattccggtatgggaagagttcgtgccgcgctttcaggccacgctggaacttggcgtctgcgcgatgatttttgcgacggcagtcggtattccggttggtgtgctggctgcggttaaacgtggttccattttcgatcacacagcggttggcctggcgctgaccggctactcgatgccaattttctggtggggcatgatgctgatcatgctggtttcggtgcactggaacctgacgcctgtctccggtcgtgtgagcgacatggtgttcctcgatgattccaatccgttaaccggttttatgctgatcgacaccgccatctggggtgaagacggtaactttatcgatgccgtcgcccatatgatcctgcccgccattgtgctgggtaccatcccgctggcggtcattgtgcgtatgacgcgctcctcgatgctggaagtgctgggcgaagattatatccgcaccgcgcgtgccaaaggtcttacccggatgcgggtgattatcgtccatgcgctgcgtaacgcgatgctgccggtggtgaccgttatcggcctgcaggtgggaacattgctggcgggggcgattctgactgaaaccatcttctcgtggcccggtctggggcgctggttgattgacgcactgcaacgccgcgattatccggtagtgcagggcggcgtattgctggtggcgacgatgattatcctcgtcaacctgctggtcgatctgctgtacggcgtggtgaacccgcgtattcgtcataagaagtaa

SEQ ID NO: 1660 - DNA, 228 bp, Escherichia coli
atgacccgcagcctggaactgcgtgtctgtattgctcacaaatcaattcccgcccttgtggaacagggaatgaagtattgctgccggatggcgctgcacgcagaggcacagcgccaccgggtatgcagattgttgacaaagagcgctttgtttatgccggatgcggcgcaaacgccttatccgacctacaaaatcgtgcaaactcaatacattgcagagttttcgtag

SEQ ID NO: 1661 - DNA, 1608 bp, Escherichia coli
atgcgtatttccttgaaaaagtcagggatgctgaagcttggtctcagcctggtggctatgaccgtcgcagcaagtgttcaggctaaaactctggtttattgctcagaaggatctccggaagggtttaacccgcagctgtttacctccggcaccacctatgacgcctcttccgtaccgctttataaccgtctggttgaatttaaaatcggcaccactgaagtgatcccgggcctcgctgaaaagtgggaagtcagcgaagacggtaaaacctataccttccatctgcgtaaaggtgtgaagtggcacgacaataaagaattcaaaccgacgcgcgaactgaatgccgatgacgtagtgttctcgttcgatcgtcagaaaaacgcgcaaaacccgtaccataaagtctctggcggcagctacgaatacttcgaaggcatgggcttgccagagctgatcagcgaagtgaaaaaggtggacgataacaccgttcagtttgtgctgactcgcccggaagcgccgttcctcgctgacctggcaatggacttcgcctctattctgtcaaaagaatatgctgacgcgatgatgaaagccggtacaccggaaaaactggacctcaacccaatcggtaccggcccgttccagttacagcagtaccagaaagattcccgtattcgctataaagcgtttgatggctactggggcaccaaaccgaagatcgatacgctggtcttctctattactcctgacgcttccgtgcgttacgcgaaattgcagaagaacgaatgccaggtgatgccgtacccgaacccggcagatatcgcccgcatgaagcaggataaatccatcaacctgatggaaatgccggggctgaacgtcggttatctctcgtataacgtgcagaaaaaaccactggatgacgtgaaagttcgccaggctctgacctacgcggtgaacaaagacgccatcatcaaagcggtttatcagggcgcgggcgtatcagcgaaaaacctgatcccgccaaccatgtggggctataacgacgacgttcaggactacacttacgatcctgaaaaagcgaaagccttgctgaaagaagcgggtctggaaaaaggtttctccatcgacctgtgggcaatgccggtacaacgtccgtataacccgaatgctcgccgcatggcggagatgattcaggcagactgggcgaaagtgggcgtgcaggccaaaatcgtcacctacgaatggggtgagtacctcaagcgtgcgaaagatggcgagcatcagacggtaatgatgggctggactggcgataacggggatccggataacttcttcgccaccctgttcagctgcgccgcctctgaacaaggctccaactactcaaaatggtgctacaaaccgtttgaagatctgattcaaccggcgcgtgctaccgacgaccacaataaacgtgttgaactgtacaaacaagcacaggtcgtgatgcacgatcaggctccggcactgatcatcgctcactccaccgtgtttgaaccggtacgcaaagaagttaaaggctatgtggttgatccattaggcaaacatcacttcgaaaatgtctctatcgaataa

SEQ ID NO: 1662 - DNA, 1692 bp, Escherichia coli
atgagatacatcaaatcgattacacagcagaagctgagctttttgcttgcaatctatattggcctttttatgaatggcgcggttttttaccgccgcttcggcagctatgcgcacgattttaccgtctggaaaggcatttctgctgttgttgaactggccgccaccgtactggtgaccttctttttactgcgtcttctttcgctgtttggccgccgcagctggcgtattctggcatcgctggtggtgctcttttccgcaggtgccagctattacatgaccttccttaatgtagtcattggttatggcatcatcgcatccgtcatgaccaccgatatcgacctgtcaaaagaagttgttggtctgaactttattctctggttaatcgccgtaagcgcgttgcctcttatccttatctggaataaccgctgtcgttacaccttgctccgacaactgcgaaccccagggcaacgtattcgcagcctggcggtcgtcgtactggcaggtattatggtttgggcaccgattcgtttgctggatatccagcagaagaaagtggagagggcgacaggtgttgatttgccgagttatggcggcgtcgtcgcgaactcttatctgccatcaaactggctttcggcattaggtctttatgcctgggcgcgggtcgatgaatcttccgataacaattctctccttaaccctgcgaagaagtttacgtaccaggctccacaaaacgttgatgatacatatgtcgttttcattattggtgaaaccacgcgctgggatcatatgggcattttcggctatgaacgcaataccacaccgaagctggctcaggagaaaaatctggcggcgttccgtggttactcctgtgatactgcaaccaaactctcactgcgttgcatgtttgtacgtcagggtggagcagaagataatccgcagcgcacattaaaagaacagaacattttcgcggtattgaagcagttaggattcagttctgatctctacgctatgcaaagcgaaatgtggttctacagcaatacgatggcggacaacattgcttatcgtgagcagattggtgcggagccacgtaaccgtggcaagccggtagatgatatgttgctggtagacgaaatgcagcaatcgctggggcgcaacccggatggtaagcatctgatcattctgcataccaaaggctcacactttaactacacccagcgttatccgcgcagctttgcgcagtggaagccggaatgtattggtgttgatagcggctgtaccaaagcgcagatgatcaactcatacgacaactcggtgacctatgtggatcactttatttccagcgtgattgatcaggttcgcgataagaaagcgattgtgttctatgcagctgaccacggtgagtcaattaatgaacgcgagcacctgcacggcacgccgcgtgaactggcaccgccggaacagttccgtgtgccgatgatggtctggatgtcggataaatatctggaaaatccggtcaatgcgcaggcatttgcgcagctgaaaaaagaagccgacatgaaagtgccacgccgtcatgtagagctgtacgacaccatcatgggttgtcttggctatacttcaccggatggtggaattaacgaaaacaacaactggtgccacatcccgcaggcaagagaggcggcggctaactaa

SEQ ID NO: 1663 - DNA, 1209 bp, Escherichia coli
atgacaccttcaaattatcagcgtactcgctggctgacactcatcggtactatcattacccagtttgctctggggtcggtttatacctggagtctgtttaacggtgcgctttctgccaagctgggggctccagtaagccaggttgctttctctttcggcttgttaagtctggggctggcaatttcgtcttctgttgcgggcaaattgcaggaacgttttggtgttaaacgcgtcactatggcttccggcattttgctgggattaggtttcttcctgacagcacattccaacaacctgatgatgctgtggttaagcgccggtgtgttggttggtctggcggatggtgcgggttacctgttgacgctctctaactgcgtgaagtggtttccggagcgtaagggacttatctctgcttttgctatcggttcttatggtctgggcagcctgggttttaaatttatcgacacgcacctgctcgaaacggtgggtctggaaaaaacctttgttatttggggcgcgattgtactggtgatgattgtctttggcgcaacgttaatgaaagatgcgccgaagcaggaagtgaaaaccagcaatggtgtggtggagaaggactacaccctggcagagtcgatgcgtaaaccgcagtactggatgttagcggttatgttcctgactgcgtgcatgagtggtctgtatgtgattggtgtagcgaaagatatcgctcaaagtctggcgcatcttgatgcaatttccgcagccaatgctgtgacggttatttccatcgccaacctttctggtcgtctggtgctgggcattctgtctgacaaaatcgcccgtatccgtgttatcaccattggtcaggtgattgcgctggtgggtatggcggccctgctgtttgcaccattgaatgcagtgacgttctttgcagcgattgcctgtgtggcatttaactttggtggcacgattactgtgttcccgtcgctggttagtgagttcttcggcctcaataacctggcgaaaaactacggcgtcatttacctcggtttcggtatcggcagcatttgtggttcgattatcgcttcactgtttggcggattctatgtgactttctacgtgattttcgccctgctgattctgtcactggcgctttctacgaccattcgccagccagagcagaaaatgttgcgtgaggcgcatggctccctttaa

SEQ ID NO: 1664 - DNA, 699 bp, Escherichia coli
atgatcataaaaaaaagcggtggtcgctggcagctaagcctgcttgcgagcgcggtaatcagtgccttttttctcaacacagcttacgcctggcaacaagaatatatcgttgatacgcaacccggacattccacagagcgttacacctgggatagcgatcatcaacctgattacaacgatattttgtcgcaacgtattcaaagtagccaaagggcgctgggactggaagtcaatctggcggaagaaacccctgtggatgtgaccagcagtatgagtatgggctggaattttcctttatatgagcaggttacaaccggcccggtcgcggcattacattacgatggcacaactacctcgatgtataacgagtttggcgacagtactaccacgctggccgatccgttatggcatgccagcgtgagtaccttaggctggcgtgttgactcccggcttggcgatcttcgaccctgggcgcaaatcagctataaccagcaatttggcgagaatatctggaaggcgcaatcaggcctgagccggatgacggcgacaaaccagaacggcaactggctggatgtcaccgtaggcgctgatatgttgctcaatcaaaatattgctgcctatgctgcgctatctcaggcagaaaataccactaacaatagcgactatctgtatacgatgggggttagcgccagattttaa

SEQ ID NO: 1665 - DNA, 564 bp, Escherichia coli
atggaacgttgcggctgggtgagtcaggacccgctttatattgcctaccatgataatgaatggggcgtgcctgaaactgacagtaaaaaactgttcgaaatgatctgcctggaagggcagcaggctgggttatcgtggatcacagtcctcaaaaaacgcgaaaactatcgcgcatgctttcatcagttcgatccggtgaaagttgccgcaatgcaggaagaggatgtcgaaagactggtacaggacgccgggattatccgccatcgtgggaaaattcaggcaattattggtaatgcgcgggcgtacctgcaaatggaacagaacggcgaaccgtttgccgactttgtctggtcgtttgtcaatcatcaaccacaggtgacacaagccacaacgttgagcgaaatccccacatctacacccgcctccgacgccctatctaaggcactaaaaaaacgtggttttaagtttgtcggtaccacaatctgttactcctttatgcaggcatgtgggctggtgaatgatcatgtggttggctgctgttgccatccgggaaataaaccatga

SEQ ID NO: 1666 - DNA, 441 bp, Escherichia coli
atgattcgggaagtgcaacgttcagaactccccgcgatcctccaactgtggctggaaagtacaacctgggggcatccctttataaaatcgagttactggcgtgactgcattccgctggtgcgggatgcgtatcttgccaacgcgcaaaactgggtctgggaagaagacggtaagcttctcggttttgtcagcattatggaaggccgattcctcgcagcaatgtttgtcgcaccgaaggccgtcagacgcggtattggtaaggcgctaatgcagtatgtgcagcagcgccatccccatctgatgctggaggtttatcaaaaaaatcaaccggcgatagatttctaccatgcgcagggttttcacattgtcgattgcgcatggcaggatgaaacccaactacccacctggattatgagctggccggtggttcaaacgctgtaa

SEQ ID NO: 1667 - DNA, 2334 bp, Escherichia coli
ttggccaactcatcctcacgatattccgttctgactgccgcccactgggggcctatgctggttgaaaccgacggcgaaaccgtgtttagctcgcgtggcgcgttagccacaggaatggaaaactccttgcagagcgcggttcgcgaccaggttcacagcaatacgcgggtgcgatttccaatggtgcgcaaaggctttcttgcgtcaccggaaaatccgcaaggcattcgtgggcaggatgaatttgttcgcgtgaattgggatgaggcgctggagcttattcaccatcaacataaacgtattcgtgaggcttatggtccggcatcgatttttgctggttcctacggctggcgttcaaacggcgtgctgcataaggcctcgacattattacaacgctatatggcgctggcaggcggttataccgggcatctgggggattattcgaccggcgcggcacaggcgatcatgccgtatgtcgtgggtggcagcgaagtttatcaacaacaaaccagttggccgctggtgctggaacatagcgatgttgtggtgctgtggagtgctaatccactcaatacgctgaaaattgcgtggaatgcatccgatgagcaggggctttcttacttttctgcactgcgtgacagcgggaaaaagctgatctgcattgatccaatgcgatcggaaaccgtcgatttctttggcgataaaatggagtgggtggcaccgcacatgggcaccgatgttgcgttgatgctggggatcgcccatacgctggtggaaaatggttggcacgacgaaacgtttctggcgcgttgcaccacaggttatgctgtcttcgcctcttatttgctgggcgagagtgacggaatagcgaaaaacgccgaatgggcggcagagatttgtggtgttggcgcagcgaaaatccgcgagctggcggctattttccaccaaaatacaaccatgctgatggcaggctggggaatgcagcgccaacagtttggtgagcaaaaacactggatgatcgtcacgctggcggcaatgttggggcaaatcggcacacccggcggcggttttggtctttcttaccattttgccaatggtggtaaccccacgcgccgcgctgcggtgctctcttccatgcagggtagcttgccgggtggcaccgatgcggtagataaaatccctgtcgcccgcattgttgaagcactggaaaaccctggtggcgcatatcaacataacggtatggaccgacatttcccggatattcgttttatctggtgggcgggtggtgccaactttactcatcatcaggataccaatcgcctgatccgtgcctggcaaaaaccggagctggtggtgatctccgaatgcttctggacggctgcggcgaaacacgcggatatcgttctgcctgcgaccacctcttttgagcgtaatgatctcaccatgaccggtgattacagtaatcagcatctggtgccgatgaagcaagtggtgccgccacgcgatgaagcgcgtaatgattttgatgtttttgccgacttgagtgaacgttggcagaagggcggttatgcacgttttacggaaggaaaaagtgagctgcaatggctggaaacgttttataacgttgcccggcagcgcggggcaagccagcaggttgaattgccgccatttgctgagttctggcaagccaaccagttaattgagatgccggaaaacccggacagtgagcggtttattcgcttcgccgattttcgccgcgatccgcaggcgcatccattaaaaaccgccagcggtaagattgaaatcttctcgcagcgtattgccgattacgcttatccggattgcccggggcatccaatgtggctggcgccggacgaatggcagggcaatgccgaaccggaacagttgcaggtactttctgctcatccggcgcatcgtctgcacagccagctgaattacagttctctgcgcgaattgtacgcggtggcaaatcgtgagcctgtcaccattcatcctgaagatgcccagacgcgcggcatacaagatggcgatactgttcggctgtggaactcacgcgggcaaattcttgccggcgcggtcattagcgagggaattaaacctggcgtgatttgtattcacgaaggcgcatggccggatttggatttaatcgctggcggcatttgtaaaaacggcgcagtgaacgtgctgaccaaagatctccccagctcgcggctggggaatggctgtgcgggtaatacggcgctggcatggctggaaaaatacaccggtccggaactgacacttacagcgtttgaaccaccggccagctcataa

SEQ ID NO: 1668 - DNA, 660 bp, Escherichia coli
atgaagaaacgtgtttatcttattgccgccgtagtgagtggcgctctggcggtatctggctgtacaactaacccttacaccggcgaacgcgaagcaggtaaatctgctatcggcgcaggtctgggctctctcgttggcgcgggtattggtgcgctctcttcttcgaagaaagatcgcggtaaaggcgcgctcattggcgcagcagcaggcgcagctctgggcggcggcgttggttattacatggatgtgcaggaagcgaagctgcgtgacaaaatgcgcggcactggtgttagcgtaacccgcagcggggataacattatcctcaatatgccgaacaatgtgaccttcgacagcagcagcgcaaccctgaaaccggcgggcgctaacaccctgaccggcgtggcaatggtactgaaagagtatccgaaaacggcggttaacgtgattggttataccgacagcacggggggtcacgacctgaacatgcgtctctcccagcagcgtgcggattccgttgccagcgcgttgatcacccagggcgtggacgccagccgcatccgtactcaaggccttggcccggctaacccaatcgccagcaacagcacctcagaaggtaaggcgcaaaaccgccgtgtagaaattaccttaagcccactgtaa

SEQ ID NO: 1669 - DNA, 975 bp, Escherichia coli
atgaagccgtccgttatcctctacaaagccttacctgatgatttactacaacgcctgcaagaacatttcaccgttcaccaggtggcaaacctcagcccacaaaccgtcgaacaaaatgcagcaatttttgccgaagctgaaggcttgctgggttcaaacgagaatgttgatgccgcattgctggaaaaaatgccgaaactgcgtgccacatcaacgatctccgtcggctatgacaattttgatgtcgatgcgcttaccgcccgaaaaattctgctgatgcacacaccaaccgtattaacagaaaccgtcgccgatacgctgatggcgctggtgttgtctaccgctcgtcgggttgtggaggtagcagaacgggtaaaagcaggcgaatggaccgcgagcataggcccggactggtacggcactgacgttcaccataaaacactgggcattgtcgggatgggacggatcggcatggcgctggcacaacgtgcgcactttggcttcaacatgcccatcctctataacgcacgtcgccaccataaagaagcagaagaacgcttcaacgcccgctactgcgatttggatactctgttacaagagtcagatttcgtttgcctgatcctgccgttaacggatgagacgcatcatctgtttggcgcagaacaattcgccaaaatgaaatcctccgccattttcattaatgccggacgtggcccggtggttgatgaaaatgcactgattgctgcattgcagaaaggggaaattcacgccgccgggctggatgtcttcgaacaagagccactgtccgtagattcgccgttgcactcaatggccaatgtcgtcgcagtaccgcatattggatctgccactcatgagacgcgttatggcatggccgcctgtgccgtggataatttgattgatgcgttacaaggaaaggttgagaagaactgtgtgaatccgcacgtcgcggactaa

SEQ ID NO: 1670 - DNA, 711 bp, Escherichia coli
atggcgacaggaaagtcctgctctcgctggtttgcgcctcttgcggcgttattaatggtagttagcctgagtgggtgttttgataaagaaggcgatcagcgtaaagcgtttatcgacttcctgcagaatacagtgatgcgtagcggtgaacgtctaccaaccctgactgccgatcagaaaaaacagtttggtccttttgtctctgattacgcgattctgtatggttattctcagcaggtgaatcaggcgatggattccggtctgcgcccggttgtagacagcgttaacgcaattcgcgtaccgcaggattacgttacgcaaagcggtccgctgcgtgaaatgaacggttcgctgggtgtgctggcgcaacagctgcaaaatgcgaagttgcaggccgatgctgcacactctgcgttaaaacagagtgatgacctgaaaccggtttttgatcaggcattcaccaaagtggtaacgacgccagctgatgcattgcaaccgttgattccggcggcacaaactttcacgcaacaactggtgatggttggagactacattgctcagcaaggtactcaggtgagctttgtcgcaaatggcatccagttcccgacttcacagcaggcaagtgaatataacaaactgattgcgccattaccggcacaacatcaggcgtttaatcaggcctggactacagcagttactgcaacccaataa

SEQ ID NO: 1671 - DNA, 291 bp, Escherichia coli
atggaatataaagatccaatgcatgagctgttgagcagcctggaacagattgtttttaaagatgaaacgcagaaaattaccctgacgcacagaacaacgtcctgtaccgaaattgagcagttacgaaaagggacaggattaaaaatcgatgattttgcccgggttttgggcgtatcagtcgccatggtaaaggaatgggaatccagacgcgtgaagccttcaagtgccgaactaaaattgatgcgtttgattcaagccaacccggcattaagtaagcagttgatggaatag

SEQ ID NO: 1672 - DNA, 213 bp, Escherichia coli
atgtccggtaaaatgactggtatcgtaaaatggttcaacgctgacaaaggtttcggcttcatcactcctgacgatggctctaaagacgtgttcgtacacttctctgctatccagaacgatggttacaaatctctggacgaaggtcagaaagtgtccttcaccatcgaaagcggcgctaaaggcccggcagctggtaacgtaaccagcctgtaa

SEQ ID NO: 1673 - DNA, 213 bp, Escherichia coli
atgcatagacaccataaggttagcctcttactcgttggaaatcaacacagggggctgggaatgccgcagaaatatagattactttctttaatagtgatttgtttcacgcttttatttttcacctggatgataagagattcactgtgtgaattgcatattaaacaggagagttatgagctggcggcgtttttagcctgcaaattgaaagagtaa

SEQ ID NO: 1674 - DNA, 2070 bp, Escherichia coli
atgtctgagaaaacttttctggtggaaatcggcactgaagagctgccaccaaaagcactacgcagcctggctgagtcctttgctgcgaactttactgcggagctggataacgctggcctcgcacacggcaccgttcaatggtttgctgctccgcgtcgtctggcgctgaaagtcgctaacctggcggaggcgcaaccggatcgtgaaatcgaaaaacgtggtccggcaattgctcaggcgttcgacgctgaaggcaaaccgagtaaagcggcagaaggttgggcgcgtggttgcggtattaccgttgaccaggctgagcgtctgactaccgataaaggcgaatggctgctgtatcgcgcccatgtgaagggcgaaagcaccgaagcactgctgccgaatatggttgcgacttcgctggcgaaactgccgatcccgaaactgatgcgttggggcgcaagcgacgtgcacttcgtgcgtccggttcacactgtaaccctgctgctgggcgacaaagtcattccggctaccattctgggcattcagtccgatcgcgtgattcgtggtcatcgttttatgggcgagccggaatttactatcgacaatgccgatcagtatccggaaattctgcgtgagcgcgggaaagttatcgccgattacgaagaacgtaaggcgaagattaaagccgatgccgaagaagccgcgcgtaagattggcggtaacgctgacttaagcgaaagcctgctggaagaagtggcttcgctggtggagtggccggtcgttctgaccgcgaaattcgaagagaaattcctcgcggtgccgtctgaagcactggtttacaccatgaaaggtgaccagaagtacttcccggtgtatgcgaacgacggcaaactgctgccgaactttatcttcgttgccaacatcgaatcgaaagatccgcagcagattatctccggtaacgagaaagtcgttcgtccacgtctggcggatgccgagttcttcttcaataccgaccgtaaaaaacgtcttgaagataacctgccgcgcctgcaaaccgtgttgttccagcaacagttggggacgctgcgcgacaaaactgaccgcattcaggcgctggctggctggattgctgagcagattggcgctgacgttaaccacgctacccgtgcgggcctgctgtctaagtgtgacctgatgaccaacatggtcttcgagttcaccgacacccagggcgttatggggatgcactacgcgcgtcacgatggcgaagcggaagacgtagctgtcgcgctgaatgagcagtatcagccgcgctttgccggtgatgacctgccgtctaacccggtagcctgtgcgctggcgattgctgacaagatggataccctggcgggtatcttcggtatcggccagcatccgaaaggcgacaaagacccgtttgcgctgcgtcgtgccgcacttggcgtgctgcgtattatcgttgagaagaacctcaaccttgatctgcaaacgctgaccgaagaagcagtgcgtctgtatggcgataagctgactaacgccaacgtggttgatgatgttatcgactttatgctcggtcgcttccgcgcctggtatcaggacgaaggttacaccgttgacaccatccaggcggtactggcgcgtcgtccgactcgtccggctgatttcgatgcccgtatgaaagcggtatcgcacttccgtaccctggaagcagctgcagcactggcggcggcgaacaagcgtgtatctaacatcctggcgaaatctgatgaagtgctgagcgatcgcgtgaatgcctctactctgaaagagccggaagaaattaaactggcgatgcaggttgtggtgctacgtgacaagctggagccgtactttgcggaaggtcgttaccaggatgcgctggtcgaactggctgagctgcgtgaaccggtcgatgctttcttcgataaagtgatggtcatggttgatgataaagaattgcgtatcaaccgtctgaccatgctggaaaaactgcgcgaactgttcctgcgagttgcggatatttcgctgttgcagtaa

SEQ ID NO: 1675 - DNA, 912 bp, Escherichia coli
atgcaaaagtttgataccaggaccttccagggcttgatcctgaccttacaggattactgggctcgccagggctgcaccattgttcaaccattggacatggaagtcggcgcgggaacctctcacccaatgacctgtctgcgcgcgctggggccagaaccgatggcggctgcttatgttcagccttctcgtcgcccgaccgatggtcgctacggcgaaaaccccaaccgtttacagcactactatcagttccaggtggtcattaagccatcgccggacaatattcaggagctgtacctcggttctctgaaagagctgggcatggacccgaccatccacgacatccgtttcgtggaagataactgggaaaacccgacgctgggtgcctgggggctgggctgggaagtgtggctaaacggcatggaagtgacgcagttcacttacttccagcaggttggtggtctggaatgtaaaccggttaccggtgagatcacctacggtctggaacgtctggccatgtacattcagggcgtagacagcgtttacgacctggtctggagcgacggcccgctgggtaaaaccacctacggcgacgtgttccatcagaacgaagtggagcagtccacttacaacttcgaatacgcggatgtggacttcctgttcacctgcttcgagcagtacgagaaagaagcgcagcaactgctggcgctggaaaatccgctgccgctgccagcctacgagcgtattctgaaagccgcccacagcttcaacctgctggatgcgcgtaaagccatctccgtcaccgagcgtcagcgctatattctgcgcattcgcaccctgaccaaagcagtggcagaagcatactacgcttcccgtgaagccctcggcttcccgatgtgcaacaaagataagtaa

SEQ ID NO: 1676 - DNA, 300 bp, Escherichia coli
atgatgatgaacgctttctttccagcaatggcgcttattgtgctagtgggttgttctacaccgccacccgtgcagaaagcacaacgggtaaaggttgatcctctgcgttcgttgaatatggaagcgttatgcaaggatcaggcggcaaaacgttataacaccggcgagcaaaaaatcgacgtcaccgccttcgaacagttccagggaagctatgaaatgcgcggttataccttccgtaaagagcagtttgtctgttcttttgacgcagatggccattttttgcatctttccatgcgttaa

SEQ ID NO: 1677 - DNA, 996 bp, Escherichia coli
atgcagcccaaaatttactggattgataacctgcgagggatagcgtgtttaatggtggtgatgattcacaccactacctggtatgtgaccaatgctcatagtgttagccccatcacctgggatatcgccaatgttctgaattctgcctctcgtgtcagcgtgccgctatttttcatgatttccggctatctcttttttggcgaacgcagcgcccagtcgcgccatttcttgcgtatcggcttatgcctgtttttttatagcgcaatcgcgctgctctacattgcgctgtttacctccatcaatgtggagttagcgctgaaaaacctgctgcaaaaaccagtgttttaccatttatggtttttcttcgcgattgcagtgatttatctggtttcaccgctgattcaggtgaagaacgtcggcggaaaaatgttgctggtgctaatggtggtgattggtatcatcgctaacccaaatactgtgccgcaggaaatcgacggttttgaatggctgccaattaacttatatatcaatggcgatactttttactacatcctttatggcatgttgggccgcgctatagggatgatggacacacagcataaagcactgtcgtgggtgagcgccgcactgtttgcgacgggggtttttattatctctcgcgggacattatatgaattacagtggcgcggaaattttgccgatacctggtatctttactgtgggccgatggtttttatctgcgcaatcgcgttattgactctggttaaaaacacgctgtatacgcgtaccatttgcggacttggcttaatctcccgccattcgttaggtatatacgggttccatgcattgattatccatgcactgcgcacccgggggattgagcttaaaaactggccaatactcgatattatttggatcttttgcgcgacgttggcagcgagtttgttactttctatgctggtacaacgaatcgacagaaacagattagtgagttag

SEQ ID NO: 1678 - DNA, 438 bp, Escherichia coli
atggacaacaaaatatcaacctattctccggcatttagtattgtttcatgggtagcccttattggcggtattgttacctatctgttaggactatggaatgcagagatgcagttaaatgaaaaagggtattattttgccgtactggtattaggtttgttttccgcggcgtcttatcaaaagaccgttcgggacaagtatgaaggcatacctaccacccccatttattatatgacttgcctgacggtctttattatctctgttgcgttgttgctggtaggtctatggaatgcaacgttattactcagcgaaaaaggcttttatgggctggctttcttcttaagcttgtttggtgcagtagcggtgcagaagaatattcgtgatgccggaataaacccaccaaaagaaacacaggttacccaggaagaatacagcgaataa

SEQ ID NO: 1679 - DNA, 342 bp, Escherichia coli
atgaaaacctcaaagactgtggcaaaactattatttgttgtcggggcgctggtttatctggttgggctatggatctcatgcccattgttaagtggaaaaggttattttcttggcgtgttaatgacggcaacttttggcaactatgcatatcttcgcgcagaaaaacttgggcaactggatgatttttttatccacgtctgtcagttggtagcgttaatcactatcggtctcttgtttatcggtgttttaaacgcacctatcaatgcttatgaaatggtgatctatcccatcgccttttttgtctgcttgtttggtcaaatgcgtttgtttcgctcggcatga

SEQ ID NO: 1680 - DNA, 1455 bp, Escherichia coli
atgtatatcgggatagatcttggcacctcgggcgtaaaagttattttgctcaacgagcagggtgaggtggttgctgcgcaaacggaaaagctgaccgtttcgcgcccgcatccactctggtcggaacaagacccggaacagtggtggcaggcaactgatcgcgcaatgaaagctctgggcgttcagcattctctgcaagacgttaaagcattaggtattgccggacagatgcacggtgcaaccttactggatgctcagcaacgggtgttacgccctgccattttgtggaacgacgggcgctgtgcgcaagagtgcactttgctggaagcgcgagttccgcaatcgcgggtgattaccggcaacctgatgatgcccggatttactgcgcctaaattgctatgggttcagcggcatgagccggagatattccgtcaaatcgataaagtattattaccgaaagattacttgcgtctgcgtatgacgggggagtttgccagcgatatgtctgacgcagctggcactatgtggctggatgtcgcaaagcgtgactggagcgatctcatgctgcaggcttgccacttatctcgtgaccagatgcccgcattatacgaaggcagcgaaattactggtgctttgttacctgaagttgcgaaagcgtggggtatggcggcggtgccagttatcgcaggcggtggcgacaatgcagctggtgcggttggtgtgggaatggttgatgctaatcaggcaatgttatcgctggggacgtcgggggtctattttgctgtcagcgaagggttcttaagcaagccagaaagcgccgtacatagcttttgccatgcgttaccgcaacgttggcatttaatgtctgtaatgctgagtgcggcttcgtgtctggattgggccgcgaaattaaccggcctgagcaatgtccctgctttaatcactgcagctcgacaggctgatgaaagtgccgagccagtttggtttctgccttatctttccggcgagcgtacaccacacaataatccccaggcgaaaggggttttctttggtttgactcatcaacatggccccaatgaactggcgcgagcagtgctggaaggcgtgggttatgcgctggcagatggcatggatgtcgtgcatgcctgcggcattaaaccgcaaagtgttacgttgattggtggcggggcgcgtagtgagtactggcgtcaaatgctggcggacatcagcggtcagcaactggattaccgcacgggtggcgatgtggggccagcactgggcgcagcaaggctggcgcagattgcggcgaatccagagaaatcgctcattgagttgttgccgcaactaccattagaacagtcgcatctaccagatgcgcagcgttatgccgcttatcagccacgacgagaaacgttccgtcgcctctatcagcaacttctgccattaatggcgtaa

SEQ ID NO: 1681 - DNA, 1323 bp, Escherichia coli
atgcaagcctattttgaccagctcgatcgcgttcgttatgaaggctcaaaatcctcaaacccgttagcattccgtcactacaatcccgacgaactggtgttgggcaagcgtatggaagagcacttgcgttttgccgcctgctactggcacaccttctgctggaacggggcggatatgtttggtgtgggagcgtttaatcgtccgtggcagcagcctggtgaggcactggcgttggcgaagcgtaaagcagatgtcgcatttgagtttttccacaagttacatgtgccattttattgcttccacgatgtggatgtttcccctgagggcgcgtcgttaaaagagtacatcaataattttgcgcaaatggttgatgtcctggcaggcaagcaagaagagagcggcgtgaagctgctgtggggaaccgctaactgctttacaaaccctcgttatggcgcgggtgcggcgacgaacccagatcctgaagtcttcagttgggcggcaacgcaagttgttacagcgatggaagcaacccataaattgggcggtgaaaactatgtcctgtggggcggtcgtgaaggttacgaaacgctgttaaataccgacttgcgtcaggagcgtgaacagttgggccgctttatgcagatggtggttgagcataaacataaaatcggtttccagggcacgttgcttatcgaaccgaaaccgcaagaaccgacaaaacatcaatatgattacgatgctgcgacggtctatggcttcctgaaacagtttggtctggaaaaagagattaaactgaacattgaagctaaccacgcgacgctggcaggtcactctttccatcatgaaatagccaccgccattgcgcttggcctgttcggttctgtcgacgccaaccgtggcgatgcgcaactgggctgggacaccgaccagttcccgaacagtgtggaagagaatgcgctggtgatgtatgaaattctcaaagcaggcggtttcaccaccggtggtctgaacttcgatgccaaagtacgtcgtcaaagtactgataaatatgatctgttttacggtcatatcggcgcgatggatacgatggcgttggcgctgaaaattgcagcgcgcatgattgaagatggcgagctggataaacgcatcgcgcagcgttattccggctggaatagtgaattaggccagcaaatcctgaaaggccaaatgtcactggcagatttagccaaatatgctcaggaacataatttgtctccggtgcatcagagtggtcgccaggagcaactggaaaatctggtaaatcattatctgttcgacaaataa

SEQ ID NO: 1682 - DNA, 993 bp, Escherichia coli
atgaaaataaagaacattctactcaccctttgcacctcacttctgcttaccaacgttgcggcacacgccaaagaagtcaaaataggtatggcgattgatgatctccgtcttgaacgctggcaaaaagatcgagacatttttgtgaaaaaggcagaatctctcggcgcgaaagtatttgtacagtctgcaaatggcaatgaagaaacacaaatgtcgcagattgaaaacatgattaaccggggtgtcgatgttcttgtcattattccttataacggtcaggtattaagtaacgttgtaaaagaagccaaacaagaaggtattaaagtattagcttacgaccgtatgattaacgatgcggatatcgatttttatatttctttcgataacgaaaaagtcggtgaactgcaggcaaaagccctggtcgatattgttccgcaaggtaattacttcctgatgggcggctcgccggtagataacaacgccaagctgttccgcgccgggcaaatgaaagtattaaaaccttatgttgactccggaaaaattaaagtcgttggtgaccaatgggttgatggctggttaccggaaaacgcattgaaaattatggaaaacgcgctaaccgccaataataacaaaattgatgctgtagttgcctcaaacgatgccaccgcaggaggggcaattcaggcattaagcgcgcaaggtttatcagggaaagtagcaatttccggccaggatgcggatcttgcaggtattaaacgtattgctgccggtacgcaaactatgacggtgtataaacctattacattgttggcaaatactgccgcagaaattgccgttgagttgggcaatggtcaggagccaaaagcggataccacactgaataatggcctgaaagatgttccctcccgcctgctgacaccgatcgatgtgaataaaaacaacatcaaagatacggtagttaaagacggattccacaaagagagcgagctgtaa

SEQ ID NO: 1683 - DNA, 1542 bp, Escherichia coli
atgccttatctacttgaaatgaagaacattaccaaaaccttcggcagtgtgaaggcgattgataacgtcagcttgcggttgaatgctggcgaaatcgtctcactctgtggggaaaatgggtcaggtaaatcaacgctgatgaaagtgctgtgtggtatttatccccatggttcctacgaaggcgaaattatttttgcgggagaagagattcaggcgagtcacatccgcgataccgaacgcaaaggtatcgccattattcaccaggaattggcgctggtgaaagaactgaccgtgctggaaaatatcttcctgggtaacgaaataacccataatggcattatggattatgacctgatgacgctacgctgtcagaagctgctcgcacaggtcagtttatccatttcacctgatacccgcgttggcgatttaggacttgggcaacaacaactggttgaaattgccaaggcacttaataaacaggtgcgtttgttaattctcgatgagccgacagcctcattaactgagcaggaaacgtcggttttactggatattattcgcgatctacaacagcacggtatcgcctgtatttatatttcgcacaaactcaacgaagtcaaagcgatttccgatacgatttgcgttattcgcgacggtcagcacattggcacgcgtgatgctgctggaatgagtgaagacgatattatcaccatgatggtcgggcgagagttaaccgcgctttaccctaatgaaccacataccaccggagatgaaatattacgtattgaacatctgacggcatggcatccggttaatcgtcatattaaacgagttaatgatgtctcgttttccctgaaacgtggcgaaatactgggtatcgccggactcgttggtgccggacgtaccgagactattcagtgcctgtttggtgtgtggcccggacaatgggaagggaaaatttatattgacggcaaacaggtagatattcgtaactgtcagcaagccatcgcccaggggattgcgatggtacccgaagacagaaagcgcgacggcatcgttccggtaatggcggttggtaaaaatattaccctcgccgcactcaaaaaatttaccggtagtattagccagcttgatgacgcggcagagcaaaaatgtattctggaatcaatccagcaactcaaagttaaaacgtcgtcccccgaccttgctattggacgtttgagcggcggcaatcaacaaaaagcgatcctcgctcgctgtctgttacttaacccgcgcattctcattcttgatgaacccaccaggggtatcgatattggcgcgaaatacgagatctacaaattaattaaccaactcgtccagcagggtattgccgttattgtcatctcttccgaattacctgaagtgctcggccttagcgatcgtgtactggtgatgcatgaagggaaactaaaagccaacctgataaatcataacctgactcaggagcaggtgatggaagccgcattgaggagcgaacatcatgtcgaaaagcaatccgtctga

SEQ ID NO: 1684 - DNA, 1182 bp, Escherichia coli
atgtcgaaaagcaatccgtctgaagtgaaattagccgtaccgacatccggtggcttttccgggctgaaatcactgaatttgcaggtcttcgtgatgattgcagctatcatcgcaatcatgctgttctttacctggaccaccgatggtgcctacttaagcgcccgtaacgtctccaacctgttacgccaaaccgcaattaccggcatcctcgcggtaggaatggtgttcgtcataatttctgctgaaatcgacctttccgtcggctcaatgatggggctgttaggtggcgtcgcggcgatttgtgacgtctggctaggctggcctttgccacttaccatcattgtgacgttggttctgggactgcttctcggagcctggaacggatggtgggtcgcgtaccgcaaagtcccttcatttattgtcaccctcgcgggcatgttggcatttcgtggcatactcattggcatcaccaacggcacgactgtttcccccacccgcgccgcgatgtcacaaattgggcaaagctatctacctgccagcaccggcttcatcattggcgcgcttggcttaatggcttttgttggctggcaatggcgcggaagaatgcgccgtcaggctttgggtttgcagtctccggcctctaccgcagtagtcggtcgccaggctttaaccgctatcatcgtattaggcgcaatctggctgttgaatgattaccgtggtgttcccactcctgttctgctgctgacgttgctgttactcggcggaatgtttatggcaacgcggacggcatttggacggcgcatttatgccatcggcggcaatctggaagcggcacgtctctccgggattaacgttgaacgcaccaaacttgccgtgttcgctattaacggattaatggtagccatcgccggattaatcctcagttctcgactcggcgctggttcaccttctgcgggaaatatcgccgaactggacgcaattgcagcatgtgtgattggcggcaccagtctggcaggcggcgtcgggagcgtggccggagcggtaatgggggcattcatcatggcttcgctggataacggcatgagtatgatggatgtaccgaccttctggcagtatatcgttaaaggtgcgattctgttgctggcagtatggatggactccgcaaccaaacgccgttcttga

SEQ ID NO: 1685 - DNA, 1179 bp, Escherichia coli
atgtttactaaacgtcaccgcatcacattactgttcaatgccaataaagcctatgaccggcaggtagtagaaggcgtaggggaatatttacaggcgtcacaatcggaatgggatattttcattgaagaagatttccgcgcccgcattgataaaatcaaggactggttaggagatggcgtcattgccgacttcgacgacaaacaaatcgagcaagcgctggctgatgtcgacgtccccattgttggggttggtggctcgtatcaccttgccgaaagttacccacccgttcattacattgccaccgataactatgcgctggttgaaagcgcatttttgcatttaaaagagaaaggcgttaaccgctttgctttttatggtcttccggaatcaagcggtaaacgttgggccactgaacgcgaatatgtatttcgtcagcttgtcgccgaagaaaagtatcgcggagtggtttatcaggggttagaaaccgcgccagagaactggcaacacgcgcaaaatcggctggcagactggctacaaacgctgccaccgcaaaccgggattattgccgttactgacgcccgggcacggcatattctgcaagtatgtgaacatctacacattcccgtaccggaaaaattatgcgtgattggcatcgataacgaagaactgacccgctatctgtcgcgtgtcgccctttcttcggtcgctcagggcgcacggcaaatgggctatcaggcggcaaaactgttgcatcgtttattggataaagaagagatgccgttgcaacggattttggtcccgccagtccgcgtgattgaacgacgttcaacggattaccgttcgttgactgatcctgcggttattcaggccatgcattacatccgtaatcatgcctgcaaagggattaaagtagatcaagtactcgatgcggtcggaatctcacgctccaatcttgagaagcgttttaaagaagaggtgggtgaaaccatccatgccatgattcatgccgagaagctggagaaagcgcgcagtctgctgatttcaaccaccttgtcgatcaatgagatatcgcaaatgtgcggttatccatcgctgcaatatttctactctgtttttaaaaaagcatatgacacaacgccaaaagagtatcgcgatgtaaatagcgaggtcatgttgtag

SEQ ID NO: 1686 - DNA, 825 bp, Escherichia coli
atgattttgactcccatacgacgatatggggcgatgattcttatgttactcactctggtgttttcgagtgaggtgttagcgaagacgcacacaacaacagcgagtcaaaagtcccacttaactaaagctagtaataaacaggtaagcagtaaacaagagtattctcgcaatagtgcaaagagtagttcacttcctgatttgcgaaaatacccttccggaacaccaaggaaaaaggcgtttctccggactgtaatgccttacattaccagccaaaatgcggccattactgcggaacgtaactggctgatttcaaaacagtatcagggccaatggtcacctgctgagcgtgcgcgtctgaaagacatcgccaaacgctacaaggtgaagtggtctggtaatacgcgaaaaatcccgtggaataccttgcttgaacgcgtagacattatccctaccagtatggtggcgacgatggctgcagcagaaagcggttggggaacgtcaaagctggcgcgcaacaacaacaacctgttcggcatgaaatgcatgaaaggacgttgtaccaatgcgccgggtaaagtgaaagggtactcacagtttagttctgtcaaagaatcggtgagcgcctatgtcactaacctcaatacgcacccggcttactcttcgttccgtaaatcgcgtgcacaactgcgtaaagcggatcaggaagtgactgccacagcgatgattcacaagctgaagggctactcgaccaaagggaagagttataacaactacctgttcgcaatgtaccaggataaccaacggttaatcgcggcgcatatgtaa

SEQ ID NO: 1687 - DNA, 2031 bp, Escherichia coli
atgaaactcgccgcctgttttctgacactccttcctggcttcgccgttgccgccagctggacttctccgggattccctgcctttagcgaacaggggacggggacatttgtcagccacgcgcagttgcccaaaggtacgcgtccactaacgctaaattttgaccaacagtgctggcagcctgcggatgcgataaaactcaatcagatgctttccctgcaaccttgtagcaacacgccgcctcaatggcgattgttcagggacggcgaatatacgctgcaactagacacccgctccggtacgccaacattgatgatttccctccagaacaccgtcgaaccggtagcaagcctggtccgtgaatgcccgaaatgggatggattaccgctcacactggatgtcagcgccacttttgcggagggagccgccgtccgggattattacagccagcaaattgcgatagtgaagaacggtcaaataacgttacaacccgctgccaccagcaacggtttactcctgctggaacgggcagaaactgacacatccgcccctttcgactggcataacgccacggtttactttgtgctgacagatcgtttcgaaaacggcgatcccagtaatgaccagagttacggacgtcataaagacggtatggcggaaattggcacttttcacggcggcgatttacgcggcctgaccaacaaactggattatctccagcagttgggcgttaatgctttatggataagcgccccatttgagcaaattcacggctgggtcggcggcggtacaaaaggtgatttcccgcattatgcctaccatggttattacacacaggactggacgaatcttgatgccaatatgggcagtaaagccgatctacggacgctggttgatagcgcgcatcagcgcggtattcgtattctctttgatgtcgtgatgaaccacaccggctatgccacactggcggatatgcaggagtatcagtttggcgcgttatatctttctggtgacgaagtgaaaaaaacattgggtgaacgctggagcgactggaaacctgccgccgggcaaacctggcatagctttaacgattacattaatttcagcgacaaagcaggctgggataaatggtggggaaaaaactggatcagaacggatatcggcgattacgacaatcctggattcgacgatctcactatgtcgctggcctttttgccggatatcaaaaccgaatcaacgaccgcttctggtctgccagtgttctataaaaacaaaacggatacccacgctaaagtcatcgacggctttacccctcgcgattacttaacccactggttaagtcagtgggtccgcgactatgggattgatggttttcgggtcgataccgccaaacatgttgagttgcccgcctggcagcaactgaaaaccgaagccagcgccgcacttcgcgaatggaaaaaagctaaccccgacaaagcattagatgacaaacctttctggatgaccggtgaagcctggggccacggcgtgatgcaaagtgattactatcgccacggcttcgatgcgatgatcaatttcgattatcaggagcaggcggcgaaagcagtcgattgtctggcgcagatggatacgacctggcagcaaatggcggagaaattgcaggatttcaacgtgttgagctacctctcgtcgcatgatacccgcctgttccgtgaagggggcgacaaagcagcagagttattattattagcgccaggcgcggtacaaatcttttatggcgatgaatcctcgcgtccgttcggtcctaccggttctgatccgctgcaaggtacgcgttcggatatgaactggcaggatgttagcggtaaatctgccgccagcgtcgcgcactggcagaaaatcagccagttccgcgtccgccatcccgcaattggcgcgggcaaacaaacgacactttcgctgaagcagggctacggctttgttcgtgagcatggcgacgataaagtgctggtcatctgggctgggcaacagtga

SEQ ID NO: 1688 - DNA, 1254 bp, Escherichia coli
atgacattctccctttttggtgacaaatttacccgccactccggcattacgctgctgatggaagatctgaacgacggtttacgcacgcctggcgcgattatgctcggcggcggtaatccggcgcagatcccggaaatgcaggactacttccagacgctactgaccgacatgctggaaagtggcaaagcgactgatgcactgtgcaattatgacggtccacaggggaaaacggagctactcacactgcttgccggaatgctgcgcgagaagttgggctgggatatcgaaccacagaatattgcactaacaaacggcagccagagcgcgtttttctacttatttaatctgtttgccggacgccgtgccgatggtcgggtcaaaaaagtgctgttcccgctggcaccggaatacattggctacgctgacgccggactggaagaagatctgtttgtctctgcgcgtccgaatattgaactgctgccggaaggccagtttaaataccacgtcgattttgagcatctgcatattggcgaagaaaccgggatgatttgcgtctcccggccgacgaatccaacaggcaatgtgattactgacgaagagttgctgaagcttgacgcgctggcgaatcaacacggcattccgctggtgattgataacgcttatggcgtcccgttcccgggtatcatcttcagcgaagcgcgcccgctatggaatccgaatatcgtgctgtgcatgagtctttccaagctggggctacctggctcccgctgcggcattatcatcgccaatgaaaaaatcatcaccgccatcaccaatatgaacggcattatcagcctggcacctggcggtattggtccggcgatgatgtgtgaaatgattaagcgtaacgatctgctgcgcctgtctgaaacagtcatcaaaccgttttactaccagcgtgttcaggaaactatcgccatcattcgccgctatttaccggaagatcgctgcctgattcataaaccggaaggagccattttcctctggctatggtttaaggatttgcccattacgaccgagcagctctaccagcgcctgaaagcacgcggcgtgctgatggtgccggggcacaacttcttcccgggactggataaaccgtggccgcatacgcatcaatgtatgcgcatgaactacgtaccagagccggagaaaattgaggcgggtgtgaagattctggcggaagagatagaaagagcctgggctgaaagtcactaa

SEQ ID NO: 1689 - DNA, 474 bp, Escherichia coli
atgaaccggtttattattgcggatgcgacgaaatgtatcggttgccgtacctgtgaagtggcttgcgcagtgtcgcatcaggagaatcaggattgcgctgcgttgtcaccagacgagtttatttcccgtattcgtgtcattaaagatcatacttacaccacggcagtagcctgtcatcagtgtgaagatgcaccgtgcgcaaatgtgtgccctgttgacgcgataagccgcgaacatgggcatattttcgttgaacaatcacgttgcattggctgtaaaagctgtatgctggcttgcccgtttggtgcgatggaggtcgtttcttcgcgcaaaaaggcgagggcgattaagtgcgatctgtgctggcatcgggcgacggggccggcctgtgttgaagcctgcccgacaaaggcgttgcagtgcatggatgtcgagaaagtgcagcggcatcggctacggcagcagcctgtttga

SEQ ID NO: 1690 - DNA, 849 bp, Escherichia coli
atggggaaagaagtgatgggaaaaaaagagaacgagatggcgcaggaaaaagagcgcccagccggaagccagagtctgtttcgtgggttgatgctgattgagattttgagcaactatccaaacggttgtccgttggcgcatctttcggagctggctggtttaaataagagtaccgtccatcgcttattgcagggattacagtcctgcggctatgtgaccaccgcgcccgccgcagggagttatcgcctgaccaccaaatttattgccgtcgggcagaaggcgctatcttcgctgaatatcattcatatcgccgctccgcatcttgaggctctgaacatcgccactggtgaaactattaacttctccagccgcgaagacgatcacgctattttgatttataagctggaacccacaaccgggatgctgcgaacccgtgcctatataggccagcatatgccgctctactgttccgcaatgggcaagatctacatggcgtttggtcacccggactacgtgaagtcatactgggaaagccatcagcatgagatccagccgttaacccgcaataccattaccgagctgcccgcgatgttcgacgaactggcgcacattcgtgaaagtggagcggcgatggacagagaagaaaacgaactcggcgtctcctgtattgctgttccggtgtttgatattcatgggcgggtgccgtacgccgtgtcgatttcgctttcgacatcacgtctgaaacaggtgggagagaaaaatctcctgaaaccacttcgtgaaaccgcgcaggctatttctaatgaactgggatttactgtcagggacgaccagggcgcgattacataa

SEQ ID NO: 1691 - DNA, 999 bp, Escherichia coli
atgaaagtgacatttgagcagttaaaagcagcctttaatcgggtcttaatttcacgcggcgttgacagcgaaacggctgacgcctgtgcagagatgttcgcccgcaccaccgaatcaggcgtttattctcacggcgttaatcgtttccctcgtttcattcaacaactggaaaacggcgatatcattcctgatgcccaacccaaacgtataaccagcctcggcgcaattgaacagtgggacgcccagcgttcgatcggtaacctgacagcgaaaaagatgatggatcgcgccattgaactggctgccgatcacggtattggtctggtggcactacgtaatgccaaccactggatgcgcggcggcagctacggctggcaggcggcggaaaaaggctatattggcatttgctggaccaactccatcgccgtaatgccaccgtggggcgcaaaagagtgtcgcatcggcaccaacccgctgatcgtcgccattccttccacgccgatcaccatggtcgatatgtcgatgtcgatgttctcttacggcatgttagaagttaatcgcctggctggtcgtcagctcccggtagatggtggctttgatgatgagggcaatttgaccaaagaacctggcgttatcgagaaaaatcgccgcattttgccgatgggctactggaaaggttcgggcatgtcgattgtgctggatatgatcgctaccctcctttctgacggcgcatcggttgccgaagtcaccgaggacaacagcgacgaatacggcatttcacaaatttttattgccattgaagtggacaagcttatcgacggtcccacccgcgatgccaaactgcaacgcattatggattacgttaccagtgccgagcgtgctgacgaaaaccaggctattcgtttacccggccacgaatttactaccctgctggcagaaaaccgccgtaacggtattaccgttgatgacagcgtgtgggcaaaaatccaggcgttataa

SEQ ID NO: 1692 - DNA, 465 bp, Escherichia coli
atgatttttggacatatcgcgcagcccaatccgtgccgtttgcccgccgccattgaaaaggcgctcgattttctgcgcaccatcgacttcaacgccctggaaccgggcgttgtcgaaatcgacggcaagaatatttatgcgcaaattatcgatttaaccacacgcgaagcggtagaaaaccgtccggaagtgcatcgtcgatatatcgatattcagtttctggcgtggggtgaagagaaaatcggcattgctattgatacgggaaataataaagtcagcgaatcactattagagcagcgcgatattattttttatcacgatagtgaacatgaatcatttatagaaatgattccgggcagctacgctattttcttcccgcaggatgttcatcgcccggcatgtaataaaaatgccactacggcaatacgcaagatcgtggttaaagtggccctcgctgctttataa

SEQ ID NO: 1693 - DNA, 921 bp, Escherichia coli
atgaaaacgaataatgccggttatattatcggcgcgtatccctgtgcaccttcttttcaccaaagaagtgaagaggaagagaaggatttctggcgacaattatctgagactccagacattttggggctggaacaaccttgcctggaaaattttcacccgctgggcgatcaatggttactccgtcatacgccagagagctggaaatttgtcgtcaccgcagtgatggaaaccatgcgtcgccgcagcgaaaacagcgggtttggtctcgcctccagtgatgaagaacagcgccaggcctgcgtggcgtactatcgccacctgttcaataaaatcaactcattgcaggctaataaagtgctcgcactggagctccaggctgcaccgttagcaacgaatcctaatgttatgcaagcgacggacgcttttgcccgctcattgaaagaaatcgccagttgggactggccgtgcaagctggtgctggaacactgcgacgccatgacatcttcttccccccgaaaaggctttttgcctttagaaaatgtgctggaagttattaccgattatgacatcagcatctgtatcaactgggcgcgctctgccattgaagggcgcaatacaacgctgccgctgacccacacccaaatggcgaaacaagccggaaaactcggcgcgttaatgttctctggtacgacgctaaacggggcatacggcgaatggcaggatttacacgcaccgtttgcaccattctgcgcagaaagcctgatgaccacagatcatgttcgcgagttatttaatgtagcagaatcgtcaacattgcattttgctggcatcaagctactggaaataaatgcgacggctgatgtgcaccatcgcatcgaaatattacgtaacggcattcactctctgaatgaatctcgttaa

SEQ ID NO: 1694 - DNA, 468 bp, Escherichia coli
atgaaacggatactcgaaggcattcttgcgatcatcatcgcaatactgtcttgtattatttttattaatatcattcttcgatatggattccacacaagtatattatcgattgatgaattatcccgacttttatttgtctggttaacctttattggcgcaatcgttgcttatatggacaacagccatgtgcaggttacttttttagtcgaaaaactctcaccggctaatcaacaacgtgtttcgctgctaacccatacgctcattttattgctgtgtctggggctggcctggggcgctatagaaaaaacagcgcaagactggagcaacttatcgcccattcttggcgtccccgttggcttaatgtacgccgccgctatccccaccagtctgattatcgcattgctggaattgcgtcacttataccggcagttcacaaatacccccagccgaaaccaacaaggagcctga

SEQ ID NO: 1695 - DNA, 1278 bp, Escherichia coli
atgacaatccttatatttattgtcagtttgttaggggctatcgcaattggcgttcccatcgcctgggcattattactgtgcggcatttcattgatgttctggatggatatctttgatgtgcaaattctggcacaaacgttggtaaatggcgcagacagcttctccctgttagccatccccttctttgtactggcgggtgagatcatgaacgcgggcggcctgtcgcaacgtatcgtcgacttgccaatgaaactggtaggccacaggccaggcggtctgggttacgtgggcgtgctggcagcgatgatcatggcaagcctgtccggttctgcggttgctgataccgcagctgtcgcggcgctgctggtgccgatgatgcgccaggccaactatccggtaaaccgcgccgccgggcttatcggttccggggggattattgcggccattatcccgccttccataccactcattatcttcggcgtctccagcggactctccatcagcaaactgtttatggcgggcatcgcaccgggcatcatgatgggcgtcacgctgatggttacctggtggtggcaggcaaaacgactgaatttaccttgtcagccgaaagcctcactgcgagaagtctggcaatccttagtttccggtatttgggcgctctttttaccgataattattattggcggtttccgttcggggttatttacaccgaccgaagcaggcgcggttgccgccttctacgctctgttcgtctcggtggtggtctatcgcgagatgaccttctccacgctttatcatgtgctgattaacgcggcaaaaaccacatccgtggtgatgttcctggtggcctctgctgcggtatctgcatggcttattacgatcgccgaattacccatgatggtatcggagctattacaaccgttggttgattcgcctcgcttattattcatcgtcattatgctcgctattatggtgatcagtacggtcatggacttaacgcctaccgtattaattcttacaccagtattaatgccattagtgaaagaagcgggaatagatccggtctatttcggcatcatgtttattatcaactgttcaatatcactgattacgcctccagtcggtaatgttcttaacgtggtatgcggcgtggcgaaacttaaatttgacgatgcggtaaaaggcgttgcgccttacgtcatggttttattcatgttgttagcattatttatttttataccggagctcattaccgctcctcttaaatggatgagttaa

SEQ ID NO: 1696 - DNA, 987 bp, Escherichia coli
atgaaattacgttctgtaacctacgctttattaattgccggggtggcgacgttcagcacatcttctctggcggcacaatcattacgtttcggttatgaaacctcacaaaccgattcacaacatattgcggcgaaaaaatttaatgaattactgcaggaaaaaaccaaaggcgaactgaaattaaaactgttcccggatagcacccttggtaatgcgcaggcgatgatcagcggcgtgcgtggcggcactattgatatggagatgtctggctctaacaactttacgggactctcgcccgtcatcaacctgctcgatgtcccgttcctgttccgcgataccgctcacgcgcataaaacgctcgacggcaaagtcggtgatgacctgaaagtctcccttgaaggtaaggggctgaaagtgctggcttactgggaaaacggctggcgcgatgtcaccaactcgcgtgcaccggtcaaaacgcctgccgacctgaaagggttgaaaatccgcaccaacaacagcccgatgaatatcgccgcatttaaagtttttggcgctaacccgatcccgatgccgtttgccgaagtctataccgggctggaaacccgcactatcgacgctcaggaacacccgatcaacgtcgtctggtcagcaaaattttatgaagtgcagaagtacctttctctgacccatcacgcctattcgccgcttctggtggtgatcaacaaagcgaagtttgatggcttaaccccggagttccagcaagcactgatctcatctgcacaggaagcgggtagctatcagcgcaaactggtcgccgaagatcagcaaaaaatcatcgacggtatgaaagaagcgggcgtggaagtcatcaccgatctcgaccgcaaagcctttagcgatgcgctgggtacccaggtccgtgacatgtttgttaaagatgttccgcagggtgctgatctgctgaaagccgtggatgaggtgcaataa

SEQ ID NO: 1697 - DNA, 1497 bp, Escherichia coli
atgacgcaatactggctggggttagattgtggcggtagctggctgaaagccgggctgtatgaccgagaaggccgggaggcgggcgtgcagcgcctgccgctgtgcgcatcaagtccacagccaggctgggcagagcgcgacatggcagaactgtggcaatgttgcactgctgtcattcgcgccctgcttacccattccggcgtcagcggggaacaaattgtcggtatcggcatctccgcgcagggaaagggcttatttctacttgataaaaacgacaaaccgctcggtaacgccattttgtcctcggatcgccgggcgatggaaatcgttcgtcgctggcagaaagatggcatcccggaaaaactctatccgctgacccgacaaaccttatggaccgggcatccggtgtcgctgttacgctggctgaaagagcacgaaccagaacgctacgcgcaaattggctgcgtgatgatgacgcacgactacctgcgctggtgtttaaccggcgtcaaaggttgcgaagagagcaatatttctgagtccaatctctacaacatgagtcgcggggaatatgacccgtgccttaccgactggctggggattgctgaaatcaatcacgccctgccgcctgttgtcggatctgccgaaatctgcggggaaatcaccgctcagacagccgtactgaccggtctgaaagcgggtacccccgttgtcggcggcctgtttgatgtggtttccaccgcactctgcgccgggctcgaagacgaattcaccctcaatgcggtgatggggacctgggcggtgaccagcggcataacccacggtttacgtgacggtgaagcgcatccgtatgtctatggtcgctacgttaacgatggtcaatttatcgttcacgaagccagccccacctcttccggcaatctcgaatggtttaccgcacagtggggagaaatctcatttgctgagattaatcaggccgtagccagtttgccgaaagccggtggcgatctctttttcctgccgttcctgtacggcagcaacgccggactcgaaatgaccagcggtttctacgggatgcaggccattcacacccgtgcacacctcttacaggctatctatgaaggggtggtgttcagccatatgacccatctcaaccggatgcgcgaacgttttactgatgtgcacaccctgcgcgtcactggcggcccggcgcactccgatgtctggatgcaaatgctggcggacgtcagcggtctgcgtatcgagctgccgcaggtggaagaaaccggctgctttggtgcggcacttgccgcccgcgtcggtaccggggtttatcgcgatttcagcgaagcccaacgtggcttacagcacccggtacgcaccctgcagccggatatggccgcgcatcagctttaccaacaaaaataccaacgctatcaacatctcattgccgcacttcagggttatcacacccgcatcaaggagcacacattatga

SEQ ID NO: 1698 - DNA, 663 bp, Escherichia coli
atgagtcgaccacttctgcaactggccctcgaccactcatcacttgaagccgcgcagcgcgacgtgacgcggttaaaagacagcgtcgatattgtcgaagcaggcaccattctctgtttaaacgaagggcttggcgcagtgaaagccttgcgcgaacagtgccctgacaaaatcatcgttgccgactggaaggtcgccgacgcgggtgaaacgctcgcgcaacaggcatttggcgcaggcgctaactggatgaccatcatctgcgccgcgccgctcgccacggtggaaaaaggccacgcgatggcacagaactgcggtggtgaaattcagatcgagctattcggtaactggacgctggacgacgcccgcgactggcatcgtattggtgtacgacaggcgatttatcatcgtggtcgtgacgcgcaggccagcgggcaacagtggggcgaggccgatctggcacgcatgaaagcgctttccgatatcggccttgagctttccattactggcgggattacccctgctgacctgccgctgtttaaagagatccgcgtgaaagcgtttattgccggacgggcgctggcaggcgcagcaaatccggcgcaagtggctggcgatttccatgcgcaaatcgactccatctggggaggcaagcgtgcgtaa

SEQ ID NO: 1699 - DNA, 861 bp, Escherichia coli
gtgcgtaatcatccgttaggcatttatgaaaaagcgctggcgaaagatctctcctggccggagcggctggtactggcaaaaagctgtggttttgattttgtcgaaatgtcggtggatgaaaccgacgaacggttgtcacgtcttgactggagcgccgcacaacgtgcttcgctggtcactgcgatgatcgaaacgggtgttgctattccgtcaatgtgcctgtccgcacatcgtcgttttccttttggtagccgggacgacgccgtgcgccagcgggcgcgggagattatgagtaaagcgattcgcctggcgcgcgatctcggcattcgtactattcaactggcaggttacgacgtctattacgaggatcatgacgaaggcacccagcaacggtttgctgaagggctggcgtgggcggttgaacaggcagcggcatcacaagtcatgctggcggtggagattatggacaccgcgtttatgaactctatcagcaaatggaaaaagtgggacgaaatgcttgcgtcaccgtggttcaccgtttacccggacgtaggcaatctcagcgcctggggcaatgatgttcccgccgaactgaaactgggcatcgaccgtatcgccgccatccacctgaaagacactcaacccgttaccgaacatagccccggacagttccgcgatgtgccgtttggcgaaggctgtgtcgattttgttggcatcttcaaaacgctgcatgagctgaactatcgcggatcatttctgattgaaatgtggaccgaaaaagccaaagaaccggtgctggagattattcaggcgcggcgctggattgaagcgcgtatgcaggaggccggatttatatgttag

SEQ ID NO: 1700 - DNA, 696 bp, Escherichia coli
atgttagagcaactgaaagccgacgtgctggcggcaaacctggcgcttcccgttcatcatctggtgacgttcacctggggcaatgtcagcgcgatagacgaaacgcggcaatggatggtgattaagccttccggcgttgagtatgaggtaatgaccgccgacgatatggtggtggttgagatagccagcggcaaggtggtggaaggcagcaaaaagccctcttccgacacgccaacgcatctggcgctttaccgtcgctttgcggagattggcggcatagtgcatacccactcgcgccacgccaccatctggtcgcaggccggacttgatctccccgcctggggcactactcacgccgattatttttacggagccatcccctgcacgcgcctgatgaccgcagaagagatcaacggcgagtatgaataccagaccggcgaagtgatcattaaaaccttcgaagagcgtgggttgaacccggcaaaaatcccggcggtactggtgcattctcacggcccgttcgcctggggaaaaaatgccgccgatgcggtgcataacgccgtggtactggaagagtgcgcctatatgggtctgttctcgcgccagcttgcgccacagctccctgcgatgcaaaacgaactgctggataagcactacctgcgtaagcatggggccaatgcctattacgggcagtag

SEQ ID NO: 1701 - DNA, 1539 bp, Escherichia coli
atgaccaataatcccccttcagcacagattaagcccggcgagtatggtttccccctcaaattaaaagcccgctacgacaactttatcggtggcgaatgggtagcgcctgccgatggcgagtattaccagaacctgacgccggtgaccgggcagctactgtgcgaagtggcgtcttcgggcaaacgagacatcgatctggcgctggatgctgcgcacaaagtgaaagataaatgggcgcacacctcggtgcaggatcgcgcggcgattctgtttaagattgccgatcggatggagcagaacctcgaactgttagcgaccgctgaaacctgggataacggtaaacccattcgcgaaaccagtgctgccgacgtgccgctggcgattgatcattttcgctattttgcctcgtgtattcgggcgcaggaaggtgggatcagtgaaattgatagcgaaaccgtggcctatcatttccatgagccgttaggcgtggtggggcagattatcccgtggaacttcccgctgctgatggcgagttggaaaatggcacccgcgctggcggctggcaactgtgtggtgctgaaacccgcacgtcttactccgctttctgtactgctgctaatggaaatcgtcggggatttactgccgccgggcgtggtgaacgtggtcaacggcgcaggtggggaaattggcgaatatctggcgacctcgaaacgcatcgccaaagtggcgtttaccggctcaacggaagtgggtcaacaaattatgcaatacgccacgcaaaacattattccggtgacgctggagctgggcggcaaatcgccaaatatcttctttgctgatgtgatggatgaagaagatgcctttttcgataaagcgctggaaggctttgcactgtttgcctttaaccagggcgaagtttgcacctgtccaagccgtgctttagtgcaggagtctatctacgaacgctttatggaacgcgccatccgccgtgtcgaaagcattcgcagcggtaacccgctcgacagtgtgacgcaaatgggcgcgcaggtttctcacgggcaactggaaaccatcctcaactacattgatatcggtaaaaaagagggcgctgatgtgctcaccggcggtcgacgcaagctgctggaaggcgaactgaaagacggctactacctcgaaccgacgattctgtttggtcagaacaatatgcgcgtgttccaggaggagatttttggcccggtgctggcggtaaccaccttcaaaacgatggaagaagcgctggagctggcgaacgatacgcaatatggtctgggcgcgggcgtctggagccgcaacggtaatctggcctataagatggggcgcggcattcaggcagggcgcgtgtggaccaactgttatcacgcttacccggcacatgcggcgtttggcggctacaaacaatcaggcattggccgtgaaacccacaaaatgatgcttgagcattaccagcaaaccaagtgcctgctggtgagctactcggataaaccgttggggctgttctga

SEQ ID NO: 1702 - DNA, 1296 bp, Escherichia coli
atggctatcaaatcacctcccggacttattcctttatcacacttatcgggtgaggaactcctggcccacctgcgctttaaccgggttaccgatgaaaaaggacgttatctgccttttgatgagttgcagtaccgcatcaaaaaaggagaaaacgtcgatgtggcgtggacgcttacccgtctggcgcgcaacgcggcgatccaacgaattaattattgcaatgaagcgggtgaacaggccggattcaacattaccccggtgattgcagaagcgtgcgagcttgtcgacaaacgtgctaccgcgctggcgctgaaagatcagactgaacggttacgcggggccggagccgagttaagccagttacgcctggaagagccgatcaccagctcccagctggaaggtgcgaatactacaacgctggtggcgagaaaaatgctggaaacagggcggtcgccacgcactgaagacgagcatatgattgcgggaaatgcccggctgatggcggaaattccgcacttactcgcagaaccgctgacacctgcgcttattcgccagttacatgccattggtatgggtggaatcaatgacgcgaaatatcgtccgggagaatttcgtgaaacagatgatgttgtgatcgccgactatgatggcaatatagtgcatcaaccgcccgctgcggcattgttaccggaacggctggaaaaagtttgccagtggttaaacagccatgaagggtatattcatccgttggtccgtgcctgcattctgcattttatgctggcccatgaacatccgtttcgggatggcaacgggcgcaccagtcgggcgctgttttactggtatatgctgaaatcgggctacgatgtttttaaatatatttccatcagccgtttgcttcatgcagcgccagtaaaatatgccgccagctaccagtacactgaatcagatggtatggatctgacttatttccttgaatatcaggcgggtgtcattaaacgtgctctgcaaaactggcagcagcatatcgatgaaattacacaacgaagcgcaaaactcgatagtgtgctgtttagctctggtgtgcttaaacgcctgaatccgcgccaggtaacgctcctgaatgtgatgctcgccaatccggggaaagagtacacagttgctgaaattagtgtgagtctgagcgtctcggataatacggcgcggaccgatttacggacaattgttaaagaaggattcgcgcaagagaaaagaattaataaccagcaagcagtgtacgtcgcacactacccgctgtag

SEQ ID NO: 1703 - DNA, 1152 bp, Escherichia coli
atggcagcttcaaccttttttattccttccgtgaatgttattggtgctgattcattgaatgatgcaatgaatatgatggcagattatggatttacccgtaccttaattgtcaccgacaatatgttaacgaaattgggtatggcgggtgatgtgcaaaaagcactggaagaacgcaatatttttagcgttatttatgatggcacccaacctaaccccaccacggaaaacgtcgccgcaggtttgaaattacttaaagaaaataattgcgatagcgtgatttccttaggcggtggttctccacacgactgcgcaaaaggtattgcgctggttgcagccaacggcggtgacatccgcgattatgaaggcgttgaccgctctgcaaaaccgcagctgccgatgatcgccatcaacaccacggcgggtacggcctctgaaatgacccgtttctgcatcatcactgacgaagcgcgtcacatcaaaatggcgattgttgataaacatgtcactccgttgctttctgtcaatgactcatctctgatggtcggtatgccgaagtcactgaccgccgcaacgggtatggatgccttaacgcacgctatcgaagcgtatgtttctattgccgccacgccgatcactgacgcttgcgcactgaaagccgtgaccatgattgccgaaaacctgccgttagccgttgaagatggcagcaatgctaaagcgcgtgaagcaatggcttatgcccagttcctcgccggtatggcgttcaataatgcttctctgggttatgttcatgcgatggcgcaccagctgggcggtttctacaacctgccacacggtgtatgtaacgccgttttgctgccgcatgttcaggtattcaacagcaaagtcgccgctgcacgtctgcgtgattgtgccgctgcaatgggcgtgaacgtgacaggtaaaaacgacgcggaaggtgctgaagcctgcattaacgccatccgtgaactggcgaagaaagtggatatcccggcaggcctacgcgacctgaacgtgaaagaagaagatttcgcggttctggcgactaatgccctgaaagatgcctgcggctttactaacccgatccaggcaactcacgaagaaattgtggcgatttatcgcgcagcgatgtaa

SEQ ID NO: 1704 - DNA, 1845 bp, Escherichia coli
atgattattgcgactgccggacacgttgaccacggcaaaacaaccttgttgcaggcgattacgggcgtaaatgccgaccgtctgccggaagaaaaaaagcgcggcatgaccatcgatctcggctatgcctactggccgcagccggatggtcgcgtgcctggttttatcgacgtacccggtcatgaaaagtttctttccaacatgctggcgggcgttggtggtatcgatcacgcgctgttggtggtggcgtgcgatgacggtgtgatggcacagacccgtgagcatctggcgattttgcagctgaccggtaacccgatgctgacagtggcgctgaccaaagccgatcgcgtggacgaagcgcgtgttgatgaggttgaacgccaggtaaaggaggtgctgcgggaatacggttttgctgaggcaaaactgtttatcaccgcagcaaccgaaggtcggggaattgatgctctgcgcgagcatctgcttcagttaccagaacgtgaacacgccagccaacatagtttccgcctcgcgatcgaccgcgcatttaccgtaaaaggtgccgggctggtcgtcaccggtacggcgttaagcggggaagtgaaagtaggcgattcactctggctgactggtgtaaataaaccgatgcgcgtgcgtgcgctgcatgcgcaaaatcagccaacagaaactgcccatgccgggcagcgtatcgcgcttaacatcgcgggtgatgcggaaaaagagcagattaaccgtggcgactggctgcttgccgatgtgccgccggagccgttcacacgggtgattgtcgagcttcaaacccatacaccgctgacccagtggcagccgctgcatattcaccacgccgccagccacgttacgggacgtgtttcgctactggaagataaccttgccgagctggtgttcgacacgccgctgtggctggcggataacgatcgcttagtgctgcgcgatatctcggcccgcaacacgctggcgggggcgcgtgtggtgatgcttaacccgccgcgtcgcggtaagcgtaagccggaatatctgcaatggctggcgtctcttgcacgggcgcagagcgatgccgatgcgttatctgttcatctggaacgcggcgcggttaaccttgcggatttcgcctgggcacggcagctcaacggcgaagggatgcgcgaactgctgcaacagcctggctatattcaggctggttacagcttgttgaatgcgccagttgccgcccgctggcagcggaaaattctcgatacattagcgacttatcatgagcaacatcgcgatgaacctggtcctgggcgcgaacgtctgcgacgtatggcgttgccaatggaagatgacgcgctggtactgttgctgattgaaaagatgcgcgaaagcggcgacatccacagccatcacggctggctgcatctgccggatcataaagcgggcttcagtgcagagcagcaggccatctggcaaaaagcagagccgctgtttggtgacgagccatggtgggtgcgtgacctggcaaaagagacgggaaccgacgagcaggcaatgcgcctgacgctacgccaggcggcccagcaggggataattacggcgatcgttaaagatcgttattaccgtaacgatcggattgtcgaatttgccaatatgatccgcgatctcgatcaggaatgtggttcaacctgcgcggcggatttccgcgatcgtttaggtgttggtcgaaaactggcaattcaaattctggaatattttgaccgcattggttttacgcgtcgtcggggaaatgatcatttattgcgcgacgcattattatttccggaaaaataa

SEQ ID NO: 1705 - DNA, 1392 bp, Escherichia coli
atgacaaccgaaacgcgttccctctatagtcaacttccggctattgatcgcttattgcgcgatagctccttcctttctttgcgtgatacttatggtcacacccgcgtggtggaattgctgcgtcagatgcttgacgaagcgcgagaagtgattcgtgacagccagacgctgcccgcgtggtgtgaaaactgggcgcaagaagtcgatgcccggttgacgaaagaggcgcaaagcgcgctgcgtccggtgatcaacctgacgggaaccgtgctgcataccaaccttgggcgagctttacaggcggaagccgcggtggaagccgttacgaaggctatgcgttcgccagtgaccctcgagtacgatctggacgacgccggacgcggacatcgcgatcgggcgctggcgcagctgctgtgccgtattacgggggcggaagatgcctgtatcgttaataacaatgcggcggcggtgttattgatgttggcggccactgccagcgggaaagaggtggtggtttctcgcggcgaactggtggagattggcggcgcgtttcgtattcccgatgttatgcgtcaggcaggatgcaccctacacgaagtagggaccaccaaccgcacgcacgcgaaggattatcgtcaggcggtgaatgaaaataccgcactgttgatgaaagtacataccagtaactacagcattcaggggttcaccaaagcgatagatgaagcggaactggtggcgctcggcaaagaactggatgttccagtggtgactgatttaggcagtggctcgctggtcgatcttagccagtacggtttgccgaaagagccaatgccgcaggagttgattgcggcgggcgtcagtctggtgagcttctccggcgacaagctgttaggcgggccgcaggcaggaattattgttggtaaaaaagaaatgatcgcccgcctgcaaagccacccgctgaagcgtgcattacgcgcggataaaatgaccctcgcggcgctggaagccacgttgcgtctttatttacaccctgaagctctgagtgaaaaattaccgaccctgcgcctgcttacccgcagcgcagaggtcattcaaatccaggcacaacgtttacaggctccccttgccgcacattacggcgcggagtttgcggtacaggttatgccatgtctttcgcagatcggcagtggttcgctgccggttgatcgcctgccgagcgcggcattaacgtttaccccccatgatggacgcggtagccaccttgagtcattagccgcccgctggcgtgaattgccagtgccggtgattggtcgtatttatgacggacgattgtggctggatttacgctgccttgaagatgagcaacggtttttggagatgttgttgaaatga

SEQ ID NO: 1706 - DNA, 609 bp, Escherichia coli
atgaaactcgtcggtagctacaccagcccgtttgtacgcaaactttctattctgttgttagaaaagggcataacgttcgaatttattaatgaactgccctataacgcggataacggcgtggcgcaatttaacccgttaggaaaagtgccggtgctggtgaccgaagagggcgaatgctggtttgattcaccgatcatcgctgaatatattgaattaatgaatgttgctccggcgatgttgccgcgcgatccgctggagtcgttgcgggtgcgcaaaattgaggcactggcggatggcattatggatgccgggctggtatcggtgcgtgaacaggcgcgtccggcggcgcagcagtctgaagatgaattgttacgtcagcgtgagaaaatcaaccgcagtctggatgtgctggaaggatatctggtcgatggcacgctcaaaaccgatacggtcaatctggcgactatcgccattgcctgtgccgtcggatatctcaatttccgccgcgttgcgccaggctggtgtgtcgaccgcccacacttagtcaaactggtcgaaaacctgtttagccgcgaaagttttgctcgcaccgaaccgccaaaggcttga

SEQ ID NO: 1707 - DNA, 1137 bp, Escherichia coli
atggatctattgattgttttaacttacgtggcgctggcgtgggcggtctttaaaatcttccgcattccggtgaatcagtggacgctggcgacggcggcgctgggaggcgtgtttctggtgagtggtttgattttgttgatgaactacaaccacccttacacttttaccgcgcaaaaggcagtgatagcgatccccatcacgccacaggtgacgggaattgttactgaagtcaccgacaaaaataatcagcttattcagaagggcgaggtgctttttaagctcgacccggttcgttaccaggcgcgagttgacaggcttcaggctgacctgatgacggcgacgcataatataaagacgctgcgcgcgcagctcactgaagcgcaggccaacaccacccaggtttcagcggagcgcgaccgtctgtttaaaaattatcaacgttatctgaaaggcagccaggcggcggtgaatccgttctcggaacgtgacatcgacgatgcgcggcaaaatttcctcgcgcaggatgcgctggtgaaaggctcggtggcggagcaggcgcagatccagagccagctcgacagtatggttaacggcgagcaatcgcagattgtgagcttaagagcgcaacttactgaagcaaaatataaccttgagcagaccgtcattcgcgcaccgagcaatggctacgtcactcaggtactgatccgcccaggtacatacgccgctgccttgccgctgcgtccggtgatggtcttcatccccgagcaaaaacggcaaattgtcgcccaatttcggcaaaactcgctgttacgtctgaaacccggcgatgatgcggaagtggtgtttaacgcgctacctgggcaggtgtttcacggcaaactgaccagtattttacctgtcgtgccaggcggttcttatcaggcgcagggggtattgcaatcattaacggtcgtgcccggcacggacggtgtgctgggaaccattgaactggaccctgacgctgatatcgatgccttacccgacggcatctacgcccaggtggcagtttactccgaccatttcagccatgtttcggtgatgcggaaagtgctgctaagaatgaccagttggatgcattatctttatttggatcattga

SEQ ID NO: 1708 - DNA, 363 bp, Escherichia coli
atgtttctaaactatttcgcgttgggagtgctgatcttcgtctttctggtgattttttatggaatcatcgcgatacatgacatcccttatctgattgccaaaaagcgcaaccatccccatgccgacgctattcatacggcgggctgggtgagcctgtttactctgcatgttatctggccgttcctgtggatctgggcgacgctctatcaaccggagcgcggctggggcatgcagtcacatgttgcgccgcaaggcgacgtgccagacccggaaatcgccgcactttctgaccggatttcccggctggagcaccaactcgccgccgagaaaaagactgactattccacgtttccggagatctaa

SEQ ID NO: 1709 - DNA, 1914 bp, Escherichia coli
atgtcatccgatattaagatcaaagtgcaaagctttggtcgtttcctcagcaacatggtgatgccaaatatcggcgcgtttatcgcgtggggtatcatcaccgcgttatttattccaacagggtggttaccgaacgaaacgctggcgaagctggtcgggccgatgatcacttatctcctgccgctgctgatcggttataccggtggtaagctggtaggcggcgaacgtggcggcgtagtcggtgccatcaccaccatgggcgttatcgtcggcgcagacatgccgatgttcctcggctctatgattgcaggtccgctgggcggctggtgcattaagcacttcgaccgctgggtagacggtaagatcaaatccggttttgaaatgctggtgaataacttctccgcaggcatcatcgggatgatcctcgctattctggcatttctcggcattggcccggttgttgaagccctgtctaaaatgctggcggcgggcgttaacttcatggttgtccatgacatgctgccgttggcgtctatctttgttgaaccggcgaaaatcctgttcctcaacaacgccattaaccacggtatcttctcgccgctgggtattcagcagtcccatgaactgggtaaatccatcttcttcctgattgaagctaacccaggtccgggtatgggcgtgctgctggcgtacatgttctttggtcgtggtagcgctaaacagtctgcgggcggtgcggcaatcatccacttcctggggggtatccacgaaatctacttcccgtatgtgctgatgaatccgcgtctgattctggccgttatcctcggcggtatgactggcgtgttcacgctgactatcctgggcggtggtctggtttctccggcatctccgggttctatccttgctgtactggcgatgacaccaaaaggtgcatacttcgctaacatcgcgggtgtgtgtgcggcgatggcagtctccttcgttgtctctgccattctgctgaaaaccagcaaagtgaaagaagaagatgatattgaagctgctgcacgtcgcgttcaggaaatgaaagctgagtctaaaggcgcatctccgctgtctgcgggcgatgtgactaacgacctgagccacgtacgtaaaatcatcgttgcctgtgatgctggtatgggttccagtgcgatgggtgcaggcgtgctgcgtaagaaaattcaggatgcaggtctgtcgcagatttcggtcactaacagcgcgatcaacaacctgccgccagatgtggacctggtcatcactcaccgtgacctgaccgaacgcgctatgcgccaggttccgcaggcacagcatatttcgctgaccaacttcctcgacagcggcctgtacaccagcctgaccgaacgtctggttgctgcccagcgccatactgaaaacgaagtgaaagtgaaagacagtctgaaagacagctttgacgattccagtgctaatctgttcaaactgggcgcggagaacatcttcctcggtcgcaaagcggccaccaaagaagaagcgattcgttttgctggcgagcagctggtgaaaggcggttacgttgagccggaatacgttcaggcgatgttggatcgtgaaaaactgaccccgacttatctgggtgagtctatcgcggtgccacacggtacggttgaagcgaaagatcgcgtactgaaaacgggcgtcgtgttctgccagtacccggaaggcgtgcgcttcggtgaagaagaagatgacattgcccgtctggtgattggtattgctgcccgtaacaacgagcacattcaggttatcaccagcctgaccaatgcactggatgatgagtccgtcatcgagcgtctggcacacaccaccagcgtggatgaagtgctggaattgctggcaggtcgtaagtaa

SEQ ID NO: 1710 - DNA, 1149 bp, Escherichia coli
atgaaagcattacattttggcgcaggtaatatcggtcgtggctttatcggtaaactgctggcggacgcgggtatccaactgacgtttgccgatgtaaatcaggtggtacttgatgccctgaatgcccgtcatagctatcaggttcatgtggttggtgaaaccgagcaggtggataccgtttctggcgtcaatgccgtcagcagcattggcgatgatgtcgttgatctgattgctcaggtcgatttagtcactaccgccgttggccctgtcgtgctggaacgtattgctccggccatcgccaaagggctggtgaaacgtaaagaacaaggtaatgaatctccgctgaacatcatcgcctgtgaaaacatggtccgcggcaccacgcagctgaaaggccatgtgatgaacgccctgccggaagatgccaaagcgtgggtagaagaacacgttggctttgttgattccgccgttgaccgcatcgtaccgccttcggcttcggcaactaacgatccgctggaagtgacggtagaaaccttcagcgaatggattgtcgataaaacgcagttcaaaggcacgctgccaaacatccctggcatggaattaaccgacaatctgatggcatttgtcgaacgtaaactcttcaccctgaatacaggtcatgctataaccgcgtacctcggaaaactggccggtcatcagaccattcgtgacgcaattctcgacgagaaaatccgcgcggtggtaaaaggggcaatggaagaaagcggcgcggtactgatcaagcgctacggctttgatgctgacaaacatgcggcatacatccagaaaatcctcggtcgtttcgagaacccgtacctgaaagatgatgtagaacgcgtaggccgtcagccgctgcgtaaactgagtgctggcgaccgtctgatcaagccactgctcggaaccctggaatatggtctgccacataaaaacctgattgaaggtattgccgctgcaatgcacttccgcagtgaagatgacccgcaggctcaggaactggcagcgctgattgccgacaaaggcccacaagccgcgctggcagagatttccggtcttgatgccaacagcgaggttgtatccgaggcggtaaccgcttataaagcaatgcaataa

SEQ ID NO: 1711 - DNA, 588 bp, Escherichia coli
atggtggaccaggcgcaggataccctgcgcccgaataacagattgtcagatatgcaggcaacaatggaacaaacccaggcctttgaaaaccgtgtgcttgagcgtctgaatgctggcaaaaccgtgcgaagctttctgatcaccgccgtcgagcttttgaccgaggcggtaaatcttctggtgcttcaggtattccgcaaagacgattacgcggtgaagtatgctgtagaaccgttactcgacggcgatggtccgctgggcgatctttctgtgcgtttaaaactcatttacgggttgggcgtcattaaccgccaggaatacgaagatgcggaactgctgatggcattgcgtgaagagctaaatcacgacggcaacgagtacgcttttaccgacgacgaaatacttggaccctttggtgaactgcattgcgtggcggcgttaccaccgccgccacagtttgaacctgcagactccagtttgtatgcaatgcaaattcagcgttaccaacaggctgtgcgatcaacaatggtcctttcactgacagagctgatttccaaaatcagcttaaaaaaagcctttcaaaagtaa

SEQ ID NO: 1712 - DNA, 210 bp, Escherichia coli
atgggcaaattaggtgaaaacgttccgcttcttatcgataaagccgtagatttcatggcatccagccaggcgttccgggagtatctgaaaaaactacctccccgtaacgcgattccgtccggaatacctgatgaaagcgtgccgttatatctacaacgtctggagtattatcgtcagctttatcgtccgaaacaggtagaggagaagtaa

SEQ ID NO: 1713 - DNA, 363 bp, Escherichia coli
atgaaagaagtcgaaaaaaacgaaatcaaacgtctcagcgatcgtctggacgccatccgtcaccagcaggccgatctatcgctggttgaagccgcagacaaatatgccgaactggaaaaagagaaagccacgctggaagcagaaattgctcgcctgcgcgaagttcacagccagaaactcagcaaagaagcgcagaaactgatgaagatgccgttccagcgtgcaatcaccaaaaaagagcaggctgatatgggcaagctgaaaaaaagtgttcgcggactggtggttgtgcacccaatgaccgcgctgggccgcgaaatgggcctgcaagagatgacagggttctcaaagactgcgttttaa

SEQ ID NO: 1714 - DNA, 684 bp, Escherichia coli
atgaacctaaagaaaacactgttaagcgtgttaatgatattgcaactttgcttattggtagggtgtgactatattgaaaaagcgagtaaggtcgacgatctcgttacacagcaagagttacaaaaaagcaaaattgaggcgcttgaaaaacaacaagaactcgacaagcgcaagatagaacactttgaaaaacaacaaactaccatcataaacagtaccaaaacgctcgctggcgtggtgaaggcagttaaagacaaacaggacgaatttgtctttacagaatttaacccggcacaaacccaatacttcattttaaataacggttctgttggtttggcagggaaaatactgtctattgacgcagtagaaaacggcagcgttattcgtatttcactggttaacttattaagtgttcctgtatcaaatatgggtttttacgcgacatgggggggagaaaaacccaccgacatcaacgcattagcaaaatggcagcaattgctatttagtacctcaatgaactcctccctgaaattattaccaggtcaatggcaagacattaatttgacgctaaaaggtgtctcgcccaacaacctcaaatatctgaaattagccatcaacatggcaaatattcagttcgaccgtcttcaacctgctgaatctccacagcggaaaaacaaaaaataa

SEQ ID NO: 1715 - DNA, 4743 bp, Escherichia coli
atgaacaaaatatttaaagttatctggaatccggcaacaggtagttacaccgttgccagtgaaacagcaaaaagtcgtggtaaaaaaagcgggcgcagtaagctgttaatttctgcgttggttgtgggtgggttgttgtcgtctggagtacaagcatcgaccgcgcttgatggtggtggggctagcgaaagcactccattgaccgatacctggattgccattggtcagggtgctaaagcatcatcagtagacacttcaccatcaggaggaccaggaacatcaagtattgcaatagggcaagaagcccaatctgggataggtagtacctcattaggtttcaagagccaggctacaggagaaagatctgttgctttaggacaaacagctgacgcaaccggtaatagggccatagcaatcggtagtggagctaaatcgactgccgattattcccttacgctggggaatggatctaaggctttcgctgaaaacgccacggcgataggcaaggacgcaagagcggagggcaaaggtagtcaggccttcggaaaagtggccttggccactggggagaatgccattgccttgggtagtaacagcaatgcatctggtgataacgccgttgcgctgggtagtacaagtcaggcatatggcgactccagccttgcaataggtgagttaagtgagaccaatgctgaaaatgctattgcactgggaaaactcagtaacgcaagtaaaatcaattcaatcgccctgggtagtaacagcactgcatctggtgtgggctccgttgcgctgggagagaatagttttgctggaggcataaacagtcttgctttgggtagtcaatccaatgcaaacggtgataacgcagttgccctcggtgtaggatctgtcgcagagcaagacaataccgtttcggtagggaacagcacaacacaacgcaaaattaccaatatggctgccggtcttatactaccaggcagtactgaggccattaacggttcacaacttcatgcattaagtgcctcagtcgcagcccgactcggggctggtgctggcgtaaatggagatggaagtataaatgcgccaagctacaagctgaaaagcggcacctacaataatgtgggagaggcgcttttgggaatcgacaatgacactctgcactgggacaaaaccgagggagcatttagtgccagctatatcgtcaaaaacgctgatggcagcccaaagagcagcatagcccaaaacaaaatcattaacgttgcaaagggtactatttccgccaccagcaccgatgtagtaaacggctctcaattgtacgacctgcagcaggatgcgctgttgtggaacggcacagcattcagtgccgcacacggcaccgaagccaccagcaaaatcactaatgttgaagatggtactatttcagacaccagtaaagatgcggttaacggttcccagttgaaagaaaccaaagacgatgtggccaccaacacagccaatatcgccactaacaccacggatattgcaaccaacactgccaatatcgccgataacactacggatattgcgaccaacactgccaatatcgccgataacactgctgatatcgccactaacaccacggatattgcaaccaacactgccaatatcgccgataacactgctgatatcgccactaacaccacggatattgcaaccaacactgccaatatcgccactaacactacggatattgcgactaataccgccgatatagctacaaacgctagcagtatcactactctgaacgcggacgttgataccctggaaaaagatgccctgctctggaatggcacagcattcagcgccaaacacggcaccgaagctaccagcaagatcaccaatgttaccgctggcgacctgactgctggcagcactgacgccgttaatggctcccagctcaaaaccaccaacgataacgtgtcgaccaacaccaccaacatcaccaacctgacggattccgttggcgaccttaaggacgattccctgctgtggaacaaaacggctggcgcattcagcgccgcgcacggcaccgaagccaccagcaagatcaccaacttactggctggcaaggtatcttctgacagcaccgatgccattaacggctcacaactttatggcgtagcggattcatttacgtcatatcttggtggtggtgctgatatcagcgatacgggtgtattaaccgggccaacctacactattggtggtactgactacactaacgtcggtgatgctctggcagccattaacacatcatttagctcatcactcggcgacgccctactctgggatgcaaccgcaggcaaattcagcgccaaacacggcattaataatgatcccagtgtaatcactgatgttgcaaacggtgcagtctcgtccaccagcagcgacgccattaacggttcgcaactttatgacgttagtgactacattgccgatgctttgggcgggaacgctgtggtgaatgcagacggcagtatcactacaccgacttatgccattgctggcggcagttacgacaatgtcggtgacgcgctggaagcgatcgataccacgctggatgatgctctgctgtgggatgagacagccaatggcggtaatggtgcatttagcgccgctcacgggaaagataaaactgccagtgtaatcactaacgtcgctaacggtgcagtctctgccaccagcagcgatgccattaatggctcacagctctatagcaccaataagtacatcgctgatgcgctgggtggtgatgcagaagtcaacgctgacggtactatcactgcgccgacttacaccattgcaaataccgattacaacaacgtcggtgaagccctagatgcgctcgataataacgctctgctgtgggatgcaacagccaataacggcgcaggtgcttacagcgccagtcatgacggcaaggccagcattatcacaaacgttgctgatggtaacattggtgaagatagcaccgacgctatcaacggttctcagttgaatgcaaccaacatgatgatccagcagaacagcgaaatcatcaatcagcttgccggtgacaccagtaaaaactacatcggagataacggtgcaggtattaactatgtacgtaccaacgacagcggcttagcgttcaacgatgccagcgcagcaggtattggctctaccgctgtggggtataacactgttgccaaaggcgatagcagcgtggcaatcggtcatggcagcaacagcatcgttgagacgagtattgcgctgggtagcgaatccgtctccagccgtttgattgtgaaaggctcccgtaatacccgcgttacggaaaatggggtcgagatcggttatgacaccacggatggcgaactgcttggcgcgttgtcgatcggtgatgatggtaaatatcgtcaaatcatcaacgtcgcggatggttctgaagcccatgacgctgttactgttcgccagttgcaaaacgccattggtgcagtagcaaccacaccaaccaaatactatcacgccaactcaacggctgaagactcactggcagtcggtgaagactcgctggcaatgggcgcgaaaaccatcgttaatggtaatgcgggtattggtatcggcctgaacactttagttctggctgatgcgatcaacggtattgctatcggttctaacgcacgcgcaaatcatgccgacagcattgctatgggtaatggttctcagactacccgtggtgcgcagaccaactacactgcctacaacatggatgcaccgcagaactctgtgggtgagttctctgtcggcagtgaagacggtcaacgtcagatcaccaacgtcgctgcggggtcggcggataccgatgcggttaacgtggatcagttgaaagtaacggacgcgcaggtttcccagaatacccagagcattactaacctgaacactcaggtcactaatctggatactcgcgtgaccaatatcgaaaacggcattggcgatatcgtaaccaccggtagcactaagtacttcaagaccaacaccgatggcgcagacgccaacgcgcagggtaaagacagtgttgcgattggttctggttccattgctgccgctgacaacagcgtcgcactgggcacgggttccgtagcagacgaagaaaacaccatctctgtgggttcttctaccaaccagcgtcgtatcaccaacgttgctgccggtgttaatgccaccgatgcggttaacgtttcgcaactgaagtcttctgaagcaggcggcgttcgctacgacaccaaagctgatggctctatcgactacagcaacatcactctcggtggcggcaatagcggtacgactcgcatcagcaacgtttctgctggcgtgaacaacaacgacgcagtgaactatgcgcagttgaagcaaagtgtgcaggaaacgaagcaatacaccgatcagcgcatggttgagatggataacaaactgtccaaaactgaaagcaagctgagtggtggtatcgcttctgcaatggcaatgaccggtctgccgcaggcttacacgccgggtgccagcatggcctctattggtggcggtacttacaacggtgaatcggctgttgctttaggtgtgtcgatggtgagcgccaatggtcgttgggtctacaaattacaaggtagtaccaatagccagggtgaatactccgccgcactcggtgccggtattcagtggtaa

SEQ ID NO: 1716 - DNA, 1656 bp, Escherichia coli
atgaatctctggcaacaaaactacgatcccgccgggaatatctggctttccagcctgatagcatcgcttcccatcctgtttttcttctttgcgctgattaagctcaaactgaaaggatacgtcgccgcctcatggacggtggcaatcgcccttgccgtggctttgctgttctataaaatgccggtcgctaacgcgctggcctcggtggtttatggcttcttctacgggttgtggcccatcgcgtggatcattattgcagcggtgttcgtctataagatctcggtgaaaaccgggcagtttgacatcattcgctcgtctattctttcgataacccctgaccagcgcctgcaaatgctgatcgtcggtttctgtttcggcgctttccttgaaggagccgcaggctttggcgcaccggtagcaattaccgccgcattgctggtcggtctgggctttaaaccactgtacgccgccggactgtgcctgattgttaacaccgcgccagtggcatttggtgcgatgggtattccgattctggtcgccgggcaggtaacaggcatcgacagctttgagattggtcagatggtggggcgtcagctgccgtttatgaccattatcgtgctgttctggatcatggcgattatggacggctggcgcggtatcaaagaaacctggcctgcggtcgtggttgcgggcggctcatttgccatcgctcaatacctcagctctaactttattgggccggaactgccagacattatctcttcgctggtatcgctgctctgtctgacactgttcctcaaacgctggcaaccagtgcgcgtattccgcttcggtgacttaggggcgtcacaggttgatatgacgctggctcacacaggttacacggcaggtcaggtgctgcgcgcctggacaccgttcctgttcctgaccgccaccgtaacgctgtggagtatcccgccgtttaaagccctgttcgcttcaggcggtgcgctgtatgagtgggtgatcaacattccggtgccgtacctcgataaactggttgcccgtatgccgccagtggtcagcgaagcgacagcgtatgccgccgtgtttaagtttgactggttctctgccactggcaccgccattctgtttgctgccctgctctcgattgtctggctgaagatgaaaccatctgacgctatcagcaccttcggcagcacgctgaaagaactggctctgcctatctactccatcggtatggtgctggcattcgcctttatctcgaactattccggtttgtcatcaacactggcgctggcactggcgcacaccggtcatgcattcaccttcttctcgccgttcctcggctggcttggggtattcctgaccgggtcggatacgtcatctaatgctttgtttgccgctttgcaggctaccgcagcacaacaaattggcgtttctgacctgttgttggttgccgccaataccaccggtggcgtcaccggcaaaatgatctctccgcaatctatcgctatcgcctgtgcggcggtaggcctggtgggcaaagagtctgatttgttccgctttactgtcaaacacagcctgatcttcacctgtatggtgggcgtgatcaccacgcttcaggcctatgtcttaacgtggatgattccttaa

SEQ ID NO: 1717 - DNA, 777 bp, Escherichia coli
atgattgttttacccagacgcctgtcagacgaggttgccgatcgtgtgcgggcgctgattgatgaaaaaaacctggaagcgggcatgaagttgcccgctgaacgtcaactggcgatgcaactcggcgtgtcgagaaattcactgcgcgaggcgctggcgaaactggtaagcgaaggtgtgctgctcagtcgacgtggcggcgggacgtttattcgctggcgtcatgacacatggtcggagcaaaacatcgtccagccgctgaaaacgctgatggccgatgatccggattacagtttcgatattctggaagcccgctacgccattgaagccagcaccgcatggcatgcagcaatgcgtgccacgcctggcgaaaaagaaaagattcagctttgttttgaagcaacgctaagtgaagacccggatctcgcctcacaagcggacgttcgttttcatctggcgattgccgaagcctcacataacatcgtgctgctgcaaaccatgcgcggtttcttcgatgtcctgcaatcctctgtgaagcatagccgccagcggatgtacctggtacccccggttttttcacagctgaccgaacaacatcaggcggtcattgacgccatttttgccggtgatgctgacggggcgcgtaaagcaatgatggcgcaccttagctttgttcacaccaccatgaaacgattcgatgaagatcaggctcgccatgcacgcattacccgcctgcctggtgaccataatgagcattcgagggagaaaaacgcatga

SEQ ID NO: 1718 - DNA, 1191 bp, Escherichia coli
atgattatttccgcagccagcgattatcgcgccgcagcgcaacgcattctgccgccgttcctgttccactatatggatgggggggcatattctgaatacacgctgcgccgcaacgtggaagatttgtcagaagtggcgctgcgccagcgtattctgaaaaacatgtctgacttaagcctggaaacgacgctgtttaatgagaaattgtcgattccggtggcgctaggtccggtaggtttgtgtggcatgtatgcgcgacgcggcgaagttcaggctgccaaagcagcggatgcgcatggcattccgtttactctctcgacggtttccgtttgcccgattgaagaagtcgctccagctatcaaacgtccgatgtggttccagctttatgtgctgcgcgatcgcggctttatgcgtaacgcactggagcgagcaaaagcagcgggttgttcgacactggttttcaccgtggatatgccaacgccgggagcgcgttatcgtgatgcgcattctgggatgagcggcccgaacgcggcaatgcgccgctatttgcaggcggtgacgcatccgcaatgggcgtgggatgtgggcctgaacggtcgtccgcatgatttaggtaatatctcggcttacctcggcaaaccgaccggactggaagattacatcggctggttggggaataacttcgatccgtccatctcatggaaagaccttgagtggatccgcgatttctgggatggcccgatggtgatcaaagggatcctcgatccggaagatgcgcgcgatgcagtacgttttggtgctgatggaattgtggtttctaaccacggtggccgccagttagatggcgtactctcttctgcccgtgcgctgcctgctattgcggatgccgtgaaaggtgatatcgccattctggcagatagcgggattcgtaacgggctggacgttgtgcgtatgatcgcgctcggtgctgataccgtactgctgggccgcgctttcctgtatgcgctggcaacagcgggccaggcgggtgtagctaatctgctaaatctgatcgaaaaagagatgaaagtggcgatgacgctgactggcgcgaaatcgattagcgaaattacgcaagattcgctggtgcaggggctgggtaaagagttgcctgcggcactggctccaatggcgaaagggaatgcagcttaa

SEQ ID NO: 1719 - DNA, 474 bp, Escherichia coli
atgctaaacatcgtactttacgaaccagaaattccgccaaatactggcaacatcatccgtctttgcgctaataccggctttcgtctgcatatcatcgaaccgatgggatttgcctgggacgataagcgcctgcgccgcgcggggctggactatcacgagtttaccgccgttacgcgtcatcatgactatcgcgcgttccttgaagcagaaaatccccagcgcctgtttgccctcaccacgaaaggtacgcctgctcacagcgccgtaagctatcaggatggcgattatctgatgttcggcccggaaacacgcggcctgccagcgagcattcttgatgccctgcccgctgaacaaaaaattcgtattccaatggtgccggacagccgcagcatgaacctgtccaatgcggtgtcggtcgtggtgtatgaagcctggcggcagttggggtatccgggagcggtgttgagagattag

SEQ ID NO: 1720 - DNA, 822 bp, Escherichia coli
atgtcgtgtgaagaactggaaattgtctggaacaatattaaagccgaagccagaacgctggcggattgtgagccaatgctggccagtttttaccacgcgacgctactcaagcacgaaaacctgggcagtgcactgagctacatgctggcgaacaagctgtcatcgccaattatgcctgccattgctatccgcgaagtggtggaagaggcctacgccgccgacccggaaatgatcgcttctgcggcctgtgatattcaggcagtgcgtacccgcgacccggcggtggataaatactcgactccattgttatatctgaaaggttttcatgccttgcaggcctatcgtatcggtcactggctgtggaatcagggccgccgcgctctggcaatatttctgcaaaaccaggtttctgtaacgttccaggttgatattcacccggcagcaaaaattggtcgcggtatcatgcttgaccacgccacgggcatcgttgtgggtgaaacggcggtgattgaaaacgacgtatcgattctgcaatctgtgacgcttggcggtacgggtaaatctggtggcgaccgtcatccgaaaattcgtgaaggtgtgatgattggcgcgggcgcgaaaattctcggcaatattgaagttgggcgcggcgcgaagattggcgcaggttccgtggtgctgcaaccggtgccgccgcataccaccgccgctggcgttccggcacgcattgtcggcaagccggatagcgataaaccgtcaatggatatggatcagcattttaacggtattaaccatacgtttgagtatggtgatgggatctga

SEQ ID NO: 1721 - DNA, 1020 bp, Escherichia coli
atgaaccaacgtaatgcttcaatgactgtgatcggtgccggctcgtacggcaccgctcttgccatcaccctggcaagaaatggccacgaggttgtcctctggggccatgaccctgaacatatcgcaacgcttgaacgcgaccgctgtaacgccgcgtttctccccgatgtgccttttcccgatacgctccatcttgaaagcgatctcgccactgcgctggcagccagccgtaatattctcgtcgtcgtacccagccatgtctttggtgaagtgctgcgccagattaaaccgctgatgcgtcctgatgcgcgtctggtgtgggcgaccaaagggctggaagcagaaaccggacgtctgttacaggacgtggcgcgtgaggccttaggcgatcaaattccgctggcggttatctctggcccaacgtttgcgaaagaactggcggcaggtttaccgacggccatttcgctggcctcgacggaccagacctttgccgatgacctccagcaattgctgcactgtggcaaaagtttccgcgtttacagcaacccggatttcatcggtgtgcagcttggcggcgcggtgaaaaacgtcattgccattggcgcggggatgtccgacggtatcggttttggcgcgaatgcgcgtacggcgctgatcactcgtgggctggctgagatgtcgcgtcttggcgcggcgctgggtgccgatcctgccacctttatgggcatggcggggctgggcgatctggtgcttacctgtactgataaccagtcacgtaaccgccgttttggcatgatgctcggtcagggcatggatgtacaaagcgcgcaggagaaaattggtcaggtggtggaaggctaccgcaatacgaaagaagtccgcgaactggcgcatcgcttcggcgttgaaatgccaataaccgaggaaatttatcaagtattatattgcggaaaaaacgcgcgcgaggcagcattgactttactaggtcgtgcacgcaaggacgagcgcagcagccactaa

SEQ ID NO: 1722 - DNA, 468 bp, Escherichia coli
atgtcagaacaaaacaacaccgaaatgactttccagatccaacgtatttataccaaggatatttctttcgaagcgccgaacgcgccgcacgttttccagaaagattggcaaccagaagttaaacttgatctggatacggcatctactcaactggcagatgacgtttacgaagtggtactgcgtgttaccgtaacggcctccctgggcgaagaaaccgcgttcctgtgtgaagttcagcagggcggtattttctccatcgcgggtatcgaaggcacccagatggcacattgcctgggcgcatactgcccgaacattctgttcccgtatgctcgtgagtgcatcaccagcatggtatcccgcggtacattcccgcaactgaaccttgcgccggttaacttcgatgcgctgttcatgaactatttgcagcagcaggctggcgaaggtactgaagaacatcaggatgcctga

SEQ ID NO: 1723 - DNA, 252 bp, Escherichia coli
atggccaatgttgaaatctataccaaagaaacctgcccgtattgccatcgtgcaaaagcactgctgagcagcaagggcgtgagttttcaggagttgccgatcgatggcaatgccgctaagcgtgaagagatgatcaaacgcagtggtcgcaccacggttccacagatttttattgacgcacagcacattggtggctgtgatgacttgtatgcattggatgcacgtggtggactggatcccctgctgaaataa

SEQ ID NO: 1724 - DNA, 432 bp, Escherichia coli
atgcaagaaattatgcaatttgttggccgtcatcccatactgagtatcgcctggatcgcgttactggtggcggttcttgtgactacgtttaagagcctgacctcgaaagtgaaggtgattactcgtggtgaagctacgcgtctgatcaacaaagaagacgctgtggttgtggatttacgtcagcgtgatgacttccgtaaaggccatatcgcaggttctatcaacctgttgccgagcgaaatcaaagccaacaatgttggtgagcttgagaagcacaaagacaaaccggttatcgtggtagatggttctggcatgcagtgccaggagcctgcaaacgcgctgacgaaagctggttttgcgcaagtattcgtactgaaagaaggcgtcgctggctgggctggcgaaaacttgcctttggtgcgcggcaaataa

SEQ ID NO: 1725 - DNA, 1545 bp, Escherichia coli
atgtcggtttctaaaaaacctatggtactggtgattctggatggctatggctatcgtgaagaacagcaggataacgccatttttagtgctaaaaccccggtaatggatgcactgtgggccaatcgtccgcataccctgatcgacgcttccggtctggaagtcggtctgcctgaccgtcagatgggtaactccgaagtgggccacgttaacctgggtgccggccgcatcgtgtatcaggacctgactcgtctggacgttgaaatcaaagatcgcgctttcttcgctaacccggtactgactggcgcggtagataaagcgaaaaacgcaggcaaagcagttcacattatgggtctgctctccgcaggcggcgtacacagccacgaagatcacatcatggcgatggtagaactggccgctgaacgcggcgcagaaaaaatctacctgcacgcattccttgacggtcgcgacactccgccgcgcagtgctgaatcctcgctgaaaaaattcgaagagaaatttgccgcgctgggtaaaggccgcgtagcgtccatcattggtcgttactacgcgatggaccgcgataaccgttgggatcgcgttgaaaaagcttatgacctgctgactctggcacaaggtgagttccaggccgataccgccgttgccggtttgcaggctgcttatgctcgcgacgaaaacgacgagttcgtgaaagcgaccgttattcgtgcagaaggtcagccagatgcagcaatggaagacggcgatgcgctgattttcatgaacttccgtgctgaccgcgcgcgtgaaatcactcgtgctttcgtgaacgctgatttcgatggcttcgcgcgtaagaaagtggttaacgtcgatttcgtgatgctgaccgaatacgctgccgacatcaaaaccgcagtggcttacccacccgcttccctggttaacaccttcggcgaatggatggcgaaaaacgacaaaactcagctgcgtatttccgaaaccgaaaaatatgcccacgttactttcttcttcaacggtggcgtagaagagtcgttcaaaggcgaagatcgcattctgatcaactcaccgaaagtggctacctacgatctgcaaccggaaatgagctccgcagagctgaccgaaaaactggttgcggcaatcaagagcggcaaatacgacaccattatctgtaactatccgaacggcgacatggtaggtcacaccggagtgatggaagcggcggttaaagcggttgaagcgctggatcactgcgtggaagaagtcgcgaaagcggttgagtccgtgggtggacaactgctgatcaccgctgaccacggtaacgctgaacagatgcgcgatccggcaacgggtcaggcacacacagcacacaccaacctgccagttccgctgatttacgttggtgataagaacgtgaaagcggttgaaggcggcaaactttctgacatcgcgccgaccatgttgtcgctgatgggtatggaaatcccgcaagagatgactggtaagccgctgttcatcgtggaataa

SEQ ID NO: 1726 - DNA, 1260 bp, Escherichia coli
atgacacgggccgtgaaaccgcgcaggtttgcaatcaggcccatcatctacgccagcgttctgagcgctggcgtattgttgtgcgccttttccgcccacgcggatgagcgtgaccaactcaaatccattcaggctgacatcgccgcgaaagagcgcgcggtacgccaaaagcaacaacaacgcgcaagcctgctcgcacaattgaaaaagcaggaagaagcgatctctgaagccacccgtaaactgcgcgaaacgcaaaacacgcttaatcaattgaataaacagattgatgagatgaacgcgtcgattgccaaactagagcagcaaaaagccgcccaggagcgcagcctcgccgcgcaactggatgccgcgtttcgtcagggtgaacataccggtattcagctgattctcagcggtgaagaaagccagcgtgggcagcggttacaggcttatttcggctatctcaaccaggcgcgacaagaaaccattgctcagttgaaacaaacgcgtgaagaagtcgctatgcagcgtgccgaactggaagagaaacagagcgagcaacaaacgcttttatatgagcagcgcgcccaacaggcgaagctgacccaggtgttgagcgagcgtaagaaaacactggcagggctggagtcttccatccagcaaggtcagcaacagttgagcgagctgcgcgccaacgaatcccgtctgcgtaacagcattgcccgtgcggaagccgcggcgaaagcgcgtgctgaacgtgaagcgcgcgaagcccaggcggttcgcgaccgccagaaagaagcgacgcgcaaaggcaccacctacaagccgaccgaaagcgaaaaatcgctgatgtcccgtaccggtggtctgggtgcgccgcgtggtcaggcattctggccagttcgcgggccgacgctgcatcgctatggcgagcagctacagggtgaattacgctggaaaggaatggttatcggtgcctctgaaggtactgaagttaaagcaattgccgacggtcgggtgattctggctgactggctgcaaggctacggtctggtggtggtggttgagcatggtaaaggcgacatgagtctttacggctataatcagagcgcactggtgagcgttggttcgcaggttcgcgcgggccagccgattgcactggtgggcagcagtggcggtcagggcagaccttcactctatttcgaaattcgccgccagggtcaggcggtcaatccacagccgtggttgggaagataa

SEQ ID NO: 1727 - DNA, 960 bp, Escherichia coli
ttgtttccatttcgtcgtaacgttcttgcatttgccgccctgttggcgctctcctcccccgtaattgctggcaaacttgccatcgtcattgatgattttgggtatcgcccgcacaacgaaaaccaggtgctggcgatgccttccgctatctccgtcgctgtattacccgattcaccgcacgccagagagatggcgaccaaagcacataacagcggtcacgaagtgttgattcatctaccgatggcaccactgagtaaacagccgctggagaaaaatacgctacgcccggagatgagcagcgacgaaattgagcgcattattcgtagtgcggtcaataacgtgccctatgccgtggggatcaacaaccacatgggcagcaagatgacctctaacctgtttggtatgcagaaagtgatgcaggcgctggagcgttacaatctttacttcctcgacagcgtaaccatcggtaatacccaggcgatgcgcgccgcgcaaggcactggcgtgaaggtgatcaaacggaaggtgttcctcgacgattcgcaaaatgaagcggacatccgtgtgcaattcaatcgcgcaattgacctggcgcgtcgcaacggttcaaccattgccattggacatcctcacccttcaacggtacgcgtgctacaacagatggtttataacctgccgccagacattacgctggtgaaagccagcagcttgctgaatgaaccgcaggttgatacgtctacaccgccgaaaaacactgtgcccgacacaccgcgtaatccattccgtggcgtgaagctgtgcaaaccgaagaagccgctggaacctgtttatgctaatcgcttctttgaagtattaagcgaaagcatcagccagagcacgctgatcgtttacttccagcatcagtggcaaggctggggcaaacagcccgaagcggcaaaacttaacgctagcgcaaattaa

SEQ ID NO: 1728 - DNA, 1035 bp, Escherichia coli
atgatgaacagcaccaataaacttagtgttattattccgttatataatgcgggcgatgatttccgcacttgtatggaatctttaattacgcaaacatggactgctctggaaatcattattattaacgatggttcaacggataattctgttgaaatagcaaagcattacgcagaaaactatccgcacgttcgtttgttgcatcaggcgaatgctggcgcatcggtggcgcgtaatcgtgggattgaagtggcaacgggaaaatatgtcgcttttgtcgatgctgacgatgaggtgtatcccaccatgtacgaaacgctgatgaccatggcgttagaggacgacctcgacgtggcgcagtgcaacgctgattggtgttttcgtgaaacgggtgaaacctggcaatccatccctaccgatcgccttcgctcaaccggtgtattaactggtccggactggctgcggatgggactttcttcccgccgttggacacacgtggtctggatgggggtttatcgccgcgatgttattgttaaaaataacattaaatttattgccggattacatcatcaggatattgtctggacaacagaatttatgtttaacgcgctgcgtgcgcgatataccgagcaatcattatataaatattatctgcataatacgtcagtgagtcggttgaacagacaagggaataaaaaccttaattatcaacgtcactatattaagattacccgcctgctggagaaattaaatcgaaattatgctgacaaaattacgatttatccggaatttcatcagcaaataacctacgaagcattgcgtgtttgccatgcggtgcgcaaagagccggatattattacccgccaacggatgattgctgagatatttacttccggtatgtataagcgcctgattaccaatgtgcgcagcgtgaaggtgggttaccaggcgttactgtggtctttccgcttatggcaatggcgcgacaaaacgcggtcgcaccatcgcattacgcgtagcgcctttaatttgcgctag

SEQ ID NO: 1729 - DNA, 1026 bp, Escherichia coli
atgaaagcgttatccaaactgaaagcggaagagggcatctggatgaccgacgttcctgtaccggaactcgggcataacgatctgctgattaaaatccgtaaaacagccatctgcgggactgacgttcacatctataactgggatgagtggtcgcaaaaaaccatcccggtgccgatggtcgtgggccatgaatatgtcggtgaagtggtaggtattggtcaggaagtgaaaggcttcaagattggcgatcgcgtttctggcgaaggccatatcacctgcggtcactgtcgcaactgtcgtggcggtcgtacccatctgtgccgcaacacgatcggcgtcggtgttaaccgtccgggctgcttcgccgagtatctggtgattccggcgttcaacgccttcaaaatcccggacaatatctccgacgacctggcttccatttttgatcccttcggtaacgccgtgcataccgcgctgtcgttcgatctggttggcgaggatgtgctggtctctggtgcaggtccgataggtattatggctgcggcggtggcgaaacacgttggtgcacgcaatgtggtgatcactgatgttaacgaataccgccttgagctggcacgcaaaatgggtatcacccgtgcggttaacgtcgctaaagaaaaccttaatgatgtgatggcagaactgggcatgaccgaaggctttgatgtcggtctggaaatgtccggtgcgccgccagcgtttcgtaccatgctcgacaccatgaaccacggcggtcgtattgcgatgctgggtattccaccgtccgatatgtctatcgactggaccaaagtaatctttaaaggcttgttcattaaaggtatttacggtcgtgagatgtttgaaacctggtacaagatggcggcgctgattcagtctggcctcgatctctcgccgatcattacccatcgtttctctatcgatgatttccagaagggctttgatgccatgcgttcgggccagtccgggaaagttattctgagctgggattaa

SEQ ID NO: 1730 - DNA, 1197 bp, Escherichia coli
atgcgtggagaattttatcagcagttaaccaacgatctggaaaccgcacgggcggaagggttgtttaaagaagagcgcattattacgtctgcgcagcaagcagatatcactgtggctgatggaagccacgtcattaacttttgtgccaacaactatctcggactggcgaatcatccggatctgattgcggcggcaaaggcgggaatggattctcacggtttcggcatggcttcggtgcgttttatttgcggcactcaggacagccataaagagcttgaacaaaaactggcggccttcctggggatggaagatgcgattctctactcttcctgctttgatgctaacggcggcctgtttgaaacgctgctgagcgcggaggacgccattatctccgacgcactgaaccacgcgtctattattgatggtgtgcgtctgtgtaaagccaaacgctatcgttatgccaacaacgatatgcaggagctggaagcacgtctgaaagaagcgcgtgaagccggtgcgcgtcatgtgctgattgccaccgatggtgtgttctcgatggacggcgtgattgccaacctgaagggcgtttgcgatctggcagataaatacgatgccctggtgatggtagacgactcccacgcggtcggttttgtcggtgaaaatggtcgtggttcccatgaatactgcgatgtgatgggacgtgtagacatcattaccggtacgttgggtaaagcgttgggcggggcttctggtggttataccgcggcgcgcaaagaagtggttgagtggctgcgccagcgttctcgtccgtacctgttctccaactcgctggcaccagcgattgtcgccgcatccatcaaagtgctggagatggtcgaagcgggtagcgagctgcgtgaccgtctgtgggcgaacgcgcgtcagttccgtgagcaaatgtcggcggcgggctttaccctggcgggagccgatcacgccattattccggtcatgcttggtgatgcggtagtggcgcagaaatttgcccgtgagctgcaaaaagagggcatttacgtcaccggtttcttctatccggtcgttcctaaaggtcaggcgcgtattcgtacccagatgtctgcggcgcatacccctgagcaaattacgcgtgcagtagaagcattcacgcgtattggtaaacaactgggcgttatcgcctga

SEQ ID NO: 1731 - DNA, 933 bp, Escherichia coli
atgatcatcgttaccggcggcgcgggctttatcggcagcaacatcgttaaagccctgaatgacaaaggcatcaccgatattctggtggtggacaacctgaaagacggcaccaagtttgtgaacctggtggatctggatatcgcggactatatggataaggaagacttcctgatccagattatggctggcgaagagttcggcgatgtcgaagcgattttccacgaaggcgcgtgctcttccaccaccgagtgggacggcaaatatatgatggataacaactatcaatactccaaagagctgctgcactactgtctggagcgcgaaatcccgttcctgtatgcctcttccgcagccacttacggtggacgcacctccgactttattgaatcccgcgaatatgaaaaaccgttgaatgtctacggttactcaaaattcctgtttgatgaatatgttcgccaaatcctgcctgaagcgaactcgcagattgttggcttccgttatttcaacgtttatggaccgcgtgaaggccataaaggcagtatggcgagcgtcgctttccatctcaacacccagcttaataacggtgaatcaccgaagctgttcgaaggtagcgagaactttaaacgtgacttcgtctatgtgggcgacgtggcagatgtaaacctgtggttcctggaaaatggcgtttccggcatcttcaacctcggcaccggtcgtgcggaatccttccaggcagtagcagatgctacgcttgcttatcacaagaaaggccaaatcgaatacattccgttcccggataaactgaaaggccgctaccaggcgttcactcaggcagatctgacgaatctgcgcgcggcgggttacgataaaccgttcaaaaccgttgccgaaggcgtaacggaatacatggcctggctgaatcgtgacgcataa

SEQ ID NO: 1732 - DNA, 1047 bp, Escherichia coli
atgaaaatactggtgatcggcccgtcttgggttggcgacatgatgatgtcgcaaagtctctatcgcacgctccaggcgcgctatccccaggcgataatcgacgtgatggcaccggcatggtgccgtccattattatcgcggatgccggaagttaacgaagcgatccctatgcctctcggtcacggagcgctggaaatcggcgaacgccgcaaactgggtcatagtctgcgtgaaaagcgctacgaccgcgcctacgtcttacctaactccttcaaatccgcattagtgcctttcttcgcaggtattcctcatcgcaccggctggcgcggcgagatgcgctacggtttactcaacgatgtacgcgtgctcgataaagaagcctggccgctaatggtggaacgctatgtcgcgctggcctatgacaaaggtattatgcgtaccgcacaagatctgccgcagccattgttatggccgcagttgcaggtgagcgaaggtgaaaaatcatatacctgtaatcaattttcgctttcatcagaacgtccgatgattggtttttgcccgggtgcggagtttggtccggcaaaacgctggccacactaccactatgcggagctggcaaagcagctgattgatgaaggttatcaggtggttctgtttggctcggcgaaagatcatgcggcgggcaatgagattcttgccgctttgaatacagagcagcaggcatggtgtcggaatctggcgggagaaacacagcttgatcaagcggttatcctgattgcagcctgtaaagccattgttactaacgattctggtctgatgcacgttgcggcggcgctcaatcgtccgctggttgccctgtatggaccaagcagcccggacttcacaccaccgctatcccataaagcacgcgtgatccgcctgattaccggatatcacaaagtgcgtaaaggtgacgctgcggagggttatcaccagagcttgatcgacattactccccagcgcgtactggaagaactcaacgcgctattgttacaagaggaagcctga

SEQ ID NO: 1733 - DNA, 981 bp, Escherichia coli
atgcgggttctgatcgttaaaacatcgtcgatgggcgatgttctccacacgctgcccgcactcactgatgcccagcaggcaatcccagggattaagtttgactgggtggtggaagaagggttcgcacagattccttcctggcacgctgccgttgagcgagttattcctgtggcaatacgtcgctggcgtaaagcctggttctcggctcccataaaagctgaacgcaaagcgtttcgtgaagcgctacaagcaaagaactatgacgcagttatcgacgcccaggggctggtaaaaagcgcggcgctggtgacgcgtctggcgcatggcgtaaagcatggaatggactggcaaaccgctcgcgaaccgttagccagcctgttttacaatcgtaaacatcatattgcaaaacagcagcacgccgtagaacgcacccgcgaactgtttgccaaaagtctgggctatagcaaaccacaaacccagggcgattatgctatcgcacagcatttcctgacgaacctgcctacagatgctggcgaatatgccgtatttcttcatgcaacaacccgagatgataaacactggccggaagaacactggcgagaattgattggtttactggctgattcaggaatacggattaaacttccgtggggcgcgccgcatgaggaagaacgggcgaaacgactggcggaaggatttgcttatgttgaagtattgccgaagatgagtctggaaggcgttgcccgcgtactggccggggctaaatttgtagtgtcggtggatacggggttaagccatttaacggcggcactggatagacccaatatcacggtttatggacctaccgatccgggattaattggtgggtatgggaagaatcagatggtttgtagggctccggggaatgagttgtctcaattgacagcaaatgctgttaagcaattcattgaagaaaacgctgaaaaagctgccatgatttaa

SEQ ID NO: 1734 - DNA, 1254 bp, Escherichia coli
atgtcgttttgttggaatgaaattaactctggtgtcaagtctttaattctcatattatgtatgttgtctttaatgactttgtctttgtgggatgatgttgcaacaaagtttcttcatgcagctggaattatatctgcattatattttctagcgacaccaaaaaaaacaataactaataatcctactttgttaattttcatctcattatgtcttttgggtatcgttaatatcatctggtattcacattataaagtttcaggctcggtttataccaatgcatatcgtggcccaatggaaactggaaaaattgccttgtgtagtgcttttattttcttagttctttttgctaaagatgagatgagaaccaaaataaaatttgggaaactaattctgttcgcatccttggcaacgcagttacttttttttgcgcatgccatgtggcaacatttctatttaaacgtcgaccgtgttgcattatcagcttcccacgctacaacagcaggctacatcatccttttcccttctttactggcatcaattctcattttaaaatccgactttagacataaaacaacattatatacaattaacttcatgcttagcttatgtgctgttatagtaactgaaacgcgtgcagccatattagtgtttccattctttgcgttactattaatcgtaatggatagttatattaataagcgaattaattataagttatattgttttattgcgattgcattattagcaggtgtattttcttttaaagatacattacttacgagaatgaatgacttaaatagggatttagttaattattcgcatgataacaccagaacttcagtcggtgcccgtctggcaatgtatgaagttggtttaaaaacatattctccaataggacaatcactggaaaaacgtgcggaaaaaatacatgaactagaagagaaagagcctagattaagtggtgctttaccctttgtagattctcatttgcataacgatctcatagatacgttatcaacgcgtggtattcctggagtagcattaacaattttagccttctcagcaatattcatatatgccttaagaactgctaaagaaccttatattttaatcttgcttttttcactactggtagtaggcctaagtgatgtaatactcttttctaaaccggttccgactgctgtgtttgtcaccataatattgctttgtgcttattttaaagtacaatcggaccaatgtttattagataagtaa

SEQ ID NO: 1735 - DNA, 984 bp, Escherichia coli
atgagcaatgattaccctttagtatccataataataccgacgtataattcatctgattacattactgaaactctaacgaaattagaaaaacaaacttacccaaattttgaaattgttattgttaatgatggttctaaagataacacatcaagtgttttgagagaatatgggttaacccactctcgattaattattatcaataaagaaaatggcggtgtttcgtctgccaggaatacaggtatccgcaaggcgcaaggacagtttatatgttttatggatgatgatgatgagatagatcctaactatctgctgaagatgtattccagacaacatgagacgggaggggatgcgatttattgtgggctttatggccatcatataaaaaatggtgttacttactcacctataaatacagattttaatgaagggtctttacttttcgattttttttataaaaaggtcagattccatataggatgcttgtttataagaaaacaactcctggaagataataatcttttttttgatgaagatttacgactaggagaagatctggattttatctatcgactgctaattacatgcgatatgtatgcggttccatattatatgtataagcataactatagagaaaattccttaatgaactcatgtagaaccatcactcattatcgacatgagtcatttgcgcacgaaagaatctactcttctgtgatgcagttatacaaaggtaaccggaaagaagaaattcatacattattgagtaaaaatagaacttatcataaaactcgttatttatggaatgttctacttaatggcgattttgaattattaaatcaattagttgaaagcaatgaaaaagaattgaaagattgtaatcttcttggcaagagagataagaggcgagcaaagatattagcatcaaaaaactatattctctggaggatggtaagactggtaaatagaaaaaagaataaacgttag

SEQ ID NO: 1736 - DNA, 1029 bp, Escherichia coli
atggatttattagctgagagtattactgaagtcgctgtctctggggaaattgctaacaccgatcgtgtgttaaatatcgcttacggtattgaccgcaactttttatttggtgcggcagtatctatgcaatcagttgttatgcataacccggaccttgcggttaagtttcatctctttactgactacattgatgaagattatctacaacgtgttaatgcttttaccagcaaaaatgctaacgttgaagtaagaatttataaagtatccagtgcttttattgatatcttccccagcctgaaacagtggtcttatgcaacattcttccgtttagttgcgttccagtatctgagtgaaactattgaaaatctgttatatatcgatgctgatgtcatctgtaaaggctcattagctggattgcttgatattaattttgatggcgataagttcgcggctgttattaaagatgtgccttttatgcaggaaaaaccagcgaagcgtctggctatagagggacttccagggaattatttcaacgccggtgtagtatatctgcagcttgaagcatgggcgaaaaatgattttatgaataaagccattgctatgctggcaagtgacccgcagcacacgaaatataaatgccttgatcaggatattttaaatattctgttctttagtcattgtatttttattagcggcgattatgattgcttttatggcattgactatgagttaaaaaataaaagcgatgaagattataaaaagaccattaccgatgatactaagctgattcattatgttggcgtaacgaagccctggaacgactggacgaattatccctgccagaagtattttaatgaggcttatcaggtttcttgctggaatgatgtggcgtttattccagccacgaatgaaaagcagtatcaagtgaaataccaacatgcaaagaaaaatggtgatacgtttaacgcttttatttacttcattaaattcaaattaaataagtataaaagaaaactatttgggcaataa

SEQ ID NO: 1737 - DNA, 693 bp, Escherichia coli
atgattacaagtatacgctatcgcggcttctcattttattacaaagataacgataataaatataaagaaatctttgatgaaatactggcctataattttaaaacagtaaaagtattacgtaatattgatgataccaaagtatcgttgattgatacgaaatatggtcgctatgtttttaaagtctttgccccgaaaacgaaaaggaatgaacgttttttaaaatcttttgtaaaaggtgactactatcagaatttgatcgttgaaaccgatcgtgtcagaagtgcaggtcttacttttcctaatgatttttattttctggctgagcgtaaaattttcaactatgccagtgtttttatcatgcttatcgagtatgtcgagggcgtagagctcaatgatatgccgattattccagaagatgttaaagcagaaattaaggcttcaatggaaaaattgcatgccttaaatatgctatcgggcgacccacaccggggtaactttatcgttagtaaagatggtgtcaggataattgacctatccggtaaaagctgtacggcagagcggaaagcccgtgatcgtctggccatggaacgtcacctgggtattgccaacgaaataaaagattatggctactattcagtaatctacagaaccaaactacgcaaatttattaaaaaattaaaaggcaaagcgtaa

SEQ ID NO: 1738 - DNA, 996 bp, Escherichia coli
atgaatgaatttataaaagaacggttttcgtatttagcagataataaaaaagaaaacgtcccagagctaaatgtttcctacggtatcgataagaattttttgtatggtgctggcgtttcaatttcttccgttttgattaataattcagatattaattttatctttcatgttttcactgattatgtggatgatgattatttaaagtcatttaatgaaacagcaaaacaatttaatacctcaattattgtatatttaattgacccaaaatactttgctgatctgccgacgtcacagttttggtcgtacgcgacatacttcagggtattgtcctttgaatatcttagtgaaagtatttccacactgctgtatctggatgccgatgtcgtttgtaaaggaagtctgaaacctctcacaaaaattatatttaaagatgagtttgctgcggttattcctgacaatgatagtactcaggcggcatgtgcaaaacgtcttaacattcccgaaatgaatggacgttatttcaatgcaggcgttatctatgtcaatcttaaaaaatggcatgaagcaaatttgacaccgtatttactcacgcttttacgaggggaaactaaatatggctctcttaaatatttagatcaggatgcgttgaatatcgcatttaatatgaataatatctacctcgcgaaggattttgatactatttataccctgaaaaacgaacttcatgatcgtagtcatcgaaagtatcagcaaaccattaccgataaaacagtattgattcactatacagggataactaaaccatggcatagctgggctggatatccgtctgcatcatactttaatatcgcgcgtgaacaatctccctggaagaaatatcctcttaaagaggcgcggactgttgcagaaatgcagaaacaatataagcatctgtttgcccatggtgagtatattaaaggtataacttcattaattaagtacaagcttaagaaataa

SEQ ID NO: 1739 - DNA, 1017 bp, Escherichia coli
atgagtgcccactattttaatccacaagagatgatcaataagacaatcatcttcgatgaaaggccagcggcgtcagtggcatcatcattccatgttgcttatggcattgatcagaactttctttttggttgtggtgtttcaatcacgtcagttttgttacataacaacgacgtgagttttgtcttccacgtttttattgatgatatccctgacgccgatatccagcgtttatcccaattggcgaaaagctatcatacctgtatccagatccatctggtaaattgtgaacggcttaaggtattaccgacgaccaaaaattggtctattgccatgtatttccgttttgtaattgcagattactttattgatcaacaagataagatcctgtacctggatgctgatatcgcctgtcagggaaccttaaaaccgctgataacaatggatcttgccaataacgttgctgctgttgttactgaacgcgatgctaactggtggtcgttacgggctcaaagtctgcagtgtaatgaacttgaaaagggttactttaattcaggtgtcctgttaattaatacactagcgtgggcgcaggagtccgtttctgctaaagcgatgtcgatgcttgctgataaagccgtcgtttcccgtttaacctatatggatcaagatatactaaatcttatcctgttagggaaagttaaattcattgatgctaaatacaatacgcaatttagtttaaattatgaattaaaaaaatcatttatttgtccaattaatgatgaaaccgtattaattcattatgtcggcccgacaaaaccctggcattactgggccggttatccaagcgcgcagccatttatcaaagccaaagaagcatcgccctggaaaaatgaaccgttaatgcggccaatgaactcaaattatgctcgttattgcgctaagcataattttaaacaaaataaaccaattaacgggataatgaattatatttattatttttatttaaagataataaaatga

SEQ ID NO: 1740 - DNA, 798 bp, Escherichia coli
atggttgaacttaaagagccgtttgccacgttatggcgcggtaaagatccttttgaggaagttaaaaccttgcagggtgaggtatttcgtgaactggaaactcgccgcactctgcgctttgaaatggcgggcaaaagctattttctcaaatggcatcgcggcacgaccctgaaagagataatcaaaaatttactctcattgcggatgccagtattaggcgcagaccgcgaatggaatgcgattcatcgactgcgggatgtcggcgttgatactatgtatggggtggcattcggcgaaaaaggcattaatccgctgaccagaacctcgtttattattaccgaagatctgacaccaaccatcagtctggaagattactgtgctgactgggcgaccaacccaccagatgttcgcgtaaagcgtatgcttattaagcgtgtcgcgacgatggtgcgcgatatgcatgctgcgggcattaaccaccgtgactgttatatctgtcatttcctgctgcacttgcctttttccggtaaggaagaggtgttaaaaatttcagtaattgacctgcaccgggcgcagatacgtgcaaaagtaccgcgtcgttggcgggataaagatcttattggactttatttttcttcgatgaatattggcctgactcagcgggatatctggcggttcatgaaggtgtatttttctgccccgcttaaagacattctcaagcaggaacaagggctgctgtcgcaagcagaagaaaaagccacaaaaatcagggaaagaacgattcgaaaatcgttgtaa

SEQ ID NO: 1741 - DNA, 1125 bp, Escherichia coli
atgatcgttgctttttgtttatataaatattttccctttggcggtttgcagcgcgattttatgcgtattgctcagacagtcgccgcccgaggtcatcatgttcgggtttatacccagtcgtgggaaggcgaatgccctgatgtatttgaactgatcaaagtgccggttaaatcgcataccaatcacgggcgcaatgcggaatattttgcctgggtgcaaaaacatttacgtgaacaccccgtcgatagagtcgttggattcaacaaaatgccggggctggacgtttattatgccgctgatgtttgttatgccgagaaagtagcgcaggagaaaggctttttctatcgcctgacgtcacgttatcgccattatgccgcctttgagcgggcaaccttcgaacagggcaagccgacacagctgctgatgctgacagataagcaaatcgccgatttccagaaacattatcagactgaagcggagcgttttcatattctgccaccggggatttatcctgatcgtaaatatagccagcagccagccaatagccgtgaaatcttccgtaagaagaatggaataaccgaacaacaatatttattgttgcaggtcggttcagacttcacgcgtaaaggtgtcgatcgttccattgaagcacttgcttcgttaccggattcgctgcgccacaacacattactatatgttgttgggcaggataaaccgcgaaaatttgaggcgctggcagaaaaacgcggcgtgcgcagtaatgttcacttcttctcggggcgcaacgatgtctcggaattaatggcggcggcggatttattacttcatcctgcctaccaggaagccgcaggaattgtactgctggaagcgataactgcaggattaccggtactaacaacagccgtttgtggctatgcgcattatattgtcgatgccaattgcggcgaggctattgctgagccattccgccaggaaacattgaatgagattttacgcaaagcgttaacgcaatcttcattgcgccaggcctgggcggaaaatgcgcgacattatgctgatacacaagatttatacagtctgccagagaaagcggcggacatcataacgggtggtctggatggttga

SEQ ID NO: 1742 - DNA, 1059 bp, Escherichia coli
gtggataagccatttcgaagaattttgctcattaagatgcgttttcatggggatatgttattaactactcccgtcattagttcgctgaaaaaaaattaccctgacgcaaaaatcgatgtgctgctttatcaggacaccatcccgatcctgtctgaaaatccagagattaacgcgctctacggcataaaaaataaaaaagcaaaagcttcagaaaaaattaccaacttttttcatctcatcaaggtattacgtgccaataagtatgaccttatcgttaatcttaccgatcaatggatggttgctatactggttcgcttattaaatgcccgtgtgaaaatttcccaggattatcatcatcggcagtctgctttttggcgtaatagtttcactcatttggtgccgttgcagggtggaaatgtggtggaaagtaacttatccgtgctgacgccattgggacttgaatcgttggtgaagcagacaaccatgagttacccgcctgcaagctggaaacgtatgcgtcgcgaacttgatcacgctggtgttggacaaaattatgtggttatccaacctacggcgcggcaaatcttcaaatgctgggacaacgccaagttttccgctgtgattgatgccttacatgctcgtggttatgaagtcgttctgacgtccggcccagataaagacgatctggcctgcgtcaatgaaattgcgcagggatgccagacgccaccagtaacggcgctggccggaaaggtgacctttccggaacttggtgcgttaatcgatcatgcgcagctgtttattggcgttgattccgcaccggcgcatattgccgctgcagttaatacgccgctgatatcgctgtttggtgcgacagaccatattttctggcgtccctggtcaaataacatgattcaattctgggcgggagattaccgggaaatgccaacgcgcgatcagcgtgaccgaaatgagatgtatctttcggttattccggcggcagatgtcattgcagctgtcgataaattacttccctcctccacgacaggtacgtcgttatga

SEQ ID NO: 1743 - DNA, 1278 bp, Escherichia coli
atgctcgaattgctttacaccgcccttctctaccttattcagccgctgatctggatacggctctgggtgcgcggacgtaaggctccggcctatcgaaaacgctggggtgaacgttacggtttttaccgccatccgctaaaaccaggcggcattatgctgcactccgtctccgtcggtgaaactctggcggcgatcccgttggtgcgcgcactgcgtcatcgttatcctgatttaccgattaccgtaacaaccatgactccaaccggttcggagcgcgtacaatcggctttcgggaaggatgttcagcacgtttatctgccgtatgacctgcccgatgcactcaaccgtttcctgaataaagtcgaccctaaactggtgttgattatggaaaccgaactatggcctaacctgattgcggcgctacataaacgtaaaattccgctggtgatcgctaacgcgcgactctctgcccgctcggccgcaggttatgccaaactgggtaaattcgtccgtcgcttgctgcgtcgtattacgctgattgccgcccaaaatgaagaagatggtgctcgttttgtggcgttgggcgcaaaaaataatcaggtgaccgttaccggtagcctgaaattcgatatttctgtaacgccgcagttggctgctaaagccgtgacgctgcgccgccaatgggcaccacaccgcccggtatggattgccaccagcactcatgaaggcgaagagagtgtggtgatcgccgcacatcaggcattgttacagcaattcccgaatttattgctcatcctggtaccccgtcatccagaacgcttcccggatgcgattaaccttgtccgccaggctggactaagctatatcacacgatcttcaggggaagtcccctccaccagcacgcaggttgtggttggcgatacgatgggcgagttgatgttactgtacggcattgccgatctcgcctttgttggcggttcactggttgaacgtggtgggcataatccgctggaagcggccgcacacgctattccggtattgatggggccgcatacgtttaactttaaagacatttgcgcgcggctggagcaggcaagcgggctgattaccgttaccgatgccactacgcttgcaaaagaggtttcctctttactcaccgacgccgattaccgtagtttctatggccgtcatgccgttgaagtgctgtatcaaaaccagggcgcactacagcgtctgcttcaactgctggaaccttacctgccaccgaaaacgcattga

SEQ ID NO: 1744 - DNA, 480 bp, Escherichia coli
atgcaaaaacgggcgatttatccgggtactttcgatcccattaccaatggtcatatcgatatcgtgacgcgcgccacgcaaatgttcgatcacgttattctggcgattgccgccagccccagtaaaaaaccgatgtttaccctggaagagcgtgtggagctggcacagcaggcaaccgcgcatctggggaacgtggaagtggtcgggtttagtgatttgatggcgaacttcgcccgtaatcaacacgctacggtgctgattcgtggcctgcgtgcggtggcggattttgaatatgaaatgcagctggcgcatatgaatcgccacttaatgccggaactggaaagtgtgtttcttatgccgtcgaaagagtggtcgtttatctcttcatcgttggtgaaagaggtggcgcgccatcagggcgatgtcacccatttcctgccggagaatgtccatcaggcgctgatggcgaagttagcgtag

SEQ ID NO: 1745 - DNA, 810 bp, Escherichia coli
atgcctgaattacccgaagttgaaaccagccgccgcggcatagaaccgcatctcgttggtgcaaccattcttcatgcggtggtgcgcaacggacgcttgcgctggccggtttcagaagagatctaccgtttaagcgaccaaccagtgcttagcgtgcagcggcgggctaaatatctgctgctggagctgcctgagggctggattatcattcatttggggatgtctggcagcctgcgcatccttccagaagaacttccccctgaaaagcatgaccatgttgatttggtgatgagcaacggtaaagtgctgcgctacaccgatccgcgccgctttggtgcctggctgtggaccaaagagctggaagggcacaacgtgctggcccatcttggaccggagccgcttagcgacgatttcaacggtgagtacctgcatcagaagtgcgagaagaaaaaaacggcgattaaaccatggctgatggataacaagctggtggtaggcgtagggaatatctatgccagcgaatctctgtttgctgcggggatccatccggatcggctggcgtcatcactgtcgctggcagagtgtgaattgttagctcgggtgattaaagcggtgttgctgcgttcgattgagcagggtggtacaactctgaaagattttctgcaaagtgatggtaaaccgggctatttcgcgcaggaattgcaggtttacgggcgaaaaggcgagccgtgtcgggtgtgcggtacgccgattgtggcgactaaacatgcgcagcgggcaacgttttattgtcggcagtgccagaagtaa

SEQ ID NO: 1746 - DNA, 168 bp, Escherichia coli
atggctaaaggtattcgtgagaaaatcaagctggtttcttctgctggtactggtcacttctataccactacgaagaacaaacgtactaagccggaaaaactggaactgaaaaaattcgatccagttgttcgccagcacgtgatctacaaagaagcgaaaatcaaataa

SEQ ID NO: 1747 - DNA, 237 bp, Escherichia coli
atgtcccgagtctgccaagttactggcaagcgtccggtgaccggtaacaaccgttcccacgcactgaacgcgactaaacgccgtttcctgccgaacctgcactctcaccgtttctgggttgagagcgagaagcgttttgtcaccctgcgcgtatctgctaaaggtatgcgtgtaatcgataaaaaaggcatcgatacagttctggctgaactgcgtgcccgtggcgaaaagtactaa

SEQ ID NO: 1748 - DNA, 669 bp, Escherichia coli
gtgaaaaacaatgcacagctgttgatgccgcgcgaaaaaatgctgaagtttggtattagcgccttaacggatgtcgagctgctggcgctatttctgcgtaccggaacgcgcggtaaagatgtattaaccctggcaaaagagatgctggagaatttcggctctctttatggcttgttaacctctgaatatgagcaatttagtggcgttcatggaattggcgtggcgaaattcgcccagttaaaggggattgccgaactggcgcggcgttactacaacgtacggatgcgtgaagaaagccctttactcagcccggagatgacgagggaatttttacaaagccagctcacgggcgaggagcgggagatctttatggtgatctttctcgactcccaacacagggttataacgcatagccgtcttttttccggcacgctaaaccatgttgaagtccatcctcgggaaattatccgcgaagcgataaaaataaacgcctcggcgctgatccttgcgcataatcacccttcgggttgtgctgaacccagtaaagcggataaactcattactgaacggataataaagagttgtcagttcatggatttacgcgtgctcgaccatatcgtgattgggcgtggagagtatgtttcttttgccgaacgcggctggatttaa

SEQ ID NO: 1749 - DNA, 1221 bp, Escherichia coli
atgagcctggccggtaaaaaaatcgttctcggcgttagcggcggtattgctgcctataaaacccctgaactggtgcgtcgtttgcgcgatcgcggggccgatgtccgcgtagccatgaccgaagcggcaaaagcctttatcaccccacttagcttgcaggcggtttctggttatcccgtttccgacagtctgctggacccggcagccgaagccgctatgggccatattgagctgggtaaatgggctgatttagtgattctcgcccctgccacggcagatttaattgcccgtgttgctgccggaatggcgaatgacctggtatcgacgatttgtctggctacacctgcgcctgtagccgtgctccccgccatgaaccagcagatgtaccgtgccgctgccacgcagcataatttagaggtgcttgcctcacgtggtttgctcatctgggggccagacagcggcagtcaggcttgtggtgatatcggcccaggacgaatgctcgatccgttaactattgtggatatggcggtagcgcatttttcgcccgtcaacgacctgaaacatctgaacattatgattaccgccggtccgacgcgtgaaccgctcgatcccgtgcgttatatctctaatcacagctccggcaagatgggttttgctatcgccgccgccgcagcccgtcgtggcgcgaacgtcacgctggtatcaggtccggtttcactaccgacgccaccgtttgttaaccgtgttgatgtgatgaccgcgctggaaatggaagccgccgtgaatgcttctgtacagcagcaaaatatttttatcggttgcgccgccgtggcggattatcgcgcagctaccgtggccccagaaaaaatcaaaaagcaggccacgcagggtgatgaattaacaataaaaatggttaaaaaccccgatatcgtcgcaggcgttgccgcactaaaagaccatcgaccctacgtcgttggatttgccgccgaaacaaataatgtggaagaatacgcccggcaaaaacgtatccgtaaaaaccttgatctgatctgcgcgaacgatgtttcccagccaactcaaggatttaacagcgacaacaacgcattacaccttttctggcaggacggagataaagtcttaccgcttgagcgcaaagagctccttggccaattattactcgacgagatcgtgacccgttatgatgaaaaaaatcgacgttaa

SEQ ID NO: 1750 - DNA, 459 bp, Escherichia coli
atgatgaaaaaaatcgacgttaagattctggacccgcgcgttgggaaggaatttccgctcccgacttatgccacctctggctctgccggacttgacctgcgtgcctgtctcgacgacgccgtagaactggctccgggtgacactacgctggttccgaccgggctggcgattcatattgccgatccttcactggcggcaatgatgctgccgcgctccggattgggacataagcacggtatcgtgcttggtaacctggtaggattgatcgattctgactatcagggccagttgatgatttccgtgtggaaccgtggtcaggacagcttcaccattcaacctggcgaacgcatcgcccagatgatttttgttccggtagtacaggctgaatttaatctggtggaagatttcgacgccaccgaccgcggtgaaggcggctttggtcactctggtcgtcagtaa

SEQ ID NO: 1751 - DNA, 597 bp, Escherichia coli
atggcagaaaaacaaactgcgaaaaggaaccgtcgcgaggaaatacttcagtctctggcgctgatgctggaatccagcgatggaagccaacgtatcacgacggcaaaactggccgcctctgtcggcgtttccgaagcggcactgtatcgccacttccccagtaagacccgcatgttcgatagcctgattgagtttatcgaagatagcctgattactcgcatcaatctgattctgaaagatgagaaagacaccacagcgcgcctgcgtctgatcgtgttgttgctcctcggttttggtgagcgtaatcctggcctgactcgcatcctcactggtcatgcgctaatgttcgaacaggatcgtctgcaagggcgcatcaaccagctgttcgagcgtattgaagcgcagttgcgtcaggtattgcgtgaaaagagaatgcgtgagggtgaaggttacaccaccgatgaaaccctgctggcaagccagttgctggcattttgtgaaggtatgctgtcacgatttgtccgcagcgagtttaaataccgcccgacggatgattttgacgcccgctggccgctaattgccgcacagttgcagtaa

SEQ ID NO: 1752 - DNA, 642 bp, Escherichia coli
atgaaaccatatcagcgccagtttattgaatttgcgcttagcaagcaggtgttaaagtttggcgagttcacgctgaaatccgggcgcaaaagcccctatttcttcaacgccgggctgtttaataccgggcgcgatctggcactgttaggccgtttttacgctgaagcattggtggattccggcattgagttcgatctgctgtttggccctgcttacaaagggatcccgattgccaccactaccgccgtggcgctggcggagcatcatgaccttgacctgccgtactgctttaaccgcaaagaggcaaaagaccacggtgaaggcggtaatctggttggtagcgcgttacaaggacgcgtaatgctggtagatgatgtgatcaccgcaggaacggcgattcgcgagtcgatggagattattcaggctaatggcgcgacgcttgcaggcgtgttgatttcgcttgatcgtcaggaacgcgggcgcggcgaaatttcggcgattcaggaagttgagcgtgattacaactgcaaggtgatctctatcatcaccctgaaagacctgattgcttacctggaagagaagccagaaatggcggaacatctggcggcggttaaggcctatcgcgaagagtttggcgtttaa

SEQ ID NO: 1753 - DNA, 717 bp, Escherichia coli
atgcgtccagcaggccgtagcaataatcaggtgcgtcccgttaccctgactcgtaactatacaaaacatgcagaaggctcggtgctggtcgaatttggcgataccaaagtattgtgtaccgcctctattgaagaaggcgtgccgcgcttcctgaaaggtcagggccagggttggatcaccgcagagtacggtatgctgccacgttctacccatacccgtaacgcgcgtgaagcggcgaaaggtaagcagggtggacgcacaatggaaatccagcgtctgatcgcccgtgctcttcgcgcggcagtagatttgaaagcactgggtgagttcaccattacgctggactgcgacgtgcttcaggctgatggtggcacgcgtaccgcttcgattacgggtgcctgcgtggcgctggcagatgcgctacagaagctggtggaaaacggcaagctgaaaactaatccaatgaaagggatggtagccgcggtctctgtcgggattgtgaacggtgaagcggtttgcgatctggaatatgttgaagactctgccgcagagaccgacatgaacgtagtgatgaccgaagacgggcgtatcattgaagtgcaggggacggcagaaggcgaaccgttcacccacgaagagttactcaccttgttggcgctggcccgagggggaatcgaatccattgtagcgacgcagaaggcggcgctggcaaactga

SEQ ID NO: 1754 - DNA, 864 bp, Escherichia coli
atgatccgcagtatgaccgcctacgcccggcgtgaaatcaagggtgaatgggggagcgcaacttgggaaatgcgctcggtaaaccagcgttatctggaaacttactttcgtctgccggagcagttccgtagccttgaacctgtcgttcgcgagcgtattcgttctcgcctgacgcgcggtaaagtggaatgtactctgcgctatgagccagatgttagcgcgcaaggtgagctgatcctcaacgaaaaactggctaaacagctggtaactgccgcgaactgggtaaaaatgcagagcgacgaaggagaaatcaacccggttgatattctacgctggccgggcgtgatggcagcccaggagcaagatctcgacgcgattgcagctgaaattctcgcggcgttggatggcaccctggatgactttatcatcgcgcgcgaaaccgaaggtcaggcgctgaaagtgttgattgagcaacgtctggaaggcgtcaccgccgaagtggccaaagtgcgtgcccatatgccggaaatcctgcaatggcagcgtgagcgtctggtagcgaagctggaagatgctcaggtgcaactggaaaacaaccgtctggagcaggagttggttctgctggcacaacgaattgacgttgccgaagaactggaccgcctcgaagcgcatgtcaaagagacctacaacattctgaagaaaaaagaagccgttggtcgtcgtctggactttatgatgcaggagttcaaccgcgagtcgaacactcttgcgtcgaaatctatcaacgccgaagtgacaaactccgccatcgagctgaaagtgttgattgagcagatgcgcgagcagatccagaacattgaataa

SEQ ID NO: 1755 - DNA, 825 bp, Escherichia coli
atgaacgaacatcatcaaccttttgaagaaatacggcattatggcactgaagggcaagaattttggtcagcgagagaattggcaccgttactggattatcgggactggcgcaattttcaaaaggtactggcccgcgcgactcaagcgtgcgaagccagcaatcaagctgcatctgaccatttcgttgaaaccaccaaaatggttgtattaggttcaggggctcaacgagaacttgaagatgttcatctctcccgctatgcctgttacctggtagtacaaaacggcgaccctgcgaaaccggttattgcggcagggcaaacttattttgctatccagacccgacggcaggagctggctgacgatgaagctttcaggcaacttcgtgaagacgaaaagcgtctttttctgagaaatgagttgaaagaacataacaaacaattagttgaggcagcgcagcaagctggggtagcgacagctatcgatttcgccatatttcagaatcatggttaccggggactgtatggtggattagatcagaaagccatccatcagcggaaggggctgaaaaagagtcagaagatcctggatcatatgggttcaacagaactggcggctaatctctttcgagctacccaaacagaagaaaaactcaagcgggatggcgtgaattcaaaacagcaagctaataccacacactttgacgtgggtcgcaaggtgaggcaaaccattcaggaacttggcggaaccatgcctgaggagttgccgaccccgcaggtcagcatcaagcagttggaaaacagtgtaaaaattacagagaagaaatag

SEQ ID NO: 1756 - DNA, 618 bp, Escherichia coli
atgctgttacacattttgtatttggttggcattactgccgaagccatgacgggggcgctggcggccggacgacggcgcatggatacatttggcgtaattattattgcgaccgccacggcaattggcggagggtcagtgcgcgatattctgctgggccactatccgctcggctgggtcaaacacccggaatatgtgattatcgtcgctaccgccgcagtactcaccactatcgttgctcctgtaatgccttatctgcgcaaagtgtttctggtgctcgatgcgctcggactggtggtcttttctatcatcggcgcacaggttgcactggatatggggcacggcccaattattgccgttgtcgcggcggtaaccaccggcgtgtttggcggcgttttgcgcgatatgttctgtaaacgcattccactggtattccagaaagagttgtatgccggtgtctcatttgcctccgccgtgctgtacatcgcgctgcaacactatgtttctaaccatgatgttgtgattatctccaccctggtattcggcttttttgcccgtttactggcgctacgtcttaagctgggattaccggtcttttactacagccacgaaggtcactaa

SEQ ID NO: 1757 - DNA, 1683 bp, Escherichia coli
atgaaagtatggatggcgatattaataagtatcttgtgctggcaatcatcggcgtgggcggtctgtccggcctggtcgccagccagagcacaggaagaaatttcccgcctgcaacagcaaataaaacagtgggacgatgactactggaaggaagggaaaagtgaggtggaagacggtgtttacgatcagttaagcgcccgtctcacgcagtggcaacgctgttttgggaacgagactcgcgatgtgatgatgccgcctttaaacggtgcggttatgcatccggttgcccatacgggtgtacgcaaaatggcggataaaaacgcattaagtctgtggatgcgcgaacgtagcgatctttgggtgcagccaaaagttgatggcgttgcggtaaccctggtttatcgggacgggaaactgaacaaagcaatcagtcgcggtaatggcctgaaaggcgaggactggacgcagaaagttcgcttaatttccgctgtgccgcaaaccgttagcgggcctttagccaacagcacgcttcagggggaaatatttctcaagcgtaaggggcatatccaacaacaaatggggggaataaatgcccgcgcaaaagttgctggcctgatgatgcgccaggggaatagcgatacgctaaactcactggctgtttttgtctgggcatggccggatggaccgcatttaatgaccgatcgtttaaaggatctggctaccgcaggttttactttaacgcagacgtatacccgcgcggttaaaaatgctgatgaggttgcgcacgtacgcaatgagtggtggaaagcaaaattacccttcgtcaccgatggcgtggttgtgcgagcggcgaaagaacccgaatcccgtcattggttaccgggccaggcggagtggctggtggcctggaaatatcaacctgtagctcaggttgccgaagtgaaggcgattcagtttgcggtgggtaagagcggtaaaatatcggtggtggcgtcactcgcacctgtcatgctggatgataaaaaagtccagcgggtgaatattggttccgtcaggcgctggcaggagtgggatattgcgcctggtgatcagatcctcgtcagccttgccggtcaggggattcctcgcattgatgatgtggtctggcgcggagcagaacgtacaaaaccgacaccaccagaaaaccgctttaactcgttgacctgctactttgcttctgatgtttgtcaggaacagttcatttcacgcttagtctggctggggtcaaaacaggttctggggcttgatggcattggtgaggccggctggcgcgccctgcatcagactcatcgctttgagcatatcttttcctggcttttattaacgccagagcaattacagaacacgccggggatcgcgaaaagtaaaagtgcgcagttatggcatcagtttaatctggctcgtcagcagccttttactcgctgggtgatggcaatgggaataccgctaacccgggcggcgcttaatgccagtgatgaacggtcctggtcgcaacttttatttagcacggaacagttctggcagcagcagccggggactggatcggggcgcgccagacaggttattgaatggaaggaaaatgtgcaaatcaagaagctgggcagttggctggctgcccagcagatcacaggttttgaaccttag

SEQ ID NO: 1758 - DNA, 624 bp, Escherichia coli
atggctcaaggcacgctttatattgtttctgcccccagtggcgcgggtaaatccagcctgattcaggctttattaaaaacccaaccgttgtatgacacccaggtttctgtttcacacaccacacgccaaccgcgtcctggtgaagtccacggtgaacattatttctttgttaatcatgatgaatttaaagaaatgattagtagagatgcgttcctcgaacacgcagaagtttttggtaattactatggcacttcgcgtgaggccattgagcaagtactggcgaccggtgtcgatgtttttctcgatatcgactggcagggtgcgcagcaaattcgccagaagatgccgcacgcgcggagtatctttattttaccgccgtctaaaatcgaactggaccgccgtctacgcggtcgcggtcaggacagcgaagaggtcattgcaaagcgtatggcgcaagctgttgcagaaatgagccattacgccgaatatgattacctgattgtgaatgatgacttcgataccgcgttgaccgatttgaagaccattattcgcgccgaacgtctgcgcatgagccgccaaaagcagcgtcatgacgctttaatcagcaaattgttggcagactga

SEQ ID NO: 1759 - DNA, 276 bp, Escherichia coli
atggcacgcgtaactgttcaggacgctgtagagaaaattggtaaccgttttgacctggtactggtcgccgcgcgtcgcgctcgtcagatgcaggtaggcggaaaggatccgctggtaccggaagaaaacgataaaaccactgtaatcgcgctgcgcgaaatcgaagaaggtctgatcaacaaccagatcctcgacgttcgcgaacgccaggaacagcaagagcaggaagccgctgaattacaagccgttaccgctattgctgaaggtcgtcgttaa

SEQ ID NO: 1760 - DNA, 2109 bp, Escherichia coli
ttgtatctgtttgaaagcctgaatcagctgattcaaaactacctgccggaagaccaaatcaagcgtctgcggcaggcgtatctcgttgcacgtgatgctcacgaggggcaaacacgttcaagcggtgaaccctatatcacgcacccggtggcggttgcctgcattctggccgagatgaaactcgactatgaaacgctgatggcggcgctgctgcatgatgtgattgaagatacacccgccacctaccaggacatggaacagctttttggtaaaagcgtcgccgagctggtagagggggtgtcgaaacttgataaactcaagttccgcgataagaaagaggcgcaggccgaaaactttcgcaagatgattatggcgatggtgcaggatatccgcgtcattctcatcaaacttgccgaccgtacccacaacatgcgcacgctgggctcacttcgcccggacaaacgtcgccgcatcgcccgtgaaactctcgaaatatacagcccgctggcgcaccgtttaggtatccaccacattaaaaccgaactcgaggagctgggttttgaggcgctgtatcccaaccgttatcgcgtaatcaaagaagtggtgaaagccgcgcgcggcaaccgtaaagagatgatccagaagattctttctgaaatcgaagggcgtttgcaggaagcgggaataccgtgccgcgtcagtggtcgcgaaaagcatctttattcgatttactgcaaaatggtgctcaaagagcagcgttttcactcaatcatggacatctacgctttccgcgtgatcgtcaatgattctgacacctgttatcgcgtgctgggccagatgcacagcctgtacaagccgcgtccgggccgcgtgaaagactatatcgccattccaaaagcgaacggctatcagtctttgcacacctcgatgattggcccgcacggcgtgccggttgaggtccagatccgtaccgaagatatggatcagatggcggagatgggtgttgccgcgcactgggcttataaagagcacggcgaaaccagcactaccgcgcaaatacgcgcccagcgctggatgcaaagcctgctggagctgcaacagagtgccggtagctcgtttgaatttatcgagagcgttaaatccgatctcttcccggatgagatttacgttttcacaccagaagggcgcattgtcgaactgcctgccggtgcaacgcccgtcgacttcgcttatgcggtgcataccgatatcggccatgcctgcgtgggcgcacgcgtcgaccgccagccttacccgctgtcgcagccgcttactagcggtcaaaccgttgaaatcattaccgcaccgggtgctcgcccgaatgccgcgtggctgaactttgtcgtcagctcgaaagcgcgcgccaaaattcgtcagttgctgaaaaacctcaagcgtgatgattctgtaagcctgggccgtcgtctgctcaaccatgcgttgggtggtagccgtaagctcaatgaaatcccgcaggaaaatattcagcgcgagctggaccgcatgaagctggcaacgcttgacgatctgctggcagaaatcggccttggtaacgcaatgagcgtggtggtcgcgaaaaatctgcaacatggggacgcctccattccaccggcaacccaaagtcacggacatctgcccattaaaggtgccgatggcgtgctgatcacctttgcgaaatgctgccgcccaattcctggcgacccgattatcgcccacgtcagccccggtaaaggtctggtgatccaccatgaatcctgccgtaacatccgtggctaccagaaagagccagagaagtttatggctgttgaatgggataaagagacggcgcaggaattcatcaccgaaatcaaggtggagatgttcaatcatcagggcgcgctggcaaacctgacggcggcaattaacaccacgacctcgaatattcaaagtttgaatacggaagagaaagatggtcgcgtctatagcgcctttattcgtctgaccgcccgtgaccgtgtgcatctggcgaatatcatgcgcaaaatccgcgtgatgccagacgtgattaaagtcacccgaaaccgaaattaa

SEQ ID NO: 1761 - DNA, 690 bp, Escherichia coli
atgaacccaacacgttatgcacgcatctgcgaaatgctcgccaggcggcagcctgatctgaccgtctgcatggagcaggtccacaaacctcataacgtttctgcgattattcgtaccgcagatgccgttggcgtacatgaagttcatgctgtctggcctggcagccggatgcgcaccatggcttcggcagctgcgggtagtaacagctgggtacaggtgaaaacgcaccgcaccattagtgatgccgtcgctcatctgaaaggccagggcatgcagattctggcaacccatctttctgataacgctgttgatttccgcgaaattgattacactcgcccgacctgtattttgatgggacaggagaaaacgggcatcacgcaggaagcgttggccctggcggatcaggatatcatcattccgatgatcggcatggtgcagtcgctgaatgtttccgttgcctcagccctcattctttacgaagcccagcgccagcggcaaaatgcgggcatgtacctgcgtgaaaacagcatgttgccggaagccgagcaacaacgcctgctgtttgaaggcggctatccggtgctggcgaaagtcgcaaaacgcaaaggtctgccctacccccacgttaatcagcaaggcgagattgaagccgatgctgactggtggtccaccatgcaggctgcagggtaa

SEQ ID NO: 1762 - DNA, 2082 bp, Escherichia coli
atgaaaggtcgcctgttagatgctgtcccgctcagttccctaacgggcgttggcgcagcgcttagtaacaagctggcgaaaatcaacctgcataccgtgcaggatctactcttacaccttcccctgcgctacgaagatcgcacccatctctaccccatcggagaactactaccgggcgtttatgccacggtggaaggcgaagtgctgaactgcaatatctccttcggcggtcggcggatgatgacctgccagatcagcgacggttccggcattctcactatgcgctttttcaacttcaatgcggcaatgaaaaatagcctggcgacaggccgccgcgtgctggcctatggcgaagcaaagcgcggcaaatatggtgcggagatgatccacccggaataccgtgtgcagggcgatctcagcacgccagagttacaggaaacgctcacaccggtttatccaactacggaaggcgtaaagcaggctacgctgcgtaaattaaccgaccaggcgctggatctgctcgacacatgcgccattgaagaactcctgccgccggaactgtcacaaggaatgatgacgctaccggaagcgttgcgcactttgcaccgcccgccgccgacgctacagcttagcgatctcgaaaccgggcagcatccggcacaacgccggctgattctggaagagttgctggcgcacaacctcagcatgttagccttacgtgccggagcacagcgttttcatgcccagccgctgagcgccaatgacgtgctgaaaaataaactcctcgccgccttaccgttcaagccaacgggcgcacaggtacgcgtagtggcggagatcgagcgcgatatggcgctggatgtgccaatgatgcgcctggtgcagggcgatgtaggttccggtaaaacgctggtcgccgccctcgccgcgttgcgtgcggttgcccacggcaaacaggtggccctgatggcaccaaccgaattactcgccgagcagcacgccaataacttccgtaactggtttgcaccgctcggtatcgaagtaggctggctcgccggaaaacagaaaggtaaagcacgactggctcagcaagaggccatcgccagcggtcaggtgcagatgattgttggtacgcacgccattttccaggaacaggtgcagtttaacggcctggcgctggtgattatcgacgaacagcatcgttttggcgtgcatcagcgtctggcgttatgggagaaaggccagcagcagggcttccacccgcatcagttgatcatgaccgccacgcccatcccccgcacgctggcgatgactgcgtatgccgatctcgatacctcggtgatagatgagctgccgccaggccgcacgccagtgactacggtcgctattcctgatacccgccgtaccgatatcattgaccgcgtgcgccacgcctgtatgactgaagggcgtcaggcgtactgggtttgtacgttgattgaagagtcggaattactggaagcgcaggcggcggaagcgacctgggaagagttgaaactggcgctaccagagttgaatgttggcctggtacacggacggatgaaacccgccgagaaacaggctgtgatgacatcgtttaaacaaggcgagctacacctgctggttgccactactgtcattgaagtcggtgttgatgtacccaatgccagtctgatgattatcgaaaacccggagcgtctgggtctggcgcagttacaccagcttcgcgggcgtgtaggtcgtggcgcggtggcttctcactgcgtgctgctctacaaaacgccgctctccaaaaccgcgcaaatccgcctgcaggtactacgcgacagcaacgatggttttgtgattgcacagaaagatctggagattcgcggccctggcgaattgttaggtacacgtcagacggggaatgctgaatttaaagtggcggatttactgcgcgatcaggcgatgatcccggaagttcagcgcctggcgcgacatattcacgaacgttacccacagcaggcaaaagccctgatagaacgctggatgccagaaacagaacgttactcgaatgcgtaa

SEQ ID NO: 1763 - DNA, 1206 bp, Escherichia coli
atgtttcatctcgatactttagcaacgcttgttgccgcaacgctgacgttgctgctcgggcgcaagttggtccattccgtctcctttttgaagaaatacaccataccggaacctgttgcgggtggtttattagtggcgctggcgctgctgatactgaaaaaaagcatgggctgggaagtcaactttgatatgtccctgcgcgatccgttgatgctggctttcttcgccaccattggcctgaacgccaaccttgccagtctgcgagctggtgggcgtgtggtgggggttttcctgattgtggttgttggcctgttggtgatgcaaaatgccattggcattggtatggctagcctgttagggcttgatccgctgatggggctgctggccggttctattacgctttccggcggtcacggtacgggtgctgcatggagtaaattgttcattgaacgttatggcttcaccaatgcgacagaagtggcgatggcctgtgcaacgttcggtttggtgctgggcggcttgattggcggtccggtggcacgctatctggtgaaacactccaccacaccgaacggtattccggatgaccaggaagttccgactgcgttcgaaaagccggatgtgggccgcatgatcacctcgctggtgctgattgaaactatcgcgctgattgctatctgcctgacggtggggaaaattgttgcgcaacttttggctggtactgcttttgaactaccgaccttcgtctgtgtactatttgttggcgtgattctgagcaacggtctgtcaatgatgggcttttaccgcgtctttgagcgagcggtatccgtgctgggtaacgtaagcctgtcgttgttcctggcgatggcgctgatggggctgaaactgtgggagctggcttcgctggcgttgccgatgctggcgattctggtggtacagaccatcttcatggcgttgtatgccatcttcgttacctggcgcatgatgggcaaaaactacgatgcggcagtgctggctgcgggtcactgtggttttggcctcggtgcaacgccaacagcaatcgccaacatgcaggcgatcactgaacgctttggcccgtcgcacatggcgttcctggtcgtgccgatggtcggtgcgttctttatcgatatcgtcaatgcactggtgattaagctgtatttgatgttgccgatttttgccggttaa

SEQ ID NO: 1764 - DNA, 1392 bp, Escherichia coli
atgtctgtttccaccctcgagtcagaaaatgcgcaaccggttgcgcagactcaaaacagcgaactgatttaccgtcttgaagatcgtccgccgcttcctcaaaccctgtttgccgcctgtcagcatttgctggcgatgttcgttgcggtgatcacgccagcgctattaatctgccaggcgctgggtttaccggcacaagacacgcaacacattattagtatgtcgctgtttgcctccggtgtggcatcgattattcaaattaaggcctggggtccggttggctccgggttgttgtctattcagggcaccagcttcaactttgttgctccgctgattatgggcggcacagcgctgaagaccggtggtgctgatgttcctaccatgatggcggctttattcggcacgttgatgctggcaagttgtaccgagatggtgatctcccgcgttctgcatctggcgcgccgcattattacgccgctggtttctggcgttgtggtgatgattatcggcctgtcgctaattcaggttgggctgacctccattggcggcggttacgcagccatgagcgataacaccttcggcgcaccgaaaaatctgctgctggcaggcgtggtcttagccttaattatcctgcttaaccgtcaacgtaacccttacttacgcgtggcctcactggtgattgcgatggcggccggatatgcgctggcgtggtttatgggcatgttgccagaaagcaacgaaccgatgacgcaagaactgattatggtgccaacgccgctctattacggtcttggcattgaatggagtctgctgctgccgctgatgctggtctttatgatcacttcgctggaaaccattggcgatatcacggcgacctctgacgtttccgagcagccagtgtccggtccgctgtacatgaaacgtctgaaaggcggcgtgctggcaaacggcctgaactcgtttgtctcggcggtatttaataccttcccgaactcctgcttcgggcagaacaacggggtgatccagttaaccggtgttgccagccgctatgtcggttttgtcgtcgcgctgatgttgatcgtgctgggtctgttcccggcagtgagcggttttgtacaacacattccagaaccggttctgggcggcgcaacgcttgtaatgtttggcaccatcgccgcctccggtgtgcgtatcgtttctcgtgagccgctgaaccgccgggcgattctgattatcgcgctgtcgctggcggtcggtctgggcgtgtctcagcagccgctgattttgcagtttgcccctgaatggctgaaaaacctactctcctccgggattgccgcgggcggtattactgccatcgtgctgaatctgattttcccaccagaaaaacagtaa

SEQ ID NO: 1765 - DNA, 1710 bp, Escherichia coli
atgaaatttattgggaagctgcttctctacattctcatcgctctgttagtggtgatcgctggcctctattttcttctgcaaactcgctggggagcagaacatatcagcgcatgggtttccgagaatagcgactatcatctggccttcggggcgatggatcaccgtttttccgcgccatctcatattgtgctggagaacgtcacgtttggccgtgatggccagcccgcgaccctggtggcaaaaagtgtcaacattgcgctaagcagtcggcaactgaccgaaccacgccatgtcgataccatcctgctgaaaaacgggacgctgaatctcaccgaccagaccgcgccgctaccgttcaaagccgatcgtctgcaactgcgtgatatggcgtttaatagcccgaatagcgaatggaaactgagcgcgcagcgggtaaatggcggcgtggttccgtggtcaccagaagccggtaaagtgctgggtacgaaggcgcagattcagtttagtgccggatcgctttcgctcaatgatgttcctgccaccaatgtactgattgaaggcagtattgataacgatcgcgttacgctgactaacctgggtgccgacatcgcccgcgggacattaaccggaaacgcgcagcgtaacgctgacggcagctggcaagtggaaaacctgcgcatggcggatatccgtctacaaagcgaaaaatcgctaaccgacttctttgcaccattacgctctgtcccgtcgttgcagattggtcgcctggaagtcatcgatgctcgtttgcaaggtccggactgggcggtggccgacctcgatctcagcttgcgcaatatgaccttcagtaaagatgactggcagacacaggaaggtaaactgtcgatgaacgccagcgagtttatttatggctcgctgcatttatttgatccgattataaacgcggaattttccccgcagggcgtagcactgcgccagttcaccagccgctgggaagggggtatggtcagaacgtcaggaaactggcaacgcgacgggaaaacgctgatcctcgatgatgcggcaattgccggactggaatataccttgcccaaaaactggcaacagttgtggatggaaacgacacccggttggttaaacagcctgcaactgaagagatttagcgccagccgcaatctgatcattgatatcgaccctgacttcccgtggcaggtcaccgcgctcgatggttacggtgccaatctgacactggttaccgatcataaatggggcgtctggagtggctcggcgaatctgaatgccgccgccgcaacgtttaatcgtgttgatgtccgtcgtccgtcgctggcgctaactgccaacagcagcacggtgaatatcagcgaactgagtgcatttactgaaaaaggcattctggaagccaccgccagtgtttcacaaacgccacaacgtcagacccatatcagcctgaatggacgcggtgtgccggtgaatattttgcaacattggggatggcctgaattaccgttgactggcgacggcaatattcagcttaccgccagtggcgatattcaggtcaatgtcccgctgaaacctacggttagcgggcaattgcatgccgtgaatgccgcaaagcagcaagtgactcaaaccatgaatgcgggcgtagtttccagtggtgaagttacgtcgacggagccggtgcagtaa

SEQ ID NO: 1766 - DNA, 681 bp, Escherichia coli
atgaaacgttcacaaattaattatgttattgataaagcacatgccattgcgcagaccttccgcgtttgtttgccagagttcgcctattttacggtggatgactggctgcagcgggaacgggataactggcaagaagtggtcgacttacagctcggttgggatatcaccgattttggtcgtggtgatttcaaccaaacgggactaacactgctaacgatgcgcaacggcgcgctggggtcggcggcatatccaaaaccgtatgctgagaaaatgttgcagatccaacaagatcagcagactccctggcattttcacacccacaaaatggaagatatcctcaatcggggcggtggagacttatgcatgcagttggcctgggccaacgaagccaatctctgtgatgatcaacgagtcattaccgtgagtgttgatggtcagcggcgtaccatgaaacctggtgaaacgctggtgctaaagccggggcagggcatttgcctgccaccgcgtctgtatcatcgcttctgggcggaaaaagcgtttgttctcggctgggaaatctcgatggtaaatgatgaccaacacgataattattttcttgagccgggaggacgttttcctgcgatagaagaagatgaatcggtgaaatggttattgtgcagtgagtatggaattttgcgctaa

SEQ ID NO: 1767 - DNA, 933 bp, Escherichia coli
atgcactatctggggttggatattggtgggaccaaaatcgccgccgttgtcatggatgcgcatggctgggagattcgccgttaccgctgcccgacgcaaaagtcgacatatcaacaatttgtctcatgcgttgtggcgcttatcgagcagattaggcgggacgttcaacgaccgatgctgacagggatcgccttacccggcagtatctcgccactcactggcctgattaaaaacgcgaatattcaggtgattaacggtcatgcgttacaggctgatttgcagcaattgcttgggcaaccggtggtgatagccaatgatggtaactgtttcgcgctatcagaagcttgcgacggtgccgggcaagattatgacgtggtatttggtattacgcttggtacgggctgcggcggtggcattgccatcaagcaacgaccgtttataggggcctggggaaatgctgccgaatgcggtcatatcacgttgccaggctatacggagcaggaagatggtccatcagtcagttgctattgcggcaaacacaactgcgtggagtcgtttgtttccggcagcggttttagtgaacgctatcaacagatgactggtaacttgctcactcctgcggcgattgtcaccctggcacaacgtggtgatgcttgtgccatgcagcaggtggcacgttttcgccaacagcttgcccgcacgctggcaaccatcgttaacgttgttgaccctggcgtgattgtgatcggcggcgggctttcgaatgtggaactgcttatcaccgatctgaacgcagaagtcgctccactggttttcaccgatcaattcaccactcccattgtaaaagcacagcacggcgacagtagcggaatgcgtggcgctgcctggcttgctatgcgcaacggagaagccaatgaaacgttcacaaattaa

SEQ ID NO: 1768 - DNA, 861 bp, Escherichia coli
atgttagtttcgatgaaagaattactgcaacctacccgccagcacggctttgccattggcgcatttaatgtggcggataactgtttccttcgcgcagtcgtggatgaagcagaagcgacaaatactccggcgattattgccatccatcccagcgaacatgattttgtgggcgatgcctttttcgctcacgttcgcgaaattacccagcgtagtccggtcccgtttgtactgcacctcgatcatggtgcctctgtagagcatgttttgcgtgcgattcgctgcggatttacctcagtaatgatcgacggttcgctgctgccgtatgaagaaaacgtggcgctgaccgcagaagtggttcgcctcgctcacgcggttggcgtgtcggttgagggtgaactgggaaccatcggacaaacaggaacgtcggtagaaggtggtgtttcacaagtgacctacacagatccggcgcaggccgccgattttattgctcgtacaggtgccgacacactggctgtggcgattggtacagcgcatggcatctatccaaaagggatgcaaccgaagctgcaaatggacattttgcgcgacattgccggacgtattgatattccgctggtactacacggtggttcggcaaacccggacgcggagattgctgaatcagttacactcggcgtcggcaaaatcaatatctccagcgatatgaaatacgcctatttccagaaagtgcgtgaaattctcgctaaagagagctggtgggacccgaacgtcatctatccggatgcgattaacgcggcgcgggaagtcattcgccacaaaatgaaactgttcggttcgctcggtaaagcatcactgtactaa

SEQ ID NO: 1769 - DNA, 852 bp, Escherichia coli
atgtttgccgatatgaaaagtatggtgatgaaagcctggcatgaacattacgccttgctggcgatcaactgtatgaatctggaaagtgctcacgcagctatccgcgtggcggagaagaatcgcgctccgatcattctcaatctctatcaggggcatctggcgcattttcctgcacccgtcgcggcggcagtggttaaaacgctcgcggaatctgcctcagtaccggtcactctggcgcttgatcatggcaaaaatccggactgtattcgtcaggcgtttcgtgctggtttcagcggattaatgattgatgcttctgcttttcccctggaggaaaacgtgcgccagaccagggcggtggtggaactcgccgccagcgcgcagctctgcgtggaaggcgaactgggccatctggcagatgcgccgcgttacgaccaggccgccaatgcagacctgatgacgcaacccactgatgtggaaccgtttatcgcgcagacaggcattgatctactggccgtctcggtaggcacggcgcacggcatgtacgcgcctggtgttgtacctgctattgattttcagcgtctggcggagattttccactgctcgagcgtgcctctggcattacatggcggtagcggtacgccgttcgatcagctccagctctgtacgacgctgggggtagcaaaaatcaacgtgggggcggccatttttgaacgggggaaatccgcgctcctgcataccctctgtcacgatatatccattgaactggtggacgcgctgaaagctatggaactggccttcgaagaagcgattacaccgtatttacaggcgagcggcgctatcggcaaagcctga

SEQ ID NO: 1770 - DNA, 1092 bp, Escherichia coli
atgaaagacaataaaattccggtttcacaggaaattaaaaaacatttattaaccggcatctcgtggatgataccccttattgtggccgccgggatatgtattgcgttggggcaagttcttggcggtacagatgttggtgaaaaaacaggaacaatcccgtggatgcttaatcagattggcggctggggaatggggctgattgtgccgctgattagcgcggcaattgcctattctattgccgatcgtcccggatttgccccgggcctgattgtcggctttctctgcgggcaaatccataccggatttattggcggtatgttgggtggtttcctggtgggctacaccattttgctacttaaacgctatatccgcctgccgcagtcgatgcaaggactcatgccaatcatggtgttgccggtattaagcaccattatcggtgggctgttaatgatgacgctgattggtaaacccatcgcctggttacaagaagcactgattcatttgctcgagtcgatgcagggcggatcgcgcttcctgatgggggccatacttggcgcgatggcaaccttcgatttcggtggtccggtcaacaaaaccatgtcgctgttttccgatggcttgctggtcagtggcgtctacggaccagaagccgtgaaatttgtcggctcaatcatccctccgtttggcatcacactttcgttcttactgacacgccataaatatacccgtgcggagcgcgaggcgctgaaagccgcgtttccgatggggatctgcatgatcactgaaggagtcattccgatcgccgcgcgtgacctgctgcgagtagtgggatcttgtgtggtggcatcggcggtcgcgggcggcttaatcatggtgtggggcgtggagagtccggttccgcatggcggcatgtttgttgtgcctctgttcacccatcctctgctgttttgcctggcgctgggtataggcacggtgatttgtggcgtgatgctttcactctggaagaaaccggtaacggaacgcgacgaagagtttgacgaactgagcgatcaaaagctgaaagatgaagagatcactttcaccctcgaataa

SEQ ID NO: 1771 - DNA, 315 bp, Escherichia coli
atgaatattgtctgtgttgccgcctgtacggcgggtattgctcatacctatattgctcgtgaaaagttaatcaaaggagcaaaagctctgggccataccattaaagttgaaacccagggaaccattggtacagaaaatgaattacaggcggcagatatctctgctgctgacgtcgtgattcttgctgtagatgtgaaaataaaaggagaagaacgcttcaccaataaacgtattgtgcgagtaaagacagagatcgtcattaaatcgcccgttcaatttcttgaaaaggtcgaaaaatcactgggaaacaaatga

SEQ ID NO: 1772 - DNA, 471 bp, Escherichia coli
atggacataacaaaaatcctgaatacgaatcgcgttattttagatatgcaagcaacgaataaagcggaggcgattgaagaattaactaatcttctcaaaaaagatggtgcgatcgattgtcgggaaacctttattaaagatgtctggcagcgcgaagcggaaggctcgactggttttgaaaatcatattgcgatcccgcatggtaaatcttctgcggtaattaatactacgctggcaattggccgtacccgccaggatattccctgggaaacgctggatggcagtagcgtgcgctgtattattttatttgcggtacgtcttgaagatcaaaataccacccatatccgtttactttcccaggtcgcgggcgcgctggcggatgatgacatcatagaacaattgttagttgagacgagtccgcaaaaaatcattgatctctttagtcagtatgcacaatccgatgtctgctaa

SEQ ID NO: 1773 - DNA, 1554 bp, Escherichia coli
atgcaaatgattacctcgcgacaaaacagattattacgattccttttacctcgaagggaatatacgactattgttacgattgccggctatttaaatgtttcggaaaaaaccattcaacgtgatttacgtttacttgagcaatggctgggacaatggagaataaatgttgagaagcgtgctggcgcgggtgtgatgttaagtgcggagaatattgctgatttgctgcatcttgatcatttgttggtggcagaatgtgaagagattgatggtgtaatgaataatgccaggcgcgttaaaatagcgtcgcagttattaagtgaaacaccgaatgaaacgtcgatcagtaaattgtcagaacgctactttatcagcggagcctctattgttaatgacctgagagtaattgagtcctggcttgcgccgttggggttatcgttgatccgcagtccaagtggtacgcatattgaaggtagtgaagggcaagtccgacaggcaatggcattactgattaacggcattattaaccataatgagccgcaaggtgtcgtgtattcacgtctggatcccggaagctataaagcattagtccattattttggagaagaagaggtgttatttgtccagtcattgttactggatatggaaaatgaattaagttggtctttgggagaatcttattacgttaacatttttactcacatccttattatgatgtatcgcaacacgcacgggaatgcgttatcaagagaagaagatcaaaccagacaatatgatgaaaatatctttaatgttgccagtcagatgattcataagatagaacaacgaattgcacatacattgcccgatgatgaagtctggtttatttatcaatatatcatttcatcaggtgtggcgattgatggacaaaaagatgttagcattatttcacatatgcaggccagcaatgaagcgcgtctgattacctggcgtttaattacggtattcagtgacatcgtggactgcgattttagtgaagacagcgcattatatgatggcttattggtgcatattaagccgctgattaaccgtctaaattatcgcattcatatccgtaatccattgctggaagatattaaagcagaattagcggatgtctggcggttgacgcaatatgtggtgaatcaggtatttaaaacctggggtgagaatgcagtgagcgaggatgaagtgggttacctgaccgttcattttcaggctgcgatggagcggcaaattgcccgtaaacgtgtattactggtctgttcaaccggaatcggaacttcgcatctactgaaaagccgtattctgcgagcatttcctgaatggacgattgttgatgttatttcagcagcgaatttatcacaggttttgcctgacaatatcgaactgattatttcgaccattaatttgcctacagtcactatgccggtcgcttatgttaccgctttttttaatgatgccgatattaagcgggtcactgaaatggtgattacggaaaaattacatcatgcgacgtctcgggtcgttgaaatttaa

SEQ ID NO: 1774 - DNA, 2319 bp, Escherichia coli
atgaaaattagcgacggaaactggttgattcaacctggcctcaatttgattcacccgcttcaggtgttcgaggttgaacagcagggtaatgaaatggtggtctatgctgcccctcgtgatgtgcgtgaacgtacctggcagcttgatactcctttatttacgctgcgctttttctccccacaggaaggtattgtcggtgtacggattgagcattttcagggggcgctgaataacggtcctcattacccgctcaatattttgcaggacgtgaaggtcactatcgaaaacacagaacgttacgctgagtttaaaagtggcaacttaagtgcgcgtgtcagcaaaggtgagttctggtcactggattttctgcgcaacggcgaacgtattaccggtagtcaggtgaaaaataatggctacgtgcaggacacgaataatcaacgaaattatatgtttgagcggctggatcttggcgttggcgaaacagtttacggtctgggagagcgctttactgccctggtgcgcaatggccagacggtagagacctggaaccgggacggcggcacaagtactgaacaggcgtataaaaatattccgttctatatgactaaccgtggttatggggtactggtcaatcatcctcaatgcgtctcttttgaagtgggatcggagaaagtctccaaagtgcagttcagcgttgagagtgaatatctcgaatactttgttatcgacggcccgacgccgaaagcggtacttgatcgttatacccgttttactggtcgtccggcgctgccgcccgcgtggtccttcggcctgtggctaaccacttcatttaccaccaactacgacgaagagacggtaaacagctttatcgatggtatggcggaacgcaatctgccactgcatgttttccactttgactgtttctggatgaaagccttccagtggtgcgattttgagtgggacccgctgactttcccggacccggaagggatgatccgccgcctgaaagcgaaagggctaaaaatctgcgtctggattaacccctatatcgggcaaaaatcccctgtctttaaagagttacaagagaaaggctatttactcaaacgcccggacggttcgttatggcagtgggataaatggcagccaggtctggcgatttatgactttaccaatccggatgcctgcaaatggtacgccgacaaactgaaaggtctggtcgcgatgggcgttgattgctttaagaccgactttggcgaacgtattccaaccgatgttcaatggtttgatggttccgagccgcagaaaatgcataaccattatgcgtacatctacaacgaactggtgtggaacgtgctcaaggacaccgttggtgaggaagaagccgtcttgtttgcccgctcggcctccgtcggtgcgcagaaattcccggtacactggggtggtgactgttacgctaactacgaatcaatggcggaaagcctgcgcggtggtttgtctattggcctttcaggttttggtttctggagccacgatatcggcggctttgaaaataccgctccggcgcacgtttacaaacgctggtgcgcgtttggtttgctctccagccatagccgtttacatggcagcaaatcttatcgtgtgccgtgggcctatgatgatgagtcctgtgatgtggtgcgcttcttcacgcaactgaaatgccgcatgatgccgtatctgtatcgtgaagctgcacgtgcaaacgcccggggtacgccgatgatgcgggccatgatgatggagttcccggacgatccggcttgtgattaccttgaccgtcaatacatgttaggcgacaacgtgatggttgcgcctgtgttcactgaagcgggcgatgtgcagttctacttgccggaaggtcgctggacacatctgtggcacaacgatgaactcgatggtagtcgctggcataaacagcagcacggcttcctgagtctgcctgtttatgtgcgtgataacaccctactggcgctgggcaacaacgatcaacgtcccgattacgcgtggcacgaaggtacggcattccacctctttaatctgcaagacgggcatgaagccgtctgtgaagtgcccgatgctgacggttcggtgatctttactttaaaagcagcacgtactggcaacacgattactgtgactggtacgggcgaggcgaagaactggacactgtgcttgcgcaatattgtgaaagtaaatggtctgcaaggcggttcgcaggctgaaagtgagcagggactggtggtgactcctcaagggaatgcgctgacaattacgttgtaa

SEQ ID NO: 1775 - DNA, 1383 bp, Escherichia coli
atgaagagtgaagtgttgtccgttaaagagaaaattggttatggcatgggagacgccgccagccacattattttcgataacgtaatgttatatatgatgttcttttataccgatatttttggcattcctgccggatttgtcggaaccatgtttttggtcgctcgtgcactggatgcgatttccgatccttgcatggggttgttggccgatcgaacgcgctctcgctggggtaaatttcggccgtgggtgctgtttggcgcactgccattcgggatcgtctgtgtactggcctatagcacgccagatctcagtatgaacggaaaaatgatttatgcagcaattacttacaccctacttaccttactttataccatcgtcaatatcccttactgcgcattgggtggtgtaatcaccaatgacccgactcagcgtatctcgctgcaatcctggcgttttgtgctggcgaccgcgggaggcatgctctctactgttctgatgatgccactggttaatttaattggtggtgataataaaccactcggtttccagggcggtatcgcggtcctttccgtggtggcatttatgatgctggcattctgtttcttcaccactaaagaacgcgttgaagcaccacctacaacgacgtctatgcgggatgatttacgtgatatctggcaaaacgaccagtggcgtattgtcggtttcctgacaattttcaatatcctggcggtgtgcgtacgcggtggggcgatgatgtattacgtcacatggattttgggtacgccggaagtgtttgttgcttttctcaccacttattgcgtgggtaacctgattggttccgcactggcgaaaccgctgaccgactggaaatgtaaagtcactatcttctggtggacgaacgccctgctggcagtgattagcctcgcgatgttctttgttcctatgcaggccagcatcaccatgtttgtcttcatcttcgtgattggtgtgttgcatcaactggtgacacctatccagtgggtaatgatgtccgataccgtcgactacggcgagtggtgtaatggtaaacgcctgaccgggatcagttttgctggcacgctgtttgtgctcaaactggggttggccttcggtggtgcccttatcggctggatgctggcttatggcggatatgatgcggcagaaaaagcgcagaacagcgccacaattagcatcattatcgcgctattcacgattgttccggcgatctgttacttgctgagcgcgattatcgctaaacgctactactcgctcacgacgcacaatctgaaaaccgttatggaacagctggcgcagggcaaacgccgttgccagcaacaattcacctctcaagaagtgcagaactaa

SEQ ID NO: 1776 - DNA, 1038 bp, Escherichia coli
atgtcagacaaagacttaacccagcccccagcaggcgagtttattatgtttgccagcggtgacggaagagtgcgtgttgaatgtcgctttgagtcagacacaatctggttatcccaggcggcaatggctgaactgtacgataaagatgttcgcactattaacgaacatttaatcaatatattttccgaaggtgaacttgttcaaaactcaaccatccggaaattccggatagttcgccaggaaggaaaacgtcaggtttccagagagatagaccattacaacctcgaagccattctcgctgtcggctatcgcgttcgctcgcctcgaggcacgcaattccgccagtgggccacccagacgcttcaggaatacctgatcaaaggttttgtgatggacgatgagcggctgaagaatccgcctgtcggttcatcggttgtgcccgactattttgatgagatgcttgaacgcatccgcgatattcgcgccagcgagcgtcgggtatatttgcgggtgcgggagatctttgctttagctgccgactatcagccatcgcttaaagaaaccacgcaattttttcaaaccatccagaataaactgcattttgcctgtaccgggcataccgctgcggaactcatccacaaacgagcagatgccagccagccgcacatgggcttgaccagttataaaggtgaagaggtacgtaagggcgacgtgacggtggcaaaaaattatctcacccaggatgaggtcagcgaacttaatcgcgtggttaatatgtggctggactttgccgaggatcaggcccgtcgtcgtcagcaagtctttttgcgcgactggcaggataagctggatcagttcctgcaatttaacgaccgagaggttctacagggcgcgggtaaaatcagcaagaaaatggccgatgaaaaagcgcaggcggagtatgttcagtttgccgaacaacaacggcgcttaaaagaagccgaaggcgagaaggatatcgctggtttgctacagtggaataaagagtcgaaaaagtag

SEQ ID NO: 1777 - DNA, 498 bp, Escherichia coli
gtggggcatggaacttgtaaagcagccaaaagcgctaggcatttaattgaaagtaaagagaaaaacagaagtagtcgcgtcaaagtctttagcacgcatattaatttgagtcatccagcggcatcctggctagcaactcaaacttgcgctaacaatatattcaatctgcttcaaaacaataatgccatttatttattcgaaaacgataataaaattgaactgcgaatggggtatgattcttttttctctattaaaacgattgataaaattaacaaagaaaacatcaaagaaataaaactaaaaaatgatacaacatatgtttctcttcctaatccaaccattttaataaccacgacatcaacacctgaacgacagttttctatttctgttctggatgatgataacaaagaaaatctacctaccgataccgcaccttgttttacaattggtattcctgatgaatatactaaagccatagagttattgaacattaaataa

SEQ ID NO: 1778 - DNA, 924 bp, Escherichia coli
atgggttccaccagaaaggggatgctgaacgttctgattgccgccgtgttgtggggaagttcaggggtctgcgcgcaatacatcatggagcaaagccagatgtcgtcgcagtttttgactatgacgcgtttgatattcgccggtttgattctgctgacgctatcatttattcatggtgataaaatcttttctattattaacaatcacaaagatgccattagcctactgattttttccgtggttggcgcgctaaccgtacagctcacttttttgctaaccatcgaaaaatcgaacgcagccacggcaacggtactgcaattcctctcaccgactattatcgtcgcctggttctcactggtgcgtaaatcccgcccgggcattctggttttctgcgctattttgacatcgctgatcgggacttttttattggtgacacacggtaatccgacgtcattatcgatctctcctgccgcgttattctgggggattgcctcggcatttgctgctgcattctataccacctatccctcaacgctgattgcccgctatggcacgttaccggtcgtcggctggagtatgctcattggcggtctgctcctgctgcccttttatgccagacaagggacaaactttgtcgttaacggcagtttgattctggcgtttttttatttggtggtcattggtacgtccctgacatttagtctgtacctgaaaggagcacaattaattggcggtccaaaagccagcattttaagctgtgcagaaccattaagtagcgcgctgctctctttgttgttgctggggatcaccttcacattgccggactggctgggaacgctgctgattctgtcatcggtgattttgatttcaatggattcccgccgccgcgccagaaaaataaatcgtccggcgcggcatgagtga

SEQ ID NO: 1779 - DNA, 819 bp, Escherichia coli
atgaaactgacaacacatcatctacgggcgggggccgcattattactggcaggagttctgctggcaggttgcgaccagagcagcagcgatgaaaagcatattaaagttggcgttattaatggcgcagaacaagatgtcgcggaagtcgctaaaaaggtagcaaaagagaaatatggcctcgatgttgaactggtaggatttagcggttcgttgctaccgaacgatgcgacaaatcatggcgagcttgatgcgaacgtcttccagcatcgaccctttcttgaacaagataatcaggcgcatggttataaactggtagcggtgggaaatacgtttgtcttccccatggcgggttattccaaaaaaatcaaaaccgtggcgcaaataaaagaaggcgcgacagtggcgatccccaacgacccgactaaccttggtcgcgcgcttttactgctgcaaaaagagaagctaattactctgaaagagggaaaagggttattacctaccgcgttggatataaccgataatccacgccatttgcagataatggagctggaaggggcacagttgccacgtgtactggacgacccgaaagtggatgtagcgattatcagcaccacttacatccagcaaacaggactttctccggttaacgacagcgtatttattgaagataaaaattcgccgtatgtgaatattctggtggcacgggaagataataagaatgcagaaaacgtgaaggaatttctgcaatcttatcaatcacccgaagtcgctaaagcggcagaaaccatctttaacggaggcgcggtgcctggctggtaa

SEQ ID NO: 1780 - DNA, 294 bp, Escherichia coli
atgaagccaacgatgctactcatgattaccgtattcctgatttttccagccatttctcaggccgagtcgccattcagttctctacagtcggcaaaagagaaaaccacggtattgcaagatttacgtaaaatttgcacgccacaggcgtcattatcagatgaagcgtgggaaaagttaatgttgtcagatgaaaacaataaacaacatatacgcgaggccatcgtggcgatggaacgtaataatcagagcaattattgggaagcgttgggtaaggtagaatgcccggatatgtaa

SEQ ID NO: 1781 - DNA, 1239 bp, Escherichia coli
atgttaaagtggtcggctttccctctgaaacatgccacgggtaacaccatgagtgaatttattgctgaaaaccgcggcgcgaatgccatcacccgaccgaactggtcagccgttttctcagtggcgttttgcgtcgcctgtctgattatcgttgagtttttgcctgtcagtttgttgacgccaatggcccaggatttaggcatttcggaaggggttgccggccaatcggtgaccgtgaccgcctttgtggcgatgtttgccagtttgtttattacccagaccattcaggccactgaccgccgctacgttgtcattctgttcgccgttttgctgacgctttcctgtttgctggtttcctttgccaactcattcagtctgttgttaatcggtcgcgcctgtctggggctggcgctgggcgggttctgggcgatgtcggcgtcgctgaccatgcgtctggtaccgccgcgtacggtgccgaaggcgctgtcggtgatcttcggcgcggtttctattgcgctggtgattgccgcgccgttgggcagttttttaggcgagcttatcggttggcgcaatgtctttaatgcggcggcggcgatgggtgtgctgtgtattttctggattatcaaatcactgccttcgctgccaggtgaaccttcgcatcagaaacaaaatactttccgcttattacaacgtccgggagtgatggccgggatgatcgccatctttatgtcctttgccggacagtttgcttttttcacttatattcgcccagtgtatatgaatctggcgggattcggtgttgatggcttaaccctggtgctgctgagttttggtatcgccagctttgtcgggacatcgctttcgtcgtttattctcaaacgttcggtgaaactggccttagcgggcgcaccgtttgtgctcgccctgagcgcgctggtactgacgctgtggggaagcgataaaattgttgctactggtgtggcgattatctgggggctgacctttgctttaattcccgttggttggtcaacgtggatcactcgctcattggccgatcaggcagaaaaggctggatctattcaggtggccgttattcagcttgccaatacctgcggtgcggcaatcggcggttatgcgttggataacattggtctgacttcgccgctgatgttgtccggcacattgatgttgctgactgcattgttggtgactgcaaaggtgaaaatgaagaaatcctga

SEQ ID NO: 1782 - DNA, 453 bp, Escherichia coli
atgatctggataatgctcgccacgctggcggtagtgtttgtggttggttttcgggtgctgacatccggggccagaaaagcgattcgccgtctcagcgatcggctgaacatcgatgtcgtacccgtggagtcgatggtcgatcaaatgggaaagtcagccggtgacgaatttttacgttatttgcatcgcccggatgagtcgcacctgcaaaacgccgcgcaggtgttgctcatctggcaaattgtcattgtcgatggtagcgaacagaacctgctgcaatggcatcggattttacaaaaagcccgccttgccgcgccgattaccgatgctcaggtcaggctggcgctgggttttctgcgcgaaaccgaacctgaaatgcaggatatcaatgcttttcagatgcgctataacgcgttctttcagcctgccgagggcattcactggctgcattaa

SEQ ID NO: 1783 - DNA, 1335 bp, Escherichia coli
atgaataatgacaataccgattacgtgagtaatgaatcagggacgctttcgcgattatttaaactacctcagcatgggaccaccgtccgcacagaattgattgcggggatgaccacttttttaaccatggtgtacatcgtttttgtgaacccgcaaatcctcggcgcggcacaaatggacccaaaagtggtgtttgttaccacctgtttgattgccggtatcggcagtattgcgatgggggtatttgctaacttacccgtggcactggctccggcaatgggcctgaacgccttctttgccttcgtggtcgtgggggcgatgggtatctcctggcagaccgggatgggcgcgatattctggggcgcagttgggctatttttgctcacgctgtttcgtatccggtactggatgatctccaacattccattaagtttacgtattggtatcaccagcggaatcggattatttatcgccttaatgggattaaaaaatactggcgttattgtcgccaataaagacaccctggtgatgattggcgatttaagttctcacggcgtgttgttaggtattttagggttttttattataactgtgttgtcatcacgtcattttcatgccgcggtgcttgtttctattgtggtgacgtcttgctgtggattatttttcggtgatgttcattttagcggcgtctattccattccgcctgatattagcggcgtcattggtgaagtggatttgagcggtgcgttatcacttgaactcgccggtatcattttctcctttatgctgatcaacttatttgattcatcagggacattaattggtgtgactgataaagctggcttaatagatagtaacggtaaattccccaatatgaataaggcgctgtgtgttgatagcgtcagttcggtggcgggtgcgtttatcggtacctcgtctgttaccgcctatattgaaagtacttcaggtgtggctgtcggtggtcgcacgggtctgacggctgtcgtagtcggcgttatgttcctgttagttatgttcttctcaccgctggtggcgatggttcctccttacgcaaccgccggagcgttaatctttgttggcgtgctgatgacttcaagcctggcgcgcgttaactgggatgattttaccgaatcggtgcctgcgtttattaccacggtgatgatgccctttactttctcgatcaccgaagggattgcactaggctttatgtcgtactgcatcatgaaagtgtgcaccgggcgctggcgcgatctgaacctgtgtgtggtggtggtcgcaactctgtttgcactgaagattattctggtggattag

SEQ ID NO: 1784 - DNA, 1767 bp, Escherichia coli
atgaataattctattaaccataaatttcatcacattagccggactgaataccaggaattgttagccgtttcccgtggagacgctgttgccgattatattattgataatgtctctattctcgacctgatcaatggcggagaaatttccggcccaattgtgattaaaggacgttacattgccggtgttggcgcagaatacgctgatgctccggctttgcagcggattgatgcccgcggcgcaacggcggtgccagggtttattgatgctcacctgcatattgaatccagcatgatgacgccagtcacttttgaaaccgcgaccctgccgcgcggcctgacgaccgttatttgcgaccctcatgaaatcgtcaacgtgatgggcgaagccggattcgcctggtttgcccgctgtgccgaacaggcaaggcaaaaccagtacttacaggtcagctcttgcgtacccgcactggaaggctgcgatgttaatggtgccagttttacccttgaacagatgctcgcctggcgggaccatccgcaggttaccggccttgcagaaatgatggactaccctggcgtaattagcgggcagaatgcgctgctcgataaactggacgcatttcgccacctgacgctggacggtcactgcccgggtttgggtggtaaagaacttaacgcctatattgctgcgggtattgaaaactgccacgaaagttatcagttggaagaaggacgccggaaattgcaactcggcatgtcattgatgatccgtgaaggatccgcagcccgcaatctcaacgcgctggcaccgttgatcaacgaatttaacagcccgcaatgcatgctctgtaccgatgaccgtaacccgtgggagatcgcccatgaaggacacatcgatgccttaattcgccgcctgatcgaacaacacaatgtaccgctgcatgtggcatatcgcgtagccagctggtcgacggcgcgccattttggtctgaatcacctcggcttactggcacccggcaagcaggccgatatcgtcctgttgagcgatgcgcgtaaggtcacggtgcagcaggtactggtgaaaggcgagccgatcgatgcacaaaccttacaggcggaagagtcggcgagactggcacaatccgccccgccatatggcaataccattgatcgccaaccagtttccgccagcgactttgccctgcaatttacccccggaaaacgctatcgcgttattgaggtaatccataacgaactgatcacgcactcccgctccagcgtctacagcgaaaacggttttgatcgcgatgatgtgtgctttattgccgttcttgagcgttacggacaacgactggctccggcctgtggtttgctcggcggctttggcctgaatgaaggtgcgctggcggcgacggtcagccatgacagccataatattgtggtgatcggtcgtagcgcagaagagatggcgctggcggtcaatcaggtgattcaggatggcggcgggctgtgcgtggtccgtaacggccaggtacaaagtcatctaccgttgcctattgccgggctaatgagcaccgacacggcgcagtcactggcggagcaaattgacgccctgaaagccgccgcccgtgaatgcggtccgttaccggatgagccgtttattcagatggcgtttctttccctgccagtgatccccgcgctgaaactaaccagtcaggggctgtttgatggcgagaagtttgccttcactacgctggaattcacggaataa

SEQ ID NO: 1785 - DNA, 1392 bp, Escherichia coli
atgctggctttcttaaaccaggttcgcaagccgaccctggaccttccgctcgaagtgcggcgcaaaatgtggttcaaaccgttcatgcaatcctacctggtggtctttatcggctaccttacgatgtacctgattcgcaagaactttaacatcgcgcagaacgacatgatctcgacctacgggttgagcatgacgcagctggggatgatcggcctgggcttctccatcacttatggcgtgggtaaaacgctggtttcttactacgccgacggcaaaaacaccaaacaattcctgccgttcatgctgatcctgtctgccatttgtatgctgggcttcagcgccagtatgggcagcggctcggttagcctgttcctgatgattgccttctacgccttaagcggctttttccagagtaccggcggttcgtgcagttactccaccatcaccaaatggacgccgcgtcgtaaacgcgggacattcctcggtttctggaacatttctcacaaccttggtggtgcaggcgcagcaggtgtggcgctgttcggcgcaaattacctgttcgatggtcatgtcatcggcatgtttattttcccgtcgattatcgcgctgattgttggttttatcggtctgcgttacggcagcgactccccggaatcttatggcctcggcaaagctgaagagctgtttggcgaggagatcagtgaagaggataaagagacagaatctaccgatatgaccaagtggcagatctttgttgagtatgtgctgaaaaacaaagtgatctggctgctgtgctttgccaacattttcctctatgtggtgcgtattggtatcgaccagtggtcaaccgtgtatgcgttccaggaactgaaactctctaaagcggtggcgattcagggctttacgctgtttgaagctggtgcgctggtcggtacgctgctgtggggctggctctctgacctggcgaacggtcgccgtggcctggtggcctgtatcgcgctggcgctgattatcgccacgctcggtgtgtatcaacacgccagcaacgaatatatctacctggcttctctctttgcgttgggtttcctggtctttggcccgcaattgttgattggtgtggctgctgttggctttgtacctaaaaaagcgattggcgctgccgatggtattaaaggcaccttcgcttacctgattggtgacagctttgccaagttaggtctgggaatgattgccgatgggacgccggtatttggccttaccggctgggcaggcaccttcgccgcgctggatatcgccgctattggttgtatctgcctgatggcgatagtagcggtgatggaagaacgcaaaatccgccgcgagaaaaaaattcagcagttgacagtggcataa

SEQ ID NO: 1786 - DNA, 1320 bp, Escherichia coli
atgttgccgtttctgaaagcgccagctgacgcgccgttgattagcgataaacaagaaattgatgcccgttaccgttactggcgtcgccatattctgctgaccatctggctgggttacgcgctgttttacttcacgcgtaaaagttttaacgccgccgtaccagaaatccttgctaacggcgtgctcagccgtagcgatatcggcctgttagcgaccctgttttacattacctacggcgtgtcgaagtttgtctccggcattgtcagcgaccgctcaaatgcccgttattttatggggatagggcttatcgccacgggcattatcaacattctgtttggcttctcgacgtcgctatgggcgtttgccgtgctctgggtgttgaacgcctttttccagggctggggttcaccggtgtgtgcgcgtctgttaaccgcctggtattctcgtaccgagcgcggcggttggtgggcattatggaacacggcgcataacgtcggcggcgcactcattcccattgtgatggcagcgagcgcgctgcattacggctggcgtgccgggatgatgattgcgggttgtatggcgatagtcgtggggatttttctctgctggcggctgcgcgatcgcccgcaggcgttaggtttaccggcggttggtgaatggcggcacgacgcactggagattgctcaacaacaagaaggggcagggctgacgcgtaaagagatcctcaccaaatatgtgttgctgaatccgtatatctggctgctttcgttttgctatgtgctggtctatgtggttcgggcggcgatcaacgactggggcaatttgtatatgtccgagacgctgggcgtcgatctggtcacggcgaatacggcagtgacaatgtttgaactgggcggatttattggtgcgctggtagcgggttggggttcggacaaactgtttaacggcaaccgcgggccgatgaatttgattttcgccgccggaattttgctttcagtcggctcgctgtggctgatgccatttgccagctacgtgatgcaggcaacctgcttcttcaccattggtttttttgtctttggcccgcagatgttaatcggcatggcggcggcagagtgttcccacaaagaggcggcaggggcggcgacgggatttgtcggcttgtttgcttatcttggtgcgtcgcttgctggttggccgctggcgaaagtactcgatacctggcactggagcggattttttgtggttatcgccatcgccgccgggatttccgcactgctattactgccctttttgaacgcccagacaccgcgagaagcgtga

SEQ ID NO: 1787 - DNA, 1503 bp, Escherichia coli
atgaagacgttgttctcccgcttaattaccgttattgcctgcttttttatcttctctgccgcatggttttgcctgtggagtatcagcctgcacctggttgagcgccctgatatggcggtgctgttatttccgtttggcctgcggctagggctaatgctgcaatgcccgcgcggatactggtcggtgctactgggtgcggagtggctgctgatttactggctaatgcaggcggtcggtttaacccatttctccttattgatgatcggtagtttactgacgttattgcccgtggcgctgatctcgcgctatcgccatcaacgtgactggcgcaccttgctgttacagggtgcggcgttaacggcggcggcgttgttgcagtcgctgccctggctttggcacggcaaagagtcgtggaatgcgctgctgctgactttaactggcggcctgacgctggccccgatatgtctggtgttctggcactatctcgccaataacacctggctgccgctcggcccgtcactggtttctcaaccaatcaactggcgcgggcgacatctggtctggtacttgctgctgtttgttatcagtctctggctccagttgggattgccagacgaactgtcgcgctttacgccattctgtctggcgctgccgattatcgcgctggcctggcactatggttggcaaggagcgctgattgcgacattgatgaacgccatcgcgctgatcgccagtcaaacctggcgcgatcatccggtggatttattgctctcgctgctggtgcaaagtctgacagggttgttactgggcgctggcatccagcggttgcgtgaacttaaccagtcgctgcaaaaggaactggcgcgcaatcagcatctcgctgaacggttgctggaaaccgaagagagcgtgcgccgtgatgtggcacgtgagctgcacgatgatatcggtcagaccattactgctattcgaactcaagcgggcattgttcagcggctggcggcagataacgccagcgtgaaacagagcgggcagctcatcgaacaactatcgctgggcgtttacgacgcggtgcgccgtttgttaggtcggttacgtccgcgccagttggatgatctcaccctggagcaggccatccgctcactgatgcgggaaatggagctggaagggcgcggcattgtcagccatctcgaatggcgaatcgatgaatcagcgttaagcgaaaaccagcgagtgacgctgtttcgtgtctgccaggaagggctgaacaacattgtgaaacatgctgatgccagcgcggtcaccctgcaaggctggcagcaggatgaacggttgatgctggtgattgaagacgatggcagcggtttaccgccagattccgggcaacacggttttggccttaccggaatgcgcgagcgcgtaacggcgctgggcggcacattgaccatttcctgtctgcacggcacgcgtgtcagcgtttctctacctcaacgttatgtctag

SEQ ID NO: 1788 - DNA, 591 bp, Escherichia coli
atgatcaccgttgcccttatagacgatcaccttatcgtccgctccggctttgcgcagctgctggggctggaacctgatttgcaggtagttgccgagtttggttcggggcgcgaggcgctggcggggctgccggggcgcggtgtgcaggtgtgtatttgcgatatctccatgcctgatatctccggtctggagcttctaagccagctgccgaaaggcatggcgacaattatgctctccgttcacgacagtccggcgctggttgagcaggcgcttaacgccggggcgcgcggctttctctccaaacgctgtagcccggatgaactcattgctgcggtgcatacggttgccactggcggctgttatctgacgccggatattgccattaaactggcatccggtcgccaggacccgctaaccaaacgcgaacgccaggtggcagaaaaactggcgcaaggaatggcggtgaaagagattgccgccgaactgggcttgtcgccgaaaacggtacacgtccatcgcgccaatctgatggaaaaactgggcgtcagtaacgacgttgaactggcgcgccgcatgtttgatggctggtga

SEQ ID NO: 1789 - DNA, 291 bp, Escherichia coli
atgcaaaacacaactcatgataacgtgattctggaactcaccgttcgcaaccatccgggtgtaatgacccacgtttgtggcctttttgcccgtcgcgcttttaacgttgaaggcattctctgcctgccgattcaggacagcgacaaaagccacatctggctactggtcaatgacgaccagcgtctggagcagatgataagccaaatcgacaagctggaagatgtggtgaaagtgcagcgtaatcagtccgatccgaccatgtttaacaagattgcggtgttttttcagtaa

SEQ ID NO: 1790 - DNA, 1689 bp, Escherichia coli
atggcaagttcgggcacaacatcgacgcgtaagcgctttaccggcgcagaatttatcgttcatttcctggaactgcagggcattaagattgtgacgggtattccgggcggttctatcctgcctgtttacgatgccttaagccaaagcacgcaaatccgccatattctggctcgccatgaacagggcgcggggtttatcgctcagggaatggcgcgcaccgacggtaaaccggcggtctgtatggcctgtagtggaccgggtgcgactaacctggtgaccgccattgccgatgcgaggctggactccatcccgctgatttgcatcactggtcaggttcccgcctcgatgatcggcaccgacgccttccaggaagtcgacacctacggcatctctatccccatcaccaaacacaactatctggtcagacatatcgaagaactcccgcaggtcatgagcgatgccttccgcattgcgcaatcaggccgccctggcccggtgtggatagacattcctaaggatgtgcaaacggcagtttttgagattgaaacacagcccgctatggcagaaaaagccgccgcacccgcctttagcgaagaaagtattcgtgacgcggcggcgatgattaacgccgccaaacgcccggtgctttatctgggtggtggtgtgatcaacgcgcctgcgcgagtgcgtgaactggcggagaaagcgcaactgcctaccaccatgactttaatggcgctgggtatgttgccaaaagcgcatccgctgtcgctgggtatgctggggatgcacggtgtgcgcagcaccaactatattttgcaggaggcggatctgctgattgtactcggtgcgcgttttgatgaccgggcgattggcaaaaccgagcagttctgtccgaatgccaaaattattcatgtcgatatcgaccgcgcagagctgggcaaaatcaagcaaccgcatgtggcaattcaggcggatgttgatgacgtgctggcgcagttgatcccgctggtggaagcgcaaccgcgtgcagagtggcaccagttggtggcggatttgcagcgtgaattcccgtgtccaatcccgaaagcgtgcgatccattaagccattacggcctgattaatgccgttgccgcctgcgtggatgacaacgcgattattaccactgatgttggtcagcatcagatgtggacggcgcaagcctatccgctcaatcgcccacgccagtggctgacctccggcgggctgggcacgatgggttttggcctgcctgcggcgattggcgcggcgctggcgaacccggaccgcaaagtgttgtgcttctccggcgacggcagcctgatgatgaatattcaggagatggcgaccgccagtgaaaatcagctggatgttaaaatcattttgatgaacaacgaagcgctggggctggtgcatcagcaacagagtctgttctacaagcagggcgtttttgccgctacctatccgggcaaaatcaactttatgcagattgccgccggattcggcctcgaaacctgtgatttgaataacgaagccgatccgcaggctgcattgcaggaaatcatcaatcgccctggcccggcgctgatccatgtgcgcattgatgccgaagaaaaagtgtacccgatggtgccgccaggtgcggcgaatactgaaatggtgggggaataa

SEQ ID NO: 1791 - DNA, 1185 bp, Escherichia coli
atgaaaaggcatagaaacgtcaatttgttattgatgttggtattactcgtggccgtcggtcagatggcgcaaaccatttatattccagctattgccgatatggcgcgcgatctcaatgtccgtgaaggggcggtgcagagcgtaatgggcgcttatctgctgacttacggtgtctcacagctgttttatggcccgatttccgaccgcgttggtcgccgaccggtgatcctcgtcggaatgtccatttttatgctggcaacgctggtcgcggtcacgacctccagtttgatggtattgattgccgccagcgcgatgcaggggatgggcaccggcgttggcggcgtaatggcgcgtactttgccgcgcgatttatatgaacggacacagttgcgccacgctaacagcctgttaaacatggggattcttgtcagtccgctgctcgcaccgctaatcggcggtctgctggatacgatgtggaactggcgcgcctgttatctctttttgttggttctttgtgccggtgtgaccttcagtatggcccgctggatgccggaaacgcgtccggtcgacgcaccgcgcacgcgcctgcttaccagttataaaacgcttttcggtaacagcggttttaactgttatttgctgatgctgattggcggtctggccgggattgccgcctttgaagcctgctccggcgtgctgatgggcgcggtgttagggctgagcagtatgacggtcagtattttgtttattctgccgattccggcggcattttttggcgcatggtttgccggacgtcctaataaacgcttctcaacgttgatgtggcagtcggttatctgctgcctgctggctggcttactgatgtggatccccgactggtttggcgtgatgaatgtctggacgctgctcgttcccgccgcgctgttctttttcggtgccgggatgctgtttccgctggcgaccagcggcgcgatggagccgttccctttcctggcgggcacagctggcgcgctggtcggcggtctacaaaacattggttccggcgtgctggcgtcgctctctgcgatgttgccgcaaaccggtcagggcagcctggggttgttgatgaccttaatgggattgttgatcgtgctgtgctggctaccgctggcgacgcggatgtcgcatcaggggcagcctgtttaa

SEQ ID NO: 1792 - DNA, 498 bp, Escherichia coli
atgacaggaagtcaggtcattgatgctgaagaggacaggcataaactggttgtagagtacaaggatgctctgcaacctgccgatttttatcacaatttcaaacaacggggtatccgctccgtacagcttattccccatcttgaatttgatgaccggggcgatctgacggccgcttcggtgacagcagagctgtgggggaaatttttaattgccctgttcgagtgttgggtacgggcagatatcagtcgtatttcgattgagctttttgacgccaccctacaaaaatggtgtggcagcgaaaacccgcaaccgcgtcgtggctgccaggcgtgcgactggcatcgcctgtgcccgcacgctcgggaggagacgccagacaacgtgctttgtgcgggctatcaggcgttttattcttactccgcgccgcatatgcgggtgatgcgtgatctgataaagcagcatcgttctcccatggagctgatgacgatgctgcggtga

SEQ ID NO: 1793 - DNA, 363 bp, Escherichia coli
atgccggatagccgcaaagccagacgcattgccgacccagggctgcagccggagcgtacatcactggcgtggtttcgtaccatgctgggctacggcgcgttgatggcgttggctatcaaacacaactggcaccaggcgggcatgttattctggatttcgattggcattctcgccattgtggcgctgatcctctggcactacacccgtaatcgcaatttaatggatgtcacgaatagcgatttttcccaatttcacgtagtccgtgacaaatttttgatctccctcgcggtgttatctctcgcaatactgtttgctgtaacgcatatacatcaacttatcgtatttattgagagagtcgcatga

SEQ ID NO: 1794 - DNA, 348 bp, Escherichia coli
atgaaaatttcccgcctcggagaagcacctgattatcgcttctcgctggctaatgagcgtacttttctggcgtggatccgtaccgcactaggctttctggcggcgggggttgggcttgatcaacttgcgccagatttcgccacgcccgtcattcgcgaactgctggcgttgttgttgtgtctgttttccggcgggttagcgatgtatggctacctgcgctggttacgcaatgaaaaagcgatgcgtctgaaagaggacctgccctacaccaacagcttattaatcatcagcttaatattgatggtcgtagcggtgatcgttatgggactggtgttgtatgccggatag

SEQ ID NO: 1795 - DNA, 492 bp, Escherichia coli
atgatggcgctggcagatattgaaaaaccagagattctgccgggggaaaatatccttgccgtgaaagagccacgtggcgtgttggtggaatttaatcgctacgagattgagcatgacagctttggcggttttattccggtgcgttgctgggtgacggatgactttaaactggtactcaacctcttcaccagtgatgaactttacgatcgccgtaatgacctaaatgaaatgcataatctgatcgatgatatccgttttgccgacgttcgccgcaaaatgcatgacgccttattggattacatggataaaattcgcgatccgttccgcagttaccagtggagtctgcgtccgtggcgtaaagatgcacgaccgcgctggatgggggcgtttcgtccacgcccacaagatggctattcgccagtggtacgcgactatgacaccggcctaccgacacaaggggtgaaggtggaagagaaaaaacagaagttctga

SEQ ID NO: 1796 - DNA, 930 bp, Escherichia coli
atgaaacgccccaattttctgttcatcatgaccgatacccaggccaccaatatggtcggttgctatagcggtaagccgctgaatacgcaaaatattgatagtctggcggcagaaggtattcgctttaattctgcctacacctgttcaccggtttgtacacctgcacgcgccggactattcaccggtatctacgctaaccagtccggcccgtggaccaacaacgtcgcgccgggcaaaaacatttccaccatggggcgctactttaaggatgcgggctatcacacctgctacatcggcaaatggcatctcgatggacatgactatttcggcactggcgagtgtccgccggagtgggacgctgattactggttcgatggcgcgaactatcttagtgaactgacggagaaagagattagcctgtggcgcaatggcctaaatagcgttgaggatttacaggcgaaccatattgacgaaaccttcacctgggcgcaccgcatcagcaatcgggcggtggattttctgcaacagcccgcgcgcgccgacgaacctttcctgatggtgatttcgtatgatgagccgcatcacccgttcacctgtccggtggagtatttagagaaatacactgatttttactacgaactgggtgagaaagcagaggatgacctggcgaacaaaccggaacatcaccgcttatgggcgcaggcgatgccatcgccagtcggtgatgacgggctttatcaccatccgctctattttgcctgcaatgactttgttgatgaccaaatcggacgggtcatcaacgccttaacgccagagcaacgtgaaaatacgtgggttatttatacctccgatcacggcgaaatgatgggcgcacataagctgatcagtaaaggagcggcgacaggtcgatacgccagtcagtcatattga

SEQ ID NO: 1797 - DNA, 1569 bp, Escherichia coli
atgaattcgttacaaatcttgagttttgtcggttttacgctgctggtggcggtcatcacctggtggaaagtccgcaaaacagatactggatcgcaacaaggctattttcttgccggacgttcactaaaagcgccggttattgccgcttcgttaatgctaaccaacctttccacggaacaactggtcggcctttccgggcaggcctacaaaagcggcatgtcggtgatgggctgggaagtcacctctgcagtgacgctgatcttcctcgcgctaatctttttaccgcgctatctgaagcgcggcattgccaccatccccgattttctggaggaacgttatgataaaacgacgcgtattatcatcgacttctgcttcctcattgccaccggcgtctgctttctgccgattgttctctattccggcgcgttggcgctcaacagcctgtttcatgtgggtgagtcgctacaactttccgatggtgcggctatctggttactggttattttgcttggtctggcgggaattttgtatgcggtgatcggcggactgcgcgcaatggcagtggcggactccattaacggtattgggctggttattggcgggttgatggtgccggtatttggcctgatcgcgatgggcaagggcagctttatgcagggcattgagcaactcaccaccgttcacgccgagaaattaaactcagtcggcggcccgaccgatcccttgccgattggcgcggcatttaccggtttgattctggtgaacaccttttactggtgtacaaatcagggcatcgtgcaacgcacgctggcgtcaaaaagcctggcggaagggcaaaagggggcgctgttaacggcggtgctgaaaatgctcgacccgctggtactggtgctgccagggttgattgcgtttcatctgtatcaggatttaccgaaagccgacatggcctacccgacgctggtcaataacgttctgccggtgccactggtgggcttcttcggtgcggtgttatttggtgcggtgatcagtaccttcaacggctttctgaatagcgccagtacgttattcagtatgggtatttaccggcgcatcattaaccagaatgccgagccgcaacaactggtcaccgtcgggcgcaaatttggtttctttatcgccatcgtttcggtgatagtcgcgccgtggatcgccaacgcgccgcaggggctgtatagctggatgaaacagctcaacggtatttaccgtgccgctggttaccatcatcattatgggctttttcttcccgcgcattccggcgctggcggcaaaagtggcgatggggattggcataatcagctacatcaccatcaactatctggtgaagttcgacttccatttcctctatgtgctggcctgtacgttctgcatcaacgtggtcgtgatgctggtgatcggttttatcaaaccgcgcgccacgccgttcaccttcaaagatgcgtttgcggtggacatgaaaccgtggaaaaacgtcaagattgcgtcaattggtatcctgttcgcgatgattggcgtctatgccgggctggctga

SEQ ID NO: 1798 - DNA, 867 bp, Escherichia coli
atgaatggaaaattgcaaagttcggatgtaaaaaacgaaactccgtacaatattcccttattgattaacgaaaatgtgatctccagcggaatttctctgatatcgctctggcatacctacgccgacgagcattatcgggtgatctggccgcgggacaagaagaaaccgcttatcgccaactcatgggttgcggtgtataccgtacaaggatgtgggaaaattcttttaaagaatgacgaacaaataactctgcatggcaactgtattatatttttaaagccaatggatattcactcttatcactgtgaaggtttggtctgggaacagtactggatggaatttacccccaccagtatgatggatattcccgtcggtcagcaaagcgttatttataatggcgaagtttataatcatgaactcaccgaagttgctgagttaattacttcaccagaagcaataaaaaataatctggcagtcgcttttctgacgaaaattatttatcagtggatttgtcttatgcacacagtcggtaaaaaagatccacaacggcggcaaattgaaaaattaattgccactttacatgccagtctacaacaacgctggagcgtagctgatatggctgccacgatcccctgtagcgaggcctggttgcgtcgtctgtttttacgctataccggcaagacgccgaaagaatattacctcgatgcgcgtctggatctggcgctatcgctattaaagcaacaagggaactcggttggcgaagtcgctgatacgctcaacttcttcgactcctttcatttcagcaaagcctttaagcataaatttggttatgcgccgtcagctgtgctgaagaatacggacaggtaa

SEQ ID NO: 1799 - DNA, 1662 bp, Escherichia coli
atgagtgatatagcattaacggtcagtattctggctttggtggcggtcgtcgggttgtttatcggcaacgtcaagtttcgcggtgttggattgggcattggcggcgtgctgttcggtgggatcatcgtcggccattttgtttctcaggcggggatgacattaagtagcgatatgctgcatgttattcaggagtttggcctgatcctgttcgtttataccatcgggattcaggtagggccgggcttctttgcctcattgcgcgtctccggattacgcctcaacctgtttgctgttctgatcgtcatcatcggtggtctggttaccgccatcctgcataaactgtttgatattccactgccggtagtgctggggattttttccggcgcggtcaccaatacgccagcgctgggggcagggcagcagatcttgcgcgacctggggacaccaatggaaatggtcgatcaaatggggatgagctatgcgatggcgtatccatttgggatttgcggcattttgttcactatgtggatgctgcgggttattttccgcgtcaatgttgagactgaggcccagcagcacgagtccacgcgaaccaacggcggtgcgctaatcaggacgattaacatccgagttgagaatcctaatttgcataatttagccattaaagatgtgccgattctcaatggcgataaagttatttgctcacgattgaaacgagaagaaaccctaaaagtgccttcgccagaaaccgttattcaactgggcgatttgctgcatctggtggggcagcctgcggatttacataatgcgcaactggtgattggtcaggaggtcgatacctcgctgtctacgaaaggcactgatttgcgcgtcgcgcgtgtggtggtcaccaatgaaaacgtgctcggtaaacgtattcgcgacctgcactttaaagaacgctatgacgttgttatctcgcgcctgaaccgtgctggtgttgaattagttgcaagtagcgatatcagcctgcagttcggcgatatcctcaacctggtggggcgtccgtccgcaattgatgccgttgccaatgtgctggggaatgcgcagcaaaaactgcaacaggttcagatgctgccagtgtttattggtatcgggcttggcgtattgttaggttctattcccgtctttgtgcctgggttcccggcggcgttgaaactcgggctggcgggcggtccgctgattatggcgttgatcctcgggcgtatcggcagtatcggcaagctgtactggtttatgccaccaagcgctaacctggcgctacgcgagttaggcattgtgctctttctctcggtggttggcctgaaatccggtggcgattttatccatacactggtggatggcgaagggctaagctggattggttatggtgccctgatcaccgccgttccgctgattactgttggcattctggcgcggatgttagccaaaatgaattacctgaccatgtgcgggatgctggcaggttccatgaccgatcctccggcgctggcgtttgctaataatcttcatccaaccagcggtgcggcggcgctctcttacgccactgtctatccgttagtgatgttcctgcgcattatcacaccccaattactggcggtgctcttctggagtatcggttaa

SEQ ID NO: 1800 - DNA, 429 bp, Escherichia coli
atgcgtaacttcgatttatccccactgatgcgtcaatggatcggttttgacaaactggccaacgcactgcaaaacgccggtgaaagccagagcttcccgccgtacaacattgagaaaagcgacgataaccactaccgcattacccttgcgctggcaggtttccgtcaggaagatttagagattcaactggaaggtacgcgcctgagcgtaaaaggcacgccggagcagccaaaagaagagaaaaaatggctgcatcaagggcttatgaatcagccttttagtctgagctttacgctggctgaaaatatggaagtctctggcgcaaccttcgtaaacggtttactgcatattgatttaattcgtaatgagcctgaacccatcgcagcgcagcgtatcgctatcagcgaacgtcccgcgttaaatagctaa

SEQ ID NO: 1801 - DNA, 414 bp, Escherichia coli
atgcgtaactttgatttatccccgctttaccgttctgctattggatttgaccgtttgtttaaccacttagaaaacaaccagagccagagtaatggcggctaccctccgtataacgttgaactggtagacgaaaaccattatcgcattgctatcgctgtggctggttttgctgagagcgaactggaaattaccgcccaggataatctgctggtggtgaaaggtgctcacgccgacgaacaaaaagagcgcacctatctgtaccagggcatcgctgaacgcaactttgaacgtaaattccagttagctgagaacattcatgttcgtggtgctaacctggtgaatggtctgctgtatatcgatctcgaacgcgtgattccggaagcgaaaaaaccgcgccgtatcgaaatcaactaa

SEQ ID NO: 1802 - DNA, 261 bp, Escherichia coli
atgtcccataccggggggaaagaaggaacgtatcctggcacccgcgccagcgcaaccatgattggcgacgatgaaaccaactggggcacaaaatcgctggcgatactcgacatgccatttaccgcagtactggacacaatattgctaccgtgggatgtgttccgcaaagacagctcagtgcgctcgcgcgttgaaaaaagcgaagccaacgcgcaagaaaccaataacgtcattccccccgccaaaatgcctgcaaactga

SEQ ID NO: 1803 - DNA, 1215 bp, Escherichia coli
atgaaacagataacctttgctccccgtaatcacctgctcaccaacaccaatacctggacgcccgacagccagtggctggtgtttgacgtgcggccttctggggcgtcgtttaccggcgagaccattgagcgtgtgaatatccataccggcaaggtcgaggttatctatcgcgcgtcacagggcgcacacgtcggcgtggtgaccgttcatccgaagtcagagaagtatgtcttcatccacggcccggaaaatcctgatgaaacatggtattacgactttcatcatcggcgcggagtgattgttgaaagcggcaaggtgagcaatctcgatgcaatggatattaccgcgccatatacgccaggagcgctgcgcggcggcagtcatgtacatgtctttagcccaaacggtgaaagggtgagctttacctacaacgaccatgtaatgcatgaactcgatccggcgctggatttgcgaaatgtcggtgttgctgcaccgttttgcccggtcaacgtacaaaagcagcatccgcgtgaatacagcggtagccactggtgcgtgctggtaagtaaaaccacgcccacgccacagcctggcagtgatgaaatcaatcgtgcttatgaagaaggatgggtaggaaatcacgcactggcgtttattggcgacacactttcggcaaagggcgagaaagtgccggagctgtttattgtcgagttgccgcaagatgaagctggctggaaagtggcaggtgatgcgccgttaagcggaacggaaacaaccctgcctgcgccaccgcgtggcgtcgtgcagcgacgtttaacctttacgcaccatcgtatttacccgggcctggttaacattccgcgccactgggtgcgttgtaatcctcaaggaacacaaattgcgtttttaatgcgtgatgataacggcattgtgcaactgtggcttatctcgccacagggcggtgaaccacgccagttaacccataataaaacggatattcagtctgcatttaactggcatccatcaggcgaatggctgggatttgtgctggataatcggattgcttgtgcccatgcgcaaagcggcgaggttgagtatttaaccgaaaaccacgccaatccaccttctgcggacgccgtggttttctcgccggatggtcaatggttggcgtggatggaggacggtcagttgtggatcaccgaaactgaccgctag

SEQ ID NO: 1804 - DNA, 1101 bp, Escherichia coli
atggaacatttcgacgtggcgattattggcctcggcccggcagggtcggcgttggcgcgaaagttagcaggcaaaatgcaggtgatcgcgctggataaaaagcaccagcatggtactgaaggtttcagcaaaccttgtggcggtctgctggcaccggacgcgcagcgatcttttattcgcgatggactgacgcttcctgtcgatgtcatcgccaacccgcagattttcagcgtcaaaaccgtcgacgtcgccgcatcgctcacgcgtaactaccagcgaagctatatcaatattaatcgccatgctttcgacttgtggatgaaatcgctgatccccgccagcgttgaggtttaccacgacagcctgtgtcgaaaaatctggcgtgaggatgataaatggcatgtcatttttcgcgcagacggctgggagcagcatattaccgcccgctatctggtcggtgccgatggtgccaactcgatggtgcggcgacatctctacccggatcatcagattcgtaaatatgtcgccatccagcagtggttcgcagagaaacatccggtgccgttctactcctgcatctttgataatgcgataactgactgttactcatggagtatcagcaaagacggttattttatctttggcggtgcctatccgatgaaagacggtcagacgcgtttcacggcgctgaaagagaaaatgagtgcctttcagttccagtttggtaaggcggtgaaaagcgaaaaatgcacggtgctgtttccctcacgctggcaggattttgtctgcggcaaggacaacgcctttctgattggcgaagcggcgggatttatcagcgccagctcgctggaggggattagctatgcgctggatagcgcagagattctgcgttcggtattactgaagcagccagagaagctcaataccgcttacaggcgcgccactcgcaaactgcgtttaaaactcttcggcaagatagtaaaaagccgatgcctgaccgcaccggctttaagaaagtggattatgcgcagtggagtggcgcatattccacagttgaaagattatccaacgcgcttcacatcgcccaccagcaggatgtaa

SEQ ID NO: 1805 - DNA, 1293 bp, Escherichia coli
atggatattcccgttaatgcagcaaagccggggcgtcggcgttatctgacgctggtgatgatctttattacggtggtcatttgttatgttgaccgcgctaacctggccgtggcttctgcccatattcaggaagagtttggtattactaaagcgcaaatgggctatgtattttcagccttcgcctggctttatacgctatgtcagatccccggcggttggtttttagatcgcgtaggttcacgcgtgacttattttattgcgatatttggctggtcagtggcgactttattccagggctttgccacgggattaatgtcattaattggtctgcgcgcgataaccggtattttcgaagcgcccgctttcccgaccaataaccggatggtgaccagctggttcccggaacatgaacgcgcttctgccgttggtttttatacgtctggtcagtttgtcggtctggcgtttctgactccgctgctgatctggattcaggagatgttgagctggcactgggtgttcattgtcaccggtggtatcggcattatctggtcgctgatttggtttaaggtttatcagccgccgcgcctgaccaaaggcatcagcaaagctgaactggattacattcgtgatggcggcggtctggtggatggtgatgcgccggtgaaaaaagaggcgcgtcagccgttaacagccaaagactggaaactggtgttccatcgtaaactgatcggtgtctatcttgggcaatttgcggtggcttctacactgtggtttttcttaacctggttcccgaactatttaacccaggaaaaaggaatcacggcgctgaaagcaggttttatgaccacggtgccattcctcgcggcgtttattggcgtcctgctctctggctgggtcgcggatctgctggtacgtaagggcttttcactgggctttgcgcgtaaaacgccgattatctgcggcttgctgatctccacctgcattatgggtgcgaactacaccaacgatccgatgatgattatgtgcctgatggcgctggcattcttcggcaacggttttgcttcgataacctggtcgctggtctcttctctggcaccgatgcgcctgattggtttaaccggcggcgtgtttaactttgccggtggcctgggcggcatcactgttccgctggtggtggggtacctggcgcagggttacggtttcgcacctgcactggtttatatctccgccgtcgcgttgattggcgcgctctcttacatcctgctggtgggcgatgtgaagcgcgttggataa

SEQ ID NO: 1806 - DNA, 1149 bp, Escherichia coli
atgaaaatcaccaaaattaccacgtatcggttacctccccgctggatgttcctgaaaattgaaaccgatgaaggtgtggtcggttggggcgagcccgtgattgaaggccgcgctcgcacggtggaagcggcagtccacgagctgagtgactatttgattagtcaggacccgtcacgcatcaacgacttatggcaagtgatgtatcgcgccggattttatcgtggcggtccgattctgatgagcgccatcgccgggattgaccaggcgttatgggatatcaaaggcaaagtgctgaatgcgccggtctggcaactgatgggcggcctggttcgcgacaaaattaaagcctacagttgggtcggcggcgatcgtccggcggatgttatcgacggcattaaaacgctacgcgaaatcggcttcgataccttcaaactgaacggttgtgaagaactggggctaattgataactcccgcgcggtagatgcggcagtcaacaccgtggcacaaattcgtgaagcttttggcaatcagattgagtttggtcttgatttccatggtcgcgtcagcgcgccgatggcgaaagtgctgattaaagaactggagccgtatcgcccgctgtttattgaagagccggtgctggcggaacaggccgaatactacccgaaactggcggcacaaacgcatattccactggcggcgggtgagcgcatgttctcacgcttcgattttaaacgtgtgctggaggcaggcggtatttcgattctgcaaccggatctctcccacgcaggcggtattaccgaatgctacaaaattgccggaatggcagaagcctatgacgtgacccttgcgccgcactgtccgctcggaccgattgcactggcggcttgcctgcatatcgactttgtttcctataacgccgtccttcaggaacaaagtatgggcattcattacaacaaaggcgcggagttactcgactttgtgaaaaacaaagaagacttcagcatggtcggcggtttctttaaaccattaacgaaaccgggcttaggcgtggaaatcgacgaagctaaagttattgagttcagtaaaaatgccccggactggcgtaatccgctctggcgtcatgaagataacagcgtagcagagtggtaa

SEQ ID NO: 1807 - DNA, 618 bp, Escherichia coli
atgcagtggcaaactaaactcccgctgatcgccattttgcgcggcattacgcccgacgaggcactggcacatgttggcgcggtgattgacgccgggttcgacgcggttgaaatcccgctgaattcccctcaatgggagaaaagcattcccgccatcgttgatgcatacggcgataaggcgttgattggcgcaggtacggtactgaaacctgaacaggtcgatgcactcgccaggatgggctgccagctcatcgttacgcccaatatccatagtgaagtgatccgccgtgcggtgggctacggcatgaccgtctgccccggctgtgcgacggcgaccgaagcctttaccgcgctcgaagcgggcgcgcaggcgctgaaaatatttccgtcatcggcttttggtccgcaatacatcaaagcattaaaagcggtattaccaccggacatcgcagtctttgccgttggcggcgtgacgccagaaaacctggcgcagtggatagacgcaggttgtgcaggggcgggcttaggcagcgatctctatcgcgccgggcagtccgtagaacggactgcgcagcaggcagcagcatttgttaaggcgtatcgagaggcagtgcaatga

SEQ ID NO: 1808 - DNA, 879 bp, Escherichia coli
atgacagctcgctacatcgcaattgactggggatcgaccaatctgcgcgcctggctttatcagggcgaccactgcctggacagcaggcaatcagaagcaggcgtcacgcgcctgaacggaaaatctccggctgcggtgttagcagaagtgacgaccgactggcgtgaagagaatacgccagtggtaatggcaggaatggtcggcagcaatgtcggctggaaagttgcgccgtatttatccgttccagcccgtttctcgtctattggcgaacaattaacatctgctggcgacaatatctggattattcccggattatgcgtctctcatgacgataaccacaatgtgatgcgcggcgaagaaacacaattgatcggcgcgcgcactctcgctccttcctctctttatgtcatgcccggtacgcattgcaaatgggtgcaggccgatagccagcaaattaacgattttcgcaccgtgatgaccggtgaattacatcatttactgttaaatcactcattgattggcgcaggtttgccgccgcaggaaaactctgccgatgctttcgcggctggtcttgagcgtggccttaatgctcccgacatattgccgcagctttttgaagttcgcgcctcgcatgtgctgggaacacttccccgcgaacaggtcagcgaatttctctctggtttgttgattggcgcagaggtcgccagtatgcgcgactatgtgacccatcaacaagtcatcacccttgtcgccggaacatcgctgaccgcgcgctaccagcaagcctttcaggcgatgggttgcgacgtgacggcggtggcaggcgacacggcatttcaggctggtataaggagcatcgctcatgcagtggcaaactaa

SEQ ID NO: 1809 - DNA, 690 bp, Escherichia coli
atgactctcaataaaaccgatcgcatcgttattacgctgggtagacagatcgttcacggcaaatacgtgccaggctcgccgcttccggctgaggcagaactctgtgaggagtttgcaacctcgcgcaacatcatccgtgaggtatttcgttcgctgatggcgaagcggctgattgaaatgaaacgttatcgcggggcgtttgtggctccgcgtaaccagtggaattacctcgacactgacgtactgcaatgggtgctggaaaacgactacgacccacggcttatcagtgcaatgagcgaagtgcgaaatctggtggaaccggcgattgcccgttgggcagcagaacgcgcgacctccagcgatctggcgcagattgaatcggcgctgaacgagatgattgctaacaatcaggaccgcgaagcgtttaacgaagcggatattcgctaccacgaggcggtgctgcagtcggtgcataacccggtgttacagcaactgagcattgcgatcagttcgctgcagcgggcggtttttgaacgaacctggatgggcgatgaggccaacatgccgcaaacgctccaggaacataaggcgctgttcgatgcgataaggcatcaggacggcgatgcggcagagcaggcggcgcttaccatgatcgccagctcgacacgaaggttaaaggaaatcacatga

SEQ ID NO: 1810 - DNA, 657 bp, Escherichia coli
atgaagttgaatcttaagggatttttcaaagctgccagtttgtgttctttggcatttgcgttgaccggatgtatcacctggggattggtttccaatactgcaagtcgtccacatgccgagcaatggcggtcagacacgattaagggtttatcgctggctgaagacagtaacggtacgaaaggctatgtttttgttggtgaatcgttggactatctgttgaccaccggcggcgatgaggtggttaacatgctgaacgatccggcaatccatggtgaaagaatcaccgtttctgataacgcgaaatttattttaagcagcagtaataagaatttctctggtgctattacgctctattacgactggaacaacgaagaagataaggcactggcaacacaatatggttttatttgtgatacccggcgttgtacatggatgctggacggtttgaaaggctcaatccaccagaaaaataaaaaagcggattactcaaacgtgatggttttccatcaaccctttacggtgggattttatgagtacaaagcaacagatggcgtcccgcacggcctcgttaatgcgctgctgccagtcactcttacgctggatatagtaacgtcaccactccagttcctgattttatgcacgaccagaaattgttaa

SEQ ID NO: 1811 - DNA, 813 bp, Escherichia coli
atggctatcaaactcattgctatcgatatggatggcacccttctgctgcccgatcacaccatttcacccgccgttaaaaatgcgattgccgcagctcgcgcccgtggcgtgaatgtcgtgctaacgacgggtcgcccttatgcaggtgttcacaattacctgaaagagctgcatatggaacagccgggcgactactgcattacttataacggcgcgctggtacagaaggccgctgatggtagcaccgtggcgcaaaccgctctcagctatgacgactaccgtttcctggaaaaactctctcgcgaagtcggttctcatttccacgccctggaccgcaccacgctgtacaccgccaaccgagatatcagctactacacggtgcatgaatctttcgttgccaccattccgctggtgttctgcgaagcggagaaaatggaccccaatacccagttcctgaaagtgatgatgattgatgaacccgccatcctcgaccaggccattgcgcgtattccgcaggaagtgaaagaaaaatacaccgtgctgaaaagtgcgccgtacttcctcgaaatcctcgataaacgcgttaacaaaggtacgggtgtgaaatcactggccgacgtgttaggtattaaaccggaagaaatcatggcgattggcgatcaggaaaacgacatcgcaatgattgaatatgcaggcgtcggtgtggcgatggataacgctattccttcggtgaaagaagtggcgaactttgtcaccaaatctaaccttgaagatggcgtggcatttgctattgagaagtatgtgctgaattaa

SEQ ID NO: 1812 - DNA, 399 bp, Escherichia coli
atgggcctttttgatgacgttgtcggtgcctttctgaaaggcgatgcggggaaatatcaggccattttgagctgggttgaggaacagggcggcattcaagtgctgttggaaaaactgcaaagtggcggcttaggggccattctctcaacctggctgagtaatcaacagagcaatcaatcagttagcggcgagcaagtggaatcggcgctcggcacaaatgcggtgtccgatctcgggcaaaaacttggcgtggataccagtacagcttccagtttactggcagaacaattgccgaagattattgatgcgctctcaccgcaaggtgaagtgtcaccacaagccaataacgatctgctttccgcaggcatggaactgctgaaagggaaacttttccgctaa

SEQ ID NO: 1813 - DNA, 2415 bp, Escherichia coli
atgtcgaattcttatgactcctccagtatcaaagtcctgaaagggctggatgcggtgcgtaagcgcccgggtatgtatatcggcgacacggatgacggcaccggtctgcaccacatggtattcgaggtggtagataacgctatcgacgaagcgctcgcgggtcactgtaaagaaattatcgtcaccattcacgccgataactctgtctccgtacaggatgatgggcgcggcattccgaccggtattcacccggaagagggcgtatcggcggcggaagtgatcatgaccgttctgcacgcaggcggtaaatttgacgataactcctataaagtgtccggcggtctgcacggcgttggtgtttcggtagtaaacgccctgtcgcaaaaactggagctggttatccagcgcgagggtaaaattcaccgtcagatctacgaacacggtgtaccgcaggccccgctggcggttaccggcgagactgaaaaaaccggcaccatggtgcgtttctggccaagccttgaaaccttcaccaatgtgaccgagttcgaatatgaaattctggcgaaacgtctgcgtgagttgtcgttcctcaactccggcgtttccattcgtctgcgcgacaagcgcgacggcaaagaagaccacttccactatgaaggcggcatcaaggcgttcgttgaatatctgaacaagaacaaaacgccgatccacccgaatatcttctacttctccaccgaaaaagacggtattggcgtcgaagtggcgttgcagtggaacgatggcttccaggaaaacatctactgctttaccaacaacattccgcagcgtgacggcggtactcacctggcaggtttccgtgcggcgatgacccgtactctgaacgcctacatggacaaagaaggctacagcaaaaaagccaaagtcagcgccaccggtgacgatgcgcgtgaaggcctgattgcggtcgtttccgtgaaagtgccggacccgaaattctcctcacagaccaaagacaaactggtttcttctgaggtgaaatcggcggttgaacagcagatgaacgaactgctggcggaatacctgctggaaaacccaaccgacgcgaaaatcgtggtcggcaaaattatcgatgctgcccgtgcccgtgaagctgcgcgtcgcgcgcgtgaaatgacccgccgtaaaggtgcgctggatttagctggcctgccgggcaaactggcagactgccaggaacgcgatccggcgctttccgaactgtaccttgtggaaggggactccgcgggcggctctgcgaagcaggggcgtaaccgcaagaaccaggcgattctgccgctgaagggtaaaatcctcaacgtcgagaaagcgcgcttcgataagatgctctcttctcaggaagtggcgacgcttatcaccgcgcttggttgtggtatcggtcgtgacgagtacaacccggacaaactgcgttatcacagcatcatcatcatgaccgatgcggacgtcgacggctcgcacattcgtacgctgctgttgaccttcttctatcgtcagatgccggaaatcgttgaacgtggtcacgtctacatcgctcagccgccgctgtacaaagtgaagaaaggtaagcaggaacagtacattaaagacgacgaagcgatggatcagtaccagatctctatcgcgctggatggcgcaacgctgcacaccaacgccagtgcaccggcgctggctggtgaagcgttagagaaactggtgtctgagtacaacgcgacgcagaaaatgatcaaccgcatggagcgtcgttatccgaaagcaatgctgaaagagcttatctatcagccgacgctgacggaagccgatctctctgatgagcagaccgttacccgctgggtgaacgcgctggtcagcgaactgaacgacaaagaacagcacggcagccagtggaagtttgatgtccataccaatgccgaacaaaacctgttcgagccgattgttcgcgtgcgtacccacggtgtggatactgactatccgctggatcacgagtttatcaccggcggcgaatatcgtcgtatctgcacgctgggtgagaaactgcgtggcttgctggaagaagatgcatttatcgaacgtggcgaacgtcgtcagccggtagccagcttcgagcaggcgctggactggctggtgaaagagtcccgtcgcggcctctccatccagcgttataaaggtctgggcgagatgaacccggaacagctgtgggaaaccaccatggacccggaaagccgtcgtatgctgcgcgttaccgttaaagatgcgattgctgccgaccagttgttcactacgcttatgggcgacgccgttgaaccgcgccgtgcgtttattgaagagaacgctctgaaagcggcgaatatcgatatttaa

SEQ ID NO: 1814 - DNA, 1074 bp, Escherichia coli
atgtccctcacccgcttgttgatccgcgatttccgcaacattgaaaccgcggatctcgccttatctcccggctttaactttctggtaggtgccaacggcagtggcaaaaccagcgtgctggaagccatctatacgctcggccacggtcgggcgtttcgcagtttgcagattggtcgcgtcattcgccacgagcaggaggcgtttgttctccacgggcgattacagggcgaagagcgcgagacggcgattggtttaaccaaagacaaacaaggcgacagcaaagtccgtattgacggtacagacgggcataaagtcgcggagctggcgcacctgatgccaatgcagctgataacgccagaagggtttactttactcaacggcggccccaaatacagaagagcattcctcgactggggatgctttcacaacgaacccggatttttcaccgcctggagcaatctcaagcgattgctcaagcagcgcaatgcggcgctgcgccaggtgactcgttacgaacagctacgcccgtgggataaagaactgatcccgctggcggagcaaatcagcacctggcgcgcggagtatagcgccggtatcgcggctgatatggccgatacctgtaagcaatttctccctgagttttctctgactttctctttccagcgcggctgggagaaagagacagaatatgctgaggtgctggaacgtaattttgaacgcgatcgccagctaacctacaccgcgcatggcccgcataaagcggacttacgcattcgcgccgacggtgcgccggtggaagataccttatcgcgtgggcagcttaagctgctgatgtgcgccttacgtctggcgcaaggagagttcctcacccgtgaaagcgggcggcggtgtctctacctgatagatgattttgcctctgagcttgatgatgagcgtcgcgggctgcttgccagccgcttaaaagcgacgcaatcacaggtctttgtcagcgcgatcagtgctgaacacgttatagacatgtcggacgaaaattcgaagatgtttaccgtggaaaagggtaaaataacggattaa

SEQ ID NO: 1815 - DNA, 1101 bp, Escherichia coli
atgaaatttaccgtagaacgtgagcatttattaaaaccgctacaacaggtgagcggtccgttaggtggtcgtcctacgctaccgattctcggtaatctgctgttacaggttgctgacggtacgttgtcgctgaccggtactgatctcgagatggaaatggtggcacgcgttgcgctggttcagccgcacgaaccaggggcgacgaccgttccggcgcgcaaattctttgatatctgccgtggtctgcctgaaggcgcggaaattgccgtgcagctggaaggtgagcggatgctggtgcgctccgggcgtagccgtttttcgctgtctaccctgccagcggcagatttcccgaacctcgatgactggcagagcgaagtcgaatttaccctgccgcaggcgacgatgaagcgtctgattgaagcgacccagttttctatggcgcatcaggacgttcgctattacttaaacggtatgctgtttgaaaccgaaggtgaagaactgcgcaccgtggcgaccgacggccaccgtctggcagtctgttcaatgccaattggtcaatctttgccaagccattcggtgatcgtgccgcgtaaaggcgtgattgaactgatgcgtatgctcgacggcggcgacaatccgctgcgcgtgcagattggcagcaacaacattcgcgcccacgttggcgactttattttcacctcgaaactggtggatggtcgcttcccggattaccgtcgcgttctgccgaagaacccggacaaacatctggaagctggctgtgatctgctcaagcaggcgtttgctcgtgcggcaattctctctaacgagaaattccgcggcgtgcgtctgtatgtcagcgaaaaccagctgaaaatcaccgccaacaacccagaacaggaagaagcggaagagatcctcgacgttacctatagcggtgcggagatggaaatcggcttcaacgtcagctatgtgctggatgttctcaacgcactgaaatgcgaaaacgtccgcatgatgctgaccgattcggtttccagcgtgcagattgaagatgcggccagccagagcgcggcttatgttgtcatgccaatgagactgtaa

SEQ ID NO: 1816 - DNA, 1404 bp, Escherichia coli
gtgtcactttcgctttggcagcagtgtcttgcccgattgcaggatgagttaccagccacagaattcagtatgtggatacgcccattgcaggcggaactgagcgataacacgctggccctgtacgcgccaaaccgttttgtcctcgattgggtacgggacaagtaccttaataatatcaatggactgctaaccagtttctgcggagcggatgccccacagctgcgttttgaagtcggcaccaaaccggtgacgcaaacgccacaagcggcagtgacgagcaacgtcgcggcccctgcacaggtggcgcaaacgcagccgcaacgtgctgcgccttctacgcgctcgggttgggataacgtcccggctccggcagaaccgacctatcgttctaacgtaaacgtcaaacacacgtttgataacttcgttgaaggtaaatctaaccaactggcgcgcgcggcggctcgccaggtggcagataaccctggcggtgcttataacccgttgttcctttatggcggcacgggtttgggtaaaactcacctgctgcatgcggtgggtaacggcattatggcgcgcaagccgaatgccaaagtggtttatatgcactccgagcgctttgttcaggacatggttaaagccctgcaaaacaacgcgatcgaagagtttaaacgctactaccgttccgtagatgcactgctgatcgacgatattcagttttttgctaataaagaacgatctcaggaagagtttttccacaccttcaacgccctgctggaaggtaatcaacagatcattctcacctccgatcgctatccgaaagagatcaacggcgttgaggatcgtttgaaatcccgcttcggctggggactgactgtggcgatcgaaccgccagagctggaaacccgcgtggcgatcctgatgaaaaaggccgacgaaaacgacattcgtttgccgggcgaagtggcgttctttatcgccaagcgtctacgatctaacgtacgtgagttggaaggcgcgctgaaccgcgtcattgccaacgccaactttaccggacgggcgatcaccatcgacttcgtgcgtgaggcgctgcgtgacttgctggcattgcaggaaaaactggtcaccatcgacaatattcagaagacggtggcggagtactacaagatcaaagtcgcggatctcctttccaagcgtcgatcccgctcggtggcccgtccgcgccagatggcgatggcgctggcgaaagagctgactaaccacagtcttccggagattggcgatgcctttggtggtcgtgaccacacgacggtgcttcatgcctgccggaagatcgagcagttgcgtgaagagagccacgatatcaaagaagatttttctaatttaatcagaacattgtcatcgtaa

SEQ ID NO: 1817 - DNA, 141 bp, Escherichia coli
atgaaacgcacttttcaaccgtctgtactgaagcgcaaccgttctcacggcttccgtgctcgtatggctactaaaaatggtcgtcaggttctggcacgtcgtcgtgctaaaggccgcgctcgtctgaccgtttctaagtaa

SEQ ID NO: 1818 - DNA, 327 bp, Escherichia coli
ttgttaactcccagtcaattcacattcgtcttccagcagccacaacgggctggcacgccgcaaattaccattctcggccgcctgaattcgctggggcatccccgtatcggtcttacagtcgccaagaaaaacgttcgacgcgcccatgaacgcaatcggattaaacgtctgacgcgtgaaagcttccgtctgcgccaacatgaactcccggctatggatttcgtggtggtggcgaaaaaaggggttgccgacctcgataaccgtgctctctcggaagcgttggaaaaattatggcgccgccactgtcgcctggctcgcgggtcctga

SEQ ID NO: 1819 - DNA, 1647 bp, Escherichia coli
atggattcgcaacgcaatcttttagtcatcgctttgctgttcgtgtctttcatgatctggcaagcctgggagcaggataaaaacccgcaacctcaggcccaacagaccacgcagacaacgaccaccgcagcgggtagcgccgccgaccagggcgtaccggccagtggccaggggaaactgatctcggttaagaccgacgtgcttgatctgaccatcaacacccgtggtggtgatgttgagcaagccctgctgcctgcttacccgaaagagctgaactctacccagccgttccagctgctggaaacttcaccgcagtttatttatcaggcacagagcggtctgaccggtcgtgatggcccggataacccggctaacggcccgcgtccgctgtataacgttgaaaaagacgcttatgtgctggctgaaggtcaaaacgaactgcaggtgccgatgacgtataccgacgcggcaggcaacacgtttaccaaaacgtttgtcctgaaacgtggtgattacgctgtcaacgtcaactacaacgtgcagaacgctggcgagaaaccgctggaaatctccacctttggtcagttgaagcaatccatcactctgccaccgcatctcgataccggaagcagcaacttcgcactgcacaccttccgtggtgcggcgtactccacgcctgacgagaagtacgagaaatacaagttcgataccattgccgataacgaaaacctgaacatctcttcgaaaggtggttgggtggcaatgctgcaacagtatttcgcgacggcgtggatcccgcataacgacggtaccaacaacttctataccgctaatctgggtaacggcatcgccgctatcggctataaatctcagccggtactggttcagcctggtcagactggcgcgatgaacagcaccctgtgggttggcccggaaattcaggacaaaatggcagctgttgctccgcacctggatctgaccgttgattacggttggttgtggttcatctctcagccactgttcaaactgctgaaatggatccatagctttgtgggtaactggggcttctccattatcatcatcacctttatcgttcgtggcatcatgtacccgctgaccaaagcgcagtacacctccatggcgaagatgcgtatgctgcagccgaagattcaggcaatgcgtgagcgtctgggcgatgacaaacagcgcatcagccaggaaatgatggcgctgtacaaagctgagaaggttaacccgctgggcggctgcttcccgctgctgatccagatgccaatcttcctggcgttgtactacatgctgatgggttccgttgaactgcgtcaggcaccgtttgcactgtggatccacgacctgtctgcacaggacccgtactacatcctgccgatcctgatgggcgtaacgatgttcttcattcagaagatgtcgccgaccactgtgaccgacccgatgcagcagaagatcatgacctttatgccggtcatcttcactgtgttcttcctgtggttcccgtcaggtctggtgctgtactatatcgtcagcaacctggtaaccattattcagcagcagctgatttaccgtggtctggaaaaacgtggcctgcatagccgcgagaagaaaaaatcctga

SEQ ID NO: 1820 - DNA, 1365 bp, Escherichia coli
atgagcgataatgacactatcgtagcccaggccacgcctccgggacgtggcggcgttggcatcctgcgcatctccggcttcaaagcccgtgaagttgccgaaaccgtgctgggtaaactgcctaagccgcgctacgccgattatcttccgtttaaagacgccgacggcagcgtgctcgatcaggggattgcgctatggttccctggcccgaactcgttcaccggcgaagatgtgctggaactgcaaggtcatggcggtccggtgatcctcgacctgctgttaaaacgcattctgaccattcccggcctgcggattgctcgcccgggtgagttttccgaacgcgcgtttcttaacgataaactcgacttagcccaggccgaggcgattgcggatcttatcgacgccagctcggaacaggcggcccgttcggcgctaaactcgctgcaaggcgcgttctccgcacgggtcaaccatctggtggaagccctcacccacttgcgcatttacgtcgaagcggcgattgatttccccgatgaagagatcgatttcctctccgacggcaaaattgaagcccagctcaataacgtaattgccgatctcgacgcggtacgcgccgaagctcgtcagggtagtttgttgcgcgaagggatgaaagtggtgattgccggacgtcctaacgccggtaaatcgagcctgctgaacgcgctggcgggccgtgaagcagcaatcgtaaccgatatcgccggaaccacgcgtgacgtgctgcgtgagcatatccacattgacggaatgccgttgcatatcatcgataccgccgggctacgtgaagcaagtgacgaagttgaacgtattggtatcgagcgcgcatggcaggaaattgaacaggcagaccgcgtgctgtttatggtcgatggcaccacgacagacgccgttgatccggcagagatctggccggaattcatcgcccgtctgccagcgaaactgccgatcaccgtggtgcgcaataaagccgatatcaccggcgaaacgttggggatgagcgaagtgaacggtcatgcgttaattcgtctttcggcgcggactggcgaaggcgtggatgtactgcgtaaccatctcaaacagagcatgggctttgacaccaatatggaaggcggcttcctggcgcgtcgtcgtcacctacaggcgctggaacaggcggcagagcatttgcagcaaggtaaagcgcaactgttaggtgcctgggcgggtgaactgctggcggaagagttgcgcctggcgcagcagaacttaagcgagatcaccggggaatttacttcagacgacctactggggcggattttctccagcttctgtatcggtaagtaa

SEQ ID NO: 1821 - DNA, 1416 bp, Escherichia coli
atggaaaactttaaacatctccctgaaccgttccgcattcgtgttattgagccagtaaaacgtaccactcgcgcttatcgtgaagaggcaattattaaatccggtatgaacccgttcctgctggatagcgaagatgtgtttatcgatttactgaccgacagcggcaccggggcggtgacgcagagtatgcaggccgcgatgatgcgcggcgacgaagcttacagcggcagccgcagctactacgcgttagccgagtcagtgaaaaatatctttggttatcaatacactattccgactcaccagggccgtggtgcagagcaaatctatattccggtactgattaaaaaacgcgagcaggaaaaaggcctggatcgcagcaaaatggtggcgttctctaactatttctttgataccacgcagggccatagccagattaacggctgtaccgtgcgtaacgtctatatcaaagaagccttcgatacgggcgtgcgttacgactttaaaggcaactttgaccttgagggattagaacgcggtattgaagaagttggcccgaataacgtgccgtatatcgttgcaaccatcaccagtaactccgcaggtggtcagccggtttcactggcaaacttaaaagcgatgtatagcatcgcgaagaaatacgatattccggtggtcatggactccgcacgctttgccgaaaacgcctatttcatcaagcagcgtgaagcagaatacaaagactggaccatcgagcagatcacccgcgaaacctacagatatgccgatatgctggcgatgtccgccaagaaagatgcgatggtgccgatgggcggcctgctgtgcatgaaagacgacagcttctttgatgtgtacaccgaatgcagaaccctttgcgtggtgcaggaaggcttcccgacatatggcggcctggaaggcggcgctatggagcgtctggcggtaggtctgtatgacggcatgaatctggactggctggcttatcgtatcgcgcaagtgcagtatctggtcgatggtctggaagagattggcgttgtctgtcagcaggcgggcggtcacgcggcattcgttgatgcaggtaaactgttgccgcatatcccggcagatcagttcccggcacaggcgctggcctgcgagctgtataaagtcgccggtatccgtgcggtagaaattggctctttcctgttaggccgcgatccgaaaaccggtaaacaactgccatgcccggctgaactgctgcgtttaaccattccgcgcgcaacatatactcaaacacatatggacttcattattgaagcctttaaacatgtgaaagagaacgcggcgaatattaaagggttaacctttacctacgaaccgaaagtattgcgtcacttcaccgcaaaactgaaagaagtttaa

SEQ ID NO: 1822 - DNA, 1248 bp, Escherichia coli
atgactgatcaatcagaaaaaaaacactctgcattttggggtgttatggttatagccggtacagtaattggcggtgggatgtttgctttacctgttgaccttgccggagcctggtttttttggggcgcttttattcttattattgcctggttttcaatgttacattcagggctattattattagaagcaaacttaaattatcccgtcggatccagttttaacaccatcaccaaagatttaatcggtaacacctggaacattatcagcggtattaccgttgccttcgttctctatatcctcacttatgcctatatctctgctaatggtgcgatcattagtgaaacgatatcaatgaatttgggctatcacgctaatccacgtattgtcgggatctgcactgccattttcgttgccagcgtattgtggataagttcgttagccgccagtcgtattacctcattgttccttgggctgaagattatctcctttgtaattgtttttggttctttcttcttccaggtcgattactccattctgcgcgattccaccagcaccactgcggggacgtcttacttcccgtatatctttatggctttgccggtgtgtctggcgtcatttggtttccacggcaatattcccagcctgattatttgctatggcaaaaagaaagacaaactaatcaaaagcgtggttttcggttcgctgctggcgctggtgatttatctcttctggctctattgcacgatggggaatatcccgcgagaaagctttaaggcgataatctcctcaggcggcaacgttgattcgctggtgaaatcgttcctcggcaccaaacagcacgggattatcgagttttgcctgctggtgttctccaacttagctgttgccagttcgttctttggtgtcacgctggggttgttcgattatctggcggatctgtttaagattgataactcccacggcgggcgtttcaaaaccgtgctgttaaccttcctgccacctgctttgttgtatctgatcttcccgaacggcttcatttacgggatcggcggtgccggactgtgtgccaccatctgggcggtaataattcctgctgtactggcaatcaaagcccgcaagaagtttcccaatcagatgttcacggtctggggcggcaatcttattccggcgattgtcattctctttggcataaccgtaattttatgctggttcggtaacgtctttaacgtgttacctaaatttggctaa

SEQ ID NO: 1823 - DNA, 1176 bp, Escherichia coli
atgtcccgctttttgatttgtagttttgccctggttttactttatcccgcagggattgatatgtacctcgttggtttaccgcgcatcgccgccgatctcaatgccagcgaagcgcagttgcatattgcgttctccgtttatctggcggggatggcggctgcgatgttatttgccggtaaagtggccgatcgttcagggagaaagcctgtcgccatacccggcgcggcgctatttattatcgcctcggtgttctgttcactggctgaaaccagcgcgttatttcttgcagggcgatttctacagggactgggcgcgggctgttgttacgtagtggcgtttgccattttgcgcgacacgctggatgatcgacgtcgggctaaagtgctgtcgttactcaacggcattacctgcatcattccggtgttagcgccagtgctcggacatctgattatgcttaacttcccatggcagagtctgttctggacgatggcaataatgggtgtcgcggtactgatgttgtctttgtttattttaaaagaaacgcgccctgcggcccccgcagcttcggacaaaccacgagaaaatagcgagtcactgcttaaccggtttttcctcagccgtgttgttatcaccaccctcagcgtttcggtgatcctcaccttcgtcaacacgtcgccagtattgctgatggaaatcatgggttttgagcgcggagaatacgccaccattatggcgttgaccgctggcgtcagcatgaccgtttcattctccacgccgtttgcgctgggaatttttaagccacgtacgttgatgatcacctcacaggtgttattcctggcggcggggatcacccttgccgtttcaccttcccatgcggtttcgctgtttggtatcacgctgatttgcgccggtttctcggtaggttttggtgtggcgatgagtcaggcgttagggccgttttcattacgcgcgggcgtagccagctcgaccttaggtattgcgcaagtttgctgttcgtcactgtggatttggctggcggcggtggttggtatcggcgcatggaatatgctgatcgggattctgattgcctgtagcatagtaagcctgttgctgattatgttcgtcgcgcctggacgcccggttgccgctcatgaagaaatccatcaccacgcttga

SEQ ID NO: 1824 - DNA, 960 bp, Escherichia coli
atgaagaaatccatcaccacgcttgatctcaatctgctgctctgtctgcaactgctgatgcaggagcgcagcgtgaccaaagcggcgaagcggatgaacgtgaccccttcggcggtgagtaagtcgctggcaaagttaagagcgtggtttgacgacccgctctttgtgaactcaccgctggggctgtcgcccacaccgctaatggtcagcatggagcaaaatctggcggagtggatgcaaatgagcaacctgctgctggataaaccgcaccaccagacaccgcgcggcctgaagtttgagctggcagcagaatcaccgctaatgatgatcatgcttaatgcgctgtcgaaacggatctaccaacgttacccgcaggcgaccatcaaattacgtaactgggattacgattccttagatgccattactcgtggtgaagtggatattggtttttccggtcgcgaaagtcatccccgttcgcgggagctgttaagctcgctaccgttagccattgattatgaagtgctgtttagtgatgtgccctgcgtctggttacgcaaagatcatccggcactgcatgaagcatggaatctggacacctttttacgttatccgcatatcagcatttgctgggaacagagcgatacctgggcgctggacaatgtgttacaggagctggggcgcgaacgcacgattgctatgagcctgccggaattcgagcagtcactgtttatggcagcacagcccgacaatctgctactggcgaccgcgccgcgctactgccagtactacaatcaactccaccaactgccgttggttgctcttcctctcccgtttgatgaaagccagcaaaaaaagctggaagtcccttttacccttctgtggcataaacggaacagccgtaatccgaagatcgtctggttacgggaaaccattaaaaatctttacgcgtcgatgacataa

SEQ ID NO: 1825 - DNA, 750 bp, Escherichia coli
atggcgactcactttgcccgagggattttaacggaaggacatctgatttctgttcgtctcccctcccagtgtcatcaagaagcccgaaacattccccctcatcgtcaaagccgttttctggcgtccagaggtttactcgcagaactgatattcatgctgtatggcattggcgaattgccggaaatcgtcaccctgccgaaaggaaaaccggttttcagcgataaaaatttgccttcgttttctatttcctatgccgggaatatggtcggcgtggcgttaacaaccgaaggtgaatgtggcctcgatatggaactacagcgtgcgacacgcgggtttcatagcccacacgcgcccgataaccacaccttttccagcaatgaatcgctatggatcagtaaacaaaacgatcctaacgaagcgcgggcgcagctcatcacgctgcgccgaagcgtgctaaaactaaccggtgatgttttgaatgacgatccgcgcgatctgcaactactgcccattgccggacgcctgaaatgtgctcatgtaaatcatgtagaagcgttatgcgacgcggaggacgtgctggtgtggtccgtggcggtcacgcccacgattgaaaagctcagtgtctgggagttagatggcaaacatggctggaaaagcctgcccgatattcacagccgcgccaacaatcctaccagccggatgatgcgttttgcccagctctctaccgtgaaggctttttcgccaaattga

SEQ ID NO: 1826 - DNA, 567 bp, Escherichia coli
atgtctgaaaaattgcaggtggttacgttactggggagcctgcgcaaaggctcatttaatggcatggttgcacgtaccctgccgaaaattgctccggcgagcatggaaatcaatgcgttaccttccattgccgacattcccctgtatgacgctgacgtacagcaggaagacggttttccagcaacagttgaagctctggcggaacagatccgtcaggctgacggtgtggtgatcgtcacgccggaatataactactcggtaccgggtgggctgaaaaatgccatcgactggctttcccgcctgccggatcaaccgctggctggtaaaccggtattgattcagaccagctcaatgggcgtgattggcggcgcgcgctgtcagtatcacctgcgccagattctggttttcctcgatgcaatggtgatgaacaagccagaatttatgggcggcgtgattcagaacaaagttgatccgcaaaccggggaagtgattgatcagagtacgctggaccacctgaccgggcaattgaccgcatttggtgagtttattcagcgagttaagatctaa

SEQ ID NO: 1827 - DNA, 1338 bp, Escherichia coli
atgagtcaacaacacacaacccaggcttctggccaggggatgctggaacgcgtgtttaaactgcgcgaacatggcacgacggcacggaccgaagtgatcgccggttttaccaccttcctgacgatggtttacatcgtttttgttaacccgcaaattcttggcgttgctggcatggataccagcgccgtcttcgtcacgacctgtctgattgctgcattcggcagtattatgatggggctgtttgctaacctgccagttgcactggcaccggcaatgggcctgaatgcgttcttcgcttttgtcgttgtacaggcgatgggcttgccgtggcaagtcgggatgggcgcaatcttctggggtgcgattggtctgctgttactgacgattttccgcgttcgctactggatgatagccaacattccggtaagtctacgtgtgggcatcaccagtggtatcggtctgtttattggcatgatggggctgaaaaacgcaggtgtgattgtcgctaacccggaaacgctggtgagcatcggtaatctgacttctcacagcgtgctgctggggatcctcggcttcttcatcatcgccattctggcctcgcgcaatattcacgcggcggtgctggtttccatcgtggtgacaacgctgctgggctggatgctgggtgatgtccactataatggcatcgtttctgcgccgccgagcgtaatgactgtcgtgggtcatgtagagttagccgggtcgtttaaccttgggctggcaggggtgattttctctttcatgctggtcaacttgtttgactcctccggtacgctgattggcgtgaccgataaagcaggtctggctgatgagaaaggtaaattcccgcgcatgaagcaggcgctgtatgtcgacagtatctcttcggtgaccggttcgtttatcggtacttcttctgttacggcgtatattgaatcttcttccggcgtttccgttggcggtcgtaccggtctgacggcagtggttgttggtctgctgttcctgctggttatcttcctgtcgccgctggcggggatggtgccaggctacgctgcagctggtgcgctgatttacgttggcgtgttgatgacctcaagtcttgctcgcgtgaactggcaggatcttactgaatctgttccggcgtttattaccgctgtgatgatgccgttcagcttctcgattactgaaggtatcgcgctgggctttatctcctactgcgtgatgaagattggtaccggacgtctgcgtgaccttagcccgtgcgtaatcatcgttgcgctgctgtttatcctgaagattgtctttatcgacgctcactaa

SEQ ID NO: 1828 - DNA, 666 bp, Escherichia coli
atgtcccagatagaagcggtatttttcgactgcgacggtacgctggtcgatagcgaggtcatttgctctcgcgcctatgtcacgatgttcagggaatttggcattcacgttgacctggaagagatttttacccgttttaaaggcgtaaaactctacgaaatcatcgacatcatcagtaaagaacagggcgtgacgatggtccaggccgatgccgaacacgtttaccgcgcagaagtagcacgtctgtttgataccgaacttgaggacatcgcaggagcgaacgaattgctggcaagcattaacgtgccgatgtgcgtcgtctctaacggtccggtcagcaaaatgcagcattcgcttggtaagctcaacatgctgcactacttcccggaaaaactgttcagcggctatgatatccagcgttggaagcccgatccggcattaatgttccatgcggcaaaagcgatgaatgtgaacgttgaaaactgcattctggtcgatgactccagcgcaggtgcgcaatcagggatagatgccggaatggaagtgttttacttctgcgctgacccgcacaataaaccgatcgttcacccgaaagtcaccacctttacccatctttcgcaattaccggaactgtggaaggcgcgtggttgggatattacggcatag

SEQ ID NO: 1829 - DNA, 474 bp, Escherichia coli
atgtctgtttcacgtcgggtaattcatcacggactgtattttgcggttttagggccgttaattggtgttctgtttcttgtcctctacatattcttcgcaaaagaaccgctgattcttttggtaataatacaggtacttccattgtttctcttattgtcgataactacgggagctattcctgcaatgttaactggcgtaatggtcgcctgtctgccggaaaagatcgggtcacagaaacgttatcgttgtctggttggcggcataggtggagtcgttatcaccgagatctattgcgctgttatcgtacatattaaggacatggcttcctcagcgttatttgaaaacattctttctggtgaaaatctcgttgtccgcatcatcccagcattgctggcaggcgtagtgatgagcagaatcattacacgtctacccggattggatatttcatgtcctgaaacagactctttaagctaa

SEQ ID NO: 1830 - DNA, 723 bp, Escherichia coli
atgaaattaatcattaccgaagattaccaggaaatgagccgtgtcgcggcacaccatctgcttggttatatgtcgaagacgcgtcgtgttaacctggcaattaccgccgggagcacgcccaaaggcatgtacgaatatctcatcactctggttaaaggtaagccctggtacgataactgctatttctataatttcgatgaaattccatttcgcggcaaagagggagaaggcgtaacgattaccaatctgcgtaatctgtttttcacccctgcggggatcaaagaagagaatatccagaagctcactattgataactaccgcgagcatgatcagaaactggcgcgtgaaggcggcctggatttggtggtgttgggattaggtgtagatggtcatttttgtggcaatctgccaaatacgacccatttccatgagcaaaccgtggagttcccgatccagggagagatggttgatattgtggcgcatggcgagttgggcggcgacttttcattagtgcctgacagctacgtgacgatggggccgaaaagcatcatggcggcgaaaaacttgctgataattgtcagtggcgcatgtaaagcgcaggcactgaaaaatgttctgcaaggtccggttaccgaagatgttccagcttccgtgttgcagctgcatccttcgctgatggtaatcgctgataaagccgctgccgcagaattagcgctcggttaa

SEQ ID NO: 1831 - DNA, 1170 bp, Escherichia coli
atgaatataaaaattgctgctttaacgctggctattgccagcggtatttctgctcaatgggccatagcagcggatatgccagccagcccggcacccactattccggtgaaacagtatgtgactcaggtcaataccgataacagcgtgacctttcgctactttgcccctggggcaaaaaatgtctccgtagtggtgggtgttccggttccggacaatattcacccgatgaccaaagatgaagcgggagtctggtcgtggcgcacgcctgtcctgaaaggcaatctgtacgagtattttttcaatgttgatggtgtacgcagcattgatacaggcacggcaatgactaagcctcagcgtcaggttaactccagtatgattctggtaccgggcagttatctggatacacgttctgttgtgcatggtgatttgatcgccataacttaccactccaacgcattgcaatccgaacgtcagatgtatgtctggaccccgccaggatacaccggcataggcgagcctttgccagtgctctatttctatcacggctttggtgataccggacgttccgctattgatcaggggcgtatcccgcaaatcatggataacctgctggctgaagggaaaattaaaccgatgctggtggtgatcccggataccgaaaccgatgcgaagggcattattcccgaagatttcgttcctcaggagagacgtaaagtcttttatccgttaaatgctaaagcggcagatcgcgaactgatgaacgatattatcccgctgattagcaagcgttttaatgtccgtaaagatgccgatggtcgcgcactggcagggctttcacaaggtgggtatcaggcactggtatcgggaatgaatcatctggaaagctttggctggctggccacattcagtggtgttaccacgacgaccgtaccagatgaaggggtcgctgcccggctgaacgatccggcagctattaaccagcaactacgtaattttactgtggttgtgggggataaagatgttgtaaccggcaaggatatcgccgggctgaaaactgagcttgagcagaaaaaaattaagtttgattaccaggaatatccgggtctgaaccatgaaatggatgtctggcggcctgcctatgcagccttcgtacagaaattattcaaataa

SEQ ID NO: 1832 - DNA, 1617 bp, Escherichia coli
atgtttagacgaaatattattacctctgccatcttattaatggcaccgttagccttttccgcacaatcattggctgaatcattaacagtggaacaacgccttgagctattagaaaaggcgttaagagaaacgcaaagcgaactgaaaaaatataaagatgaagagaagaaaaagtatacgccagcgacggtgaatcgtagcgtaagtacgaatgatcaagggtatgccgccaatccattcccgaccagtcgtgccgcaaagcctgatgctgtactggttaaaaatgaagagaaaaatgccagtgagacaggctcgatttattcttccatgactctgaaagatttcagtaaatttgtgaaagatgaaatcggctttagttacaacggctactaccgttctggttggggaacagcctctcatggttcacctaaatcatgggcaattggttctctgggccgctttggtaacgaatactccggctggtttgatttgcagttaaaacaacgtgtctacaacgaaaacggcaaacgggttgatgccatcgtgatgatggatggtaacgttggtcagcagtactctactggctggtttggcgataacgccggtggtgagaactttatgcagttctctgatatgtacgttaccaccaaaggtttcctgccctttgcgccagaggctgatttctgggtgggtaaacacggtgcgccgaaaattgaaatccagatgcttgactggaaaacgcagcgtaccgatgctgccgcaggtgtaggtctggaaaactggaaagtcggtccgggtaaaattgatatcgcgctggttcgtgaagatgtcgatgattacgatcgcagcctgcaaaacaaacagcagattaataccaataccattgatttacgctataaagatatcccgttatgggataaagccaccttaatggtgagcggtcgttatgtctcagcaaatgaaagcgcatcggaaaaagataatcaggataataacgggtattatgactggaaagatacctggatgtttggtacatctttaacgcagaaatttgataagggtggcttcaacgaattctccttcctggttgcgaataactctatcgccagtaactttggtcgttatgctggtgcaagtccatttactacctttaatggtcgttattatggtgatcacacaggcggaactgcagttcgtctgacttcgcagggcgaagcttatatcggcgatcatttcattgtggctaacgcgattgtttactccttcggtaacgatatttatagctacgaaacaggcgcacattctgatttcgaatctattcgtgcggttgttcgcccggcctatatttgggaccaatataaccagacaggtgttgaactgggctatttcacccagcaaaacaaagatgcgaatagcaataaatataatgagtctggttataaaaccacgctcttccatacctttaaagtcaataccagtatgttgacctcgcgcccggaaattcgtttctacgctacatatatcaaagctctggaaaacgaactggatggcttcacctttgaagacaataaagacgaccagtttgctgtcggtgcccaggctgaaatctggtggtaa

SEQ ID NO: 1833 - DNA, 1395 bp, Escherichia coli
atgaaagcatttccagaaacatttctttggggtggtgcaacagctgccaatcagatggaaggcgcctggcaggaagatggcaaagggatcacgacctcagatttacagcctcatggcgtaatgggaaaaatggaaccgcgcatcctggggaaagagaatatcaaagatgtcgccatcgatttttatcaccgttacccggaagatatcgcgttatttgccgagatgggcttcacctgtctgcgtatttccattgcctgggcgcgaatttttcctcagggcgatgaagccgaaccgaatgaagcggggttagcattttacgagcggctgtttgatgaaatggcgcaggcggggatcaagccgctggtaacgttatcccattacgaaatgccatatgggctggtgaaaaactacggcggttgggctaatcgggcggtcatcgatcacttcgagcattacgcacgcacggcctttacccgctaccaacataaagttgcgttatggctgacatttaatgaaatcaacatgtcattacacgcgccattcacgggcgtggggctggcagaagagagtggcgaggcggaagtttatcaggcgatccatcatcaactggttgccagtgcgcgggcagttaaagcctgtcatagcctgatccccgaagcgaaaattggcaatatgcttctcggtgggctggtttaccccctcacctgccagccacaggatatgttgcaggccatggaagagaaccggcgctggatgttctttggtgatgttcaggcgcgtggtcagtatcccggctatatgcagcgtttcttccgcgaccacaatatcaccattgagatgactgaaagtgacgcagaagatttaaaacataccgtagatttcatctcttttagttattacatgaccggttgtgtttcccacgacgaaagcattaataaaaatgcgcagggcaacatactgaatatgatcccaaatccgcatctgaaaagttcagagtgggggtggcaaattgatccggttggattacggattctgttaaatacgctttgggatcgttatcaaaaaccgttatttattgtcgagaacggattaggcgcaaaagacagcgttgaagtggatggttcgatacaggacgattatcgaattgcctatttaaacgatcaccttgtacaggtaaatgaagcgattgccgatggtgtggatattatggggtacaccagttgggggccaattgatttagtcagtgcatctcattcacaaatgtctaagcgctacggctttatttatgtggatcgtgatgataatggtgaaggaagcctcacaagaacgcgcaagaaaagcttcggatggtatgcagaagtgatcaaaactcgggggctatcattaaaaaaataa

SEQ ID NO: 1834 - DNA, 1875 bp, Escherichia coli
atgacggagttagccagaacaatagtcgcaggagtcgggggcgcagataacattgtgagtctgatgcattgtgcaacgcgattacgttttaagttaaaggatgaaagcaaagcgcaagctgaggtactgaaaaagacccccggtattattatggtggtggaaagcggtggccagtttcaggttgtcataggtaaccatgtggccgatgtcttcctggcggttaacagcgtggcaggccttggcgaaaaagcgcaacaggcaccggaaaatgatgataaagataatctgttaaaccgctttgtttatgttatttcaggtatttttacgcctctgatcggtttgatggcggcaaccgggatcctgaaaggtatgttggctctggcactcacttttcagtgggcgaccgaacaaagtggtacttatttaattttatttagcgccagtgatgccttgttttggttcttcccgataatcctgggctacaccgcagggaaacgcttcggcggcaatccatttactgccatggtgattggcggagcgttagtgcatccattaattctgactgccttcgagaacgggcaaaaagtggatgcgctggggctggatttcctgggtattccggtcacattgttgaattactcgtcatcggttattcccattattttttctgcctggttgtgcagcattctggaacgccgacttaatgcgtggttaccttcggcaatcaaaaatttcttcacacccttgctatgtctgatggtcatcacgcccatcacatttctgctggtggggccgctatcaacctggataagtgaactgattgctgccggttatctctggctttatcaggcggttcctgcatttgcaggcgcggtaatgggcggcttctggcaaatctttgtgatgttcggtctgcattggggtttgatacctttaattatcaataacttcaccgtgctgggctacgacaccatgatcccgctgttaatgcccgccattatggcgcaagtcggggcggcgctcggcgtcttcctctgcgaacgcgatgcacagaaaaaagtggtggcgggatcagcggcgttgacaggtttgtttggtatcaccgaaccagcggtatatggcgtcaatctgccgcgtaagtaccccttcgttatcgcctgcataagtggggcattgggggccaccatcattggctacgcgcaaacgaaagtttactcctttggtttgccaggtattttcaccttcatgcaaaccatcccgtcaacggggattgatttcaccgtatgggccagcgttattggcggtgtcattgccatcggttgcgcatttgtcggtacggtgatgtttcatttcatcaccgctaagagtcagtcagcgcaagttgcccagcaagagaaaacaccagaggttattacacctgagcagggcggtatctgttcaccgatgacgggagagattgtgccgctcattcacgtcgctgataccacgtttgccagcggcctgttgggtaaaggtattgccattctgccctctgttggtgaagtgcgttctccggtggcgggtcgaattgcttcgttgttcgccacattacatgccatcggcattgagtcagattatggcgtggagatcctgattcatgtcggtatcgacaccgtaaaactggacggcaaattcttttccgctcacgtcaacgtgggtgacaaggtcaatacaggcgatcggctgatttcttttgatatccctgctattcgcgaggccggatttgatctgacgacgccggtattaatcagtaatagcgatgattttacggacgtattaccccacggcacggcgcagataaacgctggtgagccgctgttatccatcattcgctaa

SEQ ID NO: 1835 - DNA, 837 bp, Escherichia coli
atgaacatgcaaatcaccaaaattctcaacaataatgttgtggtggttattgatgatcaacagcgggaaaaagtcgtcatggggcgcggaattggctttcaaaaacgcccaggcgaaagaattaactcaagtggaatagaaaaagagtatgccttgagcagtcatgaactgaacgggcgattaagcgaactcttaagtcatatgcctcttgaggtgatggcaacctgtgatcgtattatctctctggcgcaggagcgtctgggaaagttgcaggacagtatttatatctcgctaactgaccattgccagtttgcgattaaacgctttcagcaaaacgtgctactgcccaacccgctgctgtgggatatccagcgactttacccgaaagagttccagctaggggaagaagcgttaaccattattgataaacggttgggcgtgcagttaccgaaagatgaagtgggctttattgccatgcatctggtcagtgcccaaatgagcggaaatatggaggatgttgcaggtgtcacgcaattaatgcgagaaatgctgcaattaataaaatttcagttcagccttaattaccaggaagaaagcttgagttatcagcgactggttacgcatctgaaatttttatcctggcgtattcttgaacatgcatcgattaacgatagtgatgaatcattacaacaagcagtaaagcaaaattacccgcaagcatggcaatgtgcggagcggatcgccatttttgttggtttgcagtatcaacgtaaaatctcacctgcagagattatgtttttagccataaatatagagcgcgtgcgcaaagaacactga

SEQ ID NO: 1836 - DNA, 726 bp, Escherichia coli
atggacagtctcaatcttaataaacatatttccggccagttcaacgccgaactggaaagcatccgcacgcaggtgatgaccatgggcggcatggtggagcagcagctttctgatgcaatcaccgcgatgcataaccaggacagcgatctggcgaagcgcgtcatcgaaggcgacaagaacgtcaacatgatggaagtggcgatcgatgaagcctgcgtgcgcattatcgccaaacgtcagccgacggcgagcgacctgcgtctggttatggtgatcagtaaaaccattgccgagctggagcgtattggcgacgtggcggacaaaatctgccgtactgcactggagaaattctcccagcagcatcagccattgctggtaagtctggagtcgctgggccgtcataccatccagatgctgcacgacgtgctggacgcgttcgcgcggatggacattgacgaagcggtacgtatttatcgtgaagataaaaaagtcgatcaggagtacgaaggtattgttcgtcaactgatgacctacatgatggaagattcgcgtaccattccgagcgtacttaccgcgttattctgtgcgcgttctatcgaacgtattggcgaccgctgccagaatatttgtgagtttatcttctactacgtgaaggggcaggatttccgtcatgtcggtggtgacgagctcgataaactgctggcagaaaaagatagcgataaataa

SEQ ID NO: 1837 - DNA, 774 bp, Escherichia coli
atgagtatggttgaaactgccccgagtaaaattcaggttcgtaatttgaacttctactacggcaaattccatgccctgaaaaacatcaacctggatatcgccaaaaaccaggttacggcgtttatcgggccgtccggctgcggtaaatcaacgctgctgcgtaccttcaacaaaatgtttgaactgtacccggaacagcgtgcggaaggtgaaattctgctcgatggcgacaacatcctgaccaactctcaggatatcgccctgctgcgtgcgaaagtgggcatggtgttccagaaaccgacgccgttcccaatgtccatctacgacaacatcgcttttggcgtgcgtctgtttgagaagctctcccgtgctgacatggacgagcgcgtgcagtgggcattgaccaaagccgcattgtggaacgaaaccaaagataaattgcaccagagcggttactctctctctggtggtcagcaacagcgtttgtgtattgcgcgtggtatcgccattcgcccggaagtgctgctgctcgacgaaccgtgttcggcactcgaccccatctctaccgggcgtattgaagagctgatcaccgaactgaagcaggattacaccgtggtgatcgtcacccacaacatgcagcaggctgcgcgttgttccgaccacacggcgtttatgtacctgggcgaattgattgagttcagcaacacggacgatctgttcaccaagccagcgaagaaacaaacagaagactacatcaccggtcgttacggttga

SEQ ID NO: 1838 - DNA, 891 bp, Escherichia coli
atggctatggttgaaatgcaaaccactgcggcgctggctgaatcccgccgtaaaatgcaggcgcgtcgccgccttaagaaccgtattgcgctgacgctctcgatggcgacgatggccttcggtctgttctggctgatctggattttaatgtccaccatcactcgcggtatcgatggtatgtcgctggcgctgttcaccgaaatgacgccgccgccaaatacggaaggcggtggtctggcgaacgccctggcgggtagcggcctgttaattttgtgggccacggtattcggtacgccgctgggcattatggcggggatttatctggctgaatatggtcgtaaatcctggctggcagaagtgattcgcttcattaacgacattttgctctccgcaccgtcgattgtggttggtctttttgtttacaccatcgtggtggcgcagatggagcacttctccggctgggcgggcgtgattgcgctggcgctgttgcaggtgccgattgttatccgcaccaccgagaacatgctgaaactggtgccggacagcctgcgtgaagcggcttatgcgctgggtacgccgaagtggaagatgatcgccgcgatcacgctgaaggcgtcggtgtccgggatcatgaccggtatcctgctggcgattgcccgtattgctggtgaaaccgcgccgctgctgtttactgcgctctccaaccagttctggagcacggacatgatgcagccgatcgccaacctgccggtgacgatctttaagtttgcgatgagcccgtttgcggaatggcagcaactggcctgggccggggtgttgatcattaccctgtgcgtactgctgctgaacattctggcgcgcgttgtttttgcgaagaataaacacggttaa

SEQ ID NO: 1839 - DNA, 960 bp, Escherichia coli
atggctgcaaccaagcctgcttttaacccaccgggtaaaaagggcgacataattttcagcgtgctggtaaaactggcggcgctgattgtgctattgatgttgggtggcattattgtctctctgatcatctcatcctggccgagcattcagaaatttggtctggctttcctgtggaccaaagagtgggatgcgccgaacgatatctacggggcgctggtgccgatctacggtacgctggtgacctcgtttatcgcgctgctgatcgccgtcccggtgagttttggtatcgccctgttcctgaccgagcttgcgcctggctggctgaaacgcccgctgggtatcgccattgagctgctggctgccattccaagtatcgtttacggcatgtggggcttgtttatcttcgccccgctgttcgccgtttacttccaggagccggtcggcaatatcatgtcgaatatcccgattgtcggcgcgctgttctccggcccggcctttggtatcggtatcctcgcggcaggcgtgatcctcgccatcatgattattccgtacattgcggcggtaatgcgcgatgtattcgaacaaaccccggtgatgatgaaagagtcggcctacggtattggctgcaccacctgggaagttatctggcgtatcgttcttccgttcaccaaaaatggtgttatcggcggcatcatgttggggctggggcgcgcgctcggtgaaaccatggcggtgacctttatcatcggtaacacctaccaactcgacagcgcctcgctgtatatgccgggcaacagtatcacctctgcgctggccaacgaatttgcggaagcagagtcgggtctgcatgttgctgcactgatggaactgggcctgatcctgtttgtgattaccttcatcgtcctcgccgcatcgaagtttatgattatgcgcctggctaagaatgagggggcacgctaa

SEQ ID NO: 1840 - DNA, 1041 bp, Escherichia coli
atgaaagttatgcgtaccaccgtcgcaactgttgtcgccgcgaccttatcgatgagcgctttctctgtgtttgcagaagcaagcctgacaggtgcaggtgcaaccttccctgcgccggtgtatgccaaatgggctgacacttaccagaaagaaaccggtaataaagttaactaccagggtatcggttcttccggtggcgtaaaacagattatcgctaacaccgttgatttcggtgcctctgacgcgccgctgtctgatgaaaaactggctcaggaaggcctgttccagttcccgaccgtgattggcggcgtggtgctggcggttaatattccaggtctgaagtctggcgaactggtgctggatggtaaaaccctcggcgacatctacctgggcaaaatcaagaagtgggatgatgaagccatcgccaaactgaatccgggtctgaaactgccttcacagaacattgctgtagtacgccgcgcagatggctccgggacttccttcgtcttcaccagctacctggcgaaagtgaacgaagagtggaaaaacaacgttggtactggctctaccgtaaaatggccgatcggtctgggcggtaaaggtaacgacggtatcgccgcgttcgttcagcgtctgccgggtgcaattggttacgttgaatatacttacgcgaagcagaacaacctggcgtacaccaaactgatctccgctgatggcaaaccggtgagtccgaccgaagaaaacttcgctaatgcagcaaaaggcgcagactggagcaaaacattcgctcaggatctgaccaaccagaaaggcgaagatgcatggcctattacctctaccacgttcattctgatccataaagatcagaagaaaccagaacaaggcaccgaagtgctgaagttcttcgactgggcatacaaaaccggggctaaacaggcgaacgacctggattatgccagcctgccggatagcgtagttgaacaggttcgcgctgcgtggaagaccaatattaaagacagtagcggcaagccgctgtactaa

SEQ ID NO: 1841 - DNA, 1830 bp, Escherichia coli
atgtgtggaattgttggcgcgatcgcgcaacgtgatgtagcagaaatccttcttgaaggtttacgtcgtctggaataccgcggatatgactctgccggtctggccgttgttgatgcagaaggtcatatgacccgcctgcgtcgcctcggtaaagtccagatgctggctcaggcagcggaagaacatcctctgcatggcggcaccggtattgctcatactcgctgggcgacccacggtgaaccttcagaagctaacgcgcatccgcatgtttctgaacacattgtggtggtgcataacggcatcatcgaaaaccatgaaccgctgcgtgaagagttaaaagcgcgtggctataccttcgtttctgaaaccgacaccgaagtgattgcacatttggtgaactgggagctgaaacaaggcggtactctgcgtgaggcagttctgcgtgctatcccgcaactgcgtggtgcgtacggtacagtgatcatggactcccgtcatccggataccctgctggcggcacgttctggtagtcctctggtgattggcctgggtatgggcgaaaactttatcgcttctgaccagctggcgctgttgccagtgactcgtcgctttatcttccttgaagagggcgatattgcggaaatcactcgccgttcggtaaacatcttcgataaaactggcgcggaagtaaaacgtcaggatatcgaatccaatctgcaatatgacgcgggcgataaaggtatttaccgccactacatgcagaaagagatctacgaacagccgaacgcgatcaaaaacacccttaccgggcgcatcagccacggtcaggttgatttaagcgagctgggaccgaacgccgatgaactgctgtcgaaggttgagcatattcagatcctcgcctgtggtacttcttataactccggtatggtttcccgctactggtttgaatcgctggcaggtattccgtgcgacgtcgaaatcgcctctgaattccgctatcgcaaatctgccgtgcgtcgtaacagcctgatgatcaccttgtcacagtctggcgaaaccgcggataccctggcgggcctgcgtctgtcgaaagagctgggttaccttggttcgctggcaatctgtaacgttccgggttcttctctggtgcgcgaatccgatctggcgctgatgaccaacgccggtacggaaattggcgtggcctccaccaaagcattcaccacccagttaactgtgctgttgatgctggtggcgaaactgtctcgcctgaaaggtctggatgcctccattgaacatgacatcgtgcatggtctgcaggcgctgccgagccgtattgagcagatgctgtctcaggacaaacgcattgaagcgctggcagaagatttctctgacaaacatcacgcgctgttcctgggccgtggcgatcagtacccaatcgcgctggaaggtgcattgaagctgaaagagatctcttacattcacgctgaagcctacgctgcaggcgaactgaaacacggtccgctggcgctgattgatgccgatatgccggttatcgtcgttgcaccgaacaacgaattgctggaaaaactgaaatccaacattgaagaagttcgcgcgcgtggcggtcagttgtatgtcttcgccgatcaggatgcgggttttgtgagcagtgacaatatgcacattattgagatgccgcatgtggaagaggtgattgcaccgatcttctacaccgttccgctgcaactactggcttaccacgttgcgctgatcaaaggcaccgacgttgaccagccgcgtaacctggcaaaatcggtaacggttgagtaa

SEQ ID NO: 1842 - DNA, 1371 bp, Escherichia coli
atgttgaataatgctatgagcgtagtgatccttgccgcaggcaaaggcacgcgcatgtattccgatcttccgaaagtgctgcatacccttgccgggaaagcgatggttcagcatgtcattgatgctgcgaatgaattaggcgcagcgcacgttcaccttgtgtatggtcacggcggcgatctgcttaagcaggcgctgaaagacgacaacctgaactgggtgcttcaggcagaacagctgggtacgggtcatgcgatgcagcaggccgcacctttctttgccgatgatgaagacattttaatgctctacggcgacgtgccgctgatctctgtcgaaacactccagcgtctgcgtgatgctaaaccgcagggtggcattggtctgctgacggtaaaactggatgatccgaccggttatggacgtatcacccgtgaaaacggcaaagttaccggcattgttgagcacaaagatgccaccgacgagcagcgtcagattcaggagatcaacaccggcattctgattgccaacggcgcagatatgaaacgctggctggcgaagctgaccaacaataatgctcagggcgaatactacatcaccgacattattgcgctggcgtatcaggaaggacgtgaaatcgtcgccgttcatccgcaacgtttaagcgaagtagaaggcgtgaataaccgcctgcaactctcccgactggagcgcgtttaccagtccgaacaggctgaaaaactactgttagcaggcgttatgctgcgcgatccggcgcgttttgatctgcgcggtacgcttactcacgggcgcgatgttgaaattgatactaacgttatcatcgagggcaacgtgactctcggtaatcgtgtgaaaatcggcaccggttgtgtgattaaaaacagcgtgattggcgatgattgcgaaattagcccgtataccgttgtggaagatgcgaatctggcagcggcctgtaccattggcccgtttgcccgtctgcgtcctggtgctgagttgctggaaggcgcacacgtcggcaacttcgttgagatgaaaaaagcgcgtctgggtaaaggctcgaaagctggtcatctgacttacctgggcgatgcggaaattggcgataacgttaacatcggcgcgggaaccattacctgcaactacgatggtgcgaataaatttaagaccattatcggcgacgatgtgtttgttggatccgatactcagctggtggccccggtaacagtaggcaaaggcgcgaccattgctgctggtacaactgtgacgcgtaatgtcggcgaaaatgccctggctatcagccgtgtgccgcagactcaaaaagaaggctggcgtcgtccggtaaagaaaaagtaa

SEQ ID NO: 1843 - DNA, 420 bp, Escherichia coli
atggcaatgacttaccacctggacgtcgtcagcgcagagcaacaaatgttctctggtctggtcgagaaaatccaggtaacgggtagcgaaggtgaactggggatctaccctggccacgcaccgctgctcaccgccattaagcctggtatgattcgcatcgtgaaacagcacggtcacgaagagtttatctatctgtctggcggcattcttgaagtgcagcctggcaacgtgaccgttctggccgacaccgcaattcgcggccaggatctcgacgaagcgcgagccatggaagcgaaacgtaaggctgaagagcacattagcagctctcacggcgacgtagattacgctcaggcgtctgcggaactggccaaagcgatcgcgcagctgcgcgttatcgagttgaccaaaaaagcgatgtaa

SEQ ID NO: 1844 - DNA, 1383 bp, Escherichia coli
atggctactggaaagattgtccaggtaatcggcgccgtagttgacgtcgaattccctcaggatgccgtaccgcgcgtgtacgatgctcttgaggtgcaaaatggtaatgagcgtctggtgctggaagttcagcagcagctcggcggcggtatcgtgcgtaccatcgcaatgggttcctccgacggtctgcgtcgcggtctggatgtaaaagacctcgaacacccgatcgaagtcccggtaggtaaagcgactctgggccgtatcatgaacgtactgggtgaaccggtcgacatgaaaggcgagatcggtgaagaagagcgttgggcgattcaccgcgcagcaccttcctacgaagagctgtcaaactctcaggaactgctggaaaccggtatcaaagttatcgacctgatgtgtccgttcgctaagggcggtaaagttggtctgttcggtggtgcgggtgtaggtaaaaccgtaaacatgatggagcttattcgtaacatcgcgatcgagcactccggttactctgtgtttgcgggcgtaggtgaacgtactcgtgagggtaacgacttctaccacgaaatgaccgactccaacgttatcgacaaagtatccctggtgtatggccagatgaacgagccgccgggaaaccgtctgcgcgttgctctgaccggtctgaccatggctgagaaattccgtgacgaaggtcgtgacgtattgctgttcgtcgataacatctatcgttacaccctggccggtaccgaagtatccgcactgctgggccgtatgccttcagcggtaggttatcagccgaccctggcggaagagatgggcgttctgcaggaacgtatcacctccaccaaaaccggttctatcacctccgtacaggcagtatacgtacctgcggatgacttgactgacccgtctccggcaaccacctttgcgcaccttgacgcaaccgtggtactgagccgtcagatcgcgtctttgggtatctacccggccgttgacccgctggactccaccagccgtcagctggacccgctggtggttggtcaggaacactacgacactgcgcgtggcgttcagtccatcctgcaacgttatcaggaactgaaagacattatcgccatcctgggtatggatgaactgtctgaagaagacaaactggtggtagcgcgtgctcgtaagatccagcgcttcctgtcccagccgttcttcgtggcagaagtattcaccggttctccgggtaaatacgtctccctgaaagacaccatccgtggctttaaaggcatcatggaaggcgaatacgatcacctgccggagcaggcgttctacatggtcggttccatcgaagaagctgtggaaaaagccaaaaaactttaa

SEQ ID NO: 1845 - DNA, 864 bp, Escherichia coli
atggccggcgcaaaagagatacgtagtaagatcgcaagcgtccagaacacgcaaaagatcactaaagcgatggagatggtcgccgcttccaaaatgcgtaaatcgcaggatcgcatggcggccagccgtccttatgcagaaaccatgcgcaaagtgattggtcaccttgcgagcggtaatctggaatataagcacccatacctggaagaacgcgacgttaaacgcgtgggctacctggtggtgtcgaccgaccgtggtttgtgcggtggtttgaacattaacctgttcaaaaaactgctggcggaaatgaagacctggaccgacaaaggcgttcaatgcgacctcgcaatgatcggctcgaaaggcgtgtcgttcttcaactccgtgggcggcaatgttgttgcccaggtcaccggcatgggggataacccttccctgtccgaactgatcggtccggtaaaagtgatgttgcaggcctacgacgaaggccgtctggacaagctttacattgtcagcaacaaatttattaacaccatgtctcaggttccgaccatcagccagctgctgccattaccggcatcagatgatgatgatctgaaacacaaatcctgggattacctgtacgaacccgatccgaaggcgttgctggataccctgctgcgtcgttatgtcgaatctcaggtttatcagggcgtggttgaaaacctggccagcgagcaggccgcccgtatggtggcgatgaaagccgcgaccgacaatggcggcagcctgattaaagagctgcagttggtatacaacaaagctcgtcaggccagcattactcaggaactcaccgagattgtctcgggggccgccgcggtttaa

SEQ ID NO: 1846 - DNA, 1542 bp, Escherichia coli
atgcaactgaattccaccgaaatcagcgaactgatcaagcagcgcattgctcagttcaatgttgtgagtgaagctcacaacgaaggtactattgtttctgtaagtgacggtgttatccgcattcacggcctggccgattgtatgcagggtgaaatgatctccctgccgggtaaccgttacgctatcgcactgaacctcgagcgcgactctgtaggtgcggttgttatgggtccgtacgctgaccttgccgaaggcatgaaagttaagtgtactggccgtatcctggaagttccggttggccgtggcctgctgggccgtgtggttaacactctgggtgcaccaatcgacggtaaaggtccgctggatcacgacggcttctctgctgtagaagcaatcgctccgggcgttatcgaacgtcagtccgtagatcagccggtacagaccggttataaagccgttgactccatgatcccaatcggtcgtggtcagcgtgaattgatcatcggtgaccgtcagaccggtaaaaccgcactggctatcgatgccatcatcaaccagcgcgattccggtatcaaatgtatctatgtcgctatcggccagaaagcgtccaccatttctaacgtggtacgtaaactggaagagcacggcgcactggctaacaccatcgttgtggtagcaaccgcgtctgaatccgctgcactgcaatacctggcaccgtacgctggttgcgcaatgggcgaatacttccgtgaccgcggtgaagatgcgctgatcatttacgatgacctgtctaaacaggctgttgcttaccgtcagatctccctgctgctccgtcgtccgccaggacgtgaagcattcccgggcgacgtattctacctccactctcgtctgctggagcgtgctgcgcgtgttaacgccgaatacgttgaagccttcaccaaaggtgaagtgaaagggaaaaccggttctctgactgcgctgccgattatcgaaactcaggcgggtgacgtttctgcgttcgttccgaccaacgtaatctccattaccgatggtcagatcttcctggaaaccaacctgttcaacgccggtattcgtcctgcggttaacccgggtatttccgtatcccgtgttggtggtgcagcacagaccaagatcatgaaaaaactgtccggtggtatccgtaccgctctggcacagtatcgtgaactggcagcgttctctcagtttgcatccgaccttgacgatgcaacacgtaagcagcttgaccacggtcagaaagtgactgaactgctgaaacagaaacagtatgcgccgatgtccgttgcgcagcagtctctggttctgttcgcagcagaacgtggttacctggcggatgttgaactgtcgaaaattggcagcttcgaagccgctctgctggcttacgtcgaccgtgatcacgctccgttgatgcaagagatcaaccagaccggtggctacaacgacgaaatcgaaggcaagctgaaaggcatcctcgattccttcaaagcaacccaatcctggtaa

SEQ ID NO: 1847 - DNA, 534 bp, Escherichia coli
atgtctgaatttattacggtagctcgcccctacgccaaagcagcttttgactttgccgtcgaacaccaaagtgtagaacgctggcaggacatgctggcgtttgccgccgaggtaaccaaaaacgaacaaatggcagagcttctctctggcgcgcttgcgccagaaacgctcgccgagtcgtttatcgcagtttgtggtgagcaactggacgaaaacggtcagaacctgattcgggtaatggctgaaaatggtcgtcttaacgcgctcccggatgttctggagcagtttattcacctgcgtgccgtgagtgaggctaccgctgaggtagacgtcatttccgctgccgcactgagtgaacaacagctcgcgaaaatttctgctgcgatggaaaaacgtctgtcacgcaaagttaagctgaattgcaaaatcgataagtctgtaatggcaggcgttatcatccgagcgggtgatatggtcattgatggcagcgtacgcggtcgtcttgagcgccttgcagacgtcttgcagtcttaa

SEQ ID NO: 1848 - DNA, 471 bp, Escherichia coli
gtgaatcttaacgcaacaatcctcggccaggccatcgcgtttgtcctgttcgttctgttctgcatgaagtacgtatggccgccattaatggcagccatcgaaaaacgtcaaaaagaaattgctgacggccttgcttccgcagaacgagcacataaggaccttgaccttgcaaaggccagcgcgaccgaccagctgaaaaaagcgaaagcggaagcccaggtaatcatcgagcaggcgaacaaacgccgctcgcagattctggacgaagcgaaagctgaggcagaacaggaacgtactaaaatcgtggcccaggcgcaggcggaaattgaagccgagcgtaaacgtgcccgtgaagagctgcgtaagcaagttgctatcctggctgttgctggcgccgagaagatcatcgaacgttccgtggatgaagctgctaacagcgacatcgtggataaacttgtcgctgaactgtaa

SEQ ID NO: 1849 - DNA, 240 bp, Escherichia coli
atggaaaacctgaatatggatctgctgtacatggctgccgctgtgatgatgggtctggcggcaatcggtgctgcgatcggtatcggcatcctcgggggtaaattcctggaaggcgcagcgcgtcaacctgatctgattcctctgctgcgtactcagttctttatcgttatgggtctggtggatgctatcccgatgatcgctgtaggtctgggtctgtacgtgatgttcgctgtcgcgtag

SEQ ID NO: 1850 - DNA, 816 bp, Escherichia coli
atggcttcagaaaatatgacgccgcaggattacataggacaccacctgaacaaccttcagctggacctgcgtacattctcgctggtggatccacaaaaccccccagccaccttctggacaatcaatattgactccatgttcttctcggtggtgctgggtctgttgttcctggttttattccgtagcgtagccaaaaaggcaaccagcggcgtgccaggtaagtttcagaccgcgattgagttggtgatcggctttgttaatggtagcgtgaaagacatgtaccatggcaaaagcaagctgattgctccgctggccctgacgatcttcgtctgggtattcctgatgaacctgatggatttactgcctatcgacctgctgccgtacattgctgaacatgtactgggtctgcctgcactgcgtgtggttccgtctgcggacgtgaacgtaacgctgtctatggcactgggcgtatttatcctgattctgttctacagcatcaaaatgaaaggcatcggcggcttcacgaaagagttgacgctgcagccgttcaatcactgggcgttcattcctgtcaacttaatccttgaaggggtaagcctgctgtccaaaccagtttcactcggtttgcgactgttcggtaacatgtatgccggtgagctgattttcattctgattgctggtctgttgccgtggtggtcacagtggatcctgaatgtgccgtgggccattttccacatcctgatcattacgctgcaagccttcatcttcatggttctgacgatcgtttatctgtcgatggcgtctgaagaacattaa

SEQ ID NO: 1851 - DNA, 381 bp, Escherichia coli
atgtctgtgtcgctcgtgagtcgaaacgttgctcggaagcttctgctcgttcagttactggtggtgatagcaagtggattgctgttcagcctcaaagaccccttctggggcgtctctgcaataagcgggggcctggcagtctttctgcctaacgttttgtttatgatatttgcctggcgtcaccaggcgcatacaccagcgaaaggccgggtggcctggacattcgcatttggcgaagctttcaaagttctggcgatgttggtgttactggtggtggcgttggcggttttaaaggcggtattcttgccgctgatcgttacgtgggttttggtgctggtggttcagatactggcaccggctgtaattaacaacaaagggtaa

SEQ ID NO: 1852 - DNA, 624 bp, Escherichia coli
gtgctcaacaaactctccttactgctgaaagacgcaggtatttcgcttaccgatcaccagaaaaaccagcttattgcctacgtgaatatgctgcataaatggaataaagcgtacaacctgacttcggtccgcgatcctaatgagatgctggtacgccatattctcgatagcattgtggtggcaccgtatctgcaaggtgaacggtttatcgatgtcggcaccggaccgggactgcctggcattccactctctatcgtgcgtcctgaagctcatttcacgttgttggatagccttggtaaacgcgtgcgtttccttcgtcaggtgcaacatgagcttaaactggagaatattgagccagtacagagtagggtagaagagtttccgtcagagccgccatttgatggcgtaattagccgcgcttttgcctctctgaacgatatggtgagctggtgccaccatcttcctggtgagcaaggccgtttctacgcgctgaaagggcaaatgccggaagatgaaatcgctttgttgcccgaagaatatcaggtcgaatcagtggttaaacttcaggttccagccctggatggcgaacgtcatctggtggtgattaaagcaaataaaatttaa

SEQ ID NO: 1853 - DNA, 1890 bp, Escherichia coli
atgttttatccggatccttttgacgtcatcatcattggcgggggtcatgcaggcaccgaggccgcgatggccgcggcgcgtatgggtcaacagactctgcttttgacacacaatatcgacactctggggcagatgagctgcaacccggcgatcggcggtattgggaagggacatctggtaaaagaagtggatgcactcggcggtctgatggcgaaagcgatcgatcaggcgggtatccagtttaggatactaaacgcaagcaagggaccggcggttcgcgctacccgagctcaggcagatcgtgtgctctaccgtcaggcggtacgtacggcgctggagaaccaaccgaacctgatgatcttccagcaggcagttgaagatcttattgtcgaaaacgatcgcgtggtcggtgccgttacccaaatgggactgaagttccgtgccaaagctgtcgtgctcaccgttgggacgttcctcgacggtaaaattcatatcggtctggataattacagcggtggccgtgctggtgatccgccgtccattccgctttctcgccgtttgcgtgaactgccgctgcgcgttggtcgtctgaaaaccgggacaccaccgcgtattgatgctcgaaccatcgactttagcgtactggcgcaacagcatggcgataacccaatgccagtattctcgtttatgggcaatgcgtcccagcatccccagcaggtgccgtgttatatcactcataccaacgagaaaacccatgatgtgatccgcagtaacctcgatcgtagcccaatgtacgcaggggtgatcgaaggtgtcggcccacgctactgcccgtcgatcgaagacaaagtcatgcgcttcgccgacagaaatcagcatcagatcttccttgaaccggaagggctgacctctaacgaaatttatccgaacggtatctccaccagcctgccgttcgatgtgcagatgcaaatcgtccgctccatgcaggggatggaaaacgcgaagatcgtgcgtccgggttatgccattgagtatgacttcttcgatccacgcgacctgaaaccgacgctggagagcaagtttatccaggggctgttctttgctggtcagattaacggcactaccggttacgaagaagccgctgcgcaaggtttgctggctggtcttaacgctgcccgtctgtctgctgacaaagaaggttgggctccggcgcgttctcaggcatatctcggcgtactggttgatgacctgtgcactttaggaaccaaagaaccgtatcgtatgtttacctcgcgcgcagaatatcgtctgatgctgcgcgaagataatgctgatctgcgtttgactgaaatcggtcgcgaactgggcctggtggatgacgaacgttgggcgcgctttaacgagaaacttgagaatatcgagcgtgagcgtcagcgtctgaaatcgacctgggtaaccccgtcggcggaagctgcagccgaagtgaatgctcacctgactgcgccgctttcccgtgaagccagtggtgaagatctgctacgtcgtcctgaaatgacttatgaaaaattaaccacgctgacaccgtttgcccctgcgttgacagatgaacaggctgcggaacaggttgagattcaggttaaatacgaaggttatatcgcgcgccagcaagatgagatcgaaaagcagctgcgtaacgagaataccctgctaccagcgacgctggattaccgccaggtatccggtctttctaacgaagtgatcgccaaacttaacgatcacaaaccggcctctattggccaggcttcgcgtatttctggcgtcacgcctgcggctatctccattctgctggtgtggctgaaaaaacagggtatgctgcgtcgtagcgcataa

SEQ ID NO: 1854 - DNA, 444 bp, Escherichia coli
atggcagatatcactcttatcagcggcagcaccctcggcggtgccgaatatgtagcagaacacctggctgaaaagctggaagaggcgggttttaccaccgaaacgctgcacggtccgctgttggaagatttatctgcctcggggatctggctggttatcagctcaacccacggtgccggagatattccggacaacctttctcctttctatgaagcattgcaggaacagaagcccgatctttctgcggtccgctttggcgcaatcggtattggtagtcgtgaatatgacaccttttgtggggctatcgataaaatcgaggcagaactcaaaaattccggagcaaaacagacaggcgaaacactgaagatcaacattcttgatcacgacattccggaggatccggcagaagaatggctgggatcgtggattaatttactcaaataa

SEQ ID NO: 1855 - DNA, 459 bp, Escherichia coli
atggaaaattatctaatcgacaatctggaccgaggcatcctggaagcattaatgggcaatgcgcgcaccgcttacgccgaactggcgaaacaatttggcgtcagtccggggacgattcacgttcgagtagagaaaatgaagcaggcggggatcattaccggggcgcgtattgatgtcagtccgaagcagcttggttatgacgtaggctgctttatcggcattatattaaagagcgccaaagactatccttccgcgctggcaaagctggaaagcctcgatgaagtcactgaagcctattacacaaccggccactacagcatctttataaaagtgatgtgccgttcgatcgatgctctccagcatgtacttatcaacaagatccaaacaattgatgaaattcagtccaccgagacactgatcgtcctgcagaacccgatcatgcgtaccattaagccctga

SEQ ID NO: 1856 - DNA, 993 bp, Escherichia coli
atgaaaaccgattacattgccaaacaacgtcaaattagcttcgtgaaatctcacttttctcgtcaactggaagaacgtctggggctgatcgaagtccaggcgccgattcttagccgtgtgggggatggcacgcaggataacttgtcgggctgtgaaaaagcggtgcaggtaaaagtgaaagctctgcctgatgcccagttcgaagtggttcattcactggcgaagtggaaacgtcagaccttagggcaacacgacttcagcgcgggcgaagggctgtacacgcacatgaaagcccttcgccccgatgaagaccgtctttccccgttgcactcggtctatgtagaccagtgggactgggaacgcgtaatgggcgacggcgagcgtcaattctcgactctgaaaagcacggtagaggcgatctgggcgggaattaaagcaaccgaagctgcggttagcgaagagtttggcctggcaccgttcctgccggatcagatccacttcgtacacagccaggagttactgtctcgttatccggatctcgatgccaaagggcgtgagcgggcgattgcgaaagatcttggcgcggtattcctcgtcgggattggcggcaagttgagtgatggtcatcgtcacgacgtgcgcgcaccggattatgatgactggagcaccccgtcagagctgggccatgcgggtctgaacggcgatattctggtgtggaacccggtactggaagatgcgtttgagctttcttccatggggatccgcgtggatgccgacacgctgaagcatcagctggcgctgaccggtgacgaagatcgcctggagctggagtggcatcaggcgctgctgcgcggtgaaatgccgcagaccatcggcggcggtatcgggcagtctcgtttgaccatgctgctgctgcaactgccacatatcggccaggttcagtgtggtgtatggccggcagctgttcgcgagagcgtcccttctctgctgtaa

SEQ ID NO: 1857 - DNA, 1452 bp, Escherichia coli
atgctaacgctggatacgcttaatgtgatgctggccgtcagcgaagagggattgatcgaagagatgatcatcgcgctgctggcctcaccgcagctggcagtcttctttgaaaaattcccacgactgaaggcggcaatcactgatgatgttccccgctggcgtgaggcgctgcgcagtcggctgaaagatgcccgagtcccgccggaactcaccgaagaggtgatgtgctatcagcaaagccagctcctctccacgccgcagtttattgtgcagctaccacaaatcctggacttactgcatcgtctgaattccccatgggcagaacaagcccgacagttggttgatgctaacagtacgatcacttcagcgttacacacgctttttctccagcgctggcgtttaagcctgatcgtgcaagcaacgacgttaaatcagcagctattagaagaagaacgcgaacaactgttgagtgaagttcaggaacgcatgacgctgagcgggcaacttgaaccgattctcgcagataacaataccgcagctggtcgtctgtgggatatgagtgccggtcagcttaaacgtggcgactatcagttgattgtgaaatacggtgaatttcttaacgaacagccggaactgaaacgtctggcagaacagctggggcgttcccgggaagccaaatcaataccgcgcaacgatgcgcagatggaaaccttccgcaccatggtgcgcgaaccggcgacagttcctgagcaggttgatggtctgcagcaaagcgatgatattttacgtctcttgccgccagaactggcgacactagggataacggaactggagtatgagttttaccgtcggctggtggaaaaacagttgctcacctatcgcctgcatggtgagtcgtggcgtgaaaaagtgatcgaacgcccggtggtgcataaagattacgacgaacagccgcgcggaccgtttattgtctgcgtggatacttccggctcaatgggcggctttaatgaacagtgtgcgaaagcgttctgcctggccttgatgcgcatagccctcgctgaaaaccggcgctgctatattatgctattttccaccgagatcgtccgttatgagctttcagggccacaaggtattgagcaagcgatccgctttttaagtcagcagtttcgtggcggcaccgatcttgccagttgttttcgcgccattatggaacgcttgcaaagcagggaatggtttgatgccgatgcggtggtgatttctgattttatcgcccagcggttgcctgacgacgtgacgagtaaagtgaaagagttgcagcggatacatcagcatcgctttcatgccgtggcgatgtcggcacacggcaaacccggcatcatgcgcattttcgatcatatctggcgctttgataccgggatgcgaagccgcctgctcagacgctggcggcgataa

SEQ ID NO: 1858 - DNA, 1497 bp, Escherichia coli
atggctcaccctcatttattagcggaaagaatttcccgcctgagcagttcgttggaaaaggggctttatgaacgtagccacgccatccgcttgtgtttattagcggcattaagtggtgaaagtgtgttcctccttggcccaccaggtattgccaaaagtttgatcgcccggcgcttaaaattcgcctttcagaatgcccgcgcgtttgaatatctgatgacccgcttctccacgccggaagaagtttttggtcccctttctattcaggcgctaaaagatgaagggcgctatgaacgtttaaccagcggttacctgccggaagctgaaatcgtctttctggatgagatctggaaagcgggtccggcaattcttaataccctgctcaccgccattaacgagcgccagttccgcaacggcgcactcgtagaaaaaatcccgatgcgtctgctggtggcggcctccaacgagctgccggaagcagacagcagtctggaagcgttatatgaccgcatgctgattcgtctgtggttagataaagtgcaggataaagcgaatttccgctccatgctgaccagtcaacaggatgaaaatgacaatccggttcctgcctccttgcagatcacagatgaagaatatgaacgctggcagaaagagattggtgaaattacgctgcccgatcatgtatttgagctgatttttatgctgcgccagcaactggataaattaccggatgcgccttatgtctcggatcgtcgctggaaaaaagcgatccgcttattgcaggccagcgccttttttagcggtcgcagtgctgtcgccccggttgatctcattttgctgaaagattgcctgtggtatgacgcgcaaagcctgaatttgatacaacaacaaattgatgtattgatgaccggtcacgcctggcaacagcaagggatgttgacccgcctgggcgcgattgtgcaacgtcacctgcaacttcagcagcaacaaagcgataaaacagccttaacggtaattcgtctgggcggcatttttagccgtcgtcagcagtatcaactccctgttaacgttactgcttccactctgactctgctgctgcaaaaaccgttaaaactgcatgatatggaagtggttcatatctcctttgagcgtagcgcgctggaacagtggctgagtaaaggtggtgagattcgcggcaaactgaacggtatcggctttgcccagaaactgaatctggaagtcgatagcgcccaacatctggttgtacgcgatgtgagtttacaaggcagtacgctagcacttcccggttcatcggctgaaggtctgcccagcgaaataaaacaacaactggaagagcttgaaagcgactggcgcaagcaacacgctttattcagcgaacagcaaaaatgtctgtttatccctggcgactggttaggtcgcattgaagccagcctacaggatgtcggcgcacagattcgccaggcacaacaatgctaa

SEQ ID NO: 1859 - DNA, 1869 bp, Escherichia coli
atgagcactgataataagcaatcattgcccgcgattaccctcgcggcgattggagttgtctacggcgatattggtaccagcccgttatatacacttcgtgaatgtttgtccggccagtttggttttggcgttgaacgcgatgccgtgtttggctttttatcgctgatcttctggctgctaatctttgtggtttccattaaatatctcaccttcgtgatgcgggcagataacgccggtgaaggggggatcctgacgttgatgtcgcttgccgggcgtaatacgtcggcgcgaaccacatcaatgctggtgattatggggctaatcggcggcagctttttctatggtgaagtcgtcattactcccgctatttcggtgatgtccgccattgaaggtctggaaatcgtcgccccgcagctggatacctggatagttcccctctcaattatcgttctcacattattattcatgattcaaaaacatggcacggctatggtcggtaagctgtttgcgccgatcatgctgacctggtttttgattctggcagggctggggttacgtagcattattgttaacccggaagtgctgcatgcactgaatccgatgtgggcggtgcatttcttccttgaatacaaaacggtttcttttattgcattaggggcagtggtgctgtcgattacgggggtcgaggcgctgtatgctgatatggggcactttggtaagttccctattcgtctggcgtggttcaccgtcgtattgccttccttaacccttaattacttcggccagggagcgctgttgttaaagaatccggaagcgattaagaacccgttcttcctgttggcaccggactgggcgctgatcccgctgctgatcatcgccgcactggcgacggtaattgcctcgcaggcggttatctctggcgtcttctcattgacgcgtcaggcggtacgtctgggatatttgtcgccgatgcgcattattcacacttccgaaatggagtcagggcaaatctatattccctttgtgaactggatgctctatgtcgcggtcgtgattgtgattgtcagctttgagcactccagcaacctggcggcggcgtacgggattgcggtgaccggaaccatggtgctgacgtctattctctcgactaccgtggcacgtcagaactggcactggaataagtattttgttgcgctgatcctgattgctttcctttgtgtcgatattcccttgttcaccgctaacctcgataaactgctctccggcggctggttgccattgagcctcggtacggtgatgtttatcgtgatgaccacctggaagagcgagcgtttccgcttgctgcggcggatgcatgaacatggtaactctctggaagcgatgattgcttcgctggagaaatcaccgcccgttcgcgtgcctgggaccgcggtgtatatgtcgcgtgcaatcaacgtcattccctttgcgctgatgcataacctgaaacataacaaggtattgcatgagcgggtgattctgttaactctgcgcaccgaagacgcgccatatgtccataacgtccgtcgggtacagattgaacaactgtcgcccactttctggcgcgtggtggcaagttatggttggcgagaaacgccaaacgtggaagaagttttccaccgctgcggtctggaaggattaagttgccggatgatggaaacctccttctttatgtcgcatgagtcgttgatcctcggcaaacgcccgtggtatttgcgtctgcgcggcaagctgtacttgctgctgcaacgtaatgcgctgcgggcaccggatcaatttgaaatcccgccaaacagagttatcgaactgggtactcaggtcgaaatctaa

SEQ ID NO: 1860 - DNA, 420 bp, Escherichia coli
atgaaaaaaggcaccgttcttaattctgatatttcatcggtgatctcccgactgggacataccgatacgctggtggtgtgtgatgctggtttacccatccccaaaagtacaacgcgtatcgatatggcattaacccagggtgtaccttcttttatgcaggtgctgggtgtagtcacaaatgaaatgcaggtcgaggctgtcattatcgcggaagagatcaaacaacataatccgcaactccacgaaacgttgctcactcaccttgagcagctgcaaaaacaccagggaaacaccattgaaattcgttacaccacgcatgaacaattcaaacaacaaaccgcagaaagtcaggcggtaattcgcagcggagaatgttctccgtatgcgaatatcattctctgtgctggcgtgacgttctga

SEQ ID NO: 1861 - DNA, 1506 bp, Escherichia coli
atggaagcattacttcagcttaaaggcatcgataaagccttcccgggcgtaaaagccctctcgggcgcagcgttaaatgtctatccgggccgcgtgatggcgctggtgggcgaaaacggcgcgggtaaatccaccatgatgaaagtgcttactggtatctatactcgcgatgccggtacgcttttatggttggggaaagaaacgacatttaccgggccgaaatcttcccaggaagccgggattgggattatccaccaggaactgaacctgatcccgcagttaaccattgccgaaaacattttccttggtcgtgagtttgttaatcgctttggcaaaattgactggaaaaccatgtatgccgaagcggataaattgctggctaaacttaacctgcgctttaaaagcgacaagctggtgggcgatctttccatcggtgaccagcaaatggttgaaatcgccaaagtgctgagctttgagtcgaaagtcatcattatggatgaaccgaccgatgcgctgaccgataccgaaaccgaatccttgttccgcgtcatccgcgagctgaaatcgcaaggccgtggtattgtctatatctcccaccgcatgaaagaaatcttcgagatttgcgatgacgttaccgtttttcgtgacggacaatttattgctgagcgcgaagtggcatcactgaccgaagattctctgattgagatgatggtgggccgcaagctggaagatcaatatccgcacctggacaaagcgccgggagatatccgcctgaaagtcgataatctctgcggacctggcgttaacgatgtctcttttactttacgcaaaggcgaaattcttggcgtctctggtttgatgggcgctgggcgtaccgaactgatgaaagtgctctacggtgcactgccgcgcacaagcggttacgtcaccctggatgggcatgaagtcgttacccgttcgccgcaggatggcctggcaaacggcattgtttatatctccgaagaccgtaaacgtgacggtttagtgctgggcatgtcagtaaaagagaacatgtcgctgaccgcgctgcgctacttcagccgtgctggcggcagtttgaagcatgccgatgaacagcaggctgtgagtgatttcattcgtctgtttaatgtgaaaacgccatcgatggaacaggcaattggtctgctttccggtggcaatcagcaaaaagtagcgattgcccgtggtctgatgacacgccctaaagtgttgatcctcgatgagcctacccgtggcgtagatgtcggcgcgaaaaaagagatctatcaactgattaaccagttcaaagccgatggcttgagcatcattctggtgtcatcggagatgccagaagtattaggcatgagcgatcgcatcatcgtcatgcatgaagggcatctcagcggggaatttactcgtgagcaggccacccaggaagtgttaatggctgccgctgtgggcaagcttaatcgcgtgaatcaggagtaa

SEQ ID NO: 1862 - DNA, 966 bp, Escherichia coli
atgacaacccagactgtctctggtcgccgttatttcacgaaagcgtggctgatggagcagaaatcgcttatcgctctgctggtgctgatcgcgattgtctcgacgttaagcccgaactttttcaccatcaataacttattcaatattcttcagcaaacctcggtgaacgccattatggcggtcgggatgacgctggtgatcctgacgtcgggtatcgacttgtcggtaggttctctgttggcgctgaccggcgcagttgctgcatctatcgtcggcattgaagtcaatgcgctggtggctgtcgctgccgctctcgcgttaggtgccgcaattggtgcggtaactggggtgattgtagcgaaaggtcgcgtccaggcgtttatcgctacgctggttatgatgcttttactgcgcggcgtgaccatggtttataccaatggtagcccagtgaataccggctttactgagaacgccgatctgtttggctggtttggtattggtcgtccgctgggcgtaccgacgccagtctggatcatggggattgtcttcctcgcggcctggtacatgctgcatcacacgcgtctggggcgttacatctacgcgctgggcggcaatgaagcggcaacgcgtctttctggtatcaacgtcaataaaatcaaaatcatcgtctattctctttgtggtctgctggcatcgctggccgggatcattgaagtggcgcgtctctcctccgcacaacccacggcggggactggctatgagctggatgctattgctgcggtggttctgggcggtacgagtctggcgggcggaaaaggtcgcattgttgggacgttgatcggcgcattaattcttggcttccttaataatggattgaatttgttaggtgtttcctcctattaccagatgatcgtcaaagcggtggtgattttgctggcggtgctggtagacaacaaaaagcagtaa

SEQ ID NO: 1863 - DNA, 891 bp, Escherichia coli
atgaacatgaaaaaactggctaccctggtttccgctgttgcgctaagcgccaccgtcagtgcgaatgcgatggcaaaagacaccatcgcgctggtggtctccacgcttaacaacccattctttgtatcgctgaaagatggcgcgcagaaagaggcggataaacttggctataacctggtggtgctggactcccagaacaacccggcgaaagagctggcgaacgtgcaggacttaaccgtccgcggcaccaaaattctgctgattaacccgaccgactccgacgcagtaggtaatgctgtgaagatggctaaccaggcgaacatcccggttatcactcttgaccgccaggcaacgaaaggtgaagtggtgagccacattgcatctgataacgtactgggcggcaaaatcgccggtgattacatcgcgaagaaagtgggtgaaggtgccaaagttatcgagctgcaaggcattgccggtacatccgcagcccgtgaacgtggcgaaggtttccagcaggccgttgctgctcacaagtttaatgttcttgccagccagcctgcagattttgatcgcaccaaaggtttgaacgtaatgcagaacctgttgaccgctcatccggatgttcaggctgtattcgcgcagaatgatgaaatggcgcttggcgcgctgcgcgcactgcaaactgccggtaaatcggatgtgatggtcgtcggatttgacggtacaccggatggcgaaaaagcggtgaatgatggcaaactagcagcgactatcgctcagctacccgatcagattggcgcgaaaggcgtcgaaaccgcagataaagtgctgaaaggcgagaaagttcaggctaagtatccggttgatctgaaactggttgttaagcagtag

SEQ ID NO: 1864 - DNA, 930 bp, Escherichia coli
atgcaaaacgcaggcagcctcgttgttcttggcagcattaatgctgaccacattcttaatcttcaatcttttcctactccaggcgaaaccgtaaccggtaaccactatcaggttgcatttggcggcaaaggcgcgaatcaggcggtggctgctgggcgtagcggtgcgaatatcgcgtttattgcctgcactggcgatgacagcattggtgagagcgttcgccagcagctcgccactgataacatcgatatttctccggtcagcgtgatcaaaggcgaatcaacaggtgtggcgctgatttttgttaatggcgaaggtgagaatgtcatcggtattcatgccggcgctaatgctgccctttccccggcgctggtggaagcgcaacgtgagcgtattgccaacgcgtcggcattattaatgcagctggaatcaccactcgaaagtgtgatggcagcggcgaaaatcgcccatcaaaataagactatcgttgcgcttaacccggctccggctcgcgaacttcctgacgaacttctggcgctggtggacattattacgccaaacgaaacggaagcagaaaagctcaccggtattcgtgttgaaaatgatgaagatgcagcgaaggcggcgcaggtactgcatgaaaaaggtatccgtactgtactgattactttaggaagtcgtggtgtatgggctagcgtgaatggtgaaggtcagcgcgttcctggattccgggtgcaggctgtcgataccattgctgccggagatacctttaacggcgcgttaatcacggcgttgctggaagaaaaaacattgccagaggcgattcgttttgcccatgcagccgctgcgattgccgtaacacgtaaaggcgcacaaccttccgtaccgtggcgtgaagagatcgacgcatttttagacaggcagaggtga

SEQ ID NO: 1865 - DNA, 993 bp, Escherichia coli
ttggctacaatgaaagatgttgcccgcctggcgggcgtttctacctcaacagtttctcacgttatcaataaagatcgcttcgtcagtgaagcgattacagccaaagttgaagcggcgattaaagaactcaattacgcgccatcagctctggcgcgtagcctcaaactcaatcaaacacataccattggcatgttgatcactgccagtaccaatcctttctattcagaactggtgcgtggcgttgaacgcagctgcttcgaacgcggttatagtcttgtcctttgcaataccgaaggcgatgaacagcggatgaatcgtaatctggaaacgctgatgcaaaaacgcgttgatggcttgctgttactgtgcaccgaaacgcatcagccttcgcgtgaaatcatgcaacgttatccgacagtgcctaccgtgatgatggactgggctccgttcgatggcgacagcgatcttattcaggataactcgttgctgggcggagacttagcaacgcaatatctgatcgataaaggtcatacccgtattgcctgtattaccggtccgctggataaaactccggcgcgcctgcggttggaaggttatcgggctgcgatgaaacgtgcgggtctcaacattcctgatggctatgaagtcactggtgattttgaatttaacggcgggtttgacgctatgcgccaactgttatcacatccgctgcgtcctcaggccgtctttaccggaaatgacgctatggctgttggcgtttaccaggcgttatatcaggcagagttacaggttccgcaggatatcgcggtgattggctatgacgatatcgaactggcaagctttatgacgccaccattaacaactatacaccaaccgaaagatgaactgggggagctggcgattgatgtactcatccatcggataacccagccgaccctacagcaacaacgattacaacttactccgattctgatggaacgtggttcggcttag

SEQ ID NO: 1866 - DNA, 1428 bp, Escherichia coli
atgagcgataaaaagaagcgcagtatggcgggtttgccgtggatcgcggcgatggccttcttcatgcaggcacttgatgccactattctgaataccgccttacccgcaatcgctcatagccttaatcgttctcctctcgcgatgcaatcagccatcatcagttatacgctgacggtggcgatgcttattccggtaagcggatggctagccgatcgcttcggtacgcgtcgcatatttacccttgccgtgagtctgttcacgttgggttctctggcctgcgcactttctaactcgctaccacagctggttgtcttccgggttattcaggggataggcggcgcaatgatgatgcctgttgctcggctggccttactgcgcgcttatcctcgtaatgagcttcttcctgtattgaattttgtcgccatgccgggtctggtggggccaattttaggccccgttcttggcggcgtgctggtcacctgggcaacctggcactggatatttttaatcaatatccccataggtattgcgggccttctttacgcgcacaaacatatgcccaatttcaccaccgcacgacgcagattcgataccactggctttttgctgtttggcctcagccttgttctcttctcaagcggaatagagctattcggggaaaagattgtcgccagctggattgccttgacggtaattgtcaccagcatcgggttactgcttctctatattctccatgcgcgacgcacgccaaacccattaatttcattagatttatttaaaacccgcactttctcgatcggtatcgtaggcaatattgcaacccgtctggggaccggctgtgtaccgttccttatgccattgatgttacaggtaggatttgggtatcaggcgtttattgctggctgtatgatggcaccgacagcgttaggttccattattgcaaaatcgatggttacccaagtcttacgtcgtctgggctatcgccatacgttagtggggatcacggtgattatagggctaatgatcgctcagttctctttgcaatcaccagcaatggcgatatggatgctgatcttgccgttgtttatattagggatggctatgtcgacacaatttaccgcgatgaataccatcacacttgccgatctgaccgatgacaacgccagcagcggtaacagtgttctggcggtcacgcagcaactgtcgatcagtttaggcgttgctgtaagtgcggcagtccttcgcgtttacgaagggatggaaggcacaacgacagtcgaacaattccactatacgtttatcacgatgggcattattactgttgcttcagcagcaatgttcatgctactgaaaacaaccgatggtaataatttgatcaaaagacagcgtaaatctaagccgaaccacgttccatcagaatcggagtaa

SEQ ID NO: 1867 - DNA, 693 bp, Escherichia coli
atgcctttaagcgcacaacagttagctgcacagaaaaacctttcgtatgttctggctgagaagctggcgcagcggatcttaaaaggtgaatatgaacccggcaccattttgcctggtgagattgagctgggcgagcaatttggagtgagtcgtacagcggtacgcgaagcggtcaaaacgttaacggcaaaagggatggttttaccgcgaccgcgaattggtacccgagtcatgccacaatcgaactggaattttcttgatcaggaattgcttacctggtggatgacagaagagaactttcatcaggtcatcgatcactttctggttatgcgtatctgtctggagccgcaagcttgcctactggcagcaaaggttggcaccgcggaacagaaggcgcatctcaatacgttaatggccgaaatggcggcattaaaagagaactttcgccgtgaacgctggatcgaagtcgatatggcctggcatgagcatatctatgaaatgagcgccaatccgtttttgacctcattcgcctcgctattccattcggtttatcacacttacttcacgtcaattaccagcgacacagtgataaagctggatctgcaccaggcgattgtcgatgcgattatccaaagcgatggcgacgcggcatttaaagcttgtcaggcgctgctacgctcaccagataagtga

SEQ ID NO: 1868 - DNA, 1140 bp, Escherichia coli
atgtcagagcccctcgatctcaatcaattagcgcaaaatattaaacagtgggggctggaactgggctttcagcaggtaggtattaccgataccgatctcagcgcgtccgagcccaaactgcaagcatggctggacaaacaataccacggcgaaatggactggatggcgcgtcacggtatgctgcgcgcccgcccccatgagttattgcccggtacgctgcgcgtgatcagcgtgcggatgaattaccttcctgctaacgccgcatttgccagcacgctgaaaaatcccaaactcggctatgttagccgttatgcgctgggccgtgactatcacaagcttctgcgcaaccgactcaaaaagctgggcgagatgattcagcaacattgtgtttcgctgaattttagaccgtttgtcgattctgcgcctattctcgagcgcccgttagctgaaaaagcaggtcttggctggacaggtaagcactcacttatcctcaatcgcgaggccggttcgttcttctttttaggcgaattgctggtcgatattccgctgcccgtggatcaaccagtcgaggaaggatgcggtaaatgcgtggcctgtatgacgatttgcccgaccggtgccatcgtcgagccatataccgtcgatgctcgccgctgtatctcttatctcaccatcgaactggaaggggcgatcccggaagagttgcgaccgttaatgggaaaccgtatttacggttgcgatgactgccagcttatctgcccgtggaatcgctactcgcaactcactacagaagacgatttcagcccgcgtaagccgctacacgcaccggaactcattgagttattcgcctggagtgaagagaagtttttaaaagtcacggaaggttcggcgattcgccgtataggtcacctgcgttggctgcgtaatatcgccgtagcattaggcaatgccccctgggatgaaacgattttgacagcgctggaaagtcgtaaaggtgagcacccacttcttgatgagcacatagcgtgggcgattgcgcagcaaatcgagagacgaaatgcgtgcgtggtcgaagtgcaattaccgaaaaaacagcgtctggttcgggtgattgaaaaagggttaccgcgtgacgcctga

SEQ ID NO: 1869 - DNA, 1533 bp, Escherichia coli
atgaagaaaaaccccgtaagtataccacacaccgtctggtacgccgacgatatccgccgcggagaacgcgaggcggcagatgcgctggggctcacactctatgagctgatgcttcgcgctggcgaagccgcattccaggtgtgtcgttcggcttatcctgacgcccgccactggctggtgctgtgcggtcatggtaataacggcggcgatggctacgtggtcgcgcggctggccaaagcgatcggtattgatgtcacgctgctggcccaggaaagtgacaaaccgttgccggaagaggccgcgctggcacgcgaagcatggttaaacgcgggaggcgagatccatgcttcgaatattgtctggcccgaatcggtagatctgattgttgatgcgctgctcggcaccggcttgcagcaagcgccccgcgaatccattagccagttaatcgaccacgctaatactcaccctgcgccgattgtggcggttgatatcccttccggccttctggctgaaaccggcgctacgccaggcgcggtaatcaacgccgatcacaccatcacttttattgcgctgaaaccgggcttgctcactggaaaagcgcgggatgttaccggacaactgcattttgactcactggggctggatagctggctggcaggtcaggagacgaaaattcagcggttttcggcagaacaactttctcagtggctgataccgcgtcgcccgacttcgcataaaggcgatcacgggcggctggtgattattggtggcgatcatggcacggcgggggctattcgtatgacgggggaagcggcgctgcgtgctggtgctggtttagtccgagtactgacccgcagtgagaacattgcgccgctgctgactgcacgaccggaattgatggtgcatgaactgactatggactctcttaccgaaagcctggaatgggccgatgtggtggtgattggtcccggtctgggccagcaagagtgggggaaaaaagccctgcaaaaagttgagaattttcgcaaaccgatgttgtgggatgccgatgcattgaacctgctggcaatcaatcccgataagcgtcacaatcgcgtgatcacgccgcatcctggcgaggccgcacggttgttaggctgttccgtcgctgaaattgaaagtgaccgcttacattgcgcccaacgtctggtacaacgttatggcggcgtagcggtgctgaaaggtgccggaaccgtggtcgccgcccatcctgacgctttaggcattattgatgccggaaatgcaggcatggcgagcggcggcatgggcgatgtgctctctggtattattggcgcattgcttgggcaaaaaatgagcccttatgatgcagcctgtgcgggctgtgtcgcgcacggtgcggcagctgacgtactggcggcgcgttttggaacgcgcgggatgctggcaaccgatctcttttccacgctacagcgtattgttaacccggaagtgactgataaaaaccatgatgaatcgagtaattccgctccctga

SEQ ID NO: 1870 - DNA, 462 bp, Escherichia coli
atgatgaatcgagtaattccgctccctgatgagcaggcaacattagacctgggcgagcgggtagcgaaagcctgcgatggcgcaaccgtaatctatctgtatggcgatttaggtgcaggtaaaaccacctttagccggggctttttacaggctctgggtcatcagggtaatgtcaaaagccccacttatacgctggtcgaaccctatatgctcgacaatttaatggtttatcactttgatttgtaccgccttgccgatcccgaggagctggagtttatggggatccgcgattattttgccaacgatgccatctgcctggtggagtggccacaacaaggtacaggtgttcttcctgacccggatgtcgaaatacacattgattatcaggcacaaggccgtgaggcgcgcgtgagtgcggtttcctctgcgggtgaattgttgctggcgcgtttagccggttaa

SEQ ID NO: 1871 - DNA, 1332 bp, Escherichia coli
atgatgtatcgcatcagaaattggttggtagcgacgttgctgctgctgtgcgcgccggtgggtgccgcgacgctctctgatattcaggtttctaacggtaatcaacaggcacggataacgttgagttttattggcgatcctgattatgcgtttagccatcaaagcaaacgcaccgtggcgctcgatatcaaacaaacgggggtaattcaggggctgccgttgttgtttagcggtaataacctggtgaaagcgattcgctccggaacgcctaaagatgcacaaacgctacggctggtggtcgatctcaccgaaaacggtaaaaccgaagcggtgaagcggcagaatggcagcaattacactgtcgtctttacgattaacgccgatgcgccgccatcgcctccgccaatggttgcgaaacgcgttgaaacgcctgcggttgtcgcaccgcgcgtcagcgaaccggcgcgcaatccgtttaaaacggaaagtaaccgcactacgggtgttatcagcagtaatacggtaacgcgtccggcagcccgcgcgacggctaacactggcgataaaattatcatcgctattgatgccggacacggcggtcaggaccctggcgctatcggccccggtggtacgcgggagaaaaatgtcaccatcgccatcgcgcgtaaattgcgtactttgctcaataacgatccgatgtttaagggcgttttaacccgtgacggggattactttatctcggtgatggggcgcagtgatgtggcacgtaagcaaaacgccaatttccttgtgtcgattcatgccgatgcagcaccgaaccgcagtgcgactggcgcttccgtatgggtgctctctaaccgtcgcgccaacagcgaaatggccagctggctggagcagcacgagaaacagtcggagctgctgggcggagcgggcgatgtgctggcgaacagtcagtctgacccctatttaagccaggcggtgctggatttacagttcggtcattcccagcgggtagggtatgatgtagcgaccagtatgatcagtcagttgcaacgcattggcgaaatacataaacgccgaccagaacacgcgagtctcggcgttctgcgttcgccggatattccgtcagtactggtcgaaaccggttttatcagtaacaacagcgaagaacgtttgctggcgagcgacgattaccaacaacagctggcagaagccatttacaaaggcctgcgcaattacttccttgcgcatccgatgcaatctgcgccgcagggtgcaacggcacaaacggccagtacggtgacgacgccagatcgcacgctgccaaactaa

SEQ ID NO: 1872 - DNA, 1848 bp, Escherichia coli
atgccaattcaggtcttaccgccacaactggcgaaccagattgccgcaggtgaggtggtcgagcgacctgcgtcggtagtcaaagaactggtggaaaacagcctcgatgcaggtgcgacgcgtatcgatattgatatcgaacgcggtggggcgaaacttatccgcattcgtgataacggctgcggtatcaaaaaagatgagctggcgctggcgctggcgcgtcatgccaccagtaaaatcgcctctctggacgatctcgaagccattatcagtctgggctttcgcggtgaggcgctggcgagtatcagttcggtttcccgcctgacgctcacttcacgcaccgcagaacagcaggaagcctggcaggcctatgccgaagggcgcgatatggacgtgacggttaaaccggcggcgcatccggtgggaacgacgctggaggtgctggacctgttctacaacaccccggcgcggcgcaaattcctgcgcaccgagaaaaccgaatttaaccatatcgatgaaatcatccgccgcattgcgctggcgcgtttcgacgtcactatcaacctgtcgcataacggcaaaattgtacgccagtaccgcgcagtgccggaaggcgggcaaaaagaacggcgcttaggcgcgatttgcggcaccgcttttctcgaacaggcgctggcgattgaatggcaacacggcgatctcacgctgcgcggctgggtggccgatccaaatcacactacgcccgcactggcagaaattcagtattgctacgtgaacggtcgcatgatgcgcgatcgcctgatcaatcacgcgatccgccaggcctgcgaagacaaactgggggccaatcagcaaccggcatttgtgttgtatctggagatcgacccgcatcaggtggacgtcaacgtgcaccctgccaaacacgaagtgcgtttccatcagtcgcgtctggtgcatgactttatctatcagggcgtgctgagcgtgctacaacagcaactggaaacgccgctaccgctggacgatgaaccacaacctgcaccgcgtgccattccggaaaatcgcgtggcggctgggcgcaatcactttgctgaaccggcagttcgtgagccggtagctccgcgctactctcctgcgcccgcctcaggcagtcgtccggctgcctcctggccgaatgcgcagcctggttaccagaaacagcaaggtgaagtgtatcgccagcttttgcaaacgcccgctccgatgcaaaaaccaaaagcgccagaaccgcaggaacctgcacttgcggcgaacagtcagagttttggtcgggtactgactatcgtccattgcgactgtgcgttgcttgagcgcgatggcaacatttcacttttatccttgccagtggcagaacgttggctgcgtcaggcacaattgacgccgggtgaagtgccagtttgcgcccaaccgctgcttattccgttgcggctaaaagtttctggcgaagaaaaatcggcattagaaaaagcgcagtctgccctggcggaactgggtattgatttccagtccgatgcgcagcatgtgaccatcagggccgtgcctttacccttacgccaacaaaatttacaaatcttgattcctgaactgataggctacctggcgaagcagtccgtattcgaacctggaaatattgcgcagtggattgcacgaaatctgatgagcgaacatgcgcagtggtcaatggcacaggccataaccctgctggcggacgtggaacggttatgtccgcaacttgtgaaaacgccgccgggtggtctgttacaatctgttgatttacatccggcgataaaagccctgaaagatgagtga

SEQ ID NO: 1873 - DNA, 951 bp, Escherichia coli
atgagtgatatcagtaaggcgagcctgcctaaggcgatttttttgatggggccgacggcctccggtaaaacggcgttagccattgagctgcgtaaaattttaccagtagagttgataagcgttgattctgcccttatttacaaagggatggatatcgggacggcgaagccgaacgctgaagagttactcgccgcgccgcaccgattgctgaatattcgcgatccgtcgcaggcttactcggctgctgattttcgccgcgatgcgctggcggaaatggccgatatcaccgcggcggggcggatcccactgttagtgggcggtacgatgttgtatttcaaggcattgctggaagggttgtcgccgctaccgtcggcagacccggaagtacgggccagaattgagcaacaggcggcagagcaaggttgggagtcattgcatcgtcaacttcaggagatcgatccggttgcggcagcaaggattcatccaaatgatccacaaaggctttcccgggcactggaagtttttttcatttcgggtaaaactttaacggaactgacgcaaacgtcaggagacgctctaccgtatcaggtgcatcagttcgccatcgccccggcgagccgtgaactgctccatcaacgaattgagcagcgttttcatcagatgttggcttcaggttttgaagcagaagtccgggcgctttttgcccgaggagatttgcatacggatttgccttccattcgttgcgtgggttatcgccagatgtggtcttaccttgaaggcgaaatctcatacgatgaaatggtttatcgaggtgtttgcgccacgagacagttggcgaagcggcagataacctggctgcgtggttgggaaggggttcactggcttgacagtgaaaaaccagaacaggcgcgtgacgaagtattacaggttgttggtgctatcgcaggctga

SEQ ID NO: 1874 - DNA, 309 bp, Escherichia coli
atggctaaggggcaatctttacaagatccgttcctgaacgcactgcgtcgggaacgtgttccagtttctatttatttggtgaatggtattaagctgcaaggacaaatcgagtcttttgatcagttcgtgatcctgttgaaaaacacggtcagccagatggtttacaagcacgcgatttctactgttgtcccgtctcgcccggtttctcatcacagtaacaacgccggtggcggtaccagcagtaactatcatcatggtagcagcgcgcagaatacttccgcgcaacaggacagcgaagaaaccgaataa

SEQ ID NO: 1875 - DNA, 1281 bp, Escherichia coli
ttgtttgaccgttatgatgctggtgagcaggcggtactggtacacatctattttacgcaagacaaagatatggaagacctccaggagtttgaatctctggtctcttccgccggtgtcgaagcattgcaggtgattaccggtagccgtaaagcgccgcacccaaagtattttgtaggtgaaggtaaagcagttgaaattgcggaagctgtcaaagcgacgggtgcttcggtcgttctttttgaccatgccctgagcccggcgcaggagcgtaacctggagcgtttgtgcgagtgtcgtgtcatcgaccgcaccggccttattttagatattttcgcccaacgtgcgcgtacccatgagggtaagttgcaggttgagttggcgcagttgcgccatctggctacgcgcctggtgcgtggctggacccaccttgaaagacagaaaggcgggattggtttgcgtggtccgggtgaaacccagctcgaaaccgaccgtcgtttgttgcgtaatcgcatcgtgcagatacagtcgcgcctggaaagagttgaaaagcagcgtgagcaggggcggcaatcgcgtatcaaagccgacgttcctactgtttcgctggtgggatataccaacgccggtaaatctactcttttcaatcgcatcaccgaagcgcgggtctacgcggcagaccagttgtttgccaccctcgacccgacgttgcggcgtattgacgttgcggatgtcggtgaaaccgtgttggcagataccgtagggtttattcgccacctgccgcacgatctggtggcggcatttaaagccacgttacaagagacgcggcaagccacattgctgctgcacgtcattgacgcggcggatgtgcgtgtacaagaaaacatcgaagcggtgaatacggttcttgaagagattgatgctcacgagatcccaaccctgctggtgatgaacaagatcgatatgctggacgatttcgaaccgcgtattgacagagatgaagagaacaaaccgatccgtgtctggctttctgcgcagaccggagcggggataccacagctttttcaggctttgacggagcgtctttccggcgaggtggcgcagcatacattgcgtctgccgccgcaggaagggcgcctgagaagtcgtttttatcagcttcaggcaatagaaaaagagtggatggaggaggacggcagcgtaagtctgcaagttcgtatgccgatcgttgactggcgtcgcctctgtaaacaagaaccggcgttgatcgattacctgatctaa

SEQ ID NO: 1876 - DNA, 1260 bp, Escherichia coli
atggcgtggaatcagcccggtaataacggacaagaccgcgacccgtggggaagcagcaaacctggcggcaactctgagggaaatggaaacaaaggcggtcgcgatcaagggccacctgatttagatgatatcttccgcaaactgagcaaaaagctcggtggtctgggcggcggtaaaggcaccggatctggcggtggcagttcatcgcaaggcccgcgcccgcagcttggcggtcgcgtcgttaccatcgcagcggctgcgattgtcattatctgggcggccagtggtttctataccattaaagaagccgaacgcggcgtggtaacacgctttggtaaattcagccatctggttgagccgggtctgaactggaaaccgacgtttattgacgaagtcaaaccggtgaacgtggaagccgtgcgtgaactggcagcttctggtgtgatgctgacgtctgacgagaacgtagtgcgcgttgagatgaacgtgcagtaccgcgtcaccgatccggaaaaatatctgtatagcgtgaccagcccggatgacagtctgcgtcaggctaccgacagcgccctgcgcggggttatcggtaaatacaccatggaccgcattctgacggaaggtcgtaccgtgattcgtagcgatactcagcgcgaactggaagagacgattcgtccgtatgacatgggcatcactctgctggacgtcaacttccaggctgctcgtccgccggaagaagtaaaagcggcgtttgacgatgcgattgccgcgcgtgaaaacgaacagcaatacattcgtgaagcagaagcgtataccaacgaagttcagccgcgtgcgaacggtcaggcgcaacgtatcctcgaagaggcgcgtgcgtacaaggcccagaccatcctggaagctcagggtgaagtggcgcgctttgctaaacttctgccggaatataaagccgcgccggaaattactcgcgagcgtctgtatatcgagacgatggaaaaagtgttgggcaacacccgcaaagtgctggttaacgataaaggtggcaacctgatggttctgccattagaccagatgctgaaaggtggtaacgcccctgcggcgaagagcgataacggtgccagcaatctgctgcgtctgccgccagcctcttcctccacaaccagtggagcaagcaacacgtcgtccaccagtcagggcgatattatggaccaacgccgcgccaacgcgcagcgtaacgactaccagcgtcagggggaataa

SEQ ID NO: 1877 - DNA, 1005 bp, Escherichia coli
atgcgtaagtcagttatcgcgattatcatcatcgtgctggtagtgctttacatgtctgtctttgtcgtcaaagaaggtgagcgcggtattacgctgcgttttggtaaggtactgcgtgacgatgacaacaaacctctggtttatgagccgggtctgcatttcaagataccgttcattgaaacggtgaaaatgctcgacgcacgtattcagaccatggacaaccaggccgaccgctttgtgaccaaagagaagaaagacctgatcgtcgactcttacatcaaatggcgcatcagcgatttcagccgttactatctggcaacgggtggtggcgacatttcgcaagcggaagtgctgttgaaacgtaagttctctgaccgtctgcgttctgaaattggtcgcctagacgtgaaagacatcgtcaccgattctcgtggtcgtctgaccctcgaagtacgtgacgcgctgaactccggttctgcgggtacagaagatgaagttactaccccggcggcagataacgccattgccgaagcggcagagcgcgtaacggctgagacgaagggcaaagttccggtcatcaacccgaacagtatggcggcgctgggtattgaagttgtcgatgtgcgaattaagcagatcaacctgccgaccgaagtgtctgaagcgatctacaaccgtatgcgcgccgagcgtgaagcggtagcgcgtcgtcaccgttcacaaggtcaggaagaagcggaaaaactgcgcgcgactgccgactatgaagtgaccagaacgttggctgaagctgagcgtcagggccgcatcatgcgtggtgaaggcgatgcagaagcagccaaactgtttgctgatgcattcagtaaagatccggacttctacgcattcatccgtagcctgcgtgcttatgagaacagcttctctggcaatcaggacgtgatggtcatgagcccggatagcgatttcttccgctacatgaagacgccgacttccgcaacgcgttaa

SEQ ID NO: 1878 - DNA, 198 bp, Escherichia coli
atgaattcgacaatctggctggcgcttgccctggttttggtactggaaggtttagggccgatgctttacccgaaggcatggaagaagatgatctctgcgatgaccaatttgcccgataatattttacgtcgttttggcggtggacttgtggttgcgggcgttgtggtctactacatgttgaggaaaacgattggctga

SEQ ID NO: 1879 - DNA, 1299 bp, Escherichia coli
atgggtaacaacgtcgtcgtactgggcacccaatggggtgacgaaggtaaaggtaagatcgtcgatcttctgactgaacgggctaaatatgttgtacgctaccagggcggtcacaacgcaggccatactctcgtaatcaacggtgaaaaaaccgttctccatcttattccatcaggtattctccgcgagaatgtaaccagcatcatcggtaacggtgttgtgctgtctccggctgcgctgatgaaagagatgaaagaactggaagaccgtggcatccccgttcgtgagcgtctgctgctgtccgaagcatgtccgctgatccttgattatcacgttgcgctggataacgcgcgtgagaaagcgcgtggcgcgaaagcgatcggcaccaccggtcgaggtatcgggcctgcttatgaagataaagtggcacgtcgcggtctgcgtgttggcgaccttttcgacaaagaaaccttcgctgaaaaactgaaagaagtgatggaatatcacaacttccagttggttaactactacaaagctgaagcggttgattaccagaaagttctggatgatacgatggctgttgccgacatcctgacttctatggttgttgacgtttctgacctgcttgaccaggcgcgtcagcgtggcgatttcgtcatgtttgaaggtgcgcagggtacgctgctggatatcgaccacggcacttatccgtacgtaacttcttccaacactactgctggtggcgtggcgaccggttccggcctgggcccgcgttatgttgattacgttttgggtatcctcaaagcttactccactcgtgtgggtgcaggtccgttcccgaccgaactgtttgatgaaactggcgagttcctctgcaagcagggtaacgaattcggcgcaactacgggtcgtcgtcgtcgtaccggctggctggacaccgttgccgttcgtcgtgcggtacagctgaactccctgtctggcttctgcctgactaaactggacgttctggatggcctgaaagaggttaaactctgcgtggcttaccgtatgccggatggtcgtgaagtgactaccactccgctggcagctgacgactggaaaggtgtagagccgatttacgaaaccatgccgggctggtctgaatccaccttcggcgtgaaagatcgtagtggcctgccgcaggcggcactgaactacatcaagcgcattgaagagctgaccggtgtgccgatcgatatcatctctactggtccggatcgtactgaaaccatgattctgcgcgacccgttcgacgcgtaa

SEQ ID NO: 1880 - DNA, 426 bp, Escherichia coli
gtgcagttaacgagtttcactgattacggattacgtgcgctgatctacatggcgtcattgccagaagggcggatgaccagtatttctgaagtgactgacgtctacggcgtctcccgtaatcatatggtcaaaataatcaatcaacttagtcgtgccggctacgtgactgctgttcgtggaaaaaatggcggcattcgcttgggtaaaccggcgagtgcaatacgtattggtgatgtggtgcgcgagctggagcccttatcgctggtgaattgcagcagtgagttttgccacattacacctgcctgtcggttgaaacaggcgctttctaaggccgtgcaaagttttcttacggaactggataactacacgcttgccgatttggttgaagagaatcaaccgctttataaattattgctggtggagtga

SEQ ID NO: 1881 - DNA, 2442 bp, Escherichia coli
atgtcacaagatcctttccaggaacgcgaagctgaaaaatacgcgaatcccatccctagtcgggaatttatcctcgaacatttaaccaaacgtgaaaaaccggccagccgtgatgagctggcggtagaactgcacattgaaggcgaagagcagcttgaaggcctgcgtcgccgcctgcgcgcgatggagcgcgatggtcaactggtcttcactcgccgtcagtgctatgcgctgccggaacgcctcgacctggtgaaaggtaccgttattggccaccgtgatggctacggctttctgcgagttgaagggcgtaaagatgatttgtatctctccagcgagcagatgaaaacctgcattcatggcgatcaggtgctggctcagccgctgggcgctgaccgtaaaggtcgtcgtgaagcgcgtattgtccgcgtactggtgccaaaaaccagccagattgttggtcgctacttcaccgaagcgggcgtcggctttgtggttcctgacgatagccgtctgagcttcgatatcttaatcccgcccgatcagatcatgggcgcgcggatgggctttgtggtggtggttgaactgactcaacgcccgactcgccgtaccaaagcggtgggtaaaatcgtcgaagtgctgggcgacaatatgggcaccggcatggcggttgatatcgctctgcgtacccatgaaattccgtacatctggccgcaggctgttgagcaacaggttgccgggctgaaagaagaagtgccggaagaagcaaaagtgggccgtgtcgatctgcgcgatttaccgctggtcaccattgatggcgaagacgcccgtgactttgacgatgcagtttactgtgagaaaaaacgcggcggcggctggcgtttatgggtcgcgattgccgacgtcagctactatgtgcgtccgccaacgccgctggacagagaagcgcgtaatcgtggtacgtcggtgtacttcccttcgcaggttatcccgatgctgccggaagtgctctctaacggcctgtgctcgctcaacccgcaggtagaccgcctgtgtatggtgtgcgagatgacggtttcgtcgaaaggccgcctgactggctacaaattctacgaagcggtgatgagttctcacgcgcgtctgacctacaccaaagtctggcatatactgcaaggcgatcaggatctgcgcgagcagtatgcgccgctggttaagcatctcgaagagttacataacctctataaagtgctggataaagcccgtgaagaacgcggtgggatctcatttgagagcgaagaagcgaagttcattttcaacgctgaacgccgtattgaacgtatcgaacagactcagcgtaacgacgcccacaagttaattgaagagtgcatgattctggcgaatatctcggcggcgcgtttcgttgagaaagccaaagaaccggcactgttccgtattcacgacaagccgagcaccgaagcgattacctctttccgttcagtgctggcggagctggggctggaactgccgggcggtaacaagccggaaccgcgcgactatgcagagttactggaatcggttgccgatcgtcctgatgcagaaatgctgcaaaccatgcttttgcgctcgatgaaacaggcgatttacgatccggaaaaccgtggtcacttcggtctggcattgcagtcctatgcgcactttacttcgccgattcgtcgttatcctgacctgacgttgcaccgcgccattaaatatctgctggcgaaagagcaggggcatcagggcaacaccactgaaaccggcggctaccattattcgatggaagagatgctgcaactgggtcagcactgttcgatggcggaacgtcgtgccgatgaagcaacgcgcgatgtgtctgactggctgaagtgtgacttcatgctcgaccaggtaggtaacgtctttaaaggcgtaatttccagcgtcactggctttggcttcttcgtccgtctggacgacttgttcattgatggtctggtccatgtctcttcgctggacaatgactactatcgctttgatcaggtagggcaacgcctgatgggtgaatccagcggccagacttatcgcctgggcgatcgcgtggaagttcgcgttgaagcggttaatatggacgagcgcaaaatcgactttagcctgatctccagcgaacgcgcaccgcgcaacgtcggtaaaacggcgcgcgagaaagcgaaaaaaggcgatgcaggcaaaaaaggcggcaagcgtcgtcaggtcggcaaaaaggtcaactttgagccagacagcgccttccgcggcgagaaaaaaccgaagccgaaagcagcgaagaaagacgcgagaaaagcgaaaaagccatcggcgaaaacgcagaaaatagccgcagcgaccaaagcgaagcgtgcggcgaagaaaaaagtggcagagtga

SEQ ID NO: 1882 - DNA, 732 bp, Escherichia coli
atgagcgaaatgatttacggcatccatgcagtgcaggccctgctggagcgcgcccctgaacgttttcaggaagtctttattttaaaaggccgtgaagataaacgtctgttaccgctgattcacgcccttgagtctcagggcgtggttatccagttggcaaaccgccaatatctcgacgagaaaagcgacggtgccgtgcatcagggcattatcgctcgtgtgaagccaggacggcagtatcaggaaaacgatctgccggatctgatcgcttcgctcgatcaaccgttcctgctgatcctcgacggcgtaaccgatccgcacaacctcggcgcgtgcctgcgtagcgcggacgccgctggtgttcatgcggtgattgtgccgaaagatcgctccgcacagctcaacgccacggcgaaaaaagtggcctgtggtgcggcagaaagcgttccgctgattcgggtgactaatctggcgcgcaccatgcgtatgttgcaggaagagaatatctggatcgtcggtacggcaggcgaggcggatcatacactctatcagagcaaaatgaccggacgcctggcgctggtgatgggcgcggaaggtgaaggtatgcgtcgcctgacccgtgaacattgcgatgagttgatcagcatcccaatggcaggaagtgtttcttccctgaacgtttcggttgcaaccggaatttgcttatttgaagcggttcgtcagcgcagctag

SEQ ID NO: 1883 - DNA, 402 bp, Escherichia coli
atgacatggaatccgttggcgctggcgacggcgctgcaaactgtacctgaacaaaatattgatgtaacaaatagcgaaagcgcattaattattaaaatgaatgattatggcgatttgcaaatcaatattctttttacttcccgccaaatgatcatcgaaacctttatttgtccggtaagtagtatcagcaatccagatgaatttaataccttcttattaagaaatcagaagatgatgccgttgtcatcggtagggatctccagcgtgcaacaggaagagtattacattgttttcggtgcgttatcgcttaaatcttctcttgaagatatcctgcttgagataacttcgctggtagataacgcattggatctggctgaaattacagaagaatattcacactaa

SEQ ID NO: 1884 - DNA, 699 bp, Escherichia coli
atggggattttaaaaagtttatttacgctggggaaatcgtttatctcccaggcggaagagtccattgaagaaaaccagggcgtgcgcatgctggaacagcatattcgtgacgcaaaaactgaactcgataaagccggaaaatctcgcgttgatctgctggcgcgagtgaaattaagtcacgataagctgaaagatttacgtgagcgcaaagccagtctggaagctcgtgcgctggaagcgttaagcaagaacgtgaatccgtcgttgattaacgaagttgctgaagaaatcgcgcgccttgagaatctcattaccgctgaagagcaagtgttgtcgaatctggaagtctctcgtgatggcgtggaaaaagcagttacagcgacagcgcagcgtatcgctcagtttgagcagcaaatggaagtcgttaaagccactgaagccatgcagcgtgcacaacaggctgtaacgacctctactgttggcgcatcttccagcgtttcgacagcggcagaatccttaaaacgcctgcaaacgcgtcaggccgaacgtcaggctcgcctggatgctgccgcacagttggaaaaagtcgcagacggtcgcgatctcgatgaaaagctggcggaagccggaattggcggtagcaataaaagtagcgcccaggatgtattagcaagactgcaacgccaacagggcgagtaa

SEQ ID NO: 1885 - DNA, 660 bp, Escherichia coli
atgtctggttttttccagcgtctgtttggcaaggataataagcctgctatcgctcgcggtccgttgggtctgcatctcaatagtggttttacgctcgatacgttagcgtttcgtttgctggaagatgcattgctgatcgagctaccgggtgaagaatataccgtggccgccgtcagttgcatcgaactgggcgggggtagccagattttccgttactacacttcgggcgatgagttcctgcaaatcaataccactggcggcgaagatattgatgacattgatgatatcaagctctttgtctatgaagagagctacggtatcagtaaagagagtcactggcgcgaggcgatcaacgccaaagcgatgggggcaatgaccttaaactggcaggaaaaacgctggcagcgattttttaacagcgaagaaccgggaaatatcgaacccgtctacatgctggaaaaagtagaaaatcaaaaccatgccaaatgggaagtgcataattttagcatgggctaccaacggcaggtgaccgaagatacttacgaatatttgctgttaaatggtgaggaatcttttaacgatctcggcgagccggagtggttattttcgcgcgcgctgggtgtcgatatcccgatgacatcacttcatattattggttaa

SEQ ID NO: 1886 - DNA, 399 bp, Escherichia coli
atgcatatactggattcacttcttgcctttagtgcctatttttttattggcgtggcgatggtgattattttcctgtttatctactccaaaattacaccgcacaacgaatggcagttaatcaaaaacaataacaccgcggcggcactggcgttcagcggaacattgttggggtacgtgatccccttatccagtgcggcaatcaatgcggtgagtattccagactatttcgcatggggcgggattgctctggtgattcaattactcgtttttgctggcgtcaggctttatatgcccgcattaagcgaaaaaattattaatcacaataccgcagcaggaatgtttatgggaaccgccgcgctggctggcggtatttttaacgcagcttgtatgacatggtaa

SEQ ID NO: 1887 - DNA, 639 bp, Escherichia coli
atggccagaaaacgcaaatccagaaataacaaaaatatcggacatggggcaatcagtcgcattggtagaccgcataatccttttgagccgcgccgcaatcgctacgcacaaaaatacttaacgttggcactaatgggcggtgccgcttttttcgtattgaaaggttgtggcgatattggcgatgtcgataacgacggcgacggaacgttttacgcgactgtgcaggattgtattgatgatggtaataattcagatatctgtgctcatggctggaacaacgccaaagcggcgttttatgccgatgttccgaagaatatgactcagcagaattgtcagtctaagtacgaaaattgctactacgacaatgttgaacagagttggatcccggtcgtttctggatttttgttaagccgggttattcgtaaagatcgcgatgagccgttcgtctataacagcggcggatcctcatttgcttcccgccccgtctggcgcaacacttccggtgattactcctggcgctccggttctggcaaaaaagagtcttactcttcgggcggctttaccaccaaaaaagcgtcaaccgtttctcgtggcggctatggtcgttcttccagcgcccgtgggcattggggaggctaa

SEQ ID NO: 1888 - DNA, 1164 bp, Escherichia coli
atgctgagacacaacgttcctgtgcggcgggatctggaccggattgccgccgataacggatttgactttcatatcatcgacaatgaaatctattgggatgagagtcgggcttaccgctttactttgcgccagattgaagagcagatcgaaaaaccgactgcggaactgcatcagatgtgcctggaggtggtggatcgcgcggttaaagatgaagagatcctgacgcaactggcgatcccgccgttgtactgggatgtgatcgccgaaagctggcgcgcacgcgatccttcgttgtatggccgtatggattttgcctggtgtggtaatgcaccggttaagttgctggagtacaacgccgatacgccaacttcattgtacgagtcggcttatttccagtggttgtggctggaagatgcccggtgcagcggcattattccgcgcgatgccgatcagtacaatgccattcaggagcgcctgatttcacgctttagcgagctttacagtcgggaaccgttttatttttgctgctgtcaggataccgacgaagacaggagtaccgtgctgtacttgcaggactgcgcccagcaggcagggcaggagtctcggtttatctacattgaagagctcggtttgggcgtcggcggcgtactgaccgatcttgatgataatgtcatccagcgtgcatttaagctgtatccgctggagtggatgatgcgtgacgataacggcccgctgctgcgcaagcgtcgtgagcaatgggtggagccgttatggaaaagtatcttgagtaataaagggctaatgccgctgctttggcgcttcttccctggtcatcctaaccttcttgcatcctggttcgatggtgaaaaaccgcagattgccgctggcgaaagctatgtgcgtaaaccgatttattcgcgcgaaggcggaaacgtcaccattttcgacggtcagaataacgtcgttgaccacgctgatggtgattacgccgatgaaccgatgatctaccaggcgtttcaacctctgccgcgatttggcgatagctacacactcatcggtagctggattgtcgatgatgaagcgtgcggaatggggatccgtgaagataacacgttgatcaccaaagacacctcacgtttcgttccgcattacattgctggataa

SEQ ID NO: 1889 - DNA, 1626 bp, Escherichia coli
gtgcactggcaaactcacaccgtttttaatcaacctataccattaaataacagcaacttatacctgtctgatggcgcgctttgcgaagcggtaacgcgtgaaggtgctagctgggatagcgattttctcgccagtattggtcagcagttaggaacggctgaatcccttgaactggggcggctggcgaatgtgaatccgcctgaattattgcgctacgatgcgcaaggacgccgtctggacgatgtgcattttcaccccgcctggcacctgctgatgcaggcgctatgtaccaatcgggtgcacaatcttgcctgggaagaagacgctcgctccggcacatttgtggcgcgcgcagcgcgttttatgttacatgcgcaggttgaggctgggtcgttatgtccgataacgatgacctttgccgccacgccactgttgttacagatgttacccgcgccgtttcaggactggaccacgccgctgctgagcgatcgctacgattctcacttattgccaggtgggcaaaaacgtggcttgttgatcggcatgggaatgacggaaaagcagggcggttccgatgtcatgagcaacaccacccgcgcagagcgtctggacgatggttcttatcggctggtggggcataaatggtttttctcggtgccgcaaagcgatgcgcatctggtgctggcacagaccgcgggcggtttgtcctgcttttttgtgccgcgctttttgcctgacgggcaacgcaacgcgattcgcctcgagcggctgaaagataagctgggtaatcgctctaacgccagctgcgaagtggagtttcaggatgccattggctggttgttggggcaggaaggggaaggagttcgtctgatcctgaaaatgggtgggatgacgcgttttgattgcgccctgggtagccatgccatgatgcgccgtgcattttcgctggcgatttatcatgcacatcaacgccatgtttttggtaatccattgatccaacagccccttatgcgtcatgtcttaagtcgcatggcacttcagcttgaagggcaaacggcgttgctgtttcgtcttgcgcgagcgtgggaccggcgcgccgatgccaaagaagctctgtgggcgcgtttatttacgcctgcggcgaaatttgtgatctgcaaacgtggcattccgtttgtggccgaagcgatggaggtgctgggcggcattggttattgcgaggagagcgagctgccgcggctttaccgggagatgccggtaaacagtatttgggaaggttccggcaatattatgtgcctggatgtgctgcgcgttctcaataagcaagcgggcgtatacgacttattgtcggaagcatttgtggaagtgaaagggcaggatcgctattttgatcgcgcggttcgtcgtttacagcagcagctgcgtaagccagctgaagaattggggcgagagattactcatcggctattcctgctgggctgcggtgcgcaaatgttgaaatatgcctctccgccaatggcgcaggcgtggtgtcaggtgatgttagatacgcgcggcggcgtacggttgtcagagcagatccagaatgatttattgctgcgggcgacgggaggagtgtgtttgtaa

SEQ ID NO: 1890 - DNA, 276 bp, Escherichia coli
atgaaacaattacttgcctcaccctcgctgcaattagtgacttatcctgcgagcgccacggcacagtctgcagaattcgccagtgctgactgcgtgacgggcctgaatgaaataggtcagatctcagttagcaatatttcaggggatccgcaggacgtggaacgtatcgtggcgttaaaggccgatgaacaaggtgcgtcatggtaccgcattattaccatgtacgaagaccagcagcctgataactggcgcgtacaggcgatactgtatgcgtga

SEQ ID NO: 1891 - DNA, 330 bp, Escherichia coli
atggttagcaggaaacgtaatagcgttatttaccggtttgccagtttattattggtgttgatgttaagtgcctgtagcgcactgcaaggtacgccacagccagcaccgccagtaacggaccatccgcaagagattcgccgcgaccagacgcaagggttacagcgaataggtagcgtaagcacgatggttcggggttctccggatgacgcattagcagaaatcagagcgaaagctgtcgctgcaaaagctgattattacgttgtcgtcatggtggacgaaaccatcgtgacaggacagtggtattcacaagccattttgtaccgtaaataa

SEQ ID NO: 1892 - DNA, 750 bp, Escherichia coli
atgattgaaatagaatcacgcgagctggcagatattcccgttcttcatgcttatcctgtcgggcaaaaagataccccgttaccgtgtgtgattttttatcacggctttacttcgtccagtctggtgtatagctattttgccgttgcgctggcgcaggctggtttgcgggtgatcatgccggatgcgcccgatcacggtagccgttttagtggcgacgcagcgcggcggttaaatcaattctggcaaatcttgctacaaagtatgcaggaattcactaccttacgtgcggcaatagccgaagaaaactggctgcgtgatgaccgtctggcagtcggtggcgcgtcgatgggcgcgatgacggcactgggaattaccgctcgccaccccacgataaaatgtaccgccagcatgatgggatcgggctattttacatcgctcgcccgttcactgtttccaccgctgatacctgaaacggcagcacagcagaatgaattcaataacattgtcgcgccgctggcagagtgggaagcgacaaaccacttggaacaacttggtgacagacctctactgctgtggcatggccttgacgatgacgtcgtgcctgccgacgaatcactacgtttgcagcaggccttaagcgagacggggcgggataaactgctaacctgttcatggcagccaggcgtgcgtcaccgcattacgcctgaggcgttagatgctgccgtgacatttttcctccagcatctttaa

SEQ ID NO: 1893 - DNA, 756 bp, Escherichia coli
atgactgaagcacaaagacatcaaatcctcctggaaatgctcgcacaattgggctttgtgaccgttgagaaagtcgttgagcgtctgggaatttcgcctgccactgcacgacgcgatatcaataaacttgacgaaagcggcaaactgaaaaaagtgcgcaatggcgcagaagctattacccaacagcgcccgcgctggacgccgatgaatctgcatcaagcgcagaatcacgatgaaaaagtacgtattgctaaagcggcctcgcagctggttaatccgggcgaaagcgtagtcatcaactgcggctccaccgcgtttctgcttgggcgggaaatgtgtggcaagccagtgcaaatcatcactaattatctaccgctggcaaattacctgatcgatcaggagcatgacagcgtgatcattatgggcggacagtacaacaaaagtcagtccatcactttaagcccgcaaggcagcgaaaacagtctctatgccgggcactggatgtttaccagcggcaaaggactgacagcagaagggttgtataaaaccgatatgctgacggcaatggcagagcagaagatgctgagcgtggtagggaaactggtggtactggttgatagcagtaagattggcgaacgcgcgggaatgctttttagccgtgccgatcaaatcgatatgctgatcactggcaaaaatgctaacccggaaatcctgcaacagctggaagcgcaaggggtcagcattctgcgtgtttaa

SEQ ID NO: 1894 - DNA, 1065 bp, Escherichia coli
atgagtaaagtgaaaagtatcacccgtgagtcctggatcctgagcactttcccggagtggggtagctggctgaatgaagaaattgagcaagagcaggtcgcacctggcactttcgcaatgtggtggctcggctgtaccgggatctggttgaaatcagaaggcggtgccaacgtttgtgttgatttttggtgcggtactggcaaacaaagccacggtaacccgttcatgaaacagggtcaccagatgcagcgcatggctggcgtgaaaaaactgcagccaaacctgcgcaccaccccgtttgttcttgatccgtttgcgattcgccagatcgacgcggtactggcgactcacgatcacaacgatcatatcgacgttaacgtcgctgctgccgtgatgcagaactgtgctgatgacgtaccgttcattggaccgaaaacctgcgttgatttgtggattggctggggcgtaccgaaagagcgttgcatcgtggtcaaaccgggcgatgtcgtaaaagtgaaagacattgaaattcatgcacttgatgctttcgaccgcacggcactgatcaccctgcctgccgatcaaaaagcggctggcgtactgccggacggcatggacgatcgcgcggtgaactatctgttcaaaaccccaggcggtaccctgtatcacagcggcgactcccactactctaactactatgcaaaacatggtaatgagcatcagatcgacgtggctttaggatcgtacggagagaacccacgtggtattaccgacaaaatgaccagtgctgatatcctgcgtatgggcgaagcgctgaatgcgaaagtagtgatcccgttccaccacgatatctggtcaaacttccaggccgatccgcaagagatccgcgtgctgtgggagatgaaaaaagatcgcctgaagtatggcttcaagccgtttatctggcaggtcggcggcaaatttacctggccgctggataaagacaacttcgagtaccactatccgcgtggtttcgatgattgcttcactattgaaccagatctgccgttcaagtcgttcctgtaa

SEQ ID NO: 1895 - DNA, 1398 bp, Escherichia coli
atggagatcctctacaacatctttaccgtgttttttaaccaggtcatgaccaatgccccgttgttgctgggtattgtgacctgtctgggttacatcctactgcgcaaaagtgtcagcgttattattaaaggtacgattaaaaccataattggtttcatgttgttgcaggcagggtccggcatcctgaccagcaccttcaaaccggtggtggcgaaaatgtccgaagtctacggcattaacggcgcaatttccgatacttacgcgtcgatgatggcaaccattgaacgcatgggcgatgcctatagctgggtgggttacgcggtgttgttagcgctggcgctgaacatctgttacgtgctgctgcgtcgcattaccggtattcgtaccatcatgctgactggtcacatcatgttccagcaggcggggctgattgccgttacgctgtttatcttcggctactccatgtggacgaccattatctgcaccgcgattctggtttcgctctactggggcattacctccaacatgatgtacaagccgacacaggaagtcaccgacggctgtggtttctccattggtcaccagcagcagttcgcatcatggattgcttataaagtcgcaccgttcctcggcaaaaaagaggaaagcgttgaagacctcaaactgcctggctggctgaatattttccacgacaacatcgtctccacggcgattgtcatgactatcttctttggtgccattctgctctcctttggtatcgacaccgtgcaggcgatggcaggcaaagtgaactggacggtgtacatcctgcaaaccggtttctcctttgcggtggcgattttcatcatcactcagggcgtgcgcatgtttgtggcggagctctctgaagcattcaacggtatctcccagcgcctgatcccgggtgcggttctggcgattgactgtgcggctatttatagcttcgcgccgaacgccgtggtctggggttttatgtggggcaccatcgggcaactgattgcggttggcatcctggtcgcctgtggctcttcaatcctgattattccaggctttatcccgatgttcttctccaacgccactatcggcgtgttcgctaaccacttcggcggctggcgcgcggcgctgaagatttgcctggtgatggggatgatcgaaatctttggttgcgtctgggcggtgaaactcaccggtatgagcgcctggatgggcatggcggactggtcgattctggcaccgccgatgatgcagggcttcttctccatcggtatcgcctttatggccgtcatcattgtcattgcactggcttatatgttcttcgctggccgcgcgctgcgcgcagaagaagatgcagaaaaacaactggcagaacagtctgcttaa

SEQ ID NO: 1896 - DNA, 306 bp, Escherichia coli
atgaccgtacgtattctggctgtgtgtggtaacggacaaggcagttccatgatcatgaaaatgaaagtggaccagtttttaacccagtcgaacatcgaccacacggtaaacagctgcgcggttggcgaatacaaaagcgagttgagcggtgcggatatcatcatcgcttctacccatattgcgggcgaaatcaccgtgaccggcaacaaatatgtggttggcgtgcgcaacatgctctctcctgctgattttggcccgaaactgctggaagtgatcaaagagcatttcccgcaggacgtgaagtaa

SEQ ID NO: 1897 - DNA, 465 bp, Escherichia coli
atgaaattacgtgattcgctggctgaaaataaatctatccgcctgcaagcggaagcagagacatggcaggacgcagtgaaaatcggcgttgatctgctggtagcggcagatgtggtagagccgcgttactaccaggcgattctggatgcggttgaacagcacggcccgtactttgtgctcgcacccggcctggcaatgccgcacggacgcccggaagagggggttaagaaaactggttttgcgctggtgacgctgaaaaagccgctggagttcaaccacgaagataacgatccggtggatatcctcatcaccatggcggcggttgatgccaacactcaccaggaagtgggcatcatgcagatcgtcaacctgtttgaagatgaagagaatttcgaccgtttacgtgcctgccgtaccgagcaggaagtactggatctcattgaccgcaccaacgcggcagcttaa

SEQ ID NO: 1898 - DNA, 651 bp, Escherichia coli
atgtcattaccgatgttgcaagtcgcgctggacaaccagactatggatagcgcctacgaaaccactcgcctgattgccgaagaagtcgacattatcgaagtgggcaccattctgtgcgtgggcgaaggcgtgcgtgcggttcgtgacctgaaagcgctttacccgcacaaaatcgtactggcagacgccaaaattgccgatgcgggcaaaatcctttctcgcatgtgcttcgaagccaacgctgactgggtgaccgtaatttgctgtgcggatatcaacaccgccaaaggcgcgctggacgtggcaaaagagtttaatggcgacgtgcagatcgaattgaccggctactggacctgggaacaggcgcagcagtggcgcgacgcaggcattgggcaggtggtttatcaccgcagccgtgacgcgcaggccgcaggcgtggcatggggcgaagcggatatcaccgcgatcaaacgtctttccgatatgggcttcaaagtcaccgtcaccggtggtctggcgctggaagatctgccgttgtttaaaggcattccgattcatgtgtttatcgctggtcgcagcattcgtgatgccgcttctccggtggaggccgcacgtcagttcaaacgttccatcgctgaactgtggggctaa

SEQ ID NO: 1899 - DNA, 855 bp, Escherichia coli
atgttgtccaaacaaatcccgcttggcatctacgaaaaagcgctccccgctggggagtgctggctggaacgactgcaactggcaaaaacgttaggcttcgattttgtcgagatgtcggtagatgaaacggacgatcgcctttcgcgcctcgactggagccgcgagcagcgtctggcgctggtgaacgcgattgttgaaaccggcgtgcgcgtgccgtctatgtgcctttctgctcatcgtcgtttcccgctgggcagcgaagatgacgcggtgcgggcccaggggctggagattatgcgtaaagctatccagttcgcccaggacgtcggcattcgcgtgatccaactggcgggctatgacgtttactatcaggaagccaataacgaaacgcgtcgtcgtttccgtgacggcctgaaagagagcgttgagatggcaagccgtgcgcaggtcacgctggcgatggagatcatggattacccattgatgaactccatcagcaaggcgctgggctacgcacactatctcaacaatccgtggttccagctctacccggatatcggcaacctgtcggcgtgggataatgacgtgcagatggagttgcaggctggaatcgggcacatcgtcgcggtgcatgtgaaagacaccaaaccaggcgtcttcaaaaacgtgccgtttggcgaaggcgtagtggatttcgaacgttgcttcgaaacgctcaaacagagtggctattgcgggccgtacctgattgagatgtggagcgaaacggcggaagacccggcggcagaagtagcgaaagcgcgtgattgggtgaaagcgcgcatggccaaagcaggcatggtggaggcggcataa

SEQ ID NO: 1900 - DNA, 687 bp, Escherichia coli
atgcaaaagctgaaacagcaggtgtttgaagccaacatggatttaccgcattacgggttggtgacctttacctggggcaacgtcagcgctattgaccgtgaacgcgggctggtggtgatcaagcccagcggtgtcgcctacgaaaccatgaaagcggacgatatggtggtggtcgatatgagcggtaaggtggtggaaggggagtatcgtccgtcttccgacactgcgacgcatctcgaactctaccgtcgttatccgtcgcttggtggtattgtccatacccactccactcatgccaccgcatgggcgcaggcggggctggcgatcccggcgttaggcaccacgcacgccgattacttctttggcgacatcccgtgcacgcgcggattaagcgaagaagaggtgcagggtgagtacgaactgaataccggcaaagtgattatcgaaacgctgggtgacgccgagccgctgcatacgccgggaattgtggtgtatcagcacggaccgtttgcctgggggaaagatgcccacgacgcggtgcataacgcggtggtgatggaagaagtggcgaaaatggcgtggattgcgcgcagtattaatccacaactcaatcacatcgacagcttcctgatgaataaacacttcatgcgtaagcacggtcccaacgcctattacgggcagaagtaa

SEQ ID NO: 1901 - DNA, 276 bp, Escherichia coli
atgttcagtcgtgttttagcccttctggctgtgcttttgctaagtgcaaatacatgggcagccattgaaattaataaccaccaggccagaaatatggatgatgtgcaaagcttaggcgtgatttatatcaaccataacttcgccactgaaagtgaagcacgtcaggcattaaatgaagagacagatgcgcaaggcgcaacgtactaccatgtgattctgatgcgggaaccggggagtaacggcaatatgcacgccagcacggatatttatcgctag

SEQ ID NO: 1902 - DNA, 396 bp, Escherichia coli
atgcgtcattacgaaatcgtttttatggtccatcctgaccagagcgaacaggttccgggcatgatcgagcgctacactgctgccatcactggtgcagaaggcaagatccaccgtctggaagactggggccgccgtcagctggcttacccgatcaacaaactgcataaagcacactacgttctgatgaacgttgaagcgccgcaggaagtgatcgatgagctggaaactaccttccgcttcaacgatgccgttatccgcagcatggttatgcgtaccaagcacgctgttaccgaagcatctccgatggttaaagcgaaagacgagcgccgtgagcgtcgcgatgatttcgcaaacgaaaccgctgatgatgctgaagctggggattctgaagagtaa

SEQ ID NO: 1903 - DNA, 315 bp, Escherichia coli
atgaccaaccgtctggtgttgtccggcaccgtgtgcaggactccccttcgaaaggtcagtccatcaggaattcctcactgccagttcgtgcttgagcatcgttctgtgcaggaggaagccggctttcaccggcaggcgtggtgccaaatgcccgttattgttagcggacacgaaaaccaggccattactcacagtataacggtcggcagtcgcataaccgttcaggggttcatttcatgccataaggcaaagaacggactgagcaaaatggttttgcatgccgagcagattgaattgatagattctggagactag

SEQ ID NO: 1904 - DNA, 228 bp, Escherichia coli
atggcacgttatttccgtcgtcgcaagttctgccgtttcaccgcggaaggcgttcaagagatcgactataaagatatcgctacgctgaaaaactacatcaccgaaagcggtaagattgtcccaagccgtatcaccggtacccgtgcaaaataccagcgtcagctggctcgcgctatcaaacgcgctcgctacctgtccctgctgccgtacactgatcgccatcagtaa

SEQ ID NO: 1905 - DNA, 450 bp, Escherichia coli
atgcaagttattctgcttgataaagtagcaaacctgggtagcctgggtgatcaggtaaacgttaaagcgggctatgctcgtaacttcctggtaccgcagggtaaagctgttccagctaccaagaaaaacattgaattcttcgaagcacgtcgcgctgaactggaagctaaactggctgaagttctggcagcagctaatgctcgcgctgagaaaatcaatgcactggaaactgttaccatcgcgtctaaagctggcgacgaaggtaaactgttcggttccatcggtactcgcgacatcgctgacgctgtaactgcagctggcgttgaagtggctaagagcgaagttcgtctgccgaacggcgttctgcgtaccactggcgaacacgaagtgagcttccaggttcacagcgaagtattcgcgaaagtgatcgtaaacgtagtagctgaataa

SEQ ID NO: 1906 - DNA, 492 bp, Escherichia coli
atgggtaaaaaaacagcaccgttactcccttatacgaatcagatgcttagtgaatttggtgagcggctgaaacttgctcgtttacgacgcaggcttaccgcaaagcaagttgctgaacgtgctgggatgtcgccaataacattgcgctctctggagtcaggaagtgcaggggtcacgataggggcatatttgtctgtgatgcaggttttgggcctggaaacggatttaaataagcttgcagctgaagacgacttagggcgtcagctccaggattcccgtttgattaaaaaaagagggctttctcgttcatcaggtaaaaatgaagaaggtattcagacagacccttttcaaacgaggtatgagaaagaaggtttactcaccacggatttaacagcactggcagaaggctcaacgccatctattacaggagaaacatcaacctctcttgcagcactattaaaaccgataaaaaaaccgttaaaaggaaattaa

SEQ ID NO: 1907 - DNA, 129 bp, Escherichia coli
atggcattaatcggagtgtatgcggattgggaaggcctggatggtccggagcggattggttatttcgatatgttcttgcaaagaagtaccagtagatacctgaacatttcggaagagacgtttaattga

SEQ ID NO: 1908 - DNA, 1278 bp, Escherichia coli
atgaataaaataaagaattatcgatggcatatgattgccctcgtatgctttatcactgtaatcaattatctggacagaacggcgttaggtattgcggctccaacgattatggagacaaccggaataaccaaagaacaatattcatggattgtcagtgcattccagttggcctatacattggggcaaccgataatgggcttctttattgataccgtgggtctgaagttaagttttgcgatatgtgccgcaatctggggcctggcgacaatggggcatgccttgacaggaacatggtcaggtctggcatttatgcgcgccctgatgggtttcagcgaagcatcggcaattcctgcgggtgtaaaaaccgcatcaacatggttcccggcaaaagagcgtggcgtggcgacaggtgttttcaatatgggcacctcactcggcgcgatgcttgctccaccgttgattgcctggtgcattatgtttcatagctggcaatttgcgtttattgtctcaggtagccttgctttactcgcggctttattttggttcttttgttataaagatccaaaagatgctaaacgcctttctgatgaagagcgccactatattgagtctgggcaagaacagcatcttaaaacagataagaaagaaaaaacgtcaatcaagcatatcctcagccaacgtaatttctgggggattggcatcgcgcgttttctcgctgacccggcatggggaaccattaacttctgggtacctattttcttcgtcgaaacgctgcattttagcctgaaagaaattgccatgttcgtctggctgcctttcctgctgggcgatctcggctgtttagccagtggttttgtcgcgaagttcttccacgatcgcggcgtgagtttaattaactcacgaagaattaccttcactattgcagccgtcattatgatgacgattggtctggtgagtattgtcgaaaatccctacatcgccgtattactgattagcattggcgcattctcgcatcaatgtctttctactgttgcagcaactctgggcggtgacctattcaaaaaagacgaagtagctaccgctgtgggtatggcaggagcctgtgcatggagcggtcagttgattttcaacctgtttatcggggcattcgttcacattattggcttcgcgccgttctttattgccctggctttctttgacattattggcgccattgcgctgtggatgcttatcaaagttaaagacgaagaaccacaagtacagttagcgacaagataa

SEQ ID NO: 1909 - DNA, 2073 bp, Escherichia coli
atgagccagcttgatgaggtcatccttgatgcactgacgcacgttactttcccaaagggttttgcacagtcagaacccgcatgggttgtcacggtagacggtgttgattacccactctggaaaacagatgcccttgtagtcggcagtggtgcagccgggctgcgtgcagctgtggaacttaaacgccgccagcaaaatgtgttaatcgccaccgccgggttatatatggggacgtcggcatgttctggctctgataaacaaacactgtttaccgccgctaccgcgggcaacggcgacaacttcaccaaactggcagaggcactggcgagcggtggggcgatggatcacgacaccgcttatgtcgaagcggtaggttctctgcacactcttggcgggttgcaatatcttggtctggaattaccggaagatcgctatggcgcgattcttcgttatcaaaccgaccatgacgaagccgggcgtgcaacctcgtgtgggccgcgtacctcaaggttaatggtgaaagtgctgctggaagaagtacagcgtcttgctatcccaatgttgaccagtgcaacagtgattaaactgctgcatcagcgtgacgaaaacggtgaagaccgtgtggcgggggtaatcctcgcgaccggtcatcgcgcccataacccatgggggctggcaattgtgactgcgcccaatgtggtactggcaacaggagggcctggcgagctttatcgcgacagtgtgtatccacacaaatgtttcggctcgctggggctggcgctggaggaaggtctgacgttaacgaatctgactgaaagccagtttggtataggcacaccgcgcagcacgtttccgtggaatttgtccggcacttatgtacaggtgatcccatatatctattccgtggatgccgggggtaacgagtataacttcctcgcggattactatcgcaccacccaggagctggcttcaaatattttccgtaaaggctatcagtggccgttccacgccacacgggtaatggattttggctccagcttgttagatatggcagtagcgcaagagcagcaatcagggcgtcaggtatttatggatttcaatcgtaatcctgaacctgtgccgggtgacctgccgttctcattagatcgactggacgacgacgttcgcgcgtatctggaaaataacgacgctctggcaccatcgcccatcgaacgcctgcaacgaatgaatccgctgtctatctcgctgtataagatgcacggttacgatctcaccacgcagccattgcagtttgccatgaataatcagcacatgaatggcggcattgaagtcgatatctggggacaaacatctctgcccggttgttttgcagtgggggaagttgctggcacacacggcgtcacccgacctggcggcgcggcgttgaatgccgggcaggtttttgctgttcgtctggcgcgctttattggttgcacgcaaaagcggaatattgatggagatattgcacagctggcagctccggcactggcttctataagagagatcattactcaggcgcacgataacgggtccgggatgccgttgtcggttgtgagagaaaaaattcaggcacgaatgtctgactatgcgggatttatttgccatgccgataaagtccgacgtgccactcgtgatgccctgctattgaacgaatttgtccaacgacatggattggcaatcaaacatgtgggtgaagttgccgagctgtttatgtggcggcatatgacgctgacttctgccgccgtcttaactcaactgacacattatattgatgcaggtggtggtagccgtggggcgcgtatggttattgatccacaaggcaaatgcctaccacaaactcgtcgcggcgcaaaagaagaatggcgttttcgctctgaactcgctgaagacaaaaatcacaaattaacaattcaatattcgcaaggttcttttattaccgaagtaaagtctttacgtattcaaccgtgtattaacggtatttactttgaaaaaaactggccagactttttaaagggagacatttacacacaataa

SEQ ID NO: 1910 - DNA, 1542 bp, Escherichia coli
atgcgtaagttatcaaccgccgagacactggcggcgcaaattcaggacggcgcaaccattgccattagcggtaacggcggcggtatggtggaagctgaccatattatggccgccattgaagcgcgtttcctgcaaaccggacacccgcgcgatctgacattaatccactcgctgggtattggcgatcgcgacagcaaaggcactaaccgttttgctcacgccgaaatgctcaaacgcattattgccggacattttacctggtcgcccaagatgcaggaactggtgaaaagcaatgctattgaagcctactgtttccctggtggcgtaattcaggcactgctgcgggagatcggtgccggacgtccgggactttttacccacgttgggctgggatcgtttgttgatccacgcaatggcggcggtaagtcgaacgaatgcactaccgaggatttggtagaactgattgaaatcgacggtgaaaccaaactccgctatcgccctttcaaagtggactacgcgattttgcgcggcacctatgccgatccgcgtggcaacgttagcctcgaagaagaagcgattgatatggatagctattcgatggcgctggcagcacacaacagtggcggcaaagtgtttgtacaggtgcgcgatgtactggaagctggcaccattgaacctcgcaaggtcaagctaccggggattctggtcgatggtatcgttgagcaccgcgaacaaccgcaaacctatcttggtggttacgacctgaccattagcggtcaacatcgccgtctaagttctaacgacgctattgaactggttagtcatccggtgcgtcgcctgattgcccgtcgggcagcgcgggaactggtggcaggcgcttcaaccaactttggctttggtattccgggcggtattcctggggttgcgctgcgcgaaggcgtgccttatcaaagtttgtggctgagtgtagaacagggtgtgcataacggcatgatgctggatgatgctctgttcggctgcgcccgtaacgccgatgccattattccatcactcgatcaatttgaattctacagtggcggcggcatcgatatcaccttcctcggcatgggagagatggatcaatacggtaacgtcaacgtctcccatcttaatggcaatctcattggccccggcggatttctcgaaattgcacaaaacgcccgtaaagtggtgttttgcggtacgttcgacgccaaaggcagcaagattgatgtaacgccagatggcttgcatatcgcccagtcaggtcaaatccctaaactggttaccctggtggaaaaaatcacctttagcgccgcatacgcacagcaaagcggtcaggaagtgctgtatatcaccgaacgtgcggtattccagttaacggcagaaggcgttgaattaattgagatcgcccctggcgtagagattgagcgcgacattctgccattcatggctttccgtccaattatcaagcacccacgtctgatggaaagcagcctgtttacgccgatggaggatgcatga

SEQ ID NO: 1911 - DNA, 777 bp, Escherichia coli
atgaatgaccaacccgttctgttcagcagagcggcggcttcttgccgtctgacattgaaccgtgaagataaatgtcatgctattaatgaagaaatgatcgaatctctcgaccattatttaaatgaaattgaaaacgacaccacattacgattagtcgaattaacggcaaccggcgataaattcttttgtgcgggcggcgatattaaatcgtggtcggcctattcgccattagatatgggcagaaaatggattaaacgcggtaatgacgtttttaatcgcctgcgcaacttaccccaattaaccgttgcgaatctcaacggtcataccatcggtggcggtattgaacttgccttgtgctgcgatattcgtatcgctcgccccggcgcgaaattctctaacccggaagtgatgctcggcatggtgcctggctggatgggcattgaacgcgtgcttaatcaggttggcccggtggtcggtcgccagatgctgatgctgggtaaacgcctgactgcgcaggaagcccaggtggcgaatttaattgatgaagtggtagaaaaagaacaggtggaaagctggatggcgaaccagttagcgcagctggaaaaatgtggtccggtggcactggcacatattaagcaactgattctggcgctggaaaataaacacgccgattactcccaccagttactggctggattaatgtccgccactcaggattgccaacaggcgacgcacgcatttgccgaaaaagccggcgtgagcttccacaatcaataa

SEQ ID NO: 1912 - DNA, 843 bp, Escherichia coli
atgagagatctgttacaacgcccggatttattcagtatcaataccgcgacactgggctataaaacgccgctacccgccattattgatgcctgcgccgcacgcggtattggcgccattgccccctggcgcagggagttgcagagtgaagatctccagcaaatcacccgccagcttgctgccagtaacataaacgtttccggtttgtgccgtagcacctactacaccgcaccgacgctggcggagcgcaagctggcgattgatgataaccgccgggcgctggacgatgccgctgtgctaaatgccgcctgttacatgcaggtggttggcggtctgccaatgggaacaaaagatctgtacgaagcacgggaacaggtgaaacaagggattcgccagttgctgccacattcgaaagaggtcggcgtgccaattgcactggagccactgcacccgatgactgctgccgatcgttcttgtctgtgcacgttacgtcaggcgctggactggtgtgatgaactcgatcccgatggcgaatttggcctcggcgtggcggtagatgtctaccatgtctggtgggacccggatctcgccagtcagatcctgcgtgccggaaaacgcatcctcgcgtttcatgtttccgactggttagtgccgaccaccgatctggtcaatgaccgtggaatgccgggagatggtgtcatcaatattccgtcaattcgtcggctggttgaaaacgccggatttaatggcgctattgaactggaaatattctcaccgtactggtggcagaaagatattaacagcacgctggatattagcgtcgatcgcatcgcacattattgttaa

SEQ ID NO: 1913 - DNA, 792 bp, Escherichia coli
atgaaatccactcgtcctgttgccgtgattaccggagccgcacgtggtattggaaagggctgtgcgctggagcttgcgcgtggcggatttaatctgctgattaatgatcgtccggatgccgatagcgtagaaaaattacatgccacacaacaagaatgtctggcggaaggcgtggaagtgatttgcttccctgctgatgtgggcgatctctccctgcatgaagagatgctcgacgcagcgcaaaaccagtggggacgtctggactgcctgctcaacaacgcaggcatttcagtgaaaaaacgcggtgaccttctcgacctcgaaccagacagcttcgaccaaaatattgccattaacacccgcgcaccgttcttcctcgctcaggcattcagtaagcgcttactggcacagccgaaaccggaagcagaactgccgcaccgctcgattatttttgtcagttccatcaacgccatcatgctggcgatgaatcgcggcgaatataccattgccaaaactgccgtctctgccgctgctcgtctgtttgctgctcgcctttgtaatgaacaaattggcgtttatgaagtgcgtcctggtctcatcaaaaccgatatgactattccggcaacggcctattacgacgaactgattgccaaaggtctggtgccgtggggacgttggggttatccggctgatattgcttccactgtccgcgcgatggcggaaggtaaactgatttacacctgtggtcaggcggtcgccatcgacggcggcttaagtatgccgcgcttctga

SEQ ID NO: 1914 - DNA, 648 bp, Escherichia coli
atgtatcttgataccagcaacgtacagagcctgaaagaaaagctgctgttatgcgcggttaatgaatttgccgaatatggttacgaaggggccagagtcgataatatcgtcaaggccgcggagtgcagtaaacagacggtttatcaccactttggtaataaagaaaatttatttatcgaagtactggaatatacctggaacgatattcgacaaaaagaaaaggcccttgatttctcagatcttccgccacagaaagccattgagaaaataatcgattttacatgggattattatatttctaatccctggtttttaaaaattgtgcatagtgaaaatcaaagtaagggtgtgcattatgcaaaatcacagcgtcttttagaaattaaccatgcgcacttgcagttaatggaatccttattggatgaagggaagaaacaaaatatttttaagccagatatcgacccattgcaggtgaatattaatattgctgcgcttgggggatattatttgatcaaccagcatacgcttggcctggtttatcacatcagtatggtttcaccgcaggcactggaagccagacgtaaggtcatcaaagagacgatccttagctggcttttggttgacccttcatctaccgcgcgcgaataa

SEQ ID NO: 1915 - DNA, 639 bp, Escherichia coli
atgcccgggcgctttgaactaaaaccaaccctggagaaagtctggcacgcgccggacaattttcgcttcatggacccgctgccgccgatgcatcgtcgggggatcattattgccgccattgtattggtagtcggatttctgcttccatctgatgatacgcccaacgcgccggtggtgacgcgtgaagcgcagttagatattcagtcgcaatcacaaccaccgacagaagaacagctgcgggcgcaattagtcacgccacaaaatgatcctgatcaggtggctccggtcgctccagaaccaatacaggaaggccaaccagaagagcagccgcaaaccacccatacgcaaccattccagccagatagcggaattgataatcaatggcgctcctatcgtgtcgaacccggtaaaacgatggcgcaactgttccgcgaccacggactgcccgctaccgatgtctatgccatggcgcaggtagaaggcgcggataagccactgagtaatttgcaaaacgggcagatggtgaaaatccgccagaacgccagcggcgtggtgacgggcttaaccattgatacggggaataatcaacaggtcctgtttacccgccagccggatggcagttttattcgcgcgcggtag

SEQ ID NO: 1916 - DNA, 621 bp, Escherichia coli
atgaccaccccaacttttgacaccatcgaagcgcaagcaagctacggcattggtttgcaggtagggcaacaactgagtgaatctggcctggaagggctgctgccagaagcactggttgcaggcattgccgatgcgctggaaggcaaacatccggctgttccggttgatgtggtgcaccgcgcgctgcgtgaaatccacgaacgcgccgatgccgttcgtcgtcagcgtttccaggcgatggctgctgaaggtgtgaaatacctggaagaaaacgccaaaaaagaaggtgtaaatagcaccgaatctggcctgcaattccgcgtgatcaaccagggtgaaggcgcaattccggcacgtaccgaccgcgttcgtgttcattacaccggaaaactgatcgacggcaccgtgtttgacagctccgttgctcgcggcgagccagctgaattcccggttaatggtgtgatccctggctggattgaagcactgactctgatgccggtaggttctaaatgggaactgactatcccgcaggaactggcatatggcgagcgtggcgcaggcgcgtccatccctccgttcagcaccctggtgtttgaagtcgaactgctggaaatcctctaa

SEQ ID NO: 1917 - DNA, 1404 bp, Escherichia coli
atggtagatcaggtaaaagtcgttgccgatgatcaggctccggctgaacagtcgctacggcgcaatctcacaaaccgacatattcagcttattgccattggcggtgccattggtacagggctgtttatggggtccggcaaaacgattagccttgccgggccgtcgatcattttcgtttatatgatcatcggttttatgctctttttcgtgatgcgggcaatgggggaattgctgctttcgaatctggaatacaaatcttttagtgacttcgcttccgatttactcgggccgtgggcaggatatttcaccggctggacttactggttctgctgggttgtaaccggtatggcagacgtggttgccattaccgcctatgcgcaattctggttccctgggctttctgactgggttgcttcgttatccgtgatcattctgttactggttctaaacctcgccacggtaaaaatgttcggtgagatggagttctggtttgcgatgatcaaaatcgtcgccatcgtgtcgctgattgttgtcggcctggtcatggtggcgatgcactttcagtcaccgaccggtgtggaagcatcatttgcacatttgtggaatgacggcggctggttcccgaaaggcttaagcggcttctttgccggattccagatagcggtttttgctttcgtggggattgagctggtaggtacaacagctgcggaaaccaaagatccggagaaatcactgccacgcgcgattaactccattccgatccgtatcattatgttctacgtcttctcgctgattgtgattatgtccgtgacgccgtggagttcggtagtcccggagaaaagcccgttcgttgaactgtttgtgttggtaggtttgcctgcggctgccagcgtgatcaactttgtggtgctgacctctgcggcgtcttccgctaacagcggtgtcttctctaccagccgtatgctgtttggtctggcccaggaaggtgtggcaccgaaagcgttcgctaaactctctaagcgcgcagtacccgcgaaagggctgaccttctcttgtatctgtctgctcggcggcgtggtgatgttgtatgtgaatcccagcgtgattggcgcgttcacgatgattacaaccgtttccgcgattctgtttatgtttgtctggacgattatcctttgctcgtacctggtgtatcgcaaacagcgtcctcatctgcatgagaagtcgatctacaagatgccactcggcaagctgatgtgctgggtatgtatggcgttctttgtgtttgttctggtgttgttgacactggaagatgacacccgccaggcgctgctggttaccccgctgtggtttatcgcgctggggctgggctggctgtttattggtaaaaaacgcatggcgaagtaa

SEQ ID NO: 1918 - DNA, 432 bp, Escherichia coli
atggttaagcgcagttggttattaatcgccgcattacctctctctatttcaccttcctggggcgcggatttttattaccgccagcaggagaaaggcacggtttatgttgtcgaacagaagggggaaaaagatgagatcctctccgaattaccagatattaatttttcccgcctttggcgcattgccaatttagccaataaacaagattcccggttactgtccgattttcccgataagttcgattgcgatgatgagggggattgcgaacatgtctggctcaccgacggacgctctgttctttggtctggcaaagtcctgaaaaatccccccggtaaacctaaagtcgacgctgccagttttcaggcattcggcgctttcgctgctgataaacgcagtatctattttgacggtcagcgtaccgatgatagatga

SEQ ID NO: 1919 - DNA, 1068 bp, Escherichia coli
gtggctatattacatccacaggagtgctggttgctggaaagaataatgtcgccggaatattatcggcgtcgttttgagggctggcaggagtttgtcgagctgtgcgagcgacaggtggcagagtggagcaagaccatgccgctggatgtgcgccgtcgtccgctgtgcgagcagattgacgccgtctggggcgggcgagtgttgcccaatatccgcagtactttaaagtcggtacagtatgactttattcagctacagcagggggacctgcgggtactgcaatccgggggtaacattagcagtgatatgaaaggactaattgattatccgtcggactggatgtcactcgtcgcgcaaaaacagtatgacagactgaaatggcgaggtgcacattataataatttaatcagacgtacctcgggcggatactggtatgacggcgaactgacttattattatgaggaaagtctgcacggcccgctggccttgccgatgcaactaccgttgtatgagctggatagccgcgtatacctgcgtgaggatgacccggtaacgttggctggcttgtatctgccggatatcccagatgccagcgcccaactgttgtaccggagtgaacatattccagaggcttggcaggggcgggtacgaacgaagtatgtcaatgaggctgggatacaagaatattactgggaaaacggggcgtgggaaaaatgcaactggatacgtatacggcgggtggcaaaccgatttatcgatgtgccgccggagggatttttcccacagggcatgccggaggagttgtacaactggccacagcgcgaggcgcagtatgtaacagaccggcagcggatggcggcctgtagcggtgaagcttgtcctcatagcggggagtggtcgatttttgtagaaggtagacaagcgacggtgacactggagcagggagagcagatgccagaatggacggacaggaaaatggagggggagtataaaagaggcgagaaattccatgtgctgtggtcgctgatgaaccgccatgatggcgggtcggtgtgggtggaagcgtag

SEQ ID NO: 1920 - DNA, 663 bp, Escherichia coli
atggcttatcgcgaccaacctttaggtgaactggcgctctctattcctcgcgcttcggctctgtttcgtaaatatgatatggattactgctgtggcggtaagcagacgctggcgcgcgcggcggcacgtaaagaactggatgttgacgtcattgaagccgaactggcaaagcttgctgaacaaccgattgagaaagactggcgtagcgccccgctggcggaaatcatcgaccacattattgtgcgctatcacgatcgccatcgcgagcagctgccggagctgatcctgcaagcgactaaagtcgagcgcgttcacgccgacaaaccaagtgtgccaaaagggctgacaaaatacctgactatgctgcatgaagagctttccagccatatgatgaaagaagagcaaattctcttcccgatgattaaacaaggcatgggcagccaggcaatggggccaatcagcgtaatggaaagcgagcacgatgaagcgggcgaactgctggaagtgatcaaacacaccaccaataacgtcacaccgccgccggaagcctgcaccacctggaaagcgatgtataacggcattaatgaactgattgatgacctgatggagcacatcagtctggaaaacaatatactattcccgcgcgcgctggcgggtgagtga

SEQ ID NO: 1921 - DNA, 966 bp, Escherichia coli
atgattagcggcgtgctgtacgccctgttagcagggttgatgtgggggcttatttttgtcgggccgttgatcgtaccggaatacccggcgatgttgcagtcgatggggcgttatctggcgttagggttaattgcgctgcccattgcctggctgggacgcgtgcgtctgcgtcagttggcgcgtcgcgactggcttaccgccttgatgctcaccatgatgggtaaccttatctattacttctgccttgccagtgccattcaacgtactggcgcgcctgtttccacgatgattatcggcaccctgccggtggtgattcccgtttttgccaatctgctttatagccagcgcgacggcaaactcgcatggggaaaactcgccccggcactggtttgtattggcatcggcctggcgtgtgtgaatattgctgagttaaaccacggactccccgattttgactgggcacgttatacctcaggcatcgtgctagcgttagtttccgtggtctgctgggcatggtatgccctgcgcaacgcccgctggctgcgggaaaatcccgacaaacatccgatgatgtgggcgacggcgcaggcgctggtcacgctgccggtttctctcatcggctatctcgtcgcctgttactggctgaatatgcaaacgccggacttctccttaccctttggcccccgtccgctggtgtttattagtctgatggttgcgatagccgtgctttgctcatgggttggcgcactctgctggaacgtcgccagccagcgattaccgacagtgattctcgggccgctgattgttttcgaaacgctggcaggtttgctgtacacctttttactccgccagcaaatgccgccgctaatgacgctgagcggtatcgcgctgttagtgattggcgtggtcatcgcggtcagagcaaaaccagaaaaacctttaactgaatctgtctcagaaagttga

SEQ ID NO: 1922 - DNA, 861 bp, Escherichia coli
atgatcgctattactggtgccactggccaacttggtcactatgttattgaatccttgatgaaaacggttcctgccagccaaatagtggctatcgttcgtaatccggcaaaagcacaggtactgacagcacaaggcattaccgtgcgtcaggctgattacggcgatgaagccgcactgacatctgcgcttcagggagtggaaaaactactgctgatctcttccagcgaagtgggtcaacgtgccccgcagcatcgtaatgttattaatgccgcaaaggcggccgacgtgaaatttatcgcttataccagcctgctacatgccgattcctccccgctcggcctcgccgatgagcacatcgagacggagaaaatgctggctgattctggcatcgtttacaccctgctgcgcaacggctggtacaccgaaaactacctcgccagcgccccggcagcactggaacacggcgtatttatcggtgccgcgggcgatggcaaaatcgcctcagcaacgcgggctgattatgcggtagctgcggcacgcgtaattagcgaagccggtcacgaaggcaaggtttacgaactggcgggcgatagtgcctggacgctgacacagttagcggcagaactcaccaaacagagcagcaaaccgattacctatcaaaacctgagcgaagctgatttcgccgcggcgctgaaaagcgtcggtctgcctgatggactggcggatatgctggcggattctgacgttggcgcatcgaaaggcggtctgtttgatgacagcaaaacgcttagcaaattgattggccgcccaacgacaacgttagccgaaagcgtaagccatctttttaatgttaataactag

SEQ ID NO: 1923 - DNA, 381 bp, Escherichia coli
atgagtcaggttagcctgtcgcaacaactcaaagagggaaatctctttgcggaacagtgcccgtcgcgcgaggtgttgaaacacgtcaccagccgttggggggtgttgattctggtggcgctacgcgaaggtactcatcgctttagcgacctgcggcgcaaaatgggcggggtgagtgaaaagatgcttgcgcagtcgttacaggcattagaacaggatggttttcttaaccgtatcgcgtatccggtggtgccgccgcatgtggaatatagcctcacgccgctgggcgagcaggtgagcgaaaaggttgctgcactggcggactggattgagttgaatttgcccgaggtgttagcggtgcgggatgaacgtgcggcataa

SEQ ID NO: 1924 - DNA, 1944 bp, Escherichia coli
atgattaagtttagcgcaacgctcctggccacgctgattgccgccagtgtgaatgcagcgacggtcgatctgcgtatcatggaaaccactgatctgcatagcaacatgatggatttcgattattacaaagacaccgccacggaaaaattcggactggtacgtacggcaagcctgattaacgatgcccgcaatgaagtgaaaaacagcgtactggtcgataacggcgatttgattcaggggagtccgctggcagattacatgtcggcgaaaggattaaaagcaggtgatattcacccggtctataaggcattaaatacgctggactataccgtcggcacgcttggcaaccacgagtttaactacggtctggattatctgaaaaatgcgctggcgggagcgaaattcccttatgtaaatgccaacgtcattgacgccagaaccaaacagccaatgtttacaccgtatttaattaaagacaccgaagtggtcgataaagacggaaaaaaacagacgctgaagattggttatattggcgtcgtcccgccacaaatcatgggctgggataaagctaatttatccgggaaagtgacggtgaatgatattaccgaaaccgtgcgcaaatacgtgcctgaaatgcgcgagaaaggtgccgatgtcgttgtcgttctggcgcattccgggctgtctgccgatccgtataaagtgatggcggaaaactcagtttattacctcagtgaaattccgggcgttaacgccattatgtttggccatgctcacgccgttttcccaggtaaagattttgctgatatcgaaggggctgatatcgcgaaaggcacgctgaatggtgttccggcggtaatgccaggcatgtggggcgatcatcttggtgtggtcgacttacaactcagtaatgacagcggtaaatggcaggtgacgcaggcgaaagcggaagcacggccgatttacgacatcgctaataaaaaatccctcgcggcggaagacagcaagctggtagaaacactcaaagccgatcacgatgccacacgccagttcgtcagcaagccaatcggtaaatctgccgacaatatgtatagctatctggcgcttgtgcaggacgatccgaccgtgcaggtggtgaacaacgcgcaaaaagcatatgtcgagcattacattcagggcgatccggatctggcaaaactgccagtgctttcagctgccgcaccgtttaaagttggtggtcgcaaaaatgaccccgcaagctatgtggaggtggaaaaaggccagttgaccttccgtaatgccgccgatctttatctctaccccaatacgctgattgtggtgaaagccagcggtaaagaggtgaaagagtggctggagtgctccgccggacagtttaaccagattgatcctaacagcacgaaaccacagtcactcatcaactgggatggtttccgcacctataactttgatgttattgatggtgtgaattatcagattgatgttacccagcccgcccgttatgacggcgagtgccagatgattaatgccaatgcggaaaggattaagaacctgacctttaacggcaagccgattgatccgaacgccatgttcctcgttgccaccaataactatcgcgcttacggcggcaaatttgccggtacgggcgacagccatatcgcttttgcttcaccggatgagaaccgctcggtgctggcagcgtggattgctgatgagtcgaaacgtgcgggggaaattcacccggcggcagataacaactggcgtttagcaccaatagctggcgataagaaactggatatccgtttcgaaacctctccgtcagataaagccgcagcgtttattaaagagaaagggcagtatccgatgaataaagtcgcgaccgatgatatcgggtttgcgatttatcaggtggatctgagtaagtaa

SEQ ID NO: 1925 - DNA, 741 bp, Escherichia coli
atgttagatcaagtatgccagcttgcacggaatgcaggcgatgccattatgcaggtctacgacgggacgaaaccgatggacgtcgtcagcaaagcggacaattctccggtaacggcagcggatattgccgctcacaccgttatcatggacggtttacgtacgctgacaccggatattccggtcctttctgaagaagatcctcccggttgggaagtccgtcagcactggcagcgttactggctggtagacccgctggatggtactaaagagtttattaaacgtaatggcgaattcaccgttaacattgcgctcatcgaccacggcaaaccgattttaggtgtggtgtatgcgccggtaatgaacgtaatgtacagcgcggcagaaggcaaagcctggaaagaagagtgcggtgtgcgcaagcagattcaggtccgcgatgcgcgcccgccgctggtggtgatcagccgttcccatgcagatgcggagctgaaagagtatctgcaacagcttggcgaacatcagaccacgtccatcggctcttcgctgaaattctgcctggtggcggaaggacaggcgcagctgtacccgcgtttcgggccaacgaatatttgggataccgccgctggtcatgctgtggctgcagctgccggagcgcacgttcacgactggcagggtaaaccgctggattacactccgcgcgagtcgttcctgaatccggggttcagagtgtctatttattaa

SEQ ID NO: 1926 - DNA, 558 bp, Escherichia coli
atgaccctacgcaagattctggcactcacctgcctgctgttgccgatgatggcttccgcacatcagttcgaaaccggtcagcgagtgccgccgattggcatcaccgatcgtggcgagttggtgcttgataaagatcagtttagctacaaaacctggaacagcgcgcagttagtgggaaaagtgcgagtactgcaacatattgctggtcgcacctctgcaaaagagaaaaacgcgacgctgattgaagcgattaaatcagcgaagttaccgcacgatcgttaccagaccaccaccattgttaacaccgacgacgcgattccgggttcagggatgtttgtgcgcagcagtctggagagtaataaaaagctttatccctggtcgcagtttattgttgatagcaatggcgtcgcacgcggtgcctggcagatggatgaagaaagttccgctgtagtggtgctggataaagacggtcgcgtgcaatgggccaaagacggggcgcttactcaggaagaggtgcagcaagtgatggacctgctgcataaattaattaataaatag

SEQ ID NO: 1927 - DNA, 207 bp, Escherichia coli
atgaaaattttccaacggtacaacccacttcaggtggcgaagtacgtaaagatcctgttccgtggacggttatacatcaaggacgttggcgcttttgaatttgataagggtaagattcttatcccaaaagtgaaggataagctgcatttgtcagtgatgtccgaagttaaccgtcaggttatgcgtctgcaaacagagatggcttaa

SEQ ID NO: 1928 - DNA, 1344 bp, Escherichia coli
atgttaaacagtattttagtcatactctgtttgatcgctgtaagtgcgttcttctcgatgtccgagatctcgcttgccgcctcacgcaaaatcaaacttaaactgctggctgatgaaggcaatataaatgcccaacgcgttctgaatatgcaggaaaatcccggcatgttctttaccgtggtccagatcggtctgaacgcagtggcgattctcggcggtatcgtcggtgatgcggcattttctccagcttttcacagcctgttctcccgctatatgtcggcagaactctctgagcaactgagctttattctctctttctcgttagtgactggcatgtttatcctgtttgcggatttaaccccgaaacgcatcggtatgattgcgccagaagctgtggctttgcgtatcatcaacccgatgcgcttctgcctgtacgtttgcaccccgctggtgtggttcttcaacggactggcgaacataatcttccgtattttcaaactgccaatggtacgtaaagatgacatcacttctgatgatatctacgcggtagtggaagccggtgcgctggcgggcgtgttacgtaaacaggaacacgagctgattgaaaacgtctttgagctggaatcccgtaccgttccgtcttcaatgacaccgcgtgaaaacgtgatttggtttgatctccacgaagatgagcaaagtctgaagaataaggttgcggaacatccgcactctaagtttctcgtctgtaatgaagatattgaccacatcatcggctatgtcgattctaaagacctgctgaaccgcgtgctggctaaccaaagcctggcactgaacagcggcgtacaaattcgcaatacgctgattgtgccggatacgttaaccctttcagaggcgttggaaagttttaaaaccgcaggtgaagacttcgcggtgatcatgaacgagtacgcactggtagtggggatcatcaccctcaacgacgtgatgaccacgctgatgggcgatctggtcggtcaggggctggaagagcagattgtcgcccgtgatgagaactcatggctgatagacggcggcacgcctattgacgacgtcatgcgcgtgctggatattgacgagttcccgcagtcgggcaactacgaaaccatcggcggctttatgatgtttatgctgcgtaagatcccgaaacgcaccgattcggtgaaattcgccggctacaaatttgaagtggtggatatcgataactaccgcatcgaccagctgctggtgacccgaatcgacagcaaagccaccgccctttcgccaaaactgcctgacgctaaagataaagaagaaagcgtcgcgtaa

SEQ ID NO: 1929 - DNA, 639 bp, Escherichia coli
atgagtttatttgataaaaagcatctggtttcccccgccgatgccctgcctggacgtaacaccccgatgcccgtagccacactgcatgcggtcaacggtcactcaatgaccaatgtacctgacggaatggagattgccatttttgcgatgggttgtttttggggtgtggagcgtctgttctggcagttacccggcgtttacagcaccgccgcaggctataccggcggctatacgccaaatccgacttatcgggaagtgtgctccggcgatactggccatgccgaagcggtgcgcattgtttacgatccatccgtcatcagctatgagcagttgctacaagtattttgggagaatcacgatcccgcccagggaatgcgtcagggcaatgaccacggcacgcagtatcgttcagcgatttatccgctgaccccagaacaggatgccgccgctcgcgccagtctggaacgttttcaggcggcgatgcttgccgccgatgacgatcgtcgcatcaccacggaaatcgctaacgccacaccgttttattatgccgaagatgaccaccagcaatatctgcataaaaacccgtatggttactgtggaattggcggaattggcgtctgtctgccgccggaagcatag

SEQ ID NO: 1930 - DNA, 1734 bp, Escherichia coli
gtgcgctatatccgacagttatgctgtgtaagcttactctgcttaagcggatctgccgtcgccgcgaacgtccgtctacaggtcgaggggttatcgggagagctggaaaagaacgttcgcgcgcagctttctacgattgaaagtgatgaagtgacgccagaccgtcgctttcgcgcacgcgtcgatgatgccatccgcgaaggtctgaaagcgctgggctattaccagccgaccattgaatttgatctccgtccaccgccaaagaaagggcggcaggtattgatcgccaaagtcacgccaggcgtgccggtgttaattggcggcaccgatgtggtattgcgcggcggcgcgcggaccgataaagactatttgaaattgctcgatactcgcccggctattggtacggtactgaaccagggcgattatgaaaatttcaaaaagtccttaaccagcattgcgttgcgtaaaggctatttcgatagcgagtttactaaagcgcagctgggcattgcgctcggcctgcataaagccttctgggatattgattataacagtggcgaacgctaccgcttcgggcatgtgacctttgaaggatcacaaattcgtgacgaatacctgcaaaatctggtgccgttcaaagagggcgatgagtacgaatcgaaagatctggcggaactgaaccgccgactttctgctaccggctggtttaattcggtggtggtggcaccacaatttgataaagcgcgcgaaacgaaagtattaccgttgacgggcgtggtttcgccgcgcacagaaaacaccatcgaaaccggggtcggttactctacggacgtggggccacgagttaaggcgacgtggaaaaaaccatggatgaactcgtacggtcatagcctgaccaccagcaccagtatttctgcaccggagcagatccttgatttcagctataaaatgccgctgctgaagaatccgctggaacaatattatttggtgcagggcggttttaagcgcactgacctgaacgatactgagtctgactccactacgctggtggcttctcgctactgggatctctccagcggctggcagcgtgccattaacctgcgctggagtttcgaccactttacccagggtgaaattaccaacaccacgatgctgttttatcctggggtgatgattagccgcacgcgttctcgtggtggcctgatgccaacctggggcgactcgcaacgctactctatcgactactccaacacggcctggggctcggatgttgatttctccgttttccaggcgcagaacgtctggatccgcacactgtacgatcgccatcgttttgtgacacgcggcacgctgggctggattgaaacgggtgatttcgacaaagtaccgccggatctgcgtttcttcgccgggggcgatcgcagtattcgcggctacaaatacaaatctatcgccccgaaatacgccaacggtgacctgaaaggggcctcgaagctgataaccggatcgctggaataccagtacaacgtgaccggaaaatggtggggcgcggtgtttgtcgatagcggcgaagcggtaagcgatattcgccgcagcgactttaaaaccggtaccggtgtcggcgtgcgctgggaatcgccggtcgggccaatcaaactcgattttgccgtgccggtcgcggataaagacgaacacgggttacagttttacatcggtctggggccagaattatga

SEQ ID NO: 1931 - DNA, 3780 bp, Escherichia coli
atgagtttatggaaaaaaatcagcctcggcgtggttatcgttatcttactgttgctgggatcggtggcgtttctggtgggcaccaccagcggcctgcatctggtatttaaagcggcggatcgctgggtgccaggactggatattggcaaggtcaccggcggctggcgtgatctcaccttgtctgacgttcgttatgagcagccaggcgtggaggtaaaagcgggcaatctgcatctggcggtcgggcttgagtgcctgtggaacagtagcgtttgtattaatgatctggcgctgaaagacattcaggtcaacatcgacagtaaaaaaatgcctccttctgaacaggttgaagaagaggaagatagcggtccgctggatctctccacgccgtatcccattaccctgacacgggtggcgctggacaacgtcaacatcaagattgatgacaccacggtatcggtgatggacttcacctccggcctgaactggcaggagaaaaccctgaccctgaaaccgacatcgctgaaaggcctgttgattgctttgccgaaagtggcggaagcggcacaggaagaagtggtcgaaccgaagattgaaaatccgcagccggaggaaaagccgctcggcgaaacgctgaaagatctcttttctcgcccggtattgccggaaatgaccgatgtgcatttgccgcttaacctgaacattgaagagtttaagggcgagcagctgcgcgtgacgggcgacacggacatcaccgtgagcaccatgctgctgaaagtgagcagcattgacggcaatactaaactggacgccctggatatcgactccagtcaagggatcgtcaacgccagcggcacggcgcagctgtcagacaactggccggtggatatcaccctcaacagcacactgaacgtggagccgttgaaaggtgaaaaggtgaagctgaaagtgggcggtgcgctgcgcgaacagctggagataggcgttaacctttccggtccggtggatatggatttacgcgcccagacgcgactggcggaagccggattgccgctcaacgtggaagtgaacagcaaacagctttactggccgttcactggtgagaagcagtatcaggcggatgatctgaaactgaaacttaccggcaaaatgaccgattacacgctctctatgcgcacggctgttaagggccaggagatcccgccagccaccattacccttgatgccaaaggtaatgaacagcaggtcaatctcgacaaacttaccgtcgcggcgctggaagggaaaacggaacttaaggcgttgctcgactggcagcaggccattagttggcgcggtgagctaacgcttaacggcattaacaccgccaaagagatcccggagtggccgtcgaaactcaatggcttgattaaaacccgcggtagcctgtacggcggcacctggcagatggaggtgccagaactgaagctgaccggtaacgtcaaacagaacaaagtgaacgttgacggcacgctgaaaggcaacagttatatgcagtggatgatcccagggctgcatctggaactggggccaaacagtgccgaagtgaaaggcgagctgggggtaaaagatctcaatcttgatgccaccatcaacgcgccggggctggataaagcgctgccggggcttggcggtacagcgaaagggctggtgaaagtacgcggcacggtggaagcgccacaactactggcagatatcaccgcgcgcggcctgcgctggcaggaactttccgtggcgcaggttcgcgtggaaggcgacattaaatccaccgatcagatcgccgggaaactcgacgtacgcgttgagcaaatttcgcaaccggatgtaaatatcaacctcgtcaccctgaatgccaaaggcagtgaaaagcagcacgagctacagttgcggattcagggcgagcctgtctccgggcagcttaatctggcaggaagttttgatcgcaaagaagaacgctggaagggaactcttagcaatacccgcttccagacgccggtcggcccgtggtcgctgacccgcgatattgcgctggattaccgcaataaggagcaaaaaatcagcatcgggccacactgctggcttaacccgaatgcggaactgtgcgtgccgcaaactatcgatgcgggtgccgaagggcgtgcggtggtgaatctcaaccgcttcgacctggccatgctgaaaccatttatgccagaaaccactcaggccagcggtatcttcacgggtaaagcggacgttgcctgggacaccacgaaagaggggctgccgcagggcagtatcactctttcggggcgtaatgtgcaggtgacgcaaaccgtcaacgatgcggcgctgcccgtggcgtttcagacgctgaatctgacggcggagttgcgtaacaaccgtgccgaattgggctggaccatccgcctgaccaataacggccagtttgatggtcaggtgcaggtgaccgatccgcaaggccgccgtaatcttggtggcaacgtcaatatccgtaacttcaaccttgcgatgataaaccccatctttacccgtggggaaaaagcagcggggatggtgagtgccaacttgcgtctgggtggtgatgtgcaaagtccgcagttgtttggtcagcttcaggttacgggggtggatatcgacggcaactttatgccgtttgatatgcaaccgagccagcttgcggtcaactttaacggtatgcgctcgacgcttgcaggtaccgtgcggacccagcagggtgaaatctacctgaacggtgatgccgactggagccagattgaaaactggcgggcgcgggtaacagcgaagggcagtaaagtgcgtatcaccgtgccgccgatggtacgaatggatgtatcgccagatgttgtattcgaggctacaccaaacctgtttaccctcgatggtcgcgtggatgttccgtgggcgcgcatcgtggtgcacgatctgccggaaagcgcagtaggcgtttccagcgatgtggtgatgcttaacgataacctgcaaccggaagagccgaaaacggcgtcgattccgattaacagtaacctgactgtccacgttggcaacaatgtgcgcattgacgcctttggcctgaaagcgcggctgacgggcgatctcaacgtcgttcaggacaaacaagggctgggcctgaacgggcagatcaacatccctgaagggcgcttccatgcctatggtcaggatctgattgtgcgtaagggtgagctactgttctctggtccgccagatcaaccgtatcttaatatcgaagctattcgtaacccggatgctacagaagacgacgtcatcgccggagttcgcgtcactggtctggcggacgaaccgaaagcggagatcttctctgacccggcgatgtcgcaacaagctgcattgtcttatttgctacgtggacaagggctggagagcgatcagagcgacagcgcggcgatgacctcgatgctgattggcctgggggttgcgcaaagtggccagattgtgggtaaaatcggcgagacgtttggcgtaagcaatttagcgctcgacaccgagggagttggcgactcctcccaggtggtggtcagcggctatgtattgccaggcctgcaagtgaaatacggcgtgggtatatttgactctatagcaacactcacgttacgttatcgcctgatgcctaagctatatctggaagcagtgtctggtgtagaccaggcactggatttgctctatcagttcgagttttag

SEQ ID NO: 1932 - DNA, 342 bp, Escherichia coli
atgcgaatatttgtctacggcagtttacgccacaaacaaggcaacagtcactggatgaccaatgcccagttactgggcgatttcagtattgataactaccagttgtatagcctgggccactatccaggcgcagttccggggaacggaacagtacacggtgaagtttatcgtattgacaacgccacgctggccgaacttgatgccttgcgcaccaggggcggtgaatacgcgcgccagttgattcagacgccgtacgggagtgcatggatgtacgtttatcaacgacccgtcgatggattaaagctaattgaaagcggcgactggttagacagggataagtaa

SEQ ID NO: 1933 - DNA, 1473 bp, Escherichia coli
atgaaaaaatctcttctggctgtaatgctgacaggactgtttgctctcgtttctcttcccgctctgggaaatgtcaatctcgaacaattaaagcaaaaagctgaaagtggagaagctaaagcacagttggagctgggatatcgctattttcagggtaatgaaacgacaaaggatctcaccctggcgatggactggtttcgccgtgccgcagagcagggatacaccccggcagaatatgtactggggttacgctatatgaacggtgaaggtgtgccgcaagattatgctcaggcagttatctggtacaaaaaagcggcactgaaggggcttccgcaagcgcagcagaatctgggtgtaatgtaccatgaaggtaatggcgtgaaggttgataaagccgaatctgtgaaatggtttcgcctggcagcagagcaaggtcgtgacagcggccagcaaagtatgggagacgcatattttgaaggcgatggtgtgacgcgggattacgttatggcacgtgagtggtatagcaaagcagcggaacaaggtaacgtctggtcctgtaaccagcttggttatatgtattccagaggtttaggcgttgaaagaaacgatgccatatcggcacaatggtatcgaaaatcagcgacatcaggcgacgagttggggcagcttcatttagccgatatgtactatttcggtatcggtgttactcaggattacactcagtcacgggtattattttcccagtcggcagagcagggaaattctattgcgcagtttcgtctgggatatatattggagcaaggtttagcgggagcgaaagagccgttaaaagcactggagtggtaccgtaaatcggcagaacagggaaattccgatggtcagtattatttggcacatctgtatgataaaggcgcagaaggtgtagcaaaaaatcgagaacaagccatctcctggtacacgaaatcggcagaacagggggatgctaccgcacaggctaatctcggcgctatttacttcagacttggttcagaagaagaacataaaaaggcggtggaatggtttcgcaaggccgccgcaaagggtgagaaagcggcgcaatttaatttgggtaatgctttactccagggaaaaggtgttaaaaaagatgagcaacaggccgcaatctggatgcgaaaagccgcagagcaaggattaagtgcagcgcaggtacaattaggtgaaatctattattatggcttgggcgtagaacgtgattatgtgcaggcctgggcgtggttcgataccgcatcgaccaatgatatgaatctttttggtacagaaaaccgcaacattacagagaaaaaactgacagctaaacaactgcaacaggctgaattattatcgcaacaatatatagaaaaatatgccccggaagcctgggcgagaatgcaaaagcttaaagcgcaatcagcggtaaagacgggtaataaataa

SEQ ID NO: 1934 - DNA, 531 bp, Escherichia coli
atgagcttactcaacgtccctgcgggtaaagatctgccggaagacatctacgttgttattgagatcccggctaacgcagatccgatcaaatacgaaatcgacaaagagagcggcgcactgttcgttgaccgcttcatgtccaccgcgatgttctatccgtgcaactacggttacatcaaccacactctgtctctggacggtgacccggttgacgtactggtcccgactccgtacccgctgcagccgggttctgtgatccgctgccgtccggttggcgtactgaaaatgaccgacgaagccggtgaagatgcgaaactgattgctgttccgcacaccaagctgagcaaagaatacgatcacattaaagacgttaacgatctgccagagctgctgaaagcgcaaatcgctcacttcttcgagcactacaaagacctcgaaaaaggcaagtgggttaaagttgaaggttgggaaaacgcagaagccgctaaagctgaaatcgttgcttccttcgagcgcgccaagaataaataa

SEQ ID NO: 1935 - DNA, 957 bp, Escherichia coli
atgtggaaacgcttacttgtagtctctgcagtctcggcagccatgtcgtctatggcgttggccgctccattaaccgtaggattttcgcaggtcggatcggaatccggctggcgcgccgcagaaaccaatgtggcgaaaagtgaagccgaaaagcgcggaattacgttgaaaattgccgatggtcagcaaaagcaggaaaaccagattaaagcggtacgttccttcgtcgcgcaaggggtggatgcgatctttatcgctccagtggtagcgaccggttgggagccggtattaaaagaggcgaaagatgccgaaatcccggtcttcttgcttgaccgttccatcgatgtgaaagacaaatctctctatatgaccactgtcaccgccgacaacatcctcgaaggcaagttgattggtgactggctggtaaaagaagtgaatggcaaaccatgcaacgtggtggagctgcagggcaccgtcggggccagcgtcgccattgaccgtaagaaaggctttgccgaagccattaagaatgcgccaaatatcaaaattatccgctcgcagtcaggtgacttcacccgcagcaaaggcaaagaagtgatggagagctttatcaaagcggaaaacaacggcaaaaacatctgcatggtttacgcccataacgatgacatggtgattggtgcaattcaggcaattaaagaagcgggcctgaaaccgggcaaagatatcctgacaggctctatcgacggcgtgccggacatctacaaagcgatgattgatggcgaagcgaacgccagcgttgaactgacgccgaacatggcaggtcctgctttcgatgcgctggagaaatacaaaaaagacggcaccatgcctgaaaagctgacgttaaccaaatccaccctttatctgcctgataccgcaaaagaagagttagagaagaagaaaaatatggggtattga

SEQ ID NO: 1936 - DNA, 1503 bp, Escherichia coli
atgacgaccgaccaacaccaggaaatcctccgcaccgaaggattaagtaaatttttccccggtgtcaaagcgttagacaacgttgatttcagcctgcgccgtggtgaaatcatggcgctgctcggtgaaaacggggcgggaaaatcgacgctcatcaaagcattaaccggtgtataccacgccgatcgcggcactatctggctggaaggccaggctatctcaccgaaaaacaccgcccacgcacaacaactcggcatcggcaccgtctatcaggaagtcaacctgctacccaatatgtcggtcgctgataatctattcataggtcgcgaacccaaacgtttcggccttctacgccgtaaagagatagaaaagcgcgccaccgaactgatggcatcttacggtttctccctcgacgtgcgcgaaccgctcaaccgcttttcagtcgcgatgcagcaaatcgtcgccatttgccgggctatcgatctctccgccaaagtgctgatcctcgatgaacccaccgccagtctcgacactcaggaagtagagttactgtttggcctgatgcgtcaacttcgcgatcgcggcgtcagtctgatcttcgtcactcattttctcgatcaggtttatcaggttagcgatcggatcaccgtcttacgtaacggcagtttcgtaggctgtcgggaaacgcgcgagctaccgcagatcgaactggtaaaaatgatgctggggcgtgaactggacacccacgcgcttcagcgtgccgggagaacattgctgagcgacaaacctgttgccgcgttcaagaattacggcaaaaaaggaacgatcgcgccgtttgatctcgaagtacgccccggcgagatcgtcggtctggcaggcttgctgggatcaggacgtaccgaaaccgccgaagtgatcttcggtatcaaacctgctgatagcggcacggcgttgatcaaaggcaaactgcaaacgctacgctcgccacatcaggcttcggttcttggcattggcttctgcccggaagacaggaaaaccgatggcatcatcgctgccgcctcggtgcgggaaaatatcatccttgctctccaggcccagcgcggctggttacgacctatttcccgcaaagagcagcaagagattgccgaacgctttatccgccagcttggcattcgcacaccttccaccgaacaaccgattgaatttctctccggcggcaatcagcaaaaagtgttgctttcacgttggctactgacccgaccgcaatttctgattctcgacgagccaacgcgcggaattgatgttggtgcccacgccgagatcatccgcctgattgaaacgctgtgcgccgatgggctggcgctgctggtgatctcctccgagctggaagagctggtgggctatgccgaccgggtgattatcatgcgcgatcgcaaacaggtagcggagatcccgttggcagagctttccgttccggcgatcatgaacgccattgcggcgtaa

SEQ ID NO: 1937 - DNA, 1023 bp, Escherichia coli
atgcctcaatctctcccggacactacgccgccgaaaaggcgttttcgctggccaacaggaatgccgcagctggcggcactgttgctggtgctgctggttgatagcctggtggccccgcatttctggcaggtggtgcttcaggatgggcgtttgttcggtagccctatcgacattcttaaccgtgcggcccccgttgcgctactggcgattggcatgacgctggttatcgccactggtgggattgatctctccgtaggggcggtgatggctatcgccggagccacaacggctgcgatgacggtcgcgggattcagcctgccaattgttttgttaagcgccctgggcactggcatcctggcaggattgtggaacggcatactggtagcgatcctcaaaattcagccgtttgtcgccaccctgatcctgatggtcgccgggcgcggcgtggcgcaactgatcacctccggacagatcgtcacatttaactcaccggatctctcctggttcggcagtggatcgctgttgttcctgccaacgccagtcattattgcggtgctgacgcttctcctgttctggctgttgacccgcaaaacggcactggggatgtttatcgaagccgttggtatcaacattcgggcggcaaaaaatgccggggtaaacacgcggatcatcgtcatgctcacctacgtgttgagcgggctatgtgcggcgattgcgggcattattgtggcggcggatattcgcggtgccgatgccaacaatgccggattatggctggagctggacgccattcttgcagtggtgattggcggcggatcgctgatgggcgggcgctttaacctgctgctttcggtggtgggggcgctgattattcagggaatgaacaccggaattttgctttctggctttccgccggagatgaaccaggtggtgaaagcggtggtggtgctttgcgtgctgattgtccagtcgcaacgctttatcagtctgattaaagggggacgtaaccgtgataaaacgtaa

SEQ ID NO: 1938 - DNA, 996 bp, Escherichia coli
gtgataaaacgtaatttgccactgatgatcaccatcggcgtctttgtgttgggttatatctactgtctgacccagtttcccggttttgcttccacaagagtgatctgcaatatcctgaccgataatgcctttcttgggataatcgccgttggcatgacctttgtgatcctctccggtgggatcgatctctccgtcggttcggtgatcgcctttaccggcgtgtttctggcaaaagtgattggcgatttcggcctctcgccgctgctggcgtttccgctggtgttggtgatgggctgtgccttcggcgcatttatggggcttctgattgatgccctgaagatcccggcgtttatcattacccttgcgggaatgttctttttgcgtggcgtcagctatctcgtttcggaagagtcgatcccgataaaccatcctgtttatgacacgctctcaagccttgcgtggaaaatccctggcggtggtcgcttaagtgcgatgggactactgatgctggcggtggtggttatcggcatattactcgcgcatcgtacccgttttggtaatcaggtatacgccattggcggcaacgcaacgtcggcaaacctgatggggatttccactcgcagcaccactattcgcatttatatgctctccaccggactggcaacgctggcggggattgtcttctcgatttatacccaggccggatatgcactggcgggcgtaggtgtggaactggatgctatcgcctcagtggtaattggcggtacgcttttgagtggtggcgttggaacggtattagggacgctttttggcgtggcgattcagggactgattcagacttacataaactttgatggcacgctgagttcctggtggacgaaaatcgccatcggtattttgttgtttatttttatagcattacagcgtggattaacggtgctgtgggagaatcgtcagagttcgccagtgacaagagtcaacattgcgcagcgataa

SEQ ID NO: 1939 - DNA, 999 bp, Escherichia coli
atgaaaacgttaggtgaatttattgtcgaaaagcagcacgagttttctcatgctaccggtgagctcactgctttgctgtcggcaataaaactgggcgccaagattatccatcgcgatatcaacaaagcaggactggttgatatcctgggtgccagcggtgctgagaacgtgcagggcgaggttcagcagaaactcgacctgttcgctaatgagaaactgaaagccgcgctgaaagcacgcgatatcgttgcgggcattgcctctgaagaagaagatgagattgtcgtctttgaaggctgtgaacacgcaaaatacgtggtgctgatggacccactggatggctcgtccaacatcgatgttaacgtctctgtcggtaccattttctctatctaccgccgcgttacgcctgttggcacgccggtaacggaagaagatttcctccagcctggtaacaaacaggttgcggcaggttacgtggtatacggctcctctactatgctggtttacaccaccggatgcggtgttcacgcctttacttatgatccttcgctgggtgttttctgcctgtgccaggaacggatgcgcttcccggagaaaggcaaaacctactccatcaacgaaggaaactacattaagtttccgaacggggtgaagaagtacattaaattctgccaggaagaagataaatccaccaaccgcccgtatacctcacgttatatcggttcactggtcgcggatttccaccgtaacctgctgaaaggcggtatttatctctacccaagcaccgccagccacccggacggtaaactacgtttactgtatgagtgcaacccgatggcattcctggcggaacaagcgggcggtaaagcgagcgatggcaaagagcgtattctggatattatcccggaaaccctgcaccagcgccgttcgttctttgtcggcaacgaccatatggttgaagatgtcgaacgctttatccgtgagttcccggacgcgtaa

SEQ ID NO: 1940 - DNA, 1374 bp, Escherichia coli
atgcgcattcatattttaggaatttgtggcacgtttatgggcggtctggcgatgctggcgcgccagttaggccatgaagtaacgggttcggacgccaatgtgtatccgccgatgagcaccttacttgagaagcaaggcattgaactgattcagggttacgatgccagccagctcgatccacagccggatctggtgattattggtaacgccatgacccgtggaaatccgtgtgtggaagcggtactggaaaaaaacatcccttatatgtcaggtccgcagtggctgcacgattttgtgctgcgcgaccgctgggtgctggccgttgccggtacacacggcaaaaccaccacggcgggaatggcgacctggattctggaacaatgcggttacaaaccgggatttgtgatcggcggtgtgccggggaactttgaggtttcggcgcgtctgggcgaaagcgacttctttgttatcgaagcggatgagtacgactgcgccttcttcgacaaacgctctaaatttgtccattactgcccgcgtacgctgatcctcaacaaccttgagttcgatcacgccgatatctttgacgacctgaaagcgatccagaaacagttccaccatctggtgcgtatcgttccggggcaggggcgtattatctggccggaaaacgacatcaacctgaaacaaaccatggcgatgggctgctggagcgagcaggagctggtgggcgagcaggggcactggcaggcgaaaaagctgaccaccgatgcttccgaatgggaagtcttgctggatggcgaaaaagtgggcgaagtgaaatggtcgctggtaggcgaacataatatgcacaatggcctgatggcgattgcagcggctcgccatgttggtgtagcgccggcagatgccgctaacgcgctgggttcgtttattaacgctcgtcgccgtctggagttgcgcggagaagcaaatggcgtgacggtgtatgatgattttgcccatcacccgacggcgattctggcaacgcttgcggcgctgcgcggcaaagttggcggtacggcgcgcattattgctgtgctggaaccgcgctcaaacaccatgaaaatggggatctgcaaagacgatctggcaccttcattaggtcgtgccgatgaagtcttcctgctgcaaccggcgcatattccgtggcaggtggcagaagtggcagaagcctgcgttcagcctgcacactggagcggcgatgtggatacgctggcagatatggtggtgaaaaccgctcagccgggcgatcacattctggtgatgagcaacggcggttttggtgggatccatcagaaactgctggatgggttagcgaagaaagcggaagccgcgcagtaa

SEQ ID NO: 1941 - DNA, 552 bp, Escherichia coli
atgactaagcagcccgaagactggctcgacgacgttcccggtgatgacatcgaagacgaagacgatgaaattatctgggtcagtaaaagtgaaattaaacgtgatgccgaggagctaaaacgccttggcgcggaaattgttgatctggggaaaaacgcgctggataagatcccgttagatgcggatctgcgcgcggctattgagctcgcccagcgtattaagatggaaggtcgccgccgccagttgcagctcatcggtaagatgctgcgccagcgcgacgtagaaccgatccgtcaggcgctggataagctgaaaaaccgccacaaccagcaagtggtgttgttccataaactggaaaacctgcgcgatcgtctgatcgaccagggtgatgaagccatcgctgaagtattgaatctgtggcccgatgccgatcgtcagcaactgcgtactctgatccgtaacgcgaagaaagagaaagaagggaataagccgccgaaatccgcacgccagattttccagtatctgcgtgagttagcggaaaacgaagggtaa

SEQ ID NO: 1942 - DNA, 1353 bp, Escherichia coli
atggcacttgcaatgaaagtaatctctcaagttgaagcgcagcgcaagattctggaagaagcagtttcgactgcgctggagttggcctcaggcaaatcggacggtgcggaagttgccgtcagcaagaccaccggcattagcgtaagcacgcgttatggtgaagtggagaatgttgaattcaatagcgatggcgcgctggggatcaccgtttatcaccagaaccgtaaaggtagcgcatcgtctaccgatttaagcccgcaggccattgcccgcaccgtacaggcggcgctggatattgcccgttatacctcgccagatccgtatgcaggcgtggcagacaaagaactgctggcttttgacgcgccggatcttgacttgttccaccctgcggacgtttctccggatgaagccattgaactggcggcccgcgcggaacaggcggcattacaggcggacaaacgcatcaccaataccgaaggcggtagctttaacagccactacggtgtcaaagtttttggcaacagccacggcatgttgcagggttactgctcaacgcgtcattcgctctccagttgtgtaatcgccgaagaaaatggcgatatggagcgcgattatgcctacaccattgggcgtgcgatgagcgatctgcaaacgccagagtgggttggggccgactgtgctcgccgtaccttatcgcgcctgtcaccgcgtaaactttctaccatgaaagcgccggtgatttttgccaatgaagtggcaacagggttgtttggtcatttggtgggggcgatagcgggtggtgcggtctaccgtaaatcgaccttcttgctggattcgctgggtaaacaaattctgccggactggctgactattgaagaacatccgcatctgctgaaagggctggcatctacaccattcgacagcgaaggtgtgcgcaccgagcgccgcgatatcgtcaaagatggcatcctgactcagtggctgctgaccagctattcggcgcggaaactggggctgaaaagcaccggacatgcgggcggtattcacaactggcggattgccggacaagggctaagcttcgaacaaatgctcaaagagatgggcaccgggctggtggtgacggagctgatgggccagggcgtgagtgccattaccggtgattattcccgtggtgcagcgggcttctgggtagagaatggcgagattcagtatccggtgagcgaaatcaccatcgctggtaatttaaaagatatgtggcgcaatattgtcaccgtcggtaacgatattgaaacacgcagtaatatacagtgtggttctgtgctgttgccggagatgaaaatcgccgggcagtaa

SEQ ID NO: 1943 - DNA, 387 bp, Escherichia coli
atgcgtaaaagcctgttagctattcttgcagtctcctcattggtattcagttcggcgtcgtttgccgctgatctggaagacaatatggaaaccctcaacgacaatttaaaagtggttgaaaaagccgataacgcggcgcaagtcaaagacgcgttaacgaagatgcgcgctgcggcgctggatgcgcaaaaagcgacgccgccgaagcttgaaggcaaatcaccggacagcccggaaatgaaagacttccgccacggtttcgacattctggtcggtcagattgacgacgcgctgaagctggcaaatgaaggtaaagtaaaagaagcgcaggctgccgcagagcaactgaaaacgacccgcaacgcctatcaccagaagtatcgttaa

SEQ ID NO: 1944 - DNA, 465 bp, Escherichia coli
atgaactatcatcagtactatcctgtcgacatcgtcaacggccccggcactcgctgcaccctgtttgtctccgggtgtgttcatgaatgccccggttgctataacaaaagcacctggcgggtaaattccggtcagccatttaccaaagcaatggaagaccagatcattaacgatctgaatgacactcgtatcaaacgccagggtatttccctctccggcggcgatccgctacatccgcaaaacgtgccggatattctgaaactggtacaacgcatccgcgccgagtgtccgggtaaagacatctgggtgtggacaggctataaactcgacgaactcaacgctgcgcaaatgcaggttgttgatttgattaacgtgctggtcgacggcaaatttgtgcaggatttaaaagacccttccctgatctggcgcggcagcagcaatcaggtggtgcatcatttgcgatga

SEQ ID NO: 1945 - DNA, 2139 bp, Escherichia coli
atgacaccgcatgtgatgaaacgagacggctgcaaagtgccgtttaaatcagagcgcatcaaagaagcgattctgcgtgcagctaaagcagcggaagtcgatgatgccgattattgcgccactgttgctgcggttgtcagcgagcagatgcagggccgcaaccaggtggatatcaatgagatccagaccgcagttgaaaaccagctgatgtcggggccatacaaacaactggctcgtgcttacatcgagtaccgtcacgatcgcgacattgaacgtgaaaaacgcggtcgcctgaaccaggagatccgtggtctggtcgagcagaccaactcctcgttactcaacgaaaacgccaacaaagacagcaaggtgattccaacccagcgcgacctgctggccgggatcgtggctaaacactatgcacgccagcacctgctgccgcgtgacgtggtgcaggcacatgaacgtggtgatattcactatcacgatctcgattactcaccgttcttcccgatgttcaactgcatgttgatcgacctgaaaggcatgctgacccagggctttaaaatggggaacgccgagattgaaccgccgaaatcgatctctacggcaaccgcggtaactgcgcagattattgctcaggtcgccagccatatttatggcggcaccaccattaaccgtatcgatgaagtgctggcaccgtttgtcaccgccagctacaacaaacatcgcaagaccgcagaagagtggaacatcccggacgccgaaggctacgctaactctcgtaccatcaaagagtgctacgatgccttccagtcgctggagtacgaagtaaacaccctgcacaccgccaacggtcaaacaccgtttgtgacctttggttttggtctgggcaccagctgggagtcgcgcctgattcaggaatctatcctgcgtaaccgtatcgccggcctcggtaaaaaccgtaaaacggcggtgttcccgaaactggtgtttgcgattcgcgatggcctgaaccataaaaaaggcgatccgaactacgacatcaaacagctggcgctggagtgcgcaagcaagcgcatgtatccggatatcctgaactacgatcaggtagtgaaagtcaccggttcgtttaaaaccccgatgggctgccgcagcttcctcggcgtgtgggaaaatgaaaacggcgagcagatccacgatggtcgtaacaacctcggcgtgatcagcctgaacctgccgcgtattgctctggaagcaaaaggcgatgaagccaccttctggaagctgctggatgaacgtctggtgttggcacgtaaggcgctgatgacccgtatcgctcgtctcgaaggcgtgaaagcgcgcgtagccccgatcctctatatggaaggcgcttgtggcgtgcgtctgaatgctgacgacgacgtttctgaaatcttcaaaaacggtcgtgcgtctatttcgctgggttacatcggcatccacgaaaccattaacgcgctgttcggcggcgagcatgtttacgacaacgagcagctgcgcgcgaaaggtattgcgattgttgagcgtctgcgtcaggcggtggatcagtggaaagaagaaactggctacggtttcagcctctacagtacgccgagtgagaacctgtgtgaccgcttctgccgtctcgataccgctgagtttggcgtggtgccgggcgtgaccgataaaggttactacaccaacagtttccacctcgatgtggagaagaaggtgaacccgtacgacaagatcgactttgaagcgccttacccgccactggcgaacggtggcttcatttgctatggcgagtatccaaacattcagcacaacctgaaggcgctggaagatgtctgggattacagctatcagcatgtaccgtattacggcaccaacacaccgatcgatgaatgctacgagtgtggctttaccggcgaatttgagtgcaccagcaaaggcttcacttgtccgaaatgtggtaaccatgacacctcccgtgtgtcggtgactcgccgcgtgtgcggatatttaggtagcccggatgcacgtccgtttaacgctggtaagcaggaagaagttaagcgccgcgttaaacatttgggaaatgggcagataggttaa

SEQ ID NO: 1946 - DNA, 1656 bp, Escherichia coli
atgactcatcttccccactggtggcaaaacggcgttatctaccagatttatccaaagagttttcaggacaccacgggtagcggcaccggcgatttacgtggcgttatccaacgcctggactatctgcataaactgggcgttgatgccatctggctaacccccttttatgtctctccccaggtcgataacggttacgacgtagcgaattatacggcgattgatcccacctatggcacgctggacgattttgacgaactggtgacacaggcaaaatcgcgtgggattcgtatcattctcgatatggtgtttaaccatacctctacccaacatgcctggtttcgcgaggcgctgaacaaagaaagcccttaccgccagttttatatctggcgcgatggagaaccagaaacgccaccgaacaactggcgttcaaaattcggtggtagtgcgtggcgctggcatgcagaaagcgaacagtactatttgcatctctttgcaccagaacaggcggatctcaactgggagaatccagcggtacgcgcagagctgaaaaaagtctgtgagttctgggccgatcgtggggtcgacgggttgcgcctggatgtggtgaatctgatctccaaagacccgcgttaccctgaagacctggatggcgatgggcgtcgcttctataccgacgggccacgagcacacgagtttttgcacgagatgaaccgcgatgtgtttacgccacgcgggttaatgaccgtaggtgaaatgtcctccaccagccttgagcattgccagcgatacgcggcactgacaggcagtgaattgtcgatgacctttaattttcatcacctgaaggtcgattatcccggtggtgaaaaatggacgctggctaaacctgactttgtggcgttgaaaacattgttccgccactggcaacaaggaatgcacaacgtggcatggaatgccttgttctggtgtaaccacgatcagccgcgcattgtttctcgctttggtgatgaaggtgaataccgcgtgcctgcggcaaaaatgctggcgatggtgctgcatggcatgcagggaacgccgtatatctaccagggcgaagagattggcatgaccaacccacatttcacgcgcattactgactatcgcgacgtggagagcctcaatatgtttgccgagctacgcaacgatgggcgtgatgccgacgagttattgacaatcctcgccagtaaatcccgtgacaacagtcgcacacccatgcaatggaccaacggcgataatgccgggtttacggctggcgaaccgtggattggcctgggcgataactatcaggaaatcaacgtagaagcagcgctggccgatgagtcctcggtgttttacacctaccaaaagttaatcgcactgcgtaagcaagaagccgtcctgacatggggcgattaccaggatctgctgccaaacagccctgtattgtggtgctatcgccgtgaatggaaggggcaaaccttgctggtcattgccaaccttagccgtgagatccaaccctggcaaccagggcaaatgcgcggcaactggcagcttgtgatgcataactacgaagaagcctcaccacaaccctgcgccatgactttacggccttttgaggctgtctggtggttacaaaagtaa

SEQ ID NO: 1947 - DNA, 1422 bp, Escherichia coli
atgatgagcaaaataaaccaaacggatatcgatcggttgattgaactggtcggcgggcgcggcaatattgcgacagtgagccactgtataactcgcctgcgctttgtcctcaaccaaccggccaatgccagaccgaaagaaattgagcaactccccatggtgaaaggctgtttcaccaatgccgggcaatttcaggtggtgattggcaccaacgtgggtgattactatcaagcactgatagcgtcaaccggacaggcgcaggttgataaagagcaggtaaaaaaagccgcccggcagaatatgaaatggcatgagcagttgatctctcatttcgcggagatcttcttcccattgctgcccgcgttgattagtggtggtttgatcctcggttttcgcaatgtgatcggcgatttgcccatgagcaacggtcagacgctggcgcaaatgtacccttccctgcaaacgatctacgattttctgtggttgatcggtgaagcgatcttcttctacctgccggtcgggatttgctggtcagcggtgaaaaaaatggggggtacaccgatcctcggtatcgtgcttggcgtaacgctggtttctccacagctgatgaacgcttatctgctcgggcagcagctgccggaagtatgggactttggcatgttcagcatcgccaaagtgggctatcaggcgcaggtcatcccggcactgttagccggactggcgctgggcgttattgaaactcgtcttaagcgcatcgtgccggattacctctatctggtggtggtgcccgtctgttcgctgatcctcgcggtgttcctcgcccatgcgctgattggtccgtttggtcgcatgattggcgatggcgttgcctttgcggtacgtcacctgatgaccggcagctttgctcctattggcgcggcattgtttggcttcctgtacgccccgctggtgatcaccggcgtacaccagaccacgcttgctattgatttgcagatgattcaaagcatgggtggcacgccagtgtggccgctgattgcactgtcgaatatcgctcagggctccgccgtgataggtattatcatttccagccgcaagcacaatgaacgcgagatctccgtgcctgccgctatctccgcctggcttggagtcactgagcctgctatgtacggcatcaacctgaaatatcgcttcccgatgctgtgcgcgatgattggttctggtctggcaggattgctatgcggcctgaacggcgttatggcgaatggcatcggcgtaggcggcctgccgggaattctctcgattcaaccgagctactggcaggtgtttgcgctggcaatggctatcgccatcatcatcccgattgtactcacctcgtttatctatcagcggaaataccgcctgggcacgctggacattgtttaa

SEQ ID NO: 1948 - DNA, 948 bp, Escherichia coli
atgcaaaatcggctgaccatcaaagacatcgcgcgcttaagcggcgtggggaaatctacagtttcccgggtgctgaataacgaaagcggcgtgagccagcgcacgcgcgagcgtgttgaagcagtgatgaatcagcatggattttccccttcccgctccgcgcgcgctatgcgtgggcaaagcgataaagtggtcgccatcattgttacccgtctggattcgttgtcagaaaatctcgccgttcaaaccatgctgccagcgttctatgaacaaggttacgatccaatcatgatggaaagtcagttttccccacaattagttgccgaacatttgggggtgctgaaacggcgtaatatcgacggcgtagtgctgttcggttttaccggcataacagaagaaatgttagcccactggcagtcatcgctggttctgctggcgcgtgacgcaaaaggctttgcttcggtctgttatgacgacgaaggggcaatcaagatcctgatgcaacggctgtatgaccagggacatcgtaatatcagctatctcggcgtgccgcatagtgacgtgacgaccggtaagcgacgtcacgaagcctaccttgcgttctgcaaaacgcataaattgcatcccgttgccgctctgccagggcttgctatgaagcaaggctatgagaacgtagcaaaagtgattacgcctgaaactaccgcgttactgtgcgcaaccgacacgctggcacttggtgcaagtaaatacctgcaagagcaacgcatcgacaccttgcaactggcgagcgtcggtaatacaccgttaatgaaattcctccatccggagatcgtcaccgtagatcccggttacgccgaagctggacgccaggcggcttgccagttgatcgcgcaggtaaccggacgcagcgaaccgcaacaaatcatcatccccgccaacctgtcctga

SEQ ID NO: 1949 - DNA, 2697 bp, Escherichia coli
atgtttaaagaaatttttacccggttcattcgccatttaccttcccgtctggttcatcgtgatccattgcctggcgcgcagcagacagtgaatgcggcggtcccgccttctttaagtgcgcattgcctgaaaatggcggtgatgcccgaagaagaattgtggaaaacgttcgacacccatccggaagggttaaatctggcggaagtggaatctgcccgcgaacaacatggtgaaaataaattacccgcacaacaaccgtcgccgtggtgggtacatttatgggtctgctatcgcaacccctttaatattttgctcaccattcttggtgctatttcttacgccacggaagatttatttgccgcaggtgttatcgcgctaatggtcgctatttctacgttgctgaactttattcaggaagctcgttccaccaaagcggcagatgccctgaaagcgatggtcagtaataccgcgacggtactgcgcgtaattaacgataaaggtgaaaatggctggctggaaatcccgatagaccaactggtgcccggcgatattataaaactggcggcgggggatatgatcccggcagatttacgtatcttgcaggcgcgggatctgtttgtcgctcaggcgtcgttaaccggtgagtctctgcccgtggaaaaagccgctaccactcgccagccggagcacagcaatccgctggagtgcgacaccctgtgttttatgggcaccaccgtggtgagcggcacggcacaagcaatggtgattgccacaggtgccaatacctggtttggtcaactggcggggcgtgttagtgagcaggaaagcgagccgaatgcctttcagcaagggattagccgcgtcagtatgctgctgattcgctttatgctggtgatggctccggtggtgttgcttatcaacggttacaccaaaggtgactggtgggaagcggcactgtttgcgctttcggtcgcggtaggcttaacgccagaaatgttgccgatgattgttacctcgacgctggcgcgtggcgcagtcaagttgtcgaaacagaaagtgatcgtcaaacatctggatgccattcagaactttggcgcaatggatattctgtgcactgataaaaccggcaccctgacacaggataaaattgtgctggagaatcataccgatatctccggtaaaactagcgaacgcgtgctgcatagcgcgtggttgaacagccattaccagaccgggcttaaaaacctgcttgataccgcggtgctcgaaggtacggatgaagagtcagcgcgctcgctggccagccgttggcaaaaaattgatgagattccgtttgatttcgagcgtcgtcggatgtcggtggttgtggcagaaaataccgaacaccatcagttggtttgcaaaggcgcattgcaggaaatcctcaatgtgtgttcgcaagtgcgtcacaatggcgagattgtaccgctcgatgacaccatgctgcgtaagattaagcgggttactgatacgctgaatcgtcaggggctgcgcgtggttgcggtggcgacgaaatacctgccagcgcgtgaaggagattaccagcgggcggatgaatccgacctgatcctcgaaggatatattgctttccttgatccgccaaaagagacaacagctccggcactgaaggcattaaaagcgagtggaattaccgtaaaaatccttactggcgacagtgagttagttgcagcgaaagtgtgccatgaagtggggctggacgcgggagaggtggtcattggtagtgatattgaaacgctatctgacgacgaactggcaaatctcgcacagcgcaccacgctgtttgctcgtctgacgccgatgcataaagaacgcatcgtaacgttgctgaagcgcgaagggcatgtggttggctttatgggcgatggtattaatgatgcgcccgccttacgcgctgcggatatcggcatttctgtggacggcgcggtagatattgcccgtgaagcggctgatatcatcctactggaaaaaagcctgatggtgctggaagagggagttattgagggacgtcgcactttcgccaacatgctgaaatacatcaaaatgacggcgagctctaacttcggtaatgtgttcagcgtgctggtggcgagtgctttcttgcccttcctgccgatgttgccgctacacttgcttattcaaaatctgctgtacgatgtgtcacaggtggcgatcccatttgataacgtcgacgacgagcaaattcaaaagccgcagcgttggaatccggcggatctggggcgctttatggtcttcttcggaccgatcagctcgattttcgatattctgacgttttgcctgatgtggtgggtattccatgccaacacgccggaaacgcaaacgctgttccagtcgggctggtttgtggtgggcttactgtcgcaaacgctgattgtgcatatgatccgcacccgccgtgtgccgtttattcagagctgtgcatcgtggccgttaatgatcatgaccgtgatcgtgatgattgtcggaatcgcattgccgttttcaccgctggccagttatctgcagctgcaggcgctgccgttaagctatttcccgtggctggttgcgattctggcagggtatatgacgttaacccagttggtgaaaggattttatagccgtcgttacggttggcagtaa

SEQ ID NO: 1950 - DNA, 387 bp, Escherichia coli
atgagcaaaactatcgcgacggaaaatgcaccggcagctatcggtccttacgtacagggcgttgatctgggcaatatgatcatcacctccggtcagatcccggtaaatccgaaaacgggcgaagtcccggcagacgtcgctgcacaggcgcgtcagtcgctggataacgtaaaagcgatcgtcgaagccgctggcctgaaagtgggcgacatcgttaaaactaccgtgtttgtgaaagatctgaacgacttcgcaaccgttaacgctacctacgaagccttcttcaccgaacacaacgccaccttcccggcacgttcttgcgttgaagtagcccgtctgccgaaagacgtgaagattgagatcgaagcgatcgctgttcgtcgctaa

SEQ ID NO: 1951 - DNA, 462 bp, Escherichia coli
atgacacacgataataaattgcaggttgaagctattaaacgcggcacggtaattgaccatatccccgcccagatcggttttaagctgttgagtctgttcaagttgaccgaaacagatcagcgcatcaccattggtctgaatttgccttctggcgagatgggccgcaaagatttgatcaaaatcgaaaatacctttttaagtgaggatcaggttgatcagctggcgttatatgcaccgcaagccacggttaaccgtatcgacaactatgaagtggttggcaaatcgcgcccaagtctgccagagcgcatcgacaatgtgctggtctgcccgaacagcaactgtatcagccatgccgaaccggtttcatccagctttgccgtgcgaaaacgcgccaatgatatcgcgctcaaatgcaaatactgtgaaaaagagttttctcataatgtggtgctggccaattaa

SEQ ID NO: 1952 - DNA, 936 bp, Escherichia coli
atggctaatccgctatatcagaaacatatcatttccataaacgaccttagtcgcgatgaccttaatctggtgctggcgacagcggcgaaactgaaagcgaacccgcaaccagagctgttgaagcacaaagttattgccagctgtttcttcgaagcctctacccgcacccgcctctctttcgaaacttccatgcaccgcctgggtgccagcgtggtgggcttctccgacagcgccaatacatcactgggtaaaaagggcgaaacgctggccgataccatttcggttatcagcacttacgtcgatgcgatagtgatgcgtcatccgcaggaaggtgcagcgcgcctggccaccgagttttccggcaatgtaccggtactgaatgccggtgatggctccaaccaacatccgacgcaaaccttgctggacttattcaccattcaggaaacccaggggcgtctggacaatctccacgtcgcaatggttggtgacctgaaatatggccgcaccgttcactccctgacccaggcgctagcgaagttcgacggcaaccatttttactttatcgcgccggatgcgctggcaatgccgcaatacattctggatatgctcgatgaaaaagggatcgcctggagtctgcacagttctattgaagaagtgatggcggaagtagacatcctgtacatgacccgcgtgcaaaaagagcgtctggacccgtccgagtacgccaacgtgaaagcgcagtttgttcttcgcgccagcgatctccacaacgccaaagccaatatgaaagtgctgcatccgctgccgcgtgttgatgagattgcgacggatgtggataaaacgcctcacgcctggtacttccagcaagcaggcaacgggattttcgctcgccaggcgttactggcactggttctgaatcgcgatctggtactgtaa

SEQ ID NO: 1953 - DNA, 489 bp, Escherichia coli
atgaaggaatacgatgattactccgccaaagaaaagaagcaactggcggtctgtcagcgcctgattaccgaaaaaagttatctttcacaggaggaaatccgccgcgatttgcaaaaccatggctttgacagtatcagtcagtcaaccgtttcacgactactgaaattgctgggagtcataaaaattagaaatacaaaaggacaaaaaatttattcggtgaatcctcaattacttcccacacctgacgcaggtcgatccgtcgctgaaatggtcctgagtgtcgagcataatggtgaatttatccttatccataccgtcgccggatatggtcgggcagtagcgcgaatccttgatttccatgctttgccagaaattcttggcgtgattgctggcagcaatatcgtttgggtcgcaccacgtgtggtaaagcgtacagccctggtgcacaagcaaattaattacttattaaaattgaatatatattcatga

SEQ ID NO: 1954 - DNA, 1404 bp, Escherichia coli
atgggtaaattcaaatttcccaccgcttataccatcttgttcgtgctgattgcgttagttgcggcaatgacctggattgtacctgcgggaaaatatcagatggtgacaaatgccgcactgggaaaggaagttcctgttgcaggcacttacgcacctgttgaggcacaaccacagggtattacggctgtcctgttagcgcccatcgacggcttgtacaaccatcaaacctacactgcgggagcgattgatgtcgcgctgtttgtcctgatcatcggtggatttttgggagtagtaaataaaaccggggcaatagatgccggtatcgaacgagtgacaactcgccttaatggtcgggaagagtggatgattccgatcctgatggcgctcttcgctgctggcggtactatttatgggatggcggaagaatcactccccttctacacgttgctggtgcccgtcatgatggctgcccgctttgatcctctggtcgctgccgccacagtgttattgggatcgggcattggcacgctgggctcaaccattaacccatttgctaccgtcattgctgccaacgccgcagggatcccctttactcagggcattttgctgcgtgttattttgctgttagtaggctacgtgatttgtgtttactgggttatgcgttatgcccgcaaagttcgcaacagtccggaaagctctatcgtggcggataagatggctgaaaaccaggcgcattttctgggaaatcgttcagaaacgatgctggaatttacccccacgcgcaaagcgatcctgatactttttgctgcatcctttgcctttatgatttacggcgtagcggtactgggttggtggatggcggaaatctctgctgtctttctggcagctgcggtcatcgtgggtgtcattgcccgcatgggcgaagaaaccttcaccagtacctttattgacggcgcgcgggatctccttggtgtggcactgattatcggcatcgcccgcggtattgtggtcgtgatggataacggcatgattacgcacacaattctgcacagtgctgagaatctggtttcagggctttccaccactgttttcatcaacgtgacctattggctggaagtattgctctcttttctggttccctcatcttccggccttgcagtgttaacgatgccaataatggctccactcgctgattttgctcatgtacaacgcgatctggtggtgaccgcttatcagtctgcttccggggtggttaatttgattacgccaacctctgcggtagtgatgggcggtctggcgattgcccgtgtaccctgggtccgttatctgagatgggtagcaccgctactgctgattctcacgatgttgaatatgattgtgctgagtatcgccgcgatgatttaa

SEQ ID NO: 1955 - DNA, 1005 bp, Escherichia coli
atggctacttcactgaaaaaccgtaattttcttaagctgcttgattacaccccagcagagattcaatacctgattgatttggctatcaatcttaaagccgccaagaaatctggaaacgaaaaacaaacgctggtcggtaaaaacattgcgttgatttttgaaaaatcctctacccgtacccgctgtgcctttgaagtcgcggcctttgatcaaggtgcgcaggtgacttacatcggccccagcggctcacaaatcggccataaagaatcaatgaaagataccgctcgcgtactcggacgcatgtatgacggtattgagtatcgcggttatggtcagaatatcgttgaagaattaggtgagttcgctggtgttccggtatggaacggactgaccaatgaatttcacccgacacagatcctcgcggatttaatgaccatgctggaacatgcgccaggcaaaacgctgccagagctgagctttgcgtatcttggtgatgcccgaaataacatggggaactcgctgatggttggtgctgcaaaaatggggatggatatccgtctggtggcacctaaatctttctggccagatgaagcgctggtaacacaatgccgtgagatcgccagcgtgactggggcgagaatcaccctgacagaggatgtggaagaaggcgtatacgacgttgattttctctatacggatgtttgggtttcgatgggagagccaaaagaagcctgggcagaacgagtgagtctgatggcaccttatcagatcaatcaacaggtgattactgccacgcgtaaccctgaagttaaatttatgcactgcctgcccgccttccataatgagcacaccacagtaggacgcgagatcgagatggcctacggcctcaaaggactggaagttactgaagaggtttttgaatcggcccactctattgttttcgatgaagcagaaaaccggatgcacaccattaaagcggtgatggtagcaactctcggcgactaa

SEQ ID NO: 1956 - DNA, 933 bp, Escherichia coli
atggaaaacaaaccaacactggttatcgctctcggcggtaatgccctgcttaaacgaggcgaaccactcgaagcagaaatccaacgtaaaaatatcgatcttgcggctaaaactatcgcccaactgactcaacactggcgggttgtactggttcacgggaatggcccacaagttggacttctggcacttcaaaatagcgcctatgcccatgtcgctccctatccactcgacattctgggggccgaaagccaggggatgatcggctacatgctacaacaggcgctgaaaaatcaactaccacaacgtgaaatcagcgtgctgctgacgcaggttgaagtggatgccaacgatcccgccttcagtaacccaactaagtacatcggcccaatttatgaccacgctcagactcaggtactacaggcagaaaaaggctgggttttcaaagcagatggtcactctttccgccgggtcgtaccttctccacaacctaaacgcatcgtcgagcgggatgccatccagacactgatcgcccacgatcatctggtgatctgtaatggtggcggtggtgttccggtggttgaaaaagccgatggataccatgggattgaagcggttatcgacaaagatctttcagccgcgctactggcaagtcagatccatgctgacgccttgttgatcctcactgatgcggacgcagtatatctcgactggggcaagccaacccaacgccagctggcacaggtcacgccggaattactcaacgaaatgcagtttgatgccgggtctatggggccgaaagtcaccgcctgcgcaaagtttgttagtcagtgccggggcattgcagggatcggctctcttgcagatggtccggaaattctcgccggagacaaaggcactcttattcgccttgataccccccataaccacgcttga

SEQ ID NO: 1957 - DNA, 1221 bp, Escherichia coli
atggaaaagcattatgttggttctgaaattggacaactacgcagcgttatgttgcatcgcccaaatctcagtctgaaacgtctaacaccatccaattgccaggagttgttatttgacgatgtattgtccgttgagcgggcaggtgaagagcatgatattttcgccaatacgctgcgccagcaagggatagaagttctgttactcactgatttactaacacaaacattggatatcccggaagccaaaagctggttactggaaacacaaatatcagattaccgactcggccctacgtttgctactgacgttcgcacctggcttgcagagatgtcacaccgggaccttgctcgtcatttaagtggtgggctgacttatagtgaaattcccgcctcaattaaaaatatggtggttgatacccacgatattaatgatttcattatgaagccgttaccgaatcatttatttacgcgtgatacctcatgctggatttataacggtgtatcgattaatccaatggcaaaacctgctcgccaacgtgaaaccaataatctacgcgctatttatcgctggcatccacaatttgctggcggcgaatttattaaatatttcggcgacgagaatattaattatgaccacgccacgttagaaggtggtgatgtgctggtgattggtcggggggccgtgttgatcggcatgtctgaacgcaccacgccacaaggagtcgagtttcttgctcaggcattgtttaaacatcgtcaggctgaacgggtaatcgctgttgagctgcctaaacaccgctcctgtatgcatcttgacaccgttatgactcatatcgatatcgacaccttctcggtttatcccgaagttgtgcgcccggatgttaattgctggacgctaacacctgacggtcacggcggcctgaaacgtactcaagaaagcacactcctccatgctatcgaaaaagccctcggtattgaccaggtacgtttaatcaccacggggggtgatgcctttgaggcagaacgcgaacagtggaatgacgctaacaatgtgctcacgcttcggccgggagtggtagtgggctacgagcgcaacatctggactaacgaaaaatatgacaaagcaggcatcaccgttttacccatccccggtgatgaattaggccgcggacgtggcggcgcacgttgcatgagttgccctttgcatcgtgacggtatctaa

SEQ ID NO: 1958 - DNA, 453 bp, Escherichia coli
atgattgttggcaacatccatcacttacaatcctggctgccggaagaacttcgcgaagcaattgagtacatcaaatcacatgtcagcgatgagacagcaaaaggtaagcacgctattgacggcgaccgcctgttttatctgatttctgaggatacgactgaaccaggtgaactgcgtcgtgctgagtatcatgctcgttatctcgatatccagattgtattaaaagggcaggaagggatgacatttagcacgcaaccagcaggcgtaccagagactgactggctggcagataaagatattgcttttatcgggcaggggatcgatgaaaaaacagtgattcttaatgaaggggattttgtcgttttctatcctggcgaagttcacaaaccgctttgtgcggtgggagcccccgctcaggtacggaaagcagtagttaagctattaaaatcgtaa

SEQ ID NO: 1959 - DNA, 1005 bp, Escherichia coli
atgtccgggttttatcataagcatttcctgaaattactcgatttcacgccagctgaactcaacagcttgttgcagttagccgcgaagctgaaagccgataagaaaagcggtaaagaagaagccagactcactggcaaaaacatcgcgctcatcttcgaaaaagactcgacccgtacccgatgctctttcgaagttgccgcatatgaccagggtgctcgcgttacttatctcggcccaagcggcagccagattggtcacaaagagtcgattaaagacactgcccgcgtgcttggtcgcatgtatgacggtattcagtatcgcggctatggtcaggagattgtcgaaacactggcggaatacgctggcgtgccagtatggaacggcctgaccaatgagttccaccccacgcagctgctggcggatctcctcaccatgcaggagcatttgcccggcaaagcattcaacgaaatgacgctggtctatgcaggtgacgcgcgtaacaacatgggcaattcgatgctcgaagctgcggcgcttaccggtctggatttgcgtctggtcgcgccacaggcatgctggccggaagctgcgctggtcgccgaatgcagtgctctggcacaaaaacacgggggtaaaatcaccttgacggaagatatcgcctctggggttaaaggtgcagactttatctataccgatgtctgggtatcgatgggtgagcccaaagagaaatgggcggagcgtattgccctgctgcgtgactatcaggtgaatagcaaaatgatggccctgaccggtaattcgcaggttaagttcctccactgtctgcctgcatttcatgatgagcaaaccacgctgggtaaaaaaatggccgcagaattcggtctgtatggtggaatggaagtcaccgatgaagtctttgaatctccggcaagtattgtctttgaccaggcagaaaaccggatgcacaccataaaagctgttatggtcgctacattagcaaaataa

SEQ ID NO: 1960 - DNA, 417 bp, Escherichia coli
atggcaaacccggaacaactggaagaacagcgtgaagaaacacgtttgattattgaagaattactggaagatggcagcgatccggacgcgctgtacaccatcgaacaccatctttccgcagacgatctggaaaccctggaaaaagcagcagttgaagcgtttaaactcggttacgaagtgaccgatccagaagagctggaagttgaagatggtgatatcgtgatttgctgcgacatcctcagcgagtgtgcgttgaacgccgacctgatcgatgcccaggttgaacaactgatgacgctggcggagaaatttgacgttgagtacgatggttggggcacttactttgaagatcctaacggcgaagacggcgacgatgaagattttgtcgatgaagacgatgacggtattcgtcactaa

SEQ ID NO: 1961 - DNA, 504 bp, Escherichia coli
atgaatgttgtcgcttctcccgcactccgtttgcgcaaacttaccgtcgccgataatcctgctatcgcccacgtcattcgtcaggtatccgccgaatacggtcttaccgctgataaaggctacaccgtcgccgatccgaaccttgacgagctgtatcaagtgtatagtcagcctggccacgcatattgggtggttgagtacgagggtgaagtggtcggcggcggtgggattgcgccattaaccgggagtgagtcagacatttgcgaactgcaaaagatgtattttcttccggctatccgcggcaaagggctggcaaaaaaactggccttaatggcaatggagcaggcgcgagaaatgggtttcaaacgctgctatctggaaacgaccgcttttttaaaggaagccattgcgctttatgagcatttgggctttgagcatatcgactatgcgcttggctgcacgggtcatgtcgattgtgaagtacggatgctacgcaaactttga

SEQ ID NO: 1962 - DNA, 1188 bp, Escherichia coli
atgaatgatgtaaacatcgggaaagataattctcggcactcgtttgttttcacaggcaaaggtggtgagtattttcttatttgtcttgtgaattttttactgacaattattactctgggaatatatgggccgtgggcattgataaaatgccgtcgttatatttatcaacatgtgacactcaaggggcaaccatttagttataagggaacaggtggtgccatttttgttagcatgttacttattgtggtggtttatcttctcagtatttcttgttttgcaggtcaacactttgcgctcggtttattcctgtttgctctcttgatctgcggtattccttgtatggcagtgaagagtctgcagtatcaggcgaacatgacctcactgaatgacattcgctttggctttaactgctcaatgatgcgtgcatggtgggttatgctaggactgcctgttctgttggcgttagttttttggttcgcactgtatcttattgcacaagtgacgacatcaataggggggttattctttaacttagtcgcattaagtttgctttctgccatcgggctaggtgttgtccatggtataacctatagtaaatggatgccattgctgggtaataatgcaacttttggcattcataagttttctattcaggtaaacgtaaaagaatgcattaaaggttgcatgctcgcaatattaaccatggttcctttcatcattgtgattggtattatgatcgcaccagtattccagcagttaatgatgatgaccatgttgggtaggtctgatgctggcagtgagtttgtattacaatattacccgcagattatggcttcttatttcctgtattttgtcgcgatccttgtgtttgctagttatctctatgtcacgttacgcagtttgttcctgaataatctgacactggcaaatggcgctattcgttttcattcatctgttaccgcgatcggtatgcttctgcgcatgttggcgttattaatgggggcctcaattacctgtggtctggcttatccctggctgaaaatgtggatggttagctggattgctaacaatacccatgtccagggcgaccttgattcgctggagttaaccaatgatgacaaaccgcaggatagcggttcgttaatgtggatatctcgcggtattatgtcgtatgttccgtttatctaa

SEQ ID NO: 1963 - DNA, 2856 bp, Escherichia coli
atggaaaagacatataacccacaagatatcgaacagccgctttacgagcactgggaaaagcagggctactttaagcctaatggcgatgaaagccaggaaagtttctgcatcatgatcccgccgccgaacgtcaccggcagtttgcatatgggtcacgccttccagcaaaccatcatggataccatgatccgctatcagcgcatgcagggcaaaaacaccctgtggcaggtcggtactgaccacgccgggatcgctacccagatggtcgttgagcgcaagattgccgcagaagaaggtaaaacccgtcacgactacggccgcgaagctttcatcgacaaaatctgggaatggaaagcggaatcaggcggcaccattacccgtcagatgcgccgtctcggcaactccgtcgactgggagcgtgaacgcttcaccatggacgaaggcctgtccaatgcggtgaaagaagttttcgttcgtctgtataaagaagacctgatttaccgtggcaaacgcctggtaaactgggacccgaaactgcgcaccgctatctccgacctggaagtggaaaaccgcgaatcgaaaggttcgatgtggcacatccgctatccgctggctgacggcgcgaaaaccgcagacggtaaagattatctggtggttgcgactacccgtccggaaaccctgctgggcgatactggcgtggccgttaacccggaagatccgcgttataaagatctgattggcaaatatgtcattctgccgctggttaaccgtcgtattccgatcgttggcgacgaacacgccgacatggaaaaaggcaccggctgcgtgaagatcaccccagcgcacgactttaacgactatgaagtcggtaaacgtcacgccctgccgatgatcaacatcctgacctttgacggcgatatccgtgaaagcgcccaggtgttcgataccaaaggtaacgaatctgacgtttattccagcgaaatcccggcagagttccagaaactggagcgttttgctgcacgtaaagccgtcgttgctgcggttgacgcgctcggcctgctggaagaaattaaaccgcacgacctgaccgttccttacggcgaccgtggcggcgtggttatcgaaccgatgctgaccgaccagtggtacgttcgtgccgatgtactggcgaaaccagcggttgaagcggttgagaacggcgacattcagttcgtaccgaagcagtacgaaaacatgtatttctcctggatgcgcgatattcaggactggtgtatctctcgtcagctatggtggggtcaccgtatcccggcatggtatgacgaagcgggtaatgtttatgttggccgcaacgaagacgaagtgcgtaaagaaaataacctcggtgctgatgttgcgctgcgtcaggatgaagacgttctcgacacctggttctcctccgcgctgtggaccttctccacgctcggctggccggaaaacaccgacgcactgcgccagttccacccaaccagcgtgatggtatccggcttcgacatcatcttcttctggattgcccgcatgatcatgatgaccatgcacttcatcaaagatgaaaatggcaaaccacaggtgccgttccacaccgtttacatgaccggcctgattcgtgatgacgaaggccagaagatgtccaaatccaaaggtaacgtgattgacccactggatatggttgacggtatttcgctgccggaactgctggaaaaacgtaccggcaatatgatgcagccgcagctggcggacaaaatccgtaagcgcaccgagaagcagttcccgaacggcattgagccgcacggtactgacgcgctgcgcttcaccctggcggcgctggcttctaccggtcgtgacatcaactgggatatgaagcgtctggaaggctaccgtaacttctgtaacaagctgtggaacgccagccgttttgtgctgatgaacacggaaggtcaggattgcggcttcaacggcggtgaaatgacgctgtcgctggcggatcgctggattctggcggagttcaaccagaccatcaaagcgtaccgcgaagcgctggacagcttccgcttcgatatcgccgcaggcattctgtatgaattcacctggaaccagttctgtgactggtatctggagctgaccaagccggtaatgaacggtggaacagaagccgaactgcgcggtactcgccatacgctggtgactgtactggaaggtctgctgcgcctcgcgcatccgatcattccgttcatcaccgaaaccatctggcagcgtgtgaaagtactttgcggtatcactgccgacaccatcatgctgcagccgttcccgcagtacgatgcgtctcaggttgatgaagccgcactggccgacaccgagtggctgaaacaggcgatcgttgctgtacgtaacatccgtgcagaaatgaacatcgcaccgggtaaaccgctggagctgctgctgcgtggttgcagcgcggatgcagaacgtcgcgtaaatgaaaaccgtggcttcctgcaaacactggcgcgtctggaaagcatcaccgtgctgcctgctgatgataaaggtccggtttccgttacaaagatcgtcgacggcgcagaactgctgatcccgatggcaggcctcatcaacaaagaagatgagctggctcgtctggctaaagaagtggcgaagatcgaaggcgaaatcagccgtattgagaacaagctggcgaacgaaggctttgtcgcccgcgcaccggaagcggtcatcgcgaaagagcgtgagaagctggaaggctacgcagaagcgaaagcgaagctgattgaacagcaggctgttatcgccgcgctgtaa

SEQ ID NO: 1964 - DNA, 444 bp, Escherichia coli
atgaaaaacgcaacgttctaccttctggacaatgacaccaccgtcgatggcttaagcgccgttgagcagttggtgtgtgaaattgccgcagaacgttggcgcagtggtaagcgcgtactcatcgcctgtgaagatgaaaagcaggcttaccgactggatgaagccctgtgggcgcgtccggcagaaagctttgttccgcataatttagcgggagaaggaccgcgcggcggtgcgccggtggagatcgcctggccgcaaaagcgcagcagcagcccgcgcgatatattgattagtctgcgaacaagctttgcagattttgccaccgctttcacagaagtggtagacttcgttccttatgaagattctctgaaacaactggcgcgcgaacgctataaagcctaccgcgtggctggtttcaacctgaatacggcaacctggaaataa

SEQ ID NO: 1965 - DNA, 1512 bp, Escherichia coli
atggagtttagtgtaaaaagcggtagcccggagaaacagcggagtgcctgcatcgtcgtgggcgtcttcgaaccacgtcgcctttctccgattgcagaacagctcgataaaatcagcgatgggtacatcagcgccctgctacgtcggggcgaactggaaggaaaaccggggcagacactgttgctgcaccatgtgccaaacgtgctttctgaacgcatcctccttattggttgcggcaaagaacgtgagctggatgagcgtcagtacaagcaggttattcagaaaaccattaatacgctgaatgatactggctcaatggaagcggtctgctttctgactgaactacacgttaaaggccgtaacaactactggaaagtgcgtcaggctgtcgagacggcaaaagagacgctctacagtttcgatcagttgaaaacgaacaagagcgagccgcgtcgtccgctgcgtaaaatggtgttcaacgtgccgacccgccgtgagctgaccagcggtgaacgcgcgatccagcatggtctggcgattgccgcagggattaaagccgcgaaagatctcggcaatatgccaccgaatatctgtaacgctgcttacctcgcctctcaggcgcgccagttggctgacagctacagcaagaatgtcatcacccgagttatcggcgaacagcagatgaaagagctggggatgcattcctatctggcggtcggtcagggttcgcaaaacgaatcgctgatgtcagtgattgagtacaaaggcaacgcgtcggaagatgcacgcccaatcgtgctggtgggtaaaggtttaaccttcgactccggcggtatctcgatcaagccttcagaaggcatggatgagatgaagtacgatatgtgcggtgcggcagcggtttacggtgtgatgcggatggtcgcggagctgcaactgccgattaacgttatcggcgtgctggcaggctgcgaaaacatgcctggcgggcgtgcctatcgtccgggcgatgtgttaaccaccatgtccggtcaaaccgttgaagtgctgaataccgacgctgaaggccgcctggtactgtgcgacgtattaacttacgttgagcgttttgagccggaagcggtgattgatgtggcgacgctgaccggtgcctgcgtgatcgcgctgggtcatcatattactggtctgatggcgaaccacaatccgctggcccatgagctgattgctgcatctgaacaatccggtgaccgcgcatggcgtttaccgctgggtgacgagtatcaggaacagctggagtccaattttgccgatatggcgaacattggcggtcgtcctggtggggcgattaccgcaggttgcttcctgtcgcgctttacccgtaagtataactgggcgcacctggatatcgccggtactgcctggcgttctggtaaggcgaaaggcgcaaccggtcgcccggtggcgttgctggcacagttcctgctaaaccgcgccgggtttaacggcgaagagtaa

SEQ ID NO: 1966 - DNA, 1080 bp, Escherichia coli
gtgcgggagacgctcaaaagccagctggcgatactcttcatcttgcttttgatcttcttctgtcaaaagttagtgaggatcctcggcgcagcggttgacggcgatattccggcgaacctggtgctctcccttctcgggttgggcgtgccggaaatggcgcagcttatcctgccattaagcctgttcctcgggctgctgatgacgctgggcaaactgtataccgaaagtgaaattacggtaatgcatgcctgcggcttgagcaaagcggttctggtgaaagcggcaatgatccttgcggtattcacggcaatcgtcgcggcggttaacgtgatgtgggcgggaccgtggtcatcgcgtcatcaggatgaagtgttagcagaagcgaaagcgaaccctggcatggcggcgctggcgcaagggcaattccagcaagcgactaatggcagctcggtgctgttcatcgaaagcgttgacggcagcgatttcaaagatgtgttcctcgcacaaattcgaccaaaaggtaatgcacgtccttctgtggtggtggccgattccggacatttaacccagctgcgcgacggctcccaggtcgtcactctcaaccagggaacgcgcttcgaaggcactgcactgttacgtgatttccgcattacggatttccaggattatcaggcgatcattggtcaccaggcggtggcgctcgacccgaacgataccgaccagatggacatgcgcacattgtggaacactgacaccgatcgtgctcgcgcagaactgaactggcgtatcacgttggtattcaccgtgtttatgatggcacttatggtcgtaccgctgagcgtggttaacccacgtcagggacgcgtactgtcgatgctgccagccatgctgctgtatctacttttcttcctgatccagacctccctgaaatcgaacggcggtaaaggtaagctggacccgactctgtggatgtggaccgttaacctgatttatctggctttggcgattgttctcaacctttgggacaccgtgccggtccgccgcctgcgcgccagtttttcgcgtaaaggagcggtgtga

SEQ ID NO: 1967 - DNA, 1083 bp, Escherichia coli
atgcaaccttttggcgtacttgaccgctatatcggtaaaactattttcaccaccatcatgatgacgctgttcatgctggtgtcgctgtccggcattatcaagtttgtcgatcagctgaaaaaagccgggcaggggagttacgacgcgttaggcgcaggaatgtataccttgctgagcgtgccgaaagatgtgcaaatcttcttcccgatggcggctctgcttggggcgttgcttggtcttgggatgctggcgcagcgcagcgaactggtggtgatgcaggcttctggttttacccgtatgcaggtggcgctgtcggtgatgaaaaccgccattccgctggtcttgctgacgatggcgattggtgaatgggtcgcgccgcagggcgagcagatggcgcgtaactaccgtgcgcaggcgatgtacggcggctcgttgctctctacccagcaaggtttatgggcgaaagatggcaacaacttcgtctacattgagcgggttaaaggtgacgaagagttaggtggcatcagtatttatgcctttaacgagaatcgtcgtctgcaatccgtacgctatgccgctaccgcgaagtttgacccggaacataaagtctggcgtctgtcgcaggttgatgaatctgatttgaccaatccgaaacagatcaccggttcgcagacggtgagcggcacctggaaaaccaacctcacgccagacaaactgggcgtggtggcgctggacccggatgcactctctatcagcggtttgcacaactatgtgaagtatctgaagtcgagcggtcaggatgccggacgttatcagctcaacatgtggagcaaaatcttccagccgctatccgtggcggtgatgatgctgatggcgctgtcgttcatctttggcccactgcgtagcgtacctatgggcgtgcgtgtggtcactggtattagcttcggttttgtcttctacgtactggaccagatcttcggcccgctgacgttggtttacggcatcccgccgatcatcggcgcactgttgccaagcgccagcttcttcttaatcagcctgtggctgttaatgagaaaatcgtaa

SEQ ID NO: 1968 - DNA, 1503 bp, Escherichia coli
atgagcaaacccctgttaattgcccgcacgccggacacagaactgtttttactgccgggaatggctaaccgtcacgggctgattactggcgcaacggggacgggtaaaactgtcacgttgcaaaaactggcagagtcattgtcggaaatcggtgttccggtgtttatggccgatgtgaaaggcgatctgaccggcatcgcgcaggcaggaacggcgtcggaaaaactgctcgcaaggcttaaaaatatcggcgtcaacgactggcaaccgcatgccaatccggtggtggtgtgggatatctttggcgagaaaggccatccggtgcgggcgacggtttcggatctggggccgctgttgctggcacgactgttgaatctcaacgatgtgcaatctggcgtgctgaatatcattttccgcattgctgacgatcagggattgttgctgctcgactttaaagatctgcgggcaattacccagtacatcggcgataacgccaaatccttccagaatcagtacggtaatatcagtagtgcatcggttggtgccatccagcgcgggctgttgtcgctggaacagcaaggcgcagcacacttctttggtgagccgatgctggatatcaaagactggatgcgcaccgatgccaacggtaaaggcgttatcaatatcctcagcgccgagaagctctaccagatgccgaaactgtacgccgccagcctgctgtggatgctttcagagttgtatgaacaattgccggaagcgggcgatctggagaaaccaaaactggtgtttttcttcgacgaagcgcatctgctatttaacgatgcaccgcaggtactgctggataagattgagcaggtaataaggcttatccgttcaaaaggcgtgggcgtctggtttgtttcgcaaaacccgtctgatattccggacaacgtgcttgggcagctcggtaatcgcgttcaacacgctttgcgtgcttttacgcctaaagatcagaaagcagtgaaggcagcggcgcaaaccatgcgggccaatccaacatttgataccgaaaaggcaatccaggaactggggaccggcgaggcgttaatctcgtttctcgatgcgaaaggaagcccttcagtggtggaacgggcgatggtgattgccccctgttcacgaatggggccggtgacggaagatgagcgcaatggcttgattaaccactccccggtgtatggcaagtacgaggatgacgtggaccgggaatccgcctatgagatgttgcaaaaaggctttcaggccagtatcgagcagcaaaataatactcccgcgaaagggaaagaggtggcggtggatgacggtattctcggtggattgaaagatattttgttcggcactaccggaccacgcggcgggaagaaagatggtgtggtgcaaacaatggcaaaaagcgccgcccgccaggtgacgaatcagattgtgcgcgggatgttggggagtttgctgggggggagaagaaggtaa

SEQ ID NO: 1969 - DNA, 1020 bp, Escherichia coli
atgtcgatgataaaaagctatgccgcaaaagaagcgggtggcgaactggaagtttatgagtacgatcccggtgaactgaagccacaagatgttgaagtgcaggtggattactgcgggatctgccattccgatctgtcgatgatcgataacgaatggggattttcacagtatccgctggttgccgggcatgaggtgattgggcgcgtggtggcgctcgggagtgccgcgcaggataaaggtttgcaggtcggtcagcgtgtcgggattggctggacggcacgcagctgcgggcattgcgatgcctgtattagcggtaatcagatcaactgcgagcaaggtgcagtgccgacgattatgaatcgcggtggctttgccgagaagttgcgtgcggactggcaatgggtgattccactgccagaaaatatcgacattgaatctgccggaccgctgttgtgcggcggtatcacggtctttaaaccgctgttgatgcaccatatcactgccaccagccgcgttggggtaattggtattggcgggctggggcatatagctataaaacttctgcacgcaatgggatgcgaggtgacagcctttagttctaatccggcgaaagagcaggaagtgctggcgatgggtgccgataaagtggtgaatagccgcgatccacaggcactgaaagcactggcggggcagtttgatctcattatcaacaccgtcaacgtcagcctcgactggcagccctattttgaggcgctgacctatggcggtaatttccatacggtcggtgcggtcctcacgccgctgtctgttccggcctttacgttaattgcgggcgaccgcagcgtctctggttcagcaaccggtacaccttatgagttgcgtaagctgatgcgctttgccgcccgcagcaaggttgcgccgactaccgaactgttcccgatgtcgaaaattaacgacgccatccagcatgtgcgggatggtaaggcgcgttatcgcgtggttctgaaagccgatttatga

SEQ ID NO: 1970 - DNA, 498 bp, Escherichia coli
atggccctaacggatactaaagttcgctctgcgaaacctgaggagaaagagtattcacttgttgacggcgacggcatgtccttacttgtaaaacctggcggttcaaagtattggcgatttcgtttccgttttggcggtaaacaacatttgatggcgttcggcgtttacccggatgtttcgctggcggatgcgcgaaagaaaagggaagaggccagaaagctggtagttgctggtatcgatcctcgtgagcataagcgtgctgtgaaagaagagcaggtgaaagagattattactttcgagaaggttgccagagagtggctcgtaaccaaccaaaaatggtcggaagatcatgctaaccgtgtaaaaaagagcctggaggacaatatcttcccggcaattggttctcacaatattgctgaactgggcacccgcgatctgttaattccaattaaagccgtggagaaatccggacgtcttgaagtggcttcccgtctttaa

SEQ ID NO: 1971 - DNA, 672 bp, Escherichia coli
atgcgttatgcagtgcaaagcgggttaattgattacaatccggcgcaagaaatggcgggggcggttgcttccagtaatcgacagcatcgtccggcgctggagttaaagcgtatccctgagttacttgagaaaatagacagctataccggcaggccgctaacccgttgggtaaccgaactcactctgcttatttttattcgatccagtgagctgcgttttgctcgctggtcagaaatcgattttgaaacgtcaatgtggaccatcccgcctgagcgagaaccgattcccggtgtgaaacattctcagcgaggttccaagatgcgcacacctcatctggtgccgctttcaaagcaggcgctggcgatcctgaagcagataaaacagttctgtggcgaacatgagctgatttttattggcgatcacgatccgcgtaagcccatgagcgagaacacggtaaacagtgcgctacgggtgatgggttatgacactaaggttgaagtttgcggccacggcttccgtacaatggcctgcagttcgttaattgagtcagggctatggtcgaaggatgcggtggaaaggcagatgagccatatggaacgcaattcggtgagggcggcgtatatccataaagcggaacatctggatgagcgcaagctgatgttgcagtggtga

SEQ ID NO: 1972 - DNA, 3072 bp, Escherichia coli
atgaagcttaaattcaaacatcaaccctatcaggctgccgcagtgcaggcggtcgtcgatatttttcaggggcagccaccggcctctgatgcggccatgagctatcgccttgaccctggtaataccaaaaacggtatgggtgatctgtttgcggtagatactggttttaaaaatgctgagctaacccttagtgaggttgcattgcttgataacatccagcaggtgcagcgccagcaaaatctgccgttgtcggagagcttggtcaagaccaaggtcgccaagctaaatcttgatatcgagatggaaacgggtactggcaagacctattgctacatcaagacagtcttcgaactgaacaaacagtacggctggagcaagttcgtcatagtggtgccgagcattgccatccgcgagggcgtagccaagtcgttggaaatcacggccgagcactttcaggagacctatcacaagaaggcacgcttctttatttacaactctaagcagctgcaccatctggagagtttctcctcagatgccggtatcaatgtcatggtgatcaacgtacaagcgtttaacgccactggcaaagataaccgccgtatctatgaagcgctcgatgattttcagtcacgtcgcccgatcgatgtgatcagcgcaaaccgacccatcttgatcctcgatgagccgcagcggatggaggggggcaagaccctagattccttggctaatttcaacccgttgatggtgttgcgctattccgctacacacaagaccacacacaacaaaattcaccgcctagatgcgctcgatgcctacaaccagaagctggtgaagaagattgaggtgcgtggtatctcggtgaagggactggcgggaaccaatgcctatctctatttacaatccatcgaaatctcaaacaaaaaaccgccagtagcggttgtagagttcgaacagaaactcagcggtggaaacatcaagcgcgtcactcgcaaactgggtaagggtgacaatctgtttgtgctatcgaacgagctggatcaataccgcgatgggtttgtggtatcggacatcaatgctaatacggacaccttgagctttaccaatggcgtagaactgacggtgggtgatgtgattggtgatatttccgagatagcgctgcgccgcattcagatccgtgagacgatcaaggcgcactttgataaggagatggagctcttcgataaaggggtgaaggttctctcgttgttctttattgacgaagtggccaggtaccgggactactccgctgtcgatgaaaagggagagtacgcaaaaatatttgaagaggagtacgctaagcacattcaagaagtgtttgataatgggtttatggagggggatgccccttatgctaaatatctacgccgcattgcggccgataagacgcatagcggctacttttccatcgacaagaagagcaagcgcctcacagatcccaaagccgctgcgcgcggtgaaaatgcgggcttgtcggatgacgtagatgcttatgatctaatcctcaaagacaaggaacggttattatcactagctgagccggtgcgttttatcttctcacactcggccttacgtgagggctgggataaccccaacgtgtttgttatctgcacactcaagcatagtgataacaccatttcacgccgccaagaggtcgggcgcggcctgcgtttgtccgtcaatcaaaatggtgaacgcatggatcacccatccattgttcatgacattaacgtactgacagttgtggccagcgaaagttacaaggacttcgtgaccgccttgcagaaggacattagcgactccttgtctgctcgcccgcgtgtggcggacaaggcctacttcacgggcaagatgctgaacacgaaggaaggcccgattacggtctcggacgaccaagccacggacatcgagttttatctgatccagaatggctacgtcgataagaagcgcaatatcacagagaaataccaccaagctaagaaagacggcacattagaggcattgccggacgagctgcagccctatgcagagcaggtattccagctgattaacagcgtattcagcgaaagccagctcatgcaggtagaagatggacgcaagcccaaaagactgcagaccaacgccaactttgaaaagcaggagttcaaagcgctgtgggggcgaatcaatcgcaaagctacctacagcgtactgtttgatgatgttgagctagtgaacaatgcgatcaaggcgctcaatgataagaatgctgggttacgagtaacgccgttacaatacaccattcaccgtggcaagcaggctgatacggcaacttacgatgacctcaaaaagggtatcgccttcgagctgaaagttaccgaaacagaatcgcacaccgcctctatccactccgctgtgcagtacgacttgattggtaagttatcagaggggactttgcttacaagacgaaccattgccgaaattctaaaaggtctccatgctgacgtcttcgcgcaattcaagagcaacccggaaagtttcattgccgaagtcattcgcttggtcaacgaacaaaaggccaatgtcatcatcgagcatctggcctatgacacgctagaagacaagtttgatttggacatctttaccacgggtcagagcaaacaggatctcagtaaggctgggaataaattgcaaaatcacatctatgattacgtgcttaccgactctgcaattgagcgcaagttcgtcgaagagttggataccagcaaggatgtggtggtatatgccaagttgccacgtggttttctgatcccaacccctgtcggcgattacaaccccgactgggctatttccttcaaagaaggctcggtcaagcatgtgtatttcgttgctgagaccaagggctcgatgtcgtcactggatttacggcctattgaagccaccaagattaaatgtgcccgtaagttcttcgatgcggttaacaagacgtttgctccagaaaacgtgaagtatgacgtagtggatagcttcagtaagctgatggaagtggtgaagtaa

SEQ ID NO: 1973 - DNA, 2013 bp, Escherichia coli
atggaaaagctaaaaatgcattcacccaatctcacgcaggacaacatcgctcgcattcgcgatctgtttccaggctgcgtcaccgaagctaagggcgaggatggtagcgtgaagctggcagtggattttgaccaattgcgccaggaactgtctgattcgattgtagaagggccgcaggaacgctaccagctgaattggcctggtaagcgcgaggcactgctcactgcaaatgcaccgattgcaaagacgctccgtccagtacgtacgacaaaaaattcaaaaggcgaacacattgaagagagcgtcaacttcgacactaccaagaatatctttatcgagggagataatctcgacgcgctgaagctgcttcaggaaaattatcttggcaaaatcaagatggtctatatcgacccgccgtacaacacgggaaacgattttgtttacgccgacgattttgtagacgaggtctctgagttttttcttcgttcaaatcaggtggatagagaaggaaaccgcttaacagccaaccccgaaacaagcgggcgctttcactcagactggctgtccatgatgtattcgagactaaagttatcgcgcaacttgctacgagatgatggattaatcgtaattcatattgatgagaatgaatatcccaacctggagaagcttctggcagaaatatatggtgagaagaataatctcggaactattgtgtgggataagagaaatccaaaaggtgatgccacaggtgtcgcgcagcagcatgagctaatttgtatttactgcaaagatcgagaattcttcaagacaacctgcgagttccagcgaccaaaagagaatgcaggaaaaatgcttgcaaaagccaagcagattcttagcaaggagggcggggtaactgaaaaagcaaggaaagaatacaaagattgggtaaaccagcaagatctaactgggggggaaaaggcatataatcaaatcgatgacaatggcgacgtcttccgtccggtttctatggcgtggccgaataagaaaaaagcaccggaagattatttcattccgctaattcatcctgtaacagggaaggagtgccctgttcctgagcgtgggtggcgaaaccctcctgcaacaatgcaagaactcttgaagtcagggttgattattttcggtccagacgagaagacgcagccaacaagaaaatatcggctgaatgacaatttattcgaaaatatcccttctctactttattacggtggcagtgacgacgctttgcttgctgaccttaaaattccttttgatacaccgaaaccggttcaggtagcaaagagactaattcaatcaatttgcaagaatgacgatatattgatcgacttcttcgctggctcgtgcacggcggcgcatgcacttatgcttttgaatgcggaagatggggcaaatcgtcgattcataatggttcaattgcccgaggaatgtgacgagaagtctgaagccaaaaaacttggatactcagtagtttcggagattggaaaaaatcgcattcggagagctgcaaaaaaaattagagaagaattttcagaaatattggctacaagaaatacggaacttgacttaggatttcgcctgcttaaagtcgatacatcgaacatggctgacgtctactacagccccgatgtgctggaaaaagccaatctcgacttgtttgttgacaacatcaagcctgatcgcacgcctgaggatctgctgttccaagtaatgctggattggggcgtcgatctggccctgcctatcgccaagcagtccatccaaggtaaagacgtgttctttgtcgatggcaatgtgcttaccgcctgcttcgacgccagtggcagcattgacgaaaccttcgtgaaggaactggccaaactgcagccgctgcgcgttgtgttccgcgacgcgggctttaagaacagtgcggtcaagatcaatgtcgagcagattttcaagctcatgtcgcctgtcaccgaagtaaaatgtatctga

SEQ ID NO: 1974 - DNA, 438 bp, Escherichia coli
atgacgcagagcctaaatgacgagtcaaggaaacatatcgaggagatcgctggtgaagcattggcgcaactcgaaagcatcgctgaaaccgaagggggcaagctgtacgatgggcggacacttggttccgatgcgctggcaagcatcaacgcaatgacgtccagttcagccatccaaaggctgggtaagatcagtcaggcgaaccgcgaaaaccatcaggtactggtggcggagcctgccattgctcgtgttgtggtagacgatgaagagggagaagagaaagtaacgtgcgcgtgttcgacatccagcacatcaaaggcatggagttcgaggcggtgttctttgtcagcattgaccagctcgccactctgcacccggcgctgttcgataaatacctgtacgtcggcatcacccgtgcggcaacctacctggacgtga

SEQ ID NO: 1975 - DNA, 702 bp, Escherichia coli
atgagtcagcctatccaatttgagtcgaatatcgcgttgataaactacccgaagcaggccgcctttggtcgtaccctgccaaagaataagatctacgaacatagcggcgccaatacaaggctgaaggacttgttcatcgagcaggtggagctgatcgtctggcgatacaagttggccccagaaacgattaacctgcccgctaggccgggagtaccagagcttcagattttctcgatccagctcaagacatcggagctgaatctggacgttttacattgtatcgatggcgcagtgcagtttcccatcatattcgagctgagctttgatggccgaacaaaggtgatcgctgcatacaaacgccccaatgagtcagacgccagtcgttgggtcttgagtagctactttgcgacagcctggttgccgagtgacagtgagcgtgccgcaatacccttagcactcgatctaggcggcttgtatgagcaggtgcttcaccgcctgatccccatgcccgcgcgcccacaagaaagtctcgcggacttggtcgcacgtgtcgaaatggttgcagccaagcagcgtgaggttgagaaagctgccagtagacttgccaaagaaaaacaatttaaccgcaaagtagagatcaacgcgcaattgcgacagcttaaaaacgaacttgaagaattgacagggagagagaatgcatga

SEQ ID NO: 1976 - DNA, 3279 bp, Escherichia coli
atggaactgatcgacaatatcaaccgcctgctcggagacgacctaaagcagacgctcaaacctagtgctcgcctgaagatcgctgcctcctgcttttcgatatacgcgttcgaagcgctcaaagcagagctggaaaaaatcgacgagctgcaattcatctttacctcgccgacgtttaccgctaacgaggttaccgacaagattcgcaaggaacgcaaagaattccacatactgaaggctgaccgcgaacggagcttgtacgggagtgagttcgaaattcagctgcgtaacaaactgacccagcgcgcaattgcaaaagagtgcgcggactggatgcggcgcaaggcaacattcaagtccaatcgcagcaaggctccgatgcagcagtttgcttgtgttcaggccgccgccacagagactgcctacatgccactgcacggatttaccgccgtcgatcttggctaccagcagggcaatgctgtctcaaacctcgtcaacaaaatggacgagtcgacgtttacggcgacctacctcagtctgtttaaccagatctggcaagaccccgagaagctggaggatgtaacggcacagatctgcgaccacattacgtccgtctaccaagaaaactcgcccgagagcatctacttcctgatgctctacaatatcttcaatgagtttctggacgacattaacgaggatgctctgccgaacgaccgcacgggctatcaagacacactcatctggaacaaactcttcaattaccagaaagatgctgccaccgggatcatcaacaaacttgagagctacaacggttgcatcttggccgacagcgtgggcttgggtaagactttcaccgcgctggccgtgataaagtattacgaactgcgcaacaagtcagttctggtgttatgccccaagaagctggcggacaactggctgaactacagccgtaacctcaagaccaacatatttgctcgcgaccggttcaactacgacgtgctttgtcataccgacctcagccgtacgagcggtgagtcgttcggcacaccgctgaatcgcatcaactggggtaactatgaccttgttatcatcgacgagtcgcacaacttccgcaacaatgatgcttataaggacaaggaaacccgctaccaaaagctgatgaacaaggttatcaaggagggcgtgaaaaccaaggtgctgatgctttcggccaccccggtgaacaaccgcttcaacgacctgcgaaaccaactggcgttggcctacgaaggcgattccgaaaacctcagcaagaagctgcgtactggcaagacggtagaggacattttccgtggcgcacaggctagcttcaatgcatgggcaaagcttccatcggaagatcgcacagcgcgggcgatcctagattcgttggacttcgacttcttcgaattgctcgacagcgtcaccatcgcacgttcgcgcaagcatattcagaccttctacgataccaaggaaatcggccaattccctgagcgccgcaaacccttgtcgttccactgctcgctcacgcagcgaacggatgtgatgagttttaacgaaattttcgagcggctctctttactcaagctcgctgtttacgccccaatcagctacatcctgcccagtcgactcaagaagtacgaagagatgtatgacactcaggttgcagggaaaggcaagcttaaacaagtcgaccgcgaaaagagcctgcaggcattgatgacgaccaacctgctcaagcgtctggaaagttcgattgagtccttccgcttgacgctcaagtccctgcgcgcgaaccacatgaatacgctggccaagatcagcactttcaatgagactagcgacctcagtggcattgacagtagaatcaatgacctcaccgaccagttagaaaacctagatgcggacgacgacctgccctgcatcggtgacagcgagatcggtggcaaggtcaaaatcagcctcgcagatatggacttgccttcttgggagcacgacctgaagattgatctggaaatcattgatgccttactgacgtcgatgaacaagatcacggctgccgatgatgccaaactacagcatctcaaagcactggttcaggaaaaagtcgcagcaccgctgaatcctggaaacaagaaggtgctgatcttcacagccttcgccgacaccgctgactacctatatgccaatttggctccggaattgctggccacacaaaccttgcacagtgcaaaagtcactggcaaaggggtgccgaagagcacgcttaagaagagctatgacttccaagaactgctcacccttttctcaccacactcgaaggagaaagccatcgtgctgccaaatgaggcggcagagatagacttgttgatcggcaccgattgtatctctgaaggtcagaacctgcaggactgcgactacctcatcaactacgacatccactggaatcccgtgcgcatcatccagcgcttcggccgtgtggatcgcatcggttcacccaacagcagcatccaactggttaactactggccagacatctctctcgacgaatacatcaacctcaaggaacgggttgagagccggatgatgattgctgatgtcacagccaccggtgacgacaatgtgctgagcgcccaagccaacgacgtgtcttatcgcaaagagcaattgcgacgtttgcaagaggaagtgattgagctggaagacctgaaaaccggagtgtcgatcactgatctcgggctcaatgacttccgaatggatttgctcaactatgtgaaggctaatggcgaattgagcaacgtgccaaacggaatgcacgccgtagtgtctgccaagccggagatgggcctgcgcccgggtgtgatcttcacgctgcgcaaccggaatccaagcgtcaacgtcagtcagcacaaccggctacacccttattacctcgtctacattaatcgcgagggtgaagtcattcacgatcacacggaggtcaaacgcttgctggatctggtacgtagctgctgcaaggggcaaacccagcctattacagacgcctgtctcttgttcaacaaggaaacggccgatggcagcaagatgcaagtgtattcagatctgcttggcaaagctatccgctcaatgatcgaagtgaaggaagagaaggatctggacagcctcttcttcgccggtaagactaccgcgctggtcaatactatcgtcgggctagacgacttcgaattgatcaccttcctagtgattcaggaggccggatga

SEQ ID NO: 1977 - DNA, 906 bp, Escherichia coli
atgtctagttcccctcctaagcggcttgaagacttgagtctggtccagcgcgatcggctggcctacatcgattttcggctctacttcttcggtgagatcggtcgcccagatctgattgagcgcttcggtgtggctccggcaggggcgactcgcgatttggctttataccgggaaattgtgccgcataacatcaccttcgatggtagcaacaagatctatcgcatcggtcaggagttctccccgttattcgagcacgcatcgctgcgcattctgtcggcgctgtctctcggttttggcgatggagtgaatggctcaatgcaggcactgctaccatgcgaatcccccgcagccctaagcattcccaaaatggatgtgttagccacgatttgccgaggaatccacgctaagcgacccgtcgccatccgctaccactcgatgagcagcggcgagtccaagcgggtaattgtgccctttgccttggttgataccggcctgcgctggcacgtacgggcctttgatcgcaagagtagagagtttcgggatttcgtcgtcacccgcatcgaagaaccaacattgctcgacgaggagccacaggccaacgaacgaccgcataatgatatccagtggacgcgcatcgtcgagctggatttcgtgccgcacccgagcgttgagcgacccgatattatcaagatggactacgggatgacagatggttcgatcagaatgcgcgttcgcgctgcggtggtgggctatatgttgcagcgctggcgggtagactgctcacctgatcattgccttcgtggaccggagtaccggttatggctcaaagatcatctcgcaatttacggcgtaaaaaatgccttactggcaccaggctatagagccactaagaaggctgactattaa

SEQ ID NO: 1978 - DNA, 252 bp, Escherichia coli
atgattaaaaatgacaaggcatgggtaggagacttgctgggcgggccgctcatgagcagggaaagccgcgtcattgccgaactgttgctaaccgatcccgatgaacagacatggcaagagcaaattgttggccacaacattttacaagcatcttctcctaaaaccgcaaaacgttatatgtcaacgctattcaggacgggtcactttggtgtaaaaagcttcccatacagaggctctcagcggattacttga

SEQ ID NO: 1979 - DNA, 999 bp, Escherichia coli
gtggcgctgtacaatattgcaaataaagaactacatgctttagaaaaaacgacatttactctggaaggattacaggaacgttatgatttacaggaagcaatcaaaaaaaacatagatattattgctcctgattgtctggtgatttctgaagagttttctgactgggaagatagccgtcggcgaattgatttattggcaatcgataaacaggcaaatttagtggttatcgaattaaaacgtgatgaaacgggggcgcatatggagttacaggcactacgatatgcggcgatgatttccacaatgagttttgcgaaagcatgtgaatatttccagacgtatttgaaaaaacaaaactgcgatgccgatgcgaaagaaaaaatacttgaatttgttgagttggatgaaactgagcttgttgattttggtaaagatatcagaatcgttttggcttcatcggattttagtaaggaactgactaccactgcgatttggttaagagataagggggtagacattcgatgcgttcgtctgacgccttatagatttaatgatgatgttcttatcaatgcagagcaaatcataccggttcctgaattggaagaatatcaagttaaatttcgtgaaaaacgtgatgagcagctaattagcagtcagaaaaaagagaaggactatacgtggtatatatataaagataaagaacttaataagcgtaaattagcgcttgaattattacgtgattggataagacaatttaatccagcaagttataatgatttaataaatggattaagtgaagactttaaaaaacgtacggttatgcttgtcgatcagataccagagaagcaaaagagtcgctatcatatcaatgaagatgcattgattacacttccttctggtgaaattgttgctatttctaatcaatggggtattgctaatattgaactcttgattgagtttgtacggcaaaatggttttgttgttgaaaaagctgaacaataa

SEQ ID NO: 1980 - DNA, 159 bp, Escherichia coli
atgcgggtactggtatcagatgcggtaaacggcggagggatcgttgagagattattctgggattttgacgggaaaactattgcgttgccgcaggtgcgtagaaattacccttatgagggggttgtggagtggcatcggaaagaggtttttagggggtga

SEQ ID NO: 1981 - DNA, 981 bp, Escherichia coli
atgaacgcgataatatcgcccgattattactatgttcttaccgttgctggtcaatctaatgccatggcgtatggcgaaggactgccattaccggacggggaagatgcgcctcatcccagaattaaacaattagcgagatttgcgcatacgcatcccggaggcccgtcatgtcactttaacgacattattccactgactcactgcccacacgatgttcaggatatgcagggttatcaccatcctctggcaacgaatcatcaaacacagtacggcaccgttggccaggcactgcatattgcacggaaattactgccctttattcctgataatgcaggggttctcatcgttccgtgttgccgtggcggatcggcttttaccgcgggcagcgaagggacatattcagaacggcacggagccagccatgatgcttgtcgttggggaatggatactccgctgtaccaggatttagtcagcagaacgcgagtcgcactggcaaaaaatccgcagaacaaattcctcggcgtatgctggatgcaaggcgaatttgacttaatgaccagtgactacgcgtcacaccctcaacactttaatcatatggttgaagcctttcgtagggatctaaaacaataccattctcagcttgataatattactgacgcaccgtggttttgcggcgataccacctggtactggaaagaaaatttccctcatgcgtatgaagcgatttatggcaattatcaaaataatgttttagccaatattattttcgtcgacttccagcaacaaggtgaaagaggactgacgaacgcgcctgatgaagatccggacgatttaagcacgggatattacggttcagcgtaccggtcaccggagaactggacgacggcactgcgaagcagtcatttcagcgcggcagcccgtcgagggattatttctgacaggtttgtagaagcaattttgcagttttggcgcgaaaggtga

SEQ ID NO: 1982 - DNA, 1107 bp, Escherichia coli
atgaataaaacaataacggcgcttgctatcctaatggcttcatttgccgcaaacgcgtctgtattaccggaaactcctgtgccatttaaaagtggtaccggagtaattgataacgacactgtctacattggtttaggtagcgcaggtacggcatggtacaagctggatacacaggccaaagataaaagatggacagcgttagctgcattccctggcggaccgagagatcaagcaacctctgcatttattgatggcaatctgtatgtgtttggcggcattggcaaaaacagcgagggcttgactcaggtatttaatgacgtacacaaatacaaccccaaaaccaatagctgggttaaattgatgtcgcacgcgccgatgggcatggcaggccatgtgacttttgtacacaacggcaaggcttatgttactggcggtgttaaccagaatatcttcaatggctattttgaagatctcaacgaagctggaaaagattcaaccgctatagataaaatcaacgcctactattttgacaaaaaagcagaagattatttcttcaataagtttctgttgtcttttgatccctctacacagcaatggagttacgctggcgaatctccctggtacggaacggctggtgcggcggttgtgaataaaggtgataaaacctggcttattaatggcgaagccaaaccaggattgcgaacggatgccgtatttgaacttgatttcaccggtaataatttaaaatggaataagcttgctcccgtcgcatcaccagatggcgtcgctggcggttttgcaggcatgagcaatgactcacttatatttgccggaggggccggattcaaaggttcacgagaaaattaccagaacggtaagaactatgcgcatgaaggcctgaaaaaatcatatagcgctgatattcatctttggcataacgggaaatgggataaatcgggcgaattatcgcaaggtcgggcctacggagtatcattgccctggaataatagtttattaattattggcggtgaaactgcaggcggcaaagcggtgacggattcagttttgatttctgtgaaggataataaagtcacagtacaaaactaa

SEQ ID NO: 1983 - DNA, 717 bp, Escherichia coli
atgaaaaaggctaaaatactttctggcgtattattactgtgcttttcgtcaccactgatttctcaggctgcgacactggacgtacgtggtggatatcgtagtggaagccacgcctatgagactcgactcaaagtcagtgagggatggcaaaatggatggtgggcaagtatggaaagtaatacctggaataccattcatgataataaaaaggaaaatgccgcactcaatgatgttcaggttgaagttaattacgcgattaaacttgatgatcaatggacggtgcgcccgggaatgttaacgcattttagcagcaacggcacacgctacggaccctacgtaaaactgtcctgggacgcgacaaaagatcttaattttggcattcgctatcgttacgactggaaagcttaccgacaacaagacttatccggtgatatgtctcgtgataacgttcatcgttgggatggatatgtcacttaccatattaatagtgatttcaccttcgcatggcaaacgacgctatacagcaaacagaacgattatcgctatgcaaaccataagaaatgggcgacggaaaatgcatttgttctacaataccatatgacgcccgatattacgccatacatagaatatgactaccttgaccgtcagggtgtttacaacggcagagataacttatcggaaaacagttatcgcattggtgtgtcatttaaactgtag

SEQ ID NO: 1984 - DNA, 603 bp, Escherichia coli
atgaagaataaggctgataacaaaaaaaggaacttcctgacccatagtgaaatcgaatcactccttaaagcagcaaataccgggcctcatgctgcacgtaattattgtctgacattactttgttttattcatggtttccgggcgagtgaaatttgccgattgaggatttcggatattgatcttaaggcaaagtgtatatatatccatcgattaaaaaaaggcttttcaacaacgcacccgctattgaacaaagaaattcaggctttaaaaaactggttgagtatccgtacttcttatccgcatgctgagagcgagtgggtatttttatcacgtaaggggaatccactttctcggcaacagttttaccatattatctcgacttccggtggtaatgccgggttgtcactggagattcatccgcacatgttacgccattcgtgtggttttgctttggcgaatatgggaatagatacgcgacttatccaggattatcttggacatcgcaatattcgtcatactgtctggtataccgccagcaatgcagggcgtttttacggcatctgggatagagccagaggacgacagcgtcacgctgttttatag

SEQ ID NO: 1985 - DNA, 597 bp, Escherichia coli
gtgagtaaacgtcgttatcttaccggtaaagaagttcaggccatgatgcaggcggtgtgttacggggcaacgggagccagagattattgtcttattctgttggcatatcggcatgggatgcgtattagtgaactgcttgatctgcattatcaggatcttgaccttaatgaaggtcgaataaatattcgccgactgaagaacggattttctaccgttcacccgttacgttttgatgagcgtgaagccgtggaacgctggacccaggaacgtgctaactggaaaggcgctgaccggaccgacgctatatttatttctcgccgtgggagtcggctttctcgccagcaggcctatcgcattattcgcgatgccggtattgaagctggaaccgtaacgcagactcatcctcatatgttaaggcatgcttgtggttatgaactggcggaacgtggtgcagatacccgtttaattcaggattatctcgggcatcgaaatattcgccatactgtgcgttataccgccagtaatgctgctcgttttgccggattatgggaaagaaataatctcataaacgaaaaattaaaaagagaagaagcttga

SEQ ID NO: 1986 - DNA, 549 bp, Escherichia coli
atgaaaattaaaactctggcaatcgttgttctgtcggctctgtccctcagttccacagcggctctggccgctgccacgacggttaatggtgggaccgttcactttaaaggggaagttgttaacgccgcttgcgcagttgatgcaggctctgttgatcaaaccgttcagttagggcaggttcgtaccgcatcgctggcacaagaaggagcaaccagttctgctgtcggttttaacattcaactgaacgattgtgacactactgttgcagacaaagcagctattgccttccttggtaccgcaattgatggaaatcatcctaacgtattggctctgcagagttctgctgcaggtagcgcaacaagcgttggtgtgcaaattctggacagaaccggtgctgcgctggcgctggacggtgcgacatttagtgcagaaacaaccctgaataacggtactaacaccattccgttccaggcgcgttactttgcaaccggtgccgcaaccccaggtgctgctaatgcggatgcgaccttcaaggttcagtatcaataa

SEQ ID NO: 1987 - DNA, 498 bp, Escherichia coli
atgtttgctctggccggaaataaatggaataccacgctgcccggcggaaatatgcaatttcagggcgtcattattgcggaagcttgccggattgaagccggtgataaacaaatgacggtcaatatggggcaaatcagcagtaaccggtttcatgcggtaggggaagatagctcaccggtgtcttttgttattcatttacgggaatgtagcacggtggtgagtgaacgtgtgggtgtggcgtttcacggtgtcgcggatggtaaaaatccggatgtgctttccgtgggagaggggccagggatagccaccaatattggcgtagcgttgtttgatgatgaaggaaacctcgtaccgattaatcgtcctccagtaaactggaaacggctttactcaggctctacgtcgctacatttcatcgccaaatatcgtgctaccgggcgtcgggttactggcggtatcgccaatgcccaggcctggttctctttaacctatcagtaa

SEQ ID NO: 1988 - DNA, 726 bp, Escherichia coli
gtgagtaataaaaacgtcaatgtaaggaaatcgcaggaaataacattctgcttgctggcaggtatcctgatgttcatggcaatgatggttgccggacgcgctgaagcgggagtggccttaggtgcgactcgcgtaatttatccggcagggcaaaaacaagtgcaacttgccgtgacaaataatgatgaaaatagcacctatttaattcaatcatgggtagaaaatgccgatggtgtaaaggatggccgttttatcgtgacgccacctctgtttgcgatgaagggaaaaaaagagaataccttgcgtattcttgatgcaacaaataaccaattgccacaggatcgggaaagtttattctggatgaatgttaaagcgattccgtcaatggataaatcaaaattgactgagaatacgctacagctcgcaattatcagccgcattaaactgtactatcgtccggctaaattagcgttgccacccgatcaggccgcagaaaaattaagatttcgtcgtagcgcgaattctctgacgctgatcaacccgacaccctattacctgacggtaacagagttgaatgccggaactcgggttcttgaaaatgcattggtgcctccaatgggcgaaagcgcggttaaattgccttctgatgcaggaagcaatattacttaccgaacaataaatgattatggcgcacttacccccaaaatgacgggcgtaatggaataa

SEQ ID NO: 1989 - DNA, 2637 bp, Escherichia coli
atgtcatatctgaatttaagactttaccagcgaaacacacaatgcttgcatattcgtaagcatagtttggctggtttttttgtccgactctttgttgcctgtgcttttgccgtacaggcacctttgtcatctgccgaactctattttaacccgcgttttttagcggatgatccccaggctgtggctgatttatcgcgttttgaaaatgggcaagaattaccgccagggacgtatcgtgttgatatctatttgaataatggttatatggcaacgcgtgatgtcacatttaatacgggcgacagcgaacaagggattgttccctgcctgacacgcgcgcaacttgccagtatggggctgaatacggcttctgtctccggtatgaatctgctggcggatgatgcctgcgtgccattaacctcaatgatccatgacgctactgcgcaactggatgttggtcagcagcgactcaacctgacgatccctcaggcatttatgagtaatcgcgcgcgtggttatattcctcctgagttatgggatcccggtattaatgccggattgctcaattataatttcagcggaaatagtgtacagaatcgaattgggggtaacagccattatgcatatttaaacctacagagtgggttaaatattggtgcgtggcgtttacgcgacaataccacctggagttataacagtagcgacagttcatcaggtagcaaaaataaatggcagcatatcaatacctggcttgagcgagacataattccgttacgttcccggctgacgctgggtgatggttatactcagggcgatattttcgatggtattaactttcgcggcgcacaattggcctcagatgacaatatgttacccgatagccaaagaggatttgccccggtgatccacggtattgctcgtggtactgcacaggtcactattaaacaaaatgggtatgacatttataatagtacggtgccaccggggccttttaccatcaacgatatctatgccgcaggtaatagtggtgacttgcaggtaacgattaaagaggctgacggcagcacgcagatttttactgtaccctattcgtcagtcccgcttttgcagcgtgaagggcatacacgttattccattacggcaggagaataccgtagtggaaatgcgcaacaggaaaaaccccgctttttccagagtacattactccacggccttccggctggctggacaatatatggtggaacgcaactggcggatcgttatcgtgcgtttaatttcggtatcgggaaaaacatgggggcactgggcgctctgtctgtggatatgacgcaggctaattccacacttcccgatgacagtcagcatgacggacaatcggtgcgttttctttataacaaatcgctcaatgagtcaggcacgaatattcagttagtgggttaccgttattcgaccagtgggtattttaatttcgctgatacaacatacagtcgaatgaatggctacaacatcgaaacacaggatggtgttattcaggttaagccgaaattcaccgactattacaatctcgcttataacaaacgcgggaaattacaactcaccgttactcagcaactcgggcgcacatcaacactgtatttgagtggtagccatcaaacttattggggaacgagtaatgtcgatgagcaattccaggctggattaaatactgcgttcgaagatattaactggacgctcagctatagcctgacgaaaaacgcctggcaaaaaggacgggatcagatgttagcgcttaacgtcaatattcctttcagccactggctgcgttctgacagtaaatctcagtggcgacatgccagtgccagctacagcatgtcacacgatctcaacggtcggatgaccaatctggccggtgtatacggtacgttgctggaagacaacaacctcagctatagcgtgcaaaccggttatgccgggggaggcgatggaaatagcggaagtacaggctacgccacgctgaattatcgcggtggttacggcaatgccaatatcggttacagccatagcgatgatattaagcagctctattacggagtcagcggtggggtactggctcatgccaatggcgtaacgctggggcagccgttaaacgatacggtggtgcttgttaaagcgcctggcgcaaaagatgcaaaagtcgaaaaccagacaggagtgcgtaccgactggcggggttatgccgtgctgccttatgccactgaatatcgggaaaacagagtggcgctggataccaataccctggctgataacgtcgatttagataatgcggtcgctaacgttgttcccacccgtggggcgatcgtgcgagcagagtttaaagcgcgcgttgggataaaactgctcatgacgctaacccacaataataagccgctgccgtttggggcgatggtgacatcagagagtagccagagtagcggcattgttgcggataatggtcaggtttacctcagcggaatgcctttagcgggaaaagtgcaggtgaaatggggagaagaggaaaatgctcactgtgtcgccaattatcaactgccaccagagagtcagcagcagttattaacccagctatcagctgaatgtcgttaa

SEQ ID NO: 1990 - DNA, 531 bp, Escherichia coli
atgagaaacaaacctttttatcttctttgcgcttttttgtggctggcggtaagtcacgctttggctgcggatagcacgattactatccgcggctatgtcagagataatggctgtagtgtggccgctgaatcaaccaattttactgttgatctgatggaaaacgcggcgaagcaatttaacaacattggcgcgacgactcctgttgttccatttcgtattttgctgtcaccctgtggtaacgccgtttctgccgtaaaggttgggtttaccggcgttgcagatagccacaatgccaacctgcttgcacttgaaaatacggtgtcagcggctgcgggactgggaatacagcttctgaatgagcagcaaaatgagataccccttaatgccccatcgtccgcgatttcgtggacgaccctgacgccgggtaaaccaaatacgttgaatttttacgcccggctaatggcgacacaggtgcctgtcactgcggggcatattaatgccacggctaccttcactcttgaatatcagtaa

SEQ ID NO: 1991 - DNA, 504 bp, Escherichia coli
atgaaatggtgcaaacgtgggtatttattggcggcaatgttggcgttcgcaagtgcgacgatacaggcagccgatgtcaccatcacggtgaacggtaaggtcgtcgccaaaccgtgcacagtttccaccaccaatgccacggtagatctcggcgatctttattctttcagtcttatgtctgccggggcggcatcggcctggcatgatgttgcgcttgagttgactaattgtccggtgggaacgtcgagggtcactgccagcttcagcggggcagccgatagtaccggatattataaaaaccaggggaccgcgcaaaacatccagttagagctacaggatgacagtggcaacacattgaatactggcgcaaccaaaacagttcaggtggatgattcctcactatcagcgcacttcccgttacaggtcagagcattgacggtaaatggcggagccactcagggaaccattcaggcagtgattagcatcacctatacctacagctga

SEQ ID NO: 1992 - DNA, 903 bp, Escherichia coli
atgaaacgagttattaccctgtttgctgtactgctgatgggctggtcggtaaatgcctggtcattcgcctgtaaaaccgccaatggtaccgctatccctattggcggtggcagcgccaatgtttatgtaaaccttgcgcctgccgtgaatgtggggcaaaacctggtcgtggatctttcgacgcaaatcttttgccataacgattacccggaaaccattacagactatgtcacactgcaacgaggttcggcttatggcggcgtgttatctagtttttccgggaccgtaaaatataatggcagtagctatcctttccctactaccagcgaaacgccgcgggttgtttataattcgagaacggataagccgtggccggtggcgctttatttgacgcctgtgagcagtgcggggggagtggcgattaaagcaggctcattaattgccgtgcttattttgcgacagaccaacaactataacagcgatgatttccagtttgtgtggaatatttacgccaataatgatgtggtggtgcccactggcggctgcgatgtttctgctcgtgatgtcaccgttactctgccggactaccctggttcagtgccgattcctcttaccgtttattgtgcgaaaagccaaaacctggggtattacctctccggcacaaccgcagatgcgggcaactcgattttcaccaataccgcgtcgttttcacccgcgcagggcgtcggcgtacagttgacgcgcaacggtacgattattccagcgaataacacggtatcgttaggagcagtagggacttcggcggtaagtctgggattaacggcaaattacgcacgtaccggagggcaggtgactgcagggaatgtgcaatcgattattggcgtgacttttgtttatcaataa

SEQ ID NO: 1993 - DNA, 1185 bp, Escherichia coli
atggaacagacctggcgctggtacggcccaaacgatccggtttctttagctgatgtccgtcaggcgggcgcaactggcgtggttaccgcgctgcaccatatcccgaacggcgaagtatggtccgttgaagagatcctcaaacgcaaggcgatcgttgaagacgcaggcctggtatggtctgtcgtagaaagcgtaccaattcacgaagatatcaaaacccacactggcaactatgagcagtggattgctaactatcagcagaccctgcgcaacctggcgcagtgcggcattcgcaccgtgtgctacaacttcatgccggtgctcgactggacccgtactgacctcgaatacgtgctgccagacggctccaaagctctgcgcttcgaccagatcgaattcgctgcattcgaaatgcatatcctgaagcgtccaggcgcggaagcggattacaccgaagaagaaattgctcaggccgctgaacgcttcgccactatgagcgacgaagacaaagcgcgtctgacccgtaacatcattgccggtctgccaggtgcggaagaagggtataccctcgaccagttccgtaagcacctggagctgtacaaagatatcgacaaagccaaactgcgcgaaaactttgctgtcttcctgaaagcgattattccagttgctgaagaagttggcgtgcgtatggcggttcacccggacgatccgccgcgtccgatcctcggcctgccgcgcattgtttccaccattgaagatatgcagtggatggttgataccgtaaacagcatggcgaacggtttcaccatgtgcaccggttcctacggcgtgcgtgctgacaacgatctggttgatatgatcaagcagttcggtccgcgtatttacttcacccatctgcgctccaccatgcgtgaagataacccgaaaaccttccacgaagcggcgcacctgaacggtgacgttgatatgtacgaagtggtgaaagcgattgttgaagaagaacaccgtcgtaaagcggaaggcaaagaagacctgatcccgatgcgtccggaccacggtcatcagatgctggacgacctgaagaagaaaaccaacccaggttactccgcaattggtcgtctgaaaggcctggccgaagttcgcggtgtcgaactggcgatccagcgcgctttctttagccgttaa

SEQ ID NO: 1994 - DNA, 1461 bp, Escherichia coli
atgactactattgttgacagcaatctgccggttgcccgcccgtcatgggatcattctcgtctggaatcacgcattgtgcatctcggttgcggggcgtttcaccgcgcgcaccaggcgctgtatacccatcatctgctggaaagtaccgacagcgactggggtatctgcgaagttaacctgatgccaggcaacgaccgcgtgctgatcgaaaacctgaaaaaacagcaactgctgtacaccgtggcggaaaaaggcgcggaaagcaccgagctgaaaattatcggttcgatgaaagaagcgctgcatccggaaatcgacggttgcgaaggtattctcaacgcgatggcgcgtccgcagacggcgattgtctctctgacggtcacggaaaaaggctactgcgctgatgcggcaagcggtcagctggatctcaataacccgctgatcaagcacgatctcgaaaacccgactgcgccgaagtccgcgattggttacatcgtagaagccctgcgtctgcgtcgtgaaaaagggctgaaagcatttacggtgatgtcctgcgacaacgtgcgtgaaaacggtcatgtggcgaaggttgccgttcttgggctggctcaggcgcgtgacccgcaactggcggcatggattgaagaaaacgtcaccttcccgtgcaccatggttgaccgcatcgttccggcggcgacgccagaaaccttacaggaaattgctgaccagctgggtgtttacgacccgtgcgccattgcctgcgaaccgttccgtcagtgggtaattgaagataacttcgttaatggtcgtccggactgggataaagtcggcgcgcagtttgttgcggatgttgtaccgttcgaaatgatgaagctgcgtatgctgaacggtagccactctttcctggcgtacctcggttacctcggcggctatgaaactattgccgacaccatgactaacccggcttatcgcaaagcggcctttgccctgatgatgcaggaacaagcgccaacgctgtcgatgccggaaggtacagacctgaacgcttatgcgacgctgctgatcgagcgtttcagcaacccgtctctgcgtcaccgtacctggcagattgcaatggacggcagccagaagttaccgcagcgtctgctggacccggtgcgtctgcacctgcaaaacggcggtagctggcgtcacctggcgctgggcgtggcgggctggatgcgttacacccagggcgtggatgagcagggtaatgccattgacgtggttgacccgatgctggcggagttccagaagatcaacgcgcagtatcagggtgcagaccgcgtgaaagcactgctgggcctgagcggtatctttgccgatgatctgccgcagaacgccgactttgttggcgcggtgacggcggcatatcagcagctgtgtgagcgcggtgcgcgcgagtgtgtggctgcgctgtaa

SEQ ID NO: 1995 - DNA, 774 bp, Escherichia coli
atgaaatctgccacctctgcgcaaagaccttaccaggaagtcggggcgatgatccgcgatctgatcataaagacgccgtacaatcctggcgaacggctgccgccggagcgtgaaattgcagaaatgcttgatgtcacgcggacggtggtacgtgaagcgctgatcatgctggagatcaaagggctggtggaagtgcgccggggtgccggtatttatgttcttgatagctcagacagccagaacacagacagtccggatgccaacgtctgtaatgatgccggtccttttgagctgttacaggcgcgtcagttactggaaagtaacatcgccgagtttgccgccctgcaggctacccgcgaagatatcgtcaaaatgcgtcaggcattgcaactggaagagcgtgaactggcttccagcgcgccgggcagcagcgaaagcggtgatatgcagttccatctcgccattgccgaagcaacgcataacagcatgctggtggagttattccgtcagtcctggcagtggcgggaaaacaatccaatgtggatccaattgcacagccatctggatgacagcctgtatcgcaaagagtggttgggcgatcacaaacagatcctcgccgcgttaatcaaaaaagatgcccgagcggcgaagctggcaatgtggcagcatctggaaaacgttaagcaacgtctgctggaattctcgaacgttgacgatatttattttgacggctatctgtttgattcatggccgctggataaagtcgacgcctga

SEQ ID NO: 1996 - DNA, 384 bp, Escherichia coli
atgatgcgccaatcagttcagacggtattacctgaaagtacaggaaacaatacgttatcgctgcgtgattccgtatgccgggatctctttcaactttttagttctccccattcaccgctaccaatattacttgtttcaggcatgcctgagtggcaagggcataatcagagcgacaagcttctccagagttggtattgccgccagttacgttccgcgcttttatttcatgagccacgtattgcggcattgcaggtcaatctgaaagaagcctattgccacgagttggccattagtctggagatgatgctgtaccacgatgatgagccgctaacgtttgacctggtctggcataaggggagctggcatcgcacgatgccgcagtaa

SEQ ID NO: 1997 - DNA, 2382 bp, Escherichia coli
atggttgccattgttattgtttctcatagtctacgtctcgcccaggggattgaggaattagcactacagatgtctggaggggacgttcctctggccattgctgcaggtattgatgatccgcaaaatccgattggcactgatgctattgccattatgtctgcgattgaatcggtctggtcaccggatggcgttctggttctcatggatatgggcagtgcgctgcttagtaccgagatggcgctggagctgctttctgaagagcaaagaagtgcaatttatctgctcgccgcccctgtagtggaaggtgccatgtcagcggtaacgtctgccgcagcggggctttcggtgacggagattatcgctgaagtggatcttgcgctgtgcgctaaacagcagcagctcatgccatccccgcctgcaggcgaggttattccagcaatatcaccagtcaatcattccggtgaatggcaaactttttgctggacgatatgtaatccccacggcattcatgctcgtccggcagccagcatcctgaaagtatcagcacaatattcggcaaacattatcgtcatcaaaggcgataaacgcgccagcacccgcagtctcaacgaactggcaatgctgggcgtccgctgtggcgatgaaatcatcttccaggccgaaggcaccgatgccagtgacgctctcaaggcaattgaaacgttggcgaaaaatcattttggtgaagctcacctgctcgcttcttcagagattccgctaacggaaacgccggtggtcagcgcccctgtcgatggcgcaatatcaggcttgtcagtacaaaatggtatcgctattggtcctgttaaatggtttacctgcgaacgaccagaaattacgcagcgcaccgtcgattctccgcaagaagagctgtcgcgaatcgagtctgctatcgacattgttgtttgtgaacttgccgataaagcggcaggccctgaaggcgatatttttgccgcccataaaatgatgcttgaagatccaaagattaaccggcaattacagcaacgtctggcaaagggcaaacaggcggaattcgcatggttagaagtcatgcaggcattagcagagcaatattgtcaggcggaaacactgtatttacgtgaacgcgaggcagatatccgtgaccttacacgtcaggtactgaaccagctttgcggggtaagtgaacaacactttatcactaccgcgccctgcattttgttagccaacgatctgttgccatcacagataaccagcctgaataaagcacacattcttggcatttgtcttcataatggcggaacaacttcacatacagcgatccttgccagagcaatgggtattcctgccattgtgaaggcagctattaccccgcaaaacgtccgcgataacgacacggtcattcttgatggtgaaacaggccgtttgtggctacagccggatgaggtcacccgcctggatttactgcaacgcgccgaagcatggcggcaacaaagggatcgtcagttagctgatgccatgctgcccgctgtcacgcaaggtgggcgaaaaatcagcgtgctggcgaatattggtgacctgcaagatattgaggctgcgctatctcacggggctgagggcgtgggtttactgcgcacagagtttttattccatgagtctgcaacattacccgatgaagaagagcagtttcgcgtgtattgttctgttgctcaggcttttggcgataaaccagtcaccatccgcactctggatattggcggtgacaagccattaccttcgtaccctttacccgcagaggacaacccgttcctgggacttcgcggtatccggttgtgcctggcgcatccgcaaatatttattccgcaattacgcgcacttctccgggccgggaaagaatacccaacgctgcaaattatgctgccgatggtttcaacgctcgaggaggtcaacgccgtcaaaacgctgatacaaacgcaggcaaaactgctgggacttactgcagaaaatcttccggcgctgggaattatgattgaggttcctgctgcagtcatgattgcagaaaaattagccagtgaagtcgatttcttttccatcggcaccaacgatctgacgcaatatattatggcggcagacagaggaaatagcaccgtcgcgaaactggtcgattattgtaatgacgcggtgattaacgctattgctatggtgtgtcaggccggacgtaatagtgaaattccggtcagtatgtgcggcgaaatggctggagatatccagcaaacagcacgactgctcaccatggggattgataagctcagtgccagtccatcccggcttccggccttgaaagcagcaatcagaacctcccactaa

SEQ ID NO: 1998 - DNA, 633 bp, Escherichia coli
atgaaaattcaaaacaaacatgttattgcctggctggagagttgtgctgcacatcttactgaacaacaagattttctaaccgcacttgacagagatattggtgatgccgaccacggcctcaatatgaatcgtggtttcagtgccgtgaaagcgacgttgcccgacattgaacgtcagcatattggcaatatccttaaaaatactggcatgaaactactttccagcgttggcggtgccagtggtcctctttacggcacattatttattcgcgcttctgcggcagtgggagccagaacagaattaactctggaagagtggctggcgtgtctggaagaagggattgcaggcgttatcgcacgaggaaaagcagaacaaggggataaaacactgtgtgatgtctgggttccagtcctccacgaagccaaaaagaacctgcaagccggaatgtcgccttcccttctgctgaatacgatggtgcaagatgcggcaacagccgtcgataacaccatcaatatgcaggcgaaaaaaggacgtgccagttatctcggcgctcgcagtgtgggccatcaggatccaggcgcgacctcctcctggctgatgattaaggctatgcaggaaggattcgcgggataa

SEQ ID NO: 1999 - DNA, 1065 bp, Escherichia coli
atgaaaaaattaattaaccagattgattctgttgtcacagaacaaatggaaggactcatcgccacctggccacacctgcaggcaaattacgcgccccgatatgtgtggtgcaaacaaaccgataatgcagtggcgctgatttcaggcggcggctcaggccatgaaccactgcatgcaggttttgtcggtatgggaatgttaaccggtgcatgtcctggtgaaatcttcacatcgcccacgccagatcaaatgatcgaatgtgccaaagcggttgataatggttctggcgttctgtttttcatcaaaaattacactggcgatattctgaatttcgaaacggcagtcgagatgttacacgaagaaggcatcgccgttgggaccgtcattattgatgatgatgtagcggtaaaagatagcctgtatacagccggacgtcgcggtgttgcgggtacagtttttgttgaaaagattgtcggtgcggctgcacttcagggatataacctggggcagtgcgagcaacttggcaaagatgttaacaatgccacccgttcttttggcatcgcactgtcagcctgtacggttcccgccgcgggaaaaccctcatttgaactggctgataatgaaatcgaatttggtgtcgggatccacggtgaacccggcattgaacgccgcactttgcaagatctgaacactttaatcgacagcgtgatagcgcaattactggataataccccctggcgacgcacattacgccattgggatcgccatgcggggggatggattgacgcatcatcaatgaatgagtcattcgatcaaaatgccgaatatattgtgttaattaacggacttggcagcacgcctgaatcagagttatatggtgtagccagggtatttatgtgcgccgcacagcgccagggaattaaaattagccgccagttggtcggtaattattgtacatcattagatatggccggattttccattagcctgctgaaatgtaccccagagtttttgcaactttgggatgccccagtcaatacgccagcgcttcgttggggatgttaa

SEQ ID NO: 2000 - DNA, 1083 bp, Escherichia coli
atggataagattattataagtccggctaaatatatccagggaaatggttctctggataatattgctacatatgcggcgagtttgggaacagaaccattaattattgcagatgaatttgtgaccggtctggtgggtgacagagtaagccagagctttgcaagagaaaacattattgcggattttgatgttttttgcggtgaatgctcgcaaaatgaaatttctcgaattcgtaagaaatttaatcagcgtaaatataatgtcgttattggtattggcggcggtaaaacgttggatacggcaaaagccgtagcgtattaccaaaaaattccggtagtggtggtgccgacaattgcttccacagatgcgccaaccagttctctggcagtaatttacaccccggaaggccagtttagcgaatatctgtttttcccgaaaaacccggatatggtgattatggatactggcgtcatttcagccgcgccagtgcgtctgctggtggccggtatgggagatgcattgtcaacctggtttgaggcgagagccaatcaggcgtcaggaaaagccacaatggcaggtggggcgtcgacactggcggcactggctattgcccgactctgttataccacgctactggaagatggctataaggcaaaagtcgcggttgaacaaggtgttagcaccaaagcggtagagaatattatcgaagctaatacctatcttagcggcattggatttgaaagtagcggcctggcggcagctcatgccattcataacggcatgacgcaactggaggaatgccatcattgctaccacggtgaaaaagtggcatttggcgtcctggtacagctcgtactggaaaacgcaccacaggaggaaattgaaaccgtactcaatttctgccatagcgttggtctgccgacaaatcttcatatgttaggcgtgaaggaaattaataaagataaattacgggcagtggctgaagccgcgactgctgaaggggaaactatccataatatgccattcgtggtcactgcgcaggacgttctttgcgcaattttaactgcacatcatttgggactttaa

SEQ ID NO: 2001 - DNA, 1269 bp, Escherichia coli
atgaccagtaactggaaacgttggatcacgctggcgttatgtggtattgccggaagtgcaatatataaattgccttatttacgggaaacctattacgacgcgatgcagcaggctacaggagcgactaatgctgaacttggttttctaatgacagcctatggtctggtgaactttttattatatctacctggcggttgggctgccgatagattttctgcacgtaaattaatgaccttttcattaatttccaccgggataagcggtttttattatgcgaccttcccctcgtatactatgatctgtttgttacatgcactttgggctgttacaaccgtatttacgttttgggccgtgtgtgtgcgaattattcgtaccctgggaaccagcgaagaacaaggacgcttatacggttactggtttctgggtaagggattaacctccattgtactgggatttctttccgtgccggtatttgccaaatttggcgaaggtgttgatggtttacgggcgacaattattttttattccgtagtgactattctggccggtgttttagcctggtttgtttgtcaggatgaaacacacagcgaagataaagcgaatttccgtctggcagatatggcattcgtgctgaaaatgccgacggtttggctggcaggtgttgtgaccttttgtatgtggtcaatttatatcggctttggcatggtcacgccgtatctcacgcagatcctgcatatgggcgaatcggaagtggcagttgccagtattcttcgcgcctatgtgttatttgcgatggggggattaattggcggacaactggccgaccgctgtgcgtcacgcacgcgttttatgatttacgcctttatcggcatgattgtctttactaccgtttatttcttcctgcccggtgagtcgagctacgtcacgattgcgctggcgaatatggttgcgttgggcgtgtttatttactctgcgaatgccgtgttcttctcaattattgatgaggttcggatcccggcaaaagtcacagggactgctgcgggtctgatctctttactgacctatttcccggaaatctactgctacacgatggtgggcaatatggtcgaccgcaaaccgggtattgccggttatcaggatgttttcctgttcatgttggtttgcgcattcatcggccttatcgccgcactggtcctccagcgtgtgaatcgtaaaagtaaaaatcaagtcaatgaaatcactcaaaacaatgcggattgcgcatcctga

SEQ ID NO: 2002 - DNA, 1365 bp, Escherichia coli
atggtggacatgattaatgaaagtgcacggcaaacgccagtcattgcgcaaacggacgttctggttatcgggggcggtccggcaggattatccgctgccattgcggcagggcggttaggtgccagaaccatgattgttgagcgctacgggtcgctaggcggcgtattgacgcaggtcggggtagaaagttttgcctggtatcgtcatccggggacggaagattgtgaagggatctgtcgtgagtatgaaggccgcgcacgagcgctgggtttcacacgaccagaacctcagtcaattagcgaagttatagatactgaaggatttaaagttgtcgccgatcagatgattacggaatctggcgttgagccgttatatcactcctgggttgtggacgtgatcaaggacggggatacgttatgcggtgttatcgtcgagaataaatcaggtcgaggggcaattctggcgaaaagaatcgtcgattgcacgggggatgctgatattgccgctcgtgcaggcgcgccctggacgaaacggagcaaggaccaactgatgggcgtcaccgtgatgttcagttgcgcaggtgttgatgtggcacgctttaaccgttttgttgcggaagaacttaagccgacctacgcggattggggcaaaaactggacgattcaaaccacgggtaaagaagacccgatgtttagcccgtatatggaggatatttttacccgcgcgcaacaggatggtgtgattccaggtgacgcccaggcgattgccggaacctggtcgaccttttctgaaagcggtgaggctttccagatgaatatggtgtacgcctttggttttgactgtaccgatgtcttcgatttaaccaaagctgagattgccggaaggcagcaagcattatgggcaattgacgcactacgccactatgttccgggctttgaaaatgtacggttacgcaattttggtgccacgctggggacgcgtgaatcacggcttattgagggggaaatacgtattgctgatgattacgtccttaatcaggggcgttgttcggacagtgtagggattttcccggaatttattgatggttccggttatctcattttgccaacgaccgggcgtttctttcagatcccttatggttgtctggtgccgcaaaaagtggagaaccttttggtcgccggtcgctgtatttccgcaggcgtagttgcacatacttctatgcgtaacatgatgtgttgtgccgttaccggtgaggccgcaggtactgccgccgtggtttcgctacagcaaaattgcaccgtgcgtcaggttgctatccctgatttgcaaaacacgctgcaacagcagggcgtacgtctggcataa

SEQ ID NO: 2003 - DNA, 225 bp, Escherichia coli
atgagggatgatgacctggagcacttaagtgccaattactggataaccacagttctctgcggcctctttttggggatattcctgttcatgctgcaacagcatcagcgtggtttagctctgtattgtattgcggctctttcacttatttgcgcctttttttctttacgcctttcccgacaattgcaacacatgaaaaaggaacggcgaaatattcgtcctcattga

SEQ ID NO: 2004 - DNA, 1542 bp, Escherichia coli
atgcactatttaaaaaaacgcttttctttgattgaactgaatgtgtttatcccagcaatattatttattgcggtaatcattctgtgtttgacgatatatccacaagataccagccggtatataaataaaatacatcattttttaacctgggaaatgggcgggatttttctggtcatgacttttctggttgtactttgttgtctgtggctggccttctcacgttatggcgatatcttgttaggtcagtcgggagaaaaacctgacttcagcttgttaacctggcttggacttatttttacttctggaacggggggcagcttgttatatctggcctctgtagagtggatttggatcattcagcaaccgccttttggcgcaacagcaggaagcgctcaggctgctcgttgggcctctgcttatggcatgttccattgggggccgtccgcatgggcatggtatttgatttgcgccgttcctattggttggtttatgcatgttaagaaaacaaactcattaaaggtcagtgatttatgtcgtggatgtttgggagcgcgtgcggatggtttttgcgggcattgtgtgaattttttctacatgtttggtttgctcggcggcgcggtaacgtctctggcgctgggaacgccgatgatttctgccgtattttgccatgtgtttcatctggatcctgccgggcagtttatcaatgtcatggttatttttatctggacgctagtaccattattcattctcttttttggacttaaaaaaggtgtggcatgggccagtaactggaatattcgtgctgacattttgatgctactggcaatactgatttgtggaccaacggcatttatacttaatcaatcaattgatggtctcggcctgatgctgcaaaattttgtagcgatgagtttaagtaccgatgctattggtcgtagcggatttccacagatgtggaccgtattttatttttcatggtgggtcgtgtatgccatcccattcggtttatttatcgcccgtatttcaaaaggaaggacgatccggcaattgattgtatgtggaactctggcaggttcattgggatgcatggttttttacatggtactggctaatttcggcttatcgttgcagacaactcatgtcatcgattttgttcccatacttaacgaacaagggcgaggcgttgtcgtttctcgtttactggagcagctacccgcaagtcaggtgtttttggttgcttttggggctatagcattaatttcatatattaccggacactgtactgtgggttatgccctcggttttgcgacgcaaaaacgggcagatagtgagagtgaaccggcattctggaacgtggcattttggttgattatgactggaatcgtcgccatcacactctatcttcttgatgcgcaaagtctgcaaccgctacaaacggtctctatcctggccggactaccgctttgcggcgtagtgtttattttattgaagagttttttgacacagcttgcggctgaagagaaaaccgcgagagatgaataa

SEQ ID NO: 2005 - DNA, 1143 bp, Escherichia coli
atgaagatagttatctcccccgactcctttaaagaatgccttcctgcatggaaagtcgccgaagcgctggcaaccggctggcgcaaggtcctgcctggcagccaactggtgtgtttgcccgtggctgacggcggcgaaggcacgctcgaaacactcattcatgcgactgacggtacgttttacactaaaaaagtcaccggaccgcttggcgaatcaatacatgcgcaatacggtattttaggcaaccaaaccaccgcagtgatagaactggcacaagcttcagggctggaactggtttctcctgtcctgcgttctcccctttatacgacgtcgtttggcactggcgaacttattctcgccgccctggaacacaatattgataccgttattctatgcctgggtggcagtgctacaaatgatggcggtattgggttgatgtcggcacttggcgcatcgtttacagacgccgaagggctatcagtctctgttaatgggatggggctggcggcaattcaccacattgacttacagcacctcgatccacgattgaaaaatgtgaaatttattgcagcctgtgatgtcaccaacccactaaccggcgataacggcgcgacccgggttttcggtcaacaaaaaggggccagtgctgacgaccttgagcaactggaacagggaatgaaaaactatgcccgttgcatctaccgttgttgtggtaaagacgtcgatacgatacccggttctggggcggctggcggcgttggcgcggccttgatggcttttctcgatgctcgcttacaaccgggtatttcgctcgtgctggaagcgattcaatatacccaacatttaaaatacgcagcattggccattgtcggtgaagggaaattagatagtcagagcctgaatggcaaagcgcccgtaggcgcagccaaagttgcccagatgatgggcgttccggttatcgcaattgccgggtatatcgatgatcaacttgatctgaatgagttacgccagtgtggaatagaagcctgtttttccgtcgtcaatggtccttgtgatttacccaccgcgctgagtcagggagaaaataatttaattcgtcttggggaaaatctggcgggatattttcgtgcgatcctgagttaa

SEQ ID NO: 2006 - DNA, 888 bp, Escherichia coli
atgaatattggatttatcggcaccggcataatgggtaagccgatggcttataatttacaacaagccggacatactctttatttttcagcgcattttgaacctgcaccgcaagagcttattggtgaacgtggcattgtttgctctacaccgcgtgaagtcgcgcaggagtgtgaggtcatcatcaccatgctccctgataccccacatgttgaggatgttctttttcatcccaactatggcgtaatacatggtttaagccacgggaaaattgtgattgatatgagttcaatttccccggttgccaccaaagcatttgcacaacgtattatcgcgggaggcgcggaatatatcgatgcgcccgtctctggcggtgaagttggcgcgaaagccgggacgctttccattatggttggcggatgtgaagaggtttatttgcagatcaaaccgattctggaattgatgggtaaaaatatcactctggtcggtaacgtcggtgatggtcaaacgtgcaaagtcgctaaccaaattattgttgcactgaatattgaagcggtggctgaagccctgctctttgccagtaaatcaggtgccgatcccgcccgcgtacgtgaagcgctgatgggagggtttgcctcctctcgcgtgctggaagttcatggcgaacggatgattaaaggaacattcgaacccggttttcgtattagtctgcatcaaaaagatctgaatctggcgctggagaatgcccgcctgttgaataccccgcttcctaacacggcgacgacacagcagttatttagcgcctgcgccgcgctcggtggtaaagagtgggatcattctgcgttaattcgggcgcttgaaacacaagccaatttcactatccgtaaataa

SEQ ID NO: 2007 - DNA, 783 bp, Escherichia coli
atggcaaagtttgcagcgaatttatcaatactttttaccgagcatccatttattgaacgttttgcgcaggcaagtcacgcaggattccacggcgttgaatatctttttccctatgacttttccactgacgagctggcttcgcaactgcatcaacataatctgacgcaggttttgtttaatcttcctgcgggtaactggcaagagggtgaacggggtattgcatgtcatcctggtcgggcaaaagaatttcaggagggtgtttgcagagcgatagaatatgcccaggcccttaattgttcacaagttaattgccttgcaggaaaacatccaggtggttattcgcatgaacaatgtcatgaaacactggtcgaaaatttgcgctatgcagtagataaattggcttctcatggcataaagttagttctggaagccattaatacaaaagatattcccggtttttttgttaacaacaccagacaagctctcaatattattcatgatgtaaatcatcctgattttcgctatcaatacgatatttatcatatgcaaatcatggaagggaatattgctacaacaatcaaaaacaacctgaataacattggacatattcaattagccgataaccctgggcgtcatgaaccagggacgggagaaattaattacccgtggttgttaaattatatagaccagattggttatcaggaatggattggttgcgaatatgttccatctacgacaacgactgaaagtctacgctggctaaaaaacgagactcaattttaa

SEQ ID NO: 2008 - DNA, 1740 bp, Escherichia coli
atggcgaggatgcgtgcaatcgaagctgcagtagaaatactgaaaaaagaaggcattagcgttgcttttggtgtacccggcgcagcaataaacccactctatgccgcgatgaaaaaatcaggcggtattgatcatattctggcccgtcatgttgagggcgcctcgcatatggctgaaggttacacccgcagtcagaatggcaatattggcgtgtgtattggcacatcaggccctgcgggcactgatatgattaccgggctgtattctgcctctgcggattccattcctattctctgcattactggtcaagctcccgtaggaaaacttcataaagaagatttccaggccgtcgatattgaggctatcgccacgccagtaaccaaaatggctcgcacaattctcgaagcgggtcagttgccggggatattccagaaagccttctgggaaatgcgttcaggccgccctggcccggttcttttagatctcccttttgatgttcagatgaccgaaattgagtttgatatcgatctctatcagccactaaccccctggcaacctcaggcaacacgggcccaggcagtacgcgcattagaaatgctaaatgacgccgaaaagcccgtcatcatcgctggcggtggcattattaacgccgaagcgagtgaattgttgcgtgagtttgtcgagttaactggcgttcccgtcattcaaaccttacgcggttggggcgctttatcagacgatcaccccctaatgattggtcgcatgggatgtcaggcgggtcatcgctatggtaacgccagttatcaggcctcagattttgtttttggtatcggtaaccgttgggcaaaccgccataccggagccattgagacctacaccgaaggccgcaaattcattcatgttgatatcgaacctgcacaaattggccggatatttgcgccggatctgggcattgtttctgatgctgaaagcgccttaacgctatttattcaggtcgcccgtgatatgaagtcacgtggagaactgaaagaccgcagtcgctggattgccgaatgtgccgagcgtaaacgcacaatgcttcgtcgttcagactttgactgcaatccaattaaaccgcagcgcgtgtatcacgaaatgaataaggttttcggaccggagacacgctatatttcgacaattggtctggcgcaaatcgccgcaaaccaatttttacatgtttaccgcccacgccactggattaatgcctgtcaggctgggccgctaggctggacaatgcccgcagcactgggcgcggtaaaagctgatccatctgttcccgttgtggcaatatccggtgattacgattttcaattcttgattgaagaattagccgtcggcgcacaatttaatcttccgtatatccatattttacttaacaacgcttatcttggtttgattcgtcaatcacaacgtgcatttgatattgattattgcgttcaactgtcatttgaaaatattaatgctccagaaattaatggttatggcgttgatcataaagctgtggttgaaggattaggatgtaaagcgattcgcgtattcgcatcacaggatattgcgcctgcactgcaagaagcccagcgtttgcgtgacgaatttcacgtacctgttgttgtagaaattattactgaacgcgtgactaatatcgctatgggacctgacattaataaagtcacagaatttgaagaaactctcgacttataa

SEQ ID NO: 2009 - DNA, 1935 bp, Escherichia coli
atgaataaagagtcgtatcataatgatctaaaaaataaatggaaaatgtttgttaagcatggttgggtcgcgacaaattcgactaatcatgtgatgctgaggtcatggcaaaaatgtctcaagcattgtgaccctcgccactggaacatgcctgtcaaagcttccgggcaaacattgcagacgattttttctcgtaacgaagagtttattagaatttcacaaagagttgttgaagaccatttcaccctggctggtgacgaccggttggcatttttgatcattgatccacacggctgggttctatcgttgaatgcagcaggcgattattccagtcaattgcgagagttaggaattgaatctggtatgtcatgggccgaagatggcattggaaccaatgtatatagtctttgtcgggaaacaaatttatatacacaactggaaggagcagaacattttagtgaacagctacattgttatgcgatgagcgctgctccggtcattgattattatggtaatatacatggatacattgtatgtataattgaaaccaccgccgagcttgttaaattaaaaacatcatattcatgtgcaacagaaatcgctaattatatctatattgagaatgaacaaaagttaataaacaaagtactttgccagcataatgctgtgattgaatgtatggatgacggttttatttgttggaatagtcattctttaattacgatggttaattctcaagcacaaacattactgaatattgataaagaaagtttaattggtcagaacatccgaaaaggattcgtatttccgccgattttgaatgaggcaattacacaacgaaacaaactatcgcaaaagcaaattgtcctcgaatgccgtggcgaatttattgaacttatggttacccttcgcccgttaagcgatggttcgtttttgctttttcttcatccattagacaaaatcaggaaaatagcccaacagcaaataagcactaatgcaaattttacctttgacagtttacatgcggcttcaggtggtatgaagcaggtattacttatcgctcgccgggcaattaaatccatctctccgattttgatcaatggcgaagaaggtgtgggaaaattgagtttggcgatggcaatacataatgagagcgagcaacgtgatgggccatttatttctgtagattgtcagatgctatcaccagaaaatatcttacacgaacttcttggctctgatgttggcccttcgccatcgaaatttgaactggctcataatggcaccttatatctggataaagtcgaatatctctcaggggaagttcagagtgttttattgaaagtattgaaaacggggcttgttactcgctcagacagccatcgtttgatccccgtacgctttcgcctgattacatgtaccagtagttctttacgtgagtacgtgcaacaaggggcttttagccgacagctatattatgagatctccatgaatgaaattgaaattccgccattgcgcaaacgtcgtgaagatctcaagcaaatgattgacgatattattgataagtatcaggagcgcactcgaaaaaaaatgacaatcacgcctgacgcaaattcagttctgcttgagtaccgttggcctgggaacatctccgagttcaaaaatcgaatggagaaggtatttattaactgcaatcgacttgtactcgggttagagaatattcctctggatatccgacaaaataatagtagtggcgacgatgatatccctcatcttacttcactggcagaattggagatgcaagctattgagcatacatgtcgtgtctgcgaatggaatctaactaaagcagctgaagtattaaaaattggtcgtacaacattatggcgcaaacttaagatctataatctctatccaaatgttgagcatgcagattga

SEQ ID NO: 2010 - DNA, 1371 bp, Escherichia coli
atggaattttatctggaacccgctcgtaatatacctgtgctggcaaccacggaagtgttagttgttggtggtggtccatcgggtattgccgcagcaatgagtgccgctcgtgaaggcgcagctactatgctgattgaacgtttcggttgttttggcggaatgatgacaacggctggcgtcgagtcaattgcctggtggcgtcatgaaaatacggtagagtcaggtggactggcacgcgaaatagaagaaacggcaaaatcaatgggggcgtccagccctgagccgcaatcgaatagtcaggctattaacgccgagcgtttcaaactggttgcggatgcaatgcttgaacaggcaggtgtgcgccgcgtactacacattaccgccgttgatgttatcaagcagggcaataatttactcggcgtaataacagagagtaaatctggtcgtcaggctattttggcaaatgtcattattgactgtactggcgatgctgatattgcatggtttgccggagcaccatttactaagcgtgaacgcgaagagctaatgtgtatgacaaccgtttttagttgcgcaaatataaataaaaatgcgttcatgcaaaatattaagagcacggaacctaaatatggagactggggggcggatgaagaaaataaaaactggtcttatgatgttcatgaatcttgtcgcgatatgtttagcccttatctgggtaaagtctttgcgaaaggaaagtcggcaggaattattccaaaagatgtgacattaggcggttcctggagtacggtcaccgagtatggtgatgcgaattatttgaatgttgttagcatccccgccgttgattgtacagatgtttttgacctgacgcgtgcagaaatagaaggtcgcaagcaagccatgcaggcgattgaagcgttgcgtcaattccagccaggatttgaacaggcgcaattaaaaaatttcggtatgacggtgggaacaagggaatcaagacatattattgggcgagtccagcttacggaaaatgatatttgtaatgagggacgtcatgcggattcaataggggtattccctgagtttatagatggaaatggtcatcttaaattacctcttgaagcgaactattttcaaatcccttatggcgtaatgattccgcagcaagttgaaaacctgttggtttgcggacgggcaatcgatgcagataatttcgcctacgcgacaatccgtaatatggggtgttgtattgtcactggagaaggtgcagggactgccgctgctattgccattaaaaataacactaccgtttcacaggtagatattcagacggtacaggaacgcttacagcaaaatggcgtaaaagtcttttaa

SEQ ID NO: 2011 - DNA, 1404 bp, Escherichia coli
atgagagaaaaacccagtttttatgtcgcgcttacaccgatcatttttatgatgatcgtgttggttgttggcatcggtgttatgggctggcctgccagcgtctgtttattaatttcagcggcgttttcctgcattattgcaatggctaagctgaaatatacctgggatgaaatccagaggtttattatcgataagatttcggcggtgatggcaccagtacttatcgttattttcgttggctttatggtcgcgacatggagctatgcaggtacactgccgatgctggtttattacggtatgttactggttgcgcccgcatggctttatgccatagcgttttttctgaacgcagtattgtcctatgtttccggggcatcatggggatctgtcgcttctattggtgttgcattaatgggcatcggttccggcttacatgctgatcttccaattctggcggcagccattgttaccggggcttattttggcgacaaactttcaccgttaagcgataccactaacctgacttcagcagtaactaaaactaaactttatgatctgattaagtatctactctggacgaccatcccatcaacgattattagcctgctgttttttacctggctgggaatgattcatacttctacgggctctatttcaccagaaagcatgcagatgctggtacagctcaaagagttatataagtttggtctgttaccgctactgcctatgcttattgttctgtgctttacctttttgcgtttgcctacagtaccggcattattaagcagtgcgttcgtggccgtattggttggatggctgtatcaaggtttcccgctggccgaaggtattaaggccacaatgagtggtttccgtctgacgatgatcactgattcaacgacgctgttaccttctgtgaaagaactgcttgaacaaggaggcctgaataatcagggcggattcctgtcatttattatctgcgccatgatgtttgctggcatcctgacgggaacaggaatgatggatgtcacattacaaagtgcggcaaacaaaataaaaagtgcctttggcgctattctggcaagcggtgttttagcgatcatcattaacttacttaccggttctgatggtttgaataagattgttatatctgaattgatgatgaagaaattcgaagatcttaatttatcaccgttagtcttagcccgaacgctggaagattttggcaccatgagcgcgccaattattccgtggtcagctgccggattgtatatggcgacaacactaggcgtgccgacgtttagttacttgccgtactgtgtattctgtttctgctcgatgatatttgcgttgatctatgcttctacaggtttccgtttactgcgcttcaacgaagcaaaggcctga

SEQ ID NO: 2012 - DNA, 957 bp, Escherichia coli
atggacgtagaatgcccgcaagggcggctgacagagtataacgtaatggatgactgtggtgcggttttgcataacattgaaaccaaatggctttatgattttctgaccctggaaaaatgtcgcaatttttcccaggaggcagtcagtcgcaacgtctcgcaaccagcattcagccgccgcatccgtgcactggaacaggcgattggtgttgaattatttaaccgccaggtaacgccgctgcaactctcagaacaagggaaaatcttccattcgcagatccgccatctgttgcaacagttagagagcaatctggcagagctgcgtggcggcagcgattacgcgcaacgtaaaatcaagatagccgctgcacactctctttccctcggtctgttaccgtccattatcagccagatgccgccgctctttacctgggcaattgaagctattgatgttgatgaagcggtcgataaactgcgtgaagggcaaagtgactgtattttttcctttcacgacgaagatttgctggaagcgccgtttgaccacatccgcttatttgaatctcaattgttccccgtctgcgccagtgacgaacacggagaagcactttttaacctcgctcagccacactttccgttactgaattacagccgcaactcctacatggggcgattgattaatcgcaccctgacgcgccacagcgagttaagtttcagcaccttttttgtctcttcgatgagcgagctattaaagcaggttgccctcgacggatgtgggattgcctggctgccggagtatgccatccaacaagaaattcgcagcgggcagctcgttgtactgaatcgggacgaactggtgatcccgattcaggcctatgcataccggatgaatacccgcatgaatccagttgccgaacgcttctggcgtgaactgcgcgagctggagattgtgcttagctga

SEQ ID NO: 2013 - DNA, 1173 bp, Escherichia coli
atgattgattattccgcagccggttttaccctgctgcagggagcgcatttgtatgcgccggaagatcggggaatttgcgatgtcctcatcgctaacggcaaaattattgccgttgccagcaacatcccttctgacattgtaccggactgcacggttgtcgatctcagcgggcagatcctctgcccaggttttattgatcaacacgtccatttgattggtggtggcggcgaagcaggtcccacgacacgcacgccggaagtggcgttaagtcgtctgacggaagcgggcatcacgtcagtggttggcctgctgggcaccgactctatctctcgccacccggaatccctgctcgccaagacccgtgcgctcaatgaagaaggcatcagcgcctggatgctgaccggcgcttatcatgtcccttcccgcactattacgggttccgtggaaaaagacgtggcgattatcgatcgcgtgattggtgtgaaatgcgccatctctgatcaccgttctgccgcaccggacgtttatcacctggctaatatggcggcggaatcccgcgttggcggtttgctcggcggtaaacctggcgtcaccgtgttccacatgggtgacagcaaaaaggcgttacagccagtctatgacctgctggaaaactgcgatgtgccgatcagcaagctgctgccgacccacgttaaccgcaacgttccgttgtttgagcaggcgctggagttcgcgcgcaaaggcggcaccatcgacatcaccagcagcattgacgaaccggtcgcccctgccgaaggtattgcccgcgccgttcaggcgggtattccgctggcacgcgtcaccctcagctccgacggcaacggtagccagccgttctttgatgacgaaggaaatttaacccatatcggtgttgcaggttttgaaacattgctggaaaccgtgcaagtgttggtcaaagactatagcttcagccttagcgatgccctgcgcccgctcaccagtagcgtagccggtttccttaacctgaccgggaaaggcgaaattctgccaggcaatgacgcagacttactggtcatgacgcctgaattgcgcattgagcaggtatacgctcgcggcaaactgatggtcaaagacggcaaagcctgcgtgaaaggaacgtttgaaacggcataa

SEQ ID NO: 2014 - DNA, 462 bp, Escherichia coli
atgacaactcaggtccgtaaaaacgtcatggatatgtttattgatggcgcgcgccgtggctttactatcgctaccaccaacctgctgccaaacgtggtgatggcctttgtcatcatccaggcgctgaaaattactggcctgctcgactgggtgggacatatctgtgaacccgtaatggcgctgtggggattgcccggtgaagcggcaaccgtccttttagccgcattgatgagcatgggcggcgcagtcggtgttgccgccagtctggcaaccgctggcgcattaaccggccacgatgtcaccgttttactgcccgcgatgtatttaatgggcaacccggtgcaaaatgtcggtcgctgcctggggacagccgaagtgaatgccaaatattatccgcatatcattacggtctgcgtgattaacgcattgctgtcgatctgggttatgcagcttattgtttaa

SEQ ID NO: 2015 - DNA, 684 bp, Escherichia coli
atgacacaacaaggggatgctgtagctggggagctggcgacagaaaaagtgggtgttaaagggtatctggccttttttctcacgattatctttttttccggagttttttccgggacagacagttggtggcgcgtttttgacttttccgttctgaacggatcgtttgggcaactgcctggtgcgaatggcgctaccacctcgtttcgcggcgcaggtggcacaggagctaaagatggctttctcttcgcactggaactggctccgtcagtgattctctctctgggaattatctcgattaccgatggtcttggcggattgcgcgccgcgcagcagttaatgacgcccgtgctaaaaccgttgttgggcattccaggcatctgttcactggcgctgattgctaacctgcaaaacaccgatgccgccgcaggtatgaccaaagaactggcgcaggaaggggaaattaccgaacgtgataaagtgatattcgccgcctatcaaaccagcggtagcgccatcatcaccaactacttctcttccggcgtcgcggtgtttgcctttctgggcacgtccgtaatcgtacctttagccgtcatcctggtgtttaaatttgtcggagccaacattttgcgcgtctggcttaacttcgaagaacgtcgcaacccaacgcaaggagcgcaagcatga

SEQ ID NO: 2016 - DNA, 360 bp, Escherichia coli
atggcaaaatacaacgacaaagagctggcagagacgagcaagtttttaagttttgtcctccgacataaaccagaggcgattggcatcgtgctggaccgtgaaggatgggcggatatcgataagctcatactctgtgcccaaaaagcgggcaagcggttaacccgcgcattactggatatcgttgtcgccaccagcgataaaaagcgctttagttattccagtgatggtacgtgtattcgcgccgttcaggggcatttgacttcgcaggtcgccattggcttcatcgaaaaaacaccgccacaatttctctaccacggtacggcaagccgttttcttgacgagataaaaaacaagggctga

SEQ ID NO: 2017 - DNA, 174 bp, Escherichia coli
gtgcatctctctgctgatgaagcaacggcacgcaaagtaggagcaagacacggatcgccagttattttaaccgtcaaagcacaggaaatggcgaaacgaggcatccctttttggcaagcggaaaacggggtctggctgacatcaacggttgcggttgagtttcttgagtggtaa

SEQ ID NO: 2018 - DNA, 1179 bp, Escherichia coli
atgccttcgtccacgcatcccgtagaacgcttttctttcagcaccgcgcttttcgggatgctggttctgaccttaggtatgggtttaggccgcttcctttatacgcctatgttgcccgtcatgatggcggaaggatcgttttcatttagccagctctcgtggattgccagcggcaactatgcggggtatctggctggcagtctgctattttcttttggcgcatttcaccagccatcgcgcctgcgcccatttctgttggcttctgccctggcgagcgggttgttgatcctcgcaatggcatggttgccgccatttattctggtgttattgattcgcgtcctggcgggtgtcgccagcgccggaatgctgatttttggttcgacgctgattatgcagcacacgcgccatccttttgtgctggcagctttgttttctggcgttggcattggcatcgcactgggcaatgaatatgttctggcaggcctgcattttgacctctcctcgcaaacgttatggcaaggcgccggggcgctttctggcatgatactgattgcacttacgcttttaatgccctcgaaaaaacacgccatcgcaccaatgccattggcaaaaacggagcaacagataatgagctggtggttactggctattctgtacggcctggcgggatttggttatatcatcgtcgcgacttacctgccgctcatggcgaaagatgcaggctcaccattgttaaccgcccatctctggacgttagtcggcttatcaattgtgcctggttgctttggctggctatgggcagcaaaacgttggggggctttgccctgcctgacggcgaatttgctggtgcaggctattagtgtgttgcttactctcgccagcgactcgcctctcttgcttatcatcagcagtattggttttggcagtacctttatgggcacgacatctctggtgatgactatcgcccgccaactgagcgtaccgggaaatctcaatcttttaggctttgtgacactcatttacggcattgggcaaatcctcggcccggcgctaaccagtatgcttggcaatggaacatcggcgcttgccagcgccactctctgcggcgcggcggcgttgtttattgctgcgcttatcagcacagcgcaattatttaagctgcaagtggttacttcatga

SEQ ID NO: 2019 - DNA, 972 bp, Escherichia coli
atggtggctggcgctgcattgcacattacgggatttctccgcgttaaggattcattaagatcgctacgtatacttctcgatatcttattgatttgccttaaagggattaccgtgacaaaaagtatttcgttaagtaaacgcatcttcgttattgtgattctttttgtcattgtggcagtgtgtactttcttcgtgcaatcttgcgcccgtaaaagcaatcatgcagcatcatttcagaattaccacgccaccattgacggcaaagaaattgcaggcataacgaataatatctcttcgctgacctggtcggcacaaagcaatactctttttagcactatcaacaaacctgccgccattgttgaaatgaccaccaatggtgatttgatccgcacaattcctctggattttgttaaggatctcgagacgatcgaatacattggcgataatcagtttgtcattagcgatgagcgcgattatgccatttatgtgatttcactgaccccaaactcggaagtaaaaatcctcaaaaaaataaaaatcccgctgcaggaatccccaaccaattgcggttttgaaggattggcctattctcgccaggatcacactttctggttttttaaagagaaaaacccgattgaggtctacaaagttaacgggctattaagtagcaatgaattgcatatcagcaaagacaaggcactacaacggcaatttactttagatgatgtgtccggcgcagaatttaaccaacaaaaaaatacgcttctggtgctgtctcatgaatctcgcgcactccaggaagtaacgctggttggcgaggttatcggtgaaatgtcactaaccaaaggcagtcgaggtttgtcgcataacatcaaacaggccgaaggggttgcgatggatgcctctggtaatatttatatcgttagcgaaccaaatcgtttttatcgctttacccctcaatcatcgcattaa

SEQ ID NO: 2020 - DNA, 258 bp, Escherichia coli
atgaaagagtatctgtttttatttcactccacggtcggcgtcatacaaacccgcaaggcgttgcaggcagcgggcatgacttttcgcgtcagcgatattccccgtgatttacgcggcggctgcgggttatgcatttggctgacctgtccgcctggcgaggaaattcaatgggtgatccctgggcatacggaatcagtttattgtcagcaggatggtggctggcgctgcattgcacattacgggatttctccgcgttaa

SEQ ID NO: 2021 - DNA, 768 bp, Escherichia coli
gtgacatattcgattggcattgattccggctcaaccgccaccaaagggatcttactggctgacggcgtgattacgcgccgtttcctcgttccaacatcctttcgcccggcaacagcaattactgaagcctgggaaactctgcgcgaagggttagagacaacgccgtttctgacgctcaccggctacggacggcaactggtggattttgccgataaacaagtgacggaaatctcctgtcacgggctgggcgcacggtttcttgagccagcaacgcgcgcggtaatcgacatcggtggtcaggacagcaaagtgattcagcttgatgatgacggtaacctgtgcgatttcctgatgaatgacaaatgcgcagcgggcaccgggcgtttcctggaggtgatctcgcgcacgcttggcaccagcgtcgagcaactcgacagcattaccgaaaatgtcataccgcacgccatcacgagtatgtgcacagtgtttgctgaatcagaagtgatcagcctgcgctctgcgggcgtagcgccagaagcgattctcgccggagtgattaacgcgatggcgcggcggagcgccaatttcattgctcgtctctcctgtgaagcgccgattctgtttactggtggcgttagccactgtcaaaggtttacccacatgctggaaagccatctgggaatgccggtacaaactcaccctgatgcgcaattcgctggtgcaattggcgcggcggtgatcggtcagcggcagagaaaacgcgcatga

SEQ ID NO: 2022 - DNA, 1152 bp, Escherichia coli
atgtcacttgtcaccgatctacccgccattttcgatcagttctctgaagctcgccagaaaggctttctcaccgtcatggatctcaaggagcgcggcattccgctggttggcacctactgcacctttatgccgcaagagatcccgatggcagccggtgcggttgtggtttcgctatgttccacctctgatgaaaccattgaagaagccgagaaagatctgccgcgcaacctctgcccgctgattaaaagcagctacggcttcggcaaaaccgataaatgcccctacttctacttttctgatctggtggtcggtgaaaccacctgcgacggcaaaaagaaaatgtatgaatacatggcggagtttaagcccgttcatgtgatgcaactgccaaacagcgttaaggacgatgcctcgcgtgcattatggaaagccgagatgctgcgcttgcaaaaaacggtagaagaacgttttgggcacgagattagcgaagatgctctgcgcgatgccattgcgctgaaaaaccgcgaacgtcgcgcactggccaacttttatcatttggggcagttaaatcctccggcgcttagcggcagcgacattctgaaagtagtctacggcgcaaccttccggttcgataaagaggcgttgatcaatgaactggatgcaatgaccgcccgcgttcgtcagcagtgggaagaaggccagcgactggacccgcgcccacgtattttaatcaccggctgcccaattggcggcgcagcagagaaagtggtgcgcgcgattgaagagaatggcggctgggttgtcggttatgaaaactgcaccggggcgaaagccaccgagcaatgcgtggcggaaacgggtgatgtgtacgacgcgctggcggataaatatctggcgattggctgctcctgtgtttcgccgaacgatcagcgcctgcaaatgctcagccagatggttgaagaatatcaggtcgatggcgtagttgatgtgattttgcaggcgtgccatacctacgcggtggaatcgctggcgattaaacgtcatgtgcgccagcagcacaacattccttatatcgctattgaaacagactactccacctcggatgtcgggcagctcagcacccgtgtcgcggcctttattgagatgctgtaa

SEQ ID NO: 2023 - DNA, 1281 bp, Escherichia coli
atgaataaactcattgaactcagacgcgccaaaatgttggcgctctctttactgcttatcgccgctgctacctttgtcgttacgctgtttttgccgcccaatttttgggtgagcggcgtgaaggcgattgctgaagcggcgatggtcggcgcactggcggactggtttgcggtggtggcgctgtttcgccgcgtgccgattccgatcatttctcgtcatacggcgattatcccgcgtaataaagaccggattggcgaaaatctcggccagttcgtgcaggaaaaatttctcgatacccaatcgctggtggcattgattcgacgtcacgaaccggcgttgttgattggcaactggtttagtcagccggagaacgcccgccgcgttggtcagcatctgttacagatcatgagcggttttctcgaactgaccgatgatgcgcgtattcagcgcctgcttaagcgcgcggtccaccgggcgatcgataaggtcgatctttccggcaccagcgcactgattctggagagcatgaccagaaacgatcgtcatcaggtgctgctcgatacgctgatcgcacagttgatcgcccttctccagcgcgataaatcgcgcaagtttatcgcccagcaaattgttcgctggctggagagcgagcatccactgaaagccaaaattttgcccactgaatggctgggcgaacatagcgcggagttggtttctgacgcggtgaattctttgcttgatgatatcagccgcgatcgtgcgcatcagatccgccatgcgtttgatcgcgccactcttgccctgatcgacaagctgaaaaacgatccggaaatggcagcgcgagccgatgccgtaaaaagctatctgaaagaagatgaagcttttaaccgctatctcagtgaattgtggggggatttacgggaatggctgaaagcggatatcaacagtgaagattctcgtgtgaaagaacgtatcgcgcgggcgggtcaatggtttggcgaaacgttaattgccgatgatgccttgcgggcgtcgttaaatggtcatctggaacaagccgcacaccgcattgcgcctgagttttccgcattcctgactcgccatatcagcgacacggtaaaaagctgggacgcacgggatatgtcgcggcaaatcgagttaaatatcggcaaagatctccagtttatccgtgtcaacggtacgctggttggcggttgtattggacttattttgtatttgctgtcgcagctcccggccttgttccccctcggcaatttatag

SEQ ID NO: 2024 - DNA, 921 bp, Escherichia coli
atgacaaactttacgaccagcacgccgcatgacgcattatttaaatcctttctcacacactctgacaccgcgcgggattttatggagatccacttacccaaagatttacgtgaactgtgcgatctcgatagcttaaaactggaatccgccagctttgtcgatgaaaaattgcgggcgctacattccgatattctgtggtcggtaaagacccgtgaaggcgatggctatatttatgtagtgattgaacatcagagccgtgaggatattcatatggcctttcgtctgatgcgatattccatggcggtgatgcagcgccatatcgaacatgataaacgccggcagctaccgctggtcatcccgatgctgttttatcacggtagccgtagcccttatccctggtctttgtgctggctggacgaatttgccgacccgactaccgcacggaagctttataccgccgcgttcccgctggtggatatcactgtcgtgccagacgacgagattgtgcagcatcgcagagtcgccctgctggagttgatccaaaagcatattcgccagcgcgatctaatggggcttattgatcaactggcagtattactggttacagggtgcgctaatgacagccagataaccgcgctgttaaattacattttactggctggcgatgaagcgagttttaaagagtttatcagtgaaattacccgtcgactgccacaacaaagggagcgaataatgacgattgcagagcgaattcataatgatggatatataaaaggggaacagcgcattcttcgattgtttttgcagaatggggtagatcctgaatggatacaaaagattaccggactttcggcagagcaaatacaggcattagagcagcccttgcctgagcgtgagccttattcatggctcaagagctaa

SEQ ID NO: 2025 - DNA, 2157 bp, Escherichia coli
atgtcacctcgtcagataaggggttattattgcgaaatcatcgcttcacggaaagacgtcagaatgaaagctacagaagcccgcctactcgattttttaaaacgttcgcagcagtttgttattcccatttatcaacgcacctattcatggaccgggcaacaatgtcgtcaactttgggacgatatcattcgggccggaaagcgtgacgatatatcagcacattttatcggttcggttgtttatattgagcaggggttgtatcaggtttctggtatttctccgttgctggtcattgatggtcaacaacggctgacgaccgcaatgttgctgattgaggctttatcgcgccatcttggcgaagacgaagtttttgatggcttttcggcaatgaaattgcgtaattattatttgctcaatccttatgagtccggcgagaaaggatttaaattactgctgaccgagactgataaagacagtttgctggcgttaataaaacaaagaccaatgccagaaaactattcccatcgaataatggaaaactttactttctttgatgaacaaattaccaaactcggtgatgacttgatccccttatgtcgtgggttagcaaagttattaattgtcgatgtggcgcttaatcgtggtcaggataatccgcaactgatttttgaaagtatgaactccaccggtaaggcattaagtcaggccgatctggtgcgcaattttattctgatgggcctcgaaccagagcatcaaacccggttgtatgaagatcactggcgtccaatggaagtcgcgtttggtcagcaaggttacagcgaatattttgacagttttatgcgtcattatctgacggtaaaaacgggggagatccctcggacagatgaagtctatgaggcatttaaactccatgcccgcagccagagtgttgctgaaaaaggcgtagatcggctggttgaagatattcacatctacgcggagtattactgtgcaatggcattgggaaaagaaagtgacaaatcgcttgctacggcttttcaggatttgcgcgagttaaaggtcgatgtggcgtatcctttcttactggcgctttatcatgactataaaaatggcgttttgtctcacgaagatttcctgagcataattcgtttaattgaatcttatgttttccgccgtgcagtatgtgcgattccgacaaattctcttaacaagacgtttgctactttttataaggtcattaataaagaaaaatatctggaaagtattcaggtacattttctgaatctgccctcatatcgtcgtttccccaacgatgatgaatttaaacgggaattaaaagttcgtgatctctataatttccgtagtcgcagctactggttacgacgactggaaaacgataaacgcagagagcgcgtggaagagtttacgattgagcatattatgccgcagaacgaaaatttgtcggctaaatggcgtgaagagctgggaagtgactggcaacgcattcataaagaactgttgcatacgttggggaatctcacattaacgcgctataactcccgctacagtgacagacctttcgcggaaaaacgcgatattgaagacggctttaaacatagcccgctctatttgaatatcggtcttggacagtgcgaaaaatgggatgaagcagccattcgcgcccgtgcagatcgtctggccgatctcgcggttcaggtctggcaagcgcctgctcttcctgaagaggttttagctgtttatcgggcgcagccggagaacaaaaccagttacagcctgagtgattatccttttcttgctgatggttcgcatagccgggtgttatttgatcatcttcgcgatgaagttatgcgcctggacgcagggatcacgcaggaagttttaaagctctatattgcgtttaaagctgaaacgaattttgttgatgttgtaccgcaaaaaagccgactgcggttgtcgcttaatatgcagtttcatgaactggtcgatccgaaaggtattgccaaagatgtgacaaatgttgggcgatggggcaatggtgatgtggaaattggtttcagtgacctcgcacaacttccttacattatgggattaattcgtcaggcatttgaaaaacagatggagagcgcgttggtataa

SEQ ID NO: 2026 - DNA, 342 bp, Escherichia coli
atgactgacacgcattctattgcacaaccgttcgaagcagaagtctccccggcaaataaccgtcaattaaccgtgagttatgcgagtcgctacccggattacagccgtattcccgccatcaccctgaaaggtcagtggctggaagccgccggttttgccaccggcactgcggtagatgtcaaagtaatggaaggctgtattgtcctcaccgcccaaccacccgccgccgccgagagcgaactgatgcagtcgctgcgccaggtgtgcaagctgtcggcgcgtaaacaaaggcaggtgcaggagtttattggggtgattgcgggtaaacagaaagtcgcctga

SEQ ID NO: 2027 - DNA, 1755 bp, Escherichia coli
atgagtgtggaaaagctgatcgttgatcatatggaaacctggacctcggcgttgcaaacccgttccaccgccgggcgcggcagttccggtaaaattgatttgtatggcattaagaaattgcgtgagctgattctggaactggcggtgcgcggtaaactggtgccgcaggatccgaatgatgaaccggcgtcggagctgctgaagcgtattgcggcggaaaaagcagagctggtgaagcaaggtaaaattaaaaagcaaaaacccctgccggaaattagcgaggaagagaagccgtttgaattgccggagggatgggagtgggtaactttttcacatttaggctatttttttggtggtaaaactccaagtaaaatgaaagatgaatattggggaggaactattccatgggtaaccccaaaagatatgaaaacgaatctaatagtcgattctgaagataaggtgactcctttagcccttgaagatggtttaaccaaagtatctccaggcagtatactatttgtcgcaagaagtggaattctaagaagaattttcccagttgctataacatctattgaatgtacagttaatcaagatataaaagtattatcaccattttttagtgatatttcatactatatactattgatgatgaatggtttcgaaagatatataattgagaatttaacaaaaacaggaactactgttgaaagcctgttgtttgaagattttatatcacacccattcatgattccaccattcgcagagcagaataggatcttaagtactgtcaaaaaactcatgtctctttgcgaccaactggaacagcaatccctgaccactctggacgcacatcagcaactggttgaaaccctgttgggaacgcttacagacagtcaaaacgccgaggaactggctgaaaactgggcgcgtattagcgaacatttcgacacactatttaccactgaagccagcgtggatgcgttaaaacagaccattctgcaactggccgtaatgggtaaacttgtgccgcaggatccgaatgacgaaccagcctctgaactgctcaaacgaattgcgcaggaaaaagctcaactggtgaaagaagggaaaataaaaaaacaaaaaccgttgcccccgattagcgatgaggaaaaaccgtttgaacttccggaagggtgggagtggtgtcgtttaaatgatatttcatctaaaattactgatggagatcataaaacaccacctcgtattgccgaagggtataaattactttcagcaaaaaatatccgtgacggttatttagactacaataactgtgattatatctcagcgattgactacgaaaaatcccgtgagcgatgcttacctgaaaaaggtgacttattaattgtttcggttggtggaacaattggtagatcttctttaattaaggactgttctgatttcgcactcgtaaggagcgtagcgattataaaaccattattaatcgaacctgagtatttaaaacttgcaatggactcgaagttattacagtcaatgattcactctcataaacgaggcggagctcaaccatgcctatatcttggagaaattagtaaatttctattccctacccccccattggcggaacaaaggaatatagttaataaagttagtatccttatggaaaaatgtagatttttatttttaggacttcaatccgcccagcaaacccaactacaccttgcagacgcactcactgacgcggcgataaactaa

SEQ ID NO: 2028 - DNA, 1470 bp, Escherichia coli
atgtctatcagttcagtaatcaaatcattacaagatattatgcgcaaagatgccggtgtggatggcgatgcgcagcgtctcggtcagctctcctggctgctgtttttgaaaatcttcgatgcccaggaagaggcgctggaactggagcaggataactatcaatatccgatcccacagcgttatttatggcgcagttgggccgcaaacgctcagggcattaccggtgattccctgctggaattcgttaatgatgatctgttcccggcgttgaaaaacctcactgcgcctatcgataaaaccccacgcggctacgtggtgaagcaggcgttcagcgatgcctataactatatgaaaaacggtacgctactgcgccaggtgatcaacaagctgaacgaaattgactttaccagcgccagcgaacgccatctgtttggtgatatttacgaacagatccttaaagatctgcaatctgcgggcaatgctggcgaattctatactccacgcgccgtcactcgctttatggtggatcgcgttgatccgaaactcggcgaatccattatggacccggcctgcggtacgggcggttttcttgcctgcgcgttcgatcatgtaaagaacaaatacgtgaagagcgtcgccgatcatcagacgctgcaacaacagatccacggtgttgagaaaaaacagcttccgcacctgctggcgaccaccaatatgctgctgcacggcattgaagtaccggtacaaattcgtcacgacaacaccctgaacaagccgctttcctcctgggatgagcaactggatgtcattgttaccaacccgccatttggtggcacggaagaagacggtattgagaagaactttccggcagagatgcaaacccgcgaaacggcggatctgttcctgcaactgattgtggaagtactggcgaaaaacggtcgtgcggcggtggtattgccggatggcacgctatttggcgaaggcgttaaaaccaaaatcaaaaagctgcttaccgaagagtgcaatctgcataccatcgtgcgtttaccgaatggggtgtttaacccctataccggcattaaaaccaacctgttgttctttaccaaaggtcagccaaccaaagagatttggttctatgagcatccgtatccggcgggcgtgaaaaattacagtaaaaccaagccgatgaagtttgaagagtttcaggcggaaatcgactggtggggtaacgaggccgatggttttgccagccgcgtcgagaatgagcaggcatggaaagtcagcattgatgacgtgattgcgcgtaacttcaatctggatattaaaaacccacatcaggcggaaaccgttagccatgatccggacgaactgttagcgcagtatgcaaaacagcaggcggagatccagacgctgcgtaatcaactgtgcgatattcttggcgctgcgctgtctggcaaggaggttaactaa

SEQ ID NO: 2029 - DNA, 2433 bp, Escherichia coli
atggcggaactgaacctaagtaacctgacggaagcagacatcattaccaaatgcgttatgccagccattctcaatgcaggctgggacaacacaacgcaaatcagacaggaggtcaaactccgggacggtaaagtcatcgtacgtggtaaagttgcggcacgcagaacagtaaaatctgctgacatcgtgctgtatcacaaaccaggcattcccttagccgtgattgaagcaaaagccaacaaacatgaaattggcaaagggatgcaacagggcattgaatatgcgcgcctgctggacgttccttttgtttttgccaccaacggggatggctttatcttccgcgatgccaccgcagccgaaggtgaatgccttgaaaagcaaataacgctggatgacttcccctcccccgctgaactctggcaaaaattctgcctctggaaaggatacacacaagctcagcttccggtgattactcaggactattacgacgatggcagcggtaaatcgccacgttattaccagcttcaggcaatcaacaaaaccattgaagccgtctccaacgggcaaaaccgcgttctgctggtcatggcgaccggaacagggaaaacctacaccgcattccagatcatctggcgcctgtggaaatcaaaaaataaaaaacgcattttgttccttgccgatcgcaacattctggtcgaccaaaccaaaaataatgatttccagccatttggtacggcaatgaccaaagtcagcggacgcaccattgatcccgcttatgaaattcacctcgcgctctatcaggctataactggcccggaggaagaccaaaaagcgtttaaacaagtcgcaccagatttcttcgatctgatcgtgatcgacgaatgccatcgcggcagcgcatccgaagacagcgcctggcgagagatccttgattatttcagttccgccacccaaattggcttaaccgccacgccaaaagagacgcatgaagtctccagcacggattacttcggcgatccggtttacgtctactcactaaaagaagggatcgaagacggcttcctcgccccttataaagttgtccgtgttgatattgatgttgatctgcaaggctggcgcccaaccaaagggcaaactgacttaaacggcgaagtgatcgacgatcgtatctataaccagaaagatttcgatcgcacgatggtaatcgacgaacgcacagaactggttgccagaaccattaccgactacctcaagcgcaccaacccgatggataaaaccatcgtcttctgtaacgacatcgatcatgcagaacgtatgcgccgcgccctggtgaatctcaacccggagcaggtgaaaaagaacgacaaatacgtcatgaaaatcaccggcgatgatgaaattggcaaagctcagttggataacttcatcaacccgaaaaaagcgtacccggttatcgcgaccacttcagaactgatgaccactggtgtggatgctaaaacctgcaaactggtagtactggaccagaacatccagtcgatgaccaaattcaagcaaattatcggtcgtggtacacgcatcgacgaacgttacggcaaactctggtttaccatcctcgactttaaaaaagccaccgaactgtttgccgatgagcgtttcgatggcattcccgaaaaagtcatggataccacaccagaggatatcgccgatccagaatctgattttgaagagaaactcgaagaaatcagcgaacatgacgacgaacaggtaacaggcgttgatgaaccgcctgcgccaccataccaggttaccgataccgatgatgttggcccacttccggaagaagacgagaagaaaatccgcaagtttcacgtcaatggcgtggcggtgggtgttattgcgcagcgtgttcagtattacgatgccgacggtaaactggttaccgaatcttttaaagattacacccgcaaaacactgctcaaagaatatgcctcgctggatgactttacccgcaagtggcaagacgccgatcgcaaagaagcgatcattcacgagctggaacaacaggggatcatctgggaagtactggcagaagaagtcggtaaagatctcgacccgttcgacatgctttgccacgtagtgtatggtcagccgccgttaacccgcaaagagcgcgccgagaacgtgcgcaagcggaactacttcacaaaatactctgaagcagcgcaagccgtgctcgataatctgctggataaatacgccgatgcgggcgtacaggagatcgaaagtattcaggtgctgaaacttaaaccattcgacagcatgggcaccctaccggagattattaaaaccggatttggcgaccgtaacgggtataatcaggcgctcagcgagctggaaaacgaaatctaccaattaccgccccgctctgcttaa

SEQ ID NO: 2030 - DNA, 1653 bp, Escherichia coli
atggaagctaaagaatgtaaggtgcaggatatccttactgaaaacaaaaagtttattattccttcttatcagcgtccttacagttggacggtagataatgcagagcaactcattgatgacatttataaaagctctcaatcagaagagaatgaatattttattgggagtatgatttgtatcaataaagggcaaaatcagtatgaagttgtagatggacaacaacgtcttacaacgttaagcattattgtctccgagctaaaaaaaatcatcccgattcaggggataaaagatgatttgcaaaaaagagttctgcctattgatgtttattctgatgaaacagatgaaccaaggctaattgttagaaaaaaagagtatgatctttataaatattatatacttcaggattctaaagattataaacctgaaaaaccatcggatactgagttagtattcattagcaacgctgaaacaattagagattacttgttgcggttatctgttgatgagttgaagttgcttgctaaatatattttgcaaaatgtatatatcgtatttgtgcaaactgatgatttcgcatcatcatttagactctttaatgtattaaatagtcgaggtttacctttaagtaatgcagatcttttaaaaaatgcactgtttgaatcagcttctacgcataataaaaaatcagagcaaatagaatcagcatggtcgcaaattgaagatatggttggagtgagacggcttgataaatttcttactcttcataagctttccgagaaaaaagatcgtgacagggtgttacaaaaaggttttgaagcttttattgaaaatctccagcagcaatttgatggagatgctattgctatgtcactgatgttggttaattctgcaaaaaattatactaagattttagagaatgattttgaacactcttcaatacgacgaaaaatagcatcactaagtaatttaggggtagatgagtggattcctccggttatggcattcatgaatcgaatggctcgtacagaagattttaatttagatgatttttctcaatttattaccgcctttgagaaggtatatatgcatgggtggttaaaaaaacaaattaaaagccaaagagaaatggtttgttattcagctctggtagcaataaataatgatatgtcttttgattctgtgataaatcagataaaccaacatgcagataattcaggttttatagctgctctggatgaagatttatatgagcctcgtccgaatcaagtgaacttaataaaagcaattttgcttcgcttagatatggagcaacaagatgagagcgtgattaaaacctatacggggagaatcacaattgagcatattcttcctcaagcattagttaatgaatactggattaatagattccaacctcaagagcatgtctactggctgcataaaataggtaatttaacactcataagtggttccaaaaattctgaagcacaacactatgattttatcaaaaagaaatctatttatgagaaacttaatagtaaaagctcttttgatttaacaaaagatgtttgtaattcttcagaatggggattggctgaactgaaaatgagacatgaaaaaatgaaaacgcaattgaagaagctttggttggtctga

SEQ ID NO: 2031 - DNA, 957 bp, Escherichia coli
atgaacccgattgcagttaccctactcaccggttttttaggcgcaggaaaaaccaccctgctgcgccatattcttaacgaacaacacggctacaagattgccgtgattgaaaacgaattcggcgaagtctccgttgatgatcaactgattggcgatcgcgccacgcagatcaaaacgctgaccaacggctgcatctgctgttcgcgctccaacgagctggaagacgccctactcgacctgctggataatctcgacaagggcaatattcagttcgaccgtctggtcattgaatgcaccggcatggccgatcccggcccgattattcagacctttttctcccatgaagttttatgccagcgttacctgctggacggagtgattgcgctggtggatgcggtacatgccgatgagcagatgaaccagttcaccatcgcccagtcacaggttggctacgccgaccgtattctgctgactaaaaccgacgtcgcaggcgaagcagaaaaactgcgtgaacgcctggcgcgcatcaacgcccgtgcaccggtctacaccgtcacccacggcgacatcgacctgggcctgctgttcaacaccaacggttttatgctggaagaaaacgtcgtcagcaccaagccacgttttcactttatcgcggacaaacaaaacgatatttcgtcgattgtggtggaactggattacccggtagatatcagcgaagtttcccgggtgatggaaaacctgctgctggagtcggcggataaactactgcgttacaaagggatgctatggattgacggcgaacctaaccgcctgctgttccagggcgtccaacgcctctacagcgccgactgggaccgcccgtggggcgatgaaaaaccgcatagtacgatggtgtttatcgggattcagctgccggaagaagagattcgggcggcgtttgctgggttgaggaagtaa

SEQ ID NO: 2032 - DNA, 204 bp, Escherichia coli
atgtttggtaacttaggacaggcaaaaaaatatctcggccaggcggcgaagatgttgattggcattccagactacgacaactacgtcgagcatatgaagaccaaccatcccgacaagccgtacatgagctatgaagaattcttccgcgaacgccagaacgcgcgctacggcggcgatggtaaaggcggtatgcgctgttgttaa

SEQ ID NO: 2033 - DNA, 2151 bp, Escherichia coli
atggatactaaaaagatattcaagcacataccctgggtgattctcggaatcatcggtgcattctgcctcgcggtagttgcattacgtcggggggagcacgtcagcgccctgtggatcgtggtcgcctctgtgtcggtgtatctggtggcgtatcgctactacagtctgtacatcgcccagaaggtgatgaaactcgaccccacgcgcgcgacgcctgcggttattaacaacgacggtctgaactacgttccgaccaaccgttacgtgttgtttggtcaccacttcgccgctatcgccggtgctggtccgctggtgggtccggttctcgccgcgcagatgggctacctgcctggcacgctgtggctgctggcgggggtcgtgctggccggtgcggttcaggactttatggtgctgtttatctcctctcgccgtaacggcgcatctctcggtgagatgatcaaagaagagatgggaccagtaccggggactatcgcgctgtttggctgtttcttaatcatgatcatcatcctcgccgttctggcgctgattgtggttaaagccctggccgaaagtccgtggggggtcttcaccgtttgctcaaccgtaccgattgcgctgtttatgggtatctatatgcgctttattcgtccggggcgtgtgggtgaagtctctgtcattggtatcgtgctgctggttgcctctatctacttcggtggcgtgattgctcacgatccgtactggggtccggcactgacctttaaagacaccaccattaccttcgcgctgattggctatgcgtttgtttccgcactgctgccagtgtggctgatcctcgcaccgcgcgactatctggcaaccttcctgaaaatcggcgttatcgtcggcctggcgctgggtatcgtggtgctgaacccggaactgaaaatgcctgccatgacccagtacattgacggtactggcccgctgtggaaaggcgctctgttcccgttcctgttcatcaccatcgcctgtggtgcggtatctggcttccacgcgctgatctcttccggtacgacgccgaaactgctggctaatgaaaccgacgcgcgtttcatcggctacggcgcaatgctgatggagtccttcgtggcgattatggcgctggttgctgcgtccatcatcgaaccgggtctttacttcgcgatgaacaccccgcctgctggccttggcatcaccatgcctaacctgcatgaaatgggtggcgagaacgcgccgatcatcatggcacagctgaaagacgttaccgcacacgcggcagcgaccgtcagctcctggggcttcgtgatttcgccagagcagatcctgcaaaccgcgaaagacattggtgagccttctgtcctgaaccgtgcaggtggtgcaccaacgctggcggtaggtatcgctcacgtgttccacaaagtgctgccgatggctgacatgggcttctggtatcacttcggtattctgttcgaagccctgttcatcctgaccgcgctggatgcgggtacccgttctggccgctttatgctgcaagacctgctgggtaacttcatcccgttcctgaaaaaaaccgactccctggttgccggtatcatcggtactgcgggctgtgtgggtctgtggggctacctgctgtatcagggcgtggtcgatccgctgggcggcgttaagagcctgtggccgctgttcggtatctccaaccagatgctggcagccgtggcgctggtactgggcaccgttgtactgattaagatgaagcgcacccaatacatctgggttaccgttatcccggcagtatggctgcttatctgcaccacctgggcgctgggcctgaaactgttcagtaccaacccgcagatggaaggcttcttctacatggcaagccagtacaaagagaagattgctaacggtactgacctgacggcgcagcagattgccaacatgaaccacatcgttgtgaacaactacaccaacgcaggcctgagtattctgttcctgattgtggtgtacagcatcatcttctacggtttcaaaacctggctgaaggtgcgtaacagcgacaaacgtactgacaaagaaacaccgtacgttccaatcccggaaggcggcgtgaagatctcttcgcaccactaa

SEQ ID NO: 2034 - DNA, 1665 bp, Escherichia coli
atgttaaaacgtatcaaaattgtgaccagcctactgctggttttggccgtttttggccttttacaactgacttcaggcggtctgttctttaatgccttaaagaacgacaaagaaaatttcactgttttacaaaccattcgccagcagcaatccacgctgaatggcagctgggtcgcgttgttgcagacgcgtaacaccctcaaccgcgcgggtatccgctacatgatggatcagaacaatattggtagcggttcaaccgttgctgagctgatgcagagtgccagtatttcgctgaaacaggcggaaaaaaactgggcggattacgaagcgttgccgcgtgacccgcgtcagagcaccgccgcagcggcagagatcaaacgtaattacgatatttatcacaatgcgctggcggagctgatacaactgttaggtgcaggcaaaatcaacgagttctttgatcagccgacccagggatatcaggacggtttcgagaagcagtatgtggcttacatggagcaaaacgatcggctctatgatatcgccgtcagcgataacaatgcctcctacagccaggcgatgtggattctggtaggcgtgatgatcgtcgtactggcggtcatcctcgccgtctggttcggtattaaagcctcgttggtcgcgccaatgaatcgcctgattgacagcattcgtcatattgcaggcggcgatctggtgaaaccgattgaggtggatggctctaatgagatggggcaactggcagagagtttgcgccatatgcagggagagctgatgcgtaccgtcggtgatgtgcgcaacggggccaatgccatctatagcggtgccagcgaaatcgccaccggcaataacgatctctcttcgcgcaccgagcaacaggccgcttcgctggaagagacggcagccagcatggagcaactgaccgcaacggtgaaacagaacgccgaaaatgcgcgccaggccagccatctggcgttaagtgcttccgaaacggcgcaacgcggcggcaaagtggtggataacgtggtgcagactatgcgcgatatctccaccagttcgcagaaaatcgccgatattattagcgtaattgacggcattgccttccagaccaatattctggctttgaacgcggcggttgaggctgcgcgtgcgggtgagcaaggacgcggttttgcggtggtcgcgggagaagtgcgtaatctggcccagcgtagcgctcaggctgctcgtgaaattaaaagcctgattgaagactcggtggggaaagtggatgttggctctacgctggtcgaaagcgccggggaaacaatggcggagattgtcagtgccgtgacccgcgtgacggacattatgggcgaaattgcttctgcttctgatgagcagagccgtggtatcgatcaggttggcttagcggttgctgagatggaccgggtaacccaacaaaacgccgcgctggtggaagaatctgccgctgccgccgccgcgctggaagagcaggccagtcgcctgaccgaagcagtggcagtgttccggattcagcaacagcagcaacagcagcgtgaaacatcggctgtggtaaaaaccgtgacaccagctacgccgcgtaaaatggccatggcagatagcgaggagaactgggaaacgttttaa

SEQ ID NO: 2035 - DNA, 1272 bp, Escherichia coli
atgagttggttattgattattccgctaatgatcgtctgtttgtttctcaacattcgggtctatctggcgatgtttattggcatcatcgcttactttttattcttctccagcgtaccgattgaaattgccgtgcaaagactaatcgcgccaacgcaaagcccatcattgctggcaattccgttttttatcttgctcggcacactaatgagctacaccggcattgccgaacgcatcctgcacattgccaacgttctggtggggaaaatgcgcggcggactgggcgtggcaaacattctcgtcagcaccatgatgggcggcgtcagcgcctctaaccttgctgacgcggcgatgctgtcgcgcatgatggtgccggagatggagcgtaaaggctacaatcgcgcgtttgccgccgccattaccgctggtggctcgttagtcaccccgatcataccgcctggaatagccctgattatttacggtctggttgccgacgtctctatcggaaaaatgtttatcgccggactggtacctggtttgctatgcgcagtcgtactgatgtttaccgtctaccttgtcgcccgcaaaactaacgctaaaccctcgcgtgaaagctggcctacgtgcaaagaggtggtgttctcgctgggacaggcctggcctgcgctgttcctcatttttgctgtggtgggtggtattcgcgctaacattttcaccccaacagaagcaggtgcagcagcggtgctaatcgtgctggcgattggcttttttatctatcgtgaaatgcggatttctcatgtcgtcaaagcattgggcgaaacggcacgcgcaaccgcatcggtgatgctggtaatcatggccagcgccgcattgggatggattttctcaatggaacatgctggtgtcgcagtggcgaattttgtgacttcgctgaccgaaaacaaatacatgttcctgttgattatcaacatattgctactgacgctggggatgtttctggaaggaaacgccattttgctgatcctggtaccactattaaaaccggtggtcgaacactttggcatcgatccggtgcattttggcatcatcatgatcttcaacctgtcgattggcgcattcacgccaccggtaggtaccgtgatgctgctggtatgtaatatcacgcaagtttcggtgggaaatttctttaaacaatccctgcccctactggcggctctactgttaatgctaatgctggtgacatatatcccggcgatttcactgttcctggtttaa

SEQ ID NO: 2036 - DNA, 474 bp, Escherichia coli
atgcgtctttttgacaaagtggcagaatttagtgctgcctttgcgctattcattctggttgtggtgacaattggagcggtatttatgcgctatttcatcggccaaccgcttcaatggacagaagaaatgtcgggaatgctgatgatttgggtggtgatgttaggtggagtggtggcggaacgtgacagggcgcacctgaccattcccttcctgatggagatgcttccaggcaaactcaggcgtgttattgcagtactggtcgcccttctctccatcgcactgctgctttatatggcctggctgggctaccgactagccgaaatggcgcagtttaaagtgacacaaattctgaaggtttcctggttctggatcgatctggcggtccctgtcggcgcactggcaacggctatttataccctctactggttaataaacgatacaaaacaatccgatagcggagacaaaatgcaatga

SEQ ID NO: 2037 - DNA, 972 bp, Escherichia coli
atgagcaaaataatagcgatgctaattactgtcagtaccttttttttaccgtcaataatccaggcaaaacctatttcaataaaagttgcctatgaaaataaccctggagaacccctggatgtggtcatgcgttactgggcagacctattaaataaaaaaagtaatggcgaaataacacttgcgctctatcccagctcccaattgggatcaaaacaggatgtcaccgagcaagccatgatgggcatgaatgtcataaccttgagtgatgtggcttttcttgccgattatgaacccgatttggggattttgtttggaccgtatctgactgacgatccgcaaaaactgttcaaaatatatgaaagcgactggtttaaacaaaaaaatgaaagtctgaagaaaaagggaattcatgtggtaatgaataattatctctatggcactcgacagattatttcgaaaaaacccattcgcaccgttgacgatctcgcaggtttaaaaattcgcgttcctaataacgtcatgcaaataaaagccattcaggcgatgggggcaacaccaactcccatgccattaggcgaagtttatcccgcattaacccagggcgttattgacggcgtagaaaacccaatttcagtgctgcaagggcaaaaactgtatgagcaggcaagatatctgacaatggttaactacctgacaaatacctcagtgtggataggtggtgaagccttctttagcaccctttcaccagaacaactggagatgatccaccagaccggctatgaagcgggtgtctatagccagaaactcactcttgagcgtgatgccgaaatgttgaaaaccatgcaggcagccggcgtcgaagtgatctatcccgatactggaccattccagaagaaagcacgcgaagtttactctcaattcccggaatggacaccaggtctgtacgaaaccattcaacagcaactgcaataa

SEQ ID NO: 2038 - DNA, 1653 bp, Escherichia coli
atggaaatacttttaacaattttaattcttacgttggtagtatcattaaccagcgtgcttacacgtctgtctcctgtccagataccacttcctttaatccagattgccgctggcgcagtactggcccagcctatatttggtctgcatgtggaattcaatcctgaactttttctcttattgtttataccacccctgttgtttgctgaaagttcaaaaatacaacctaaagaattgatcaagcacagccgggaaattatcagcctggcacttgtgttggtactaatcactatttttggtgtcggctatgtgattcatttactcttaccgaatgtgccgctcatcgctgctttcgcattagccgccgtgttgtcgcctaccgatgccgtggcgttgctggggattgtcgggaaagggcgtatcagcaaaaacatccaggaagtgctcgaaggcgaagcgttgatgaatgatgcttccggcctggtggcgttgaaatttgctgttgcagtgacgatgggaacgatggaattcagcgttcatggcgcaaccattgcgttttttgtcgttgcgttgggcggtattgccgtggggatcgctgttacctggttatatggtaaagggctgctgttgatcagccgatatgctcacgatgaaccttccattcagattgtattgatgcttctgttgccgtttattgtttatctggttgcggaacattttggcttatctggcattcttgccgctgtcgccgcggggttaacaaccagtcgcattggcgtagtccaccacgcgcctattcgcctgagaattaaagctaaaagtagctggtcgatgcttgaatatgtctttaacggcatggtgtttctgattttaggcttacaactgccgggcattatttcggaatcactgatccgtgcagaaaacgatccactggtggacaccggatcgctgctccttgatgtcatttggatctacctggcgttaatggttgtgcgcctgggctggctttggctgatgcgtctgtatagccgtaaacgacccggcaaacatccgatgctgtttgctggatataaaacgcgtcatatgctgctggcgacctttgcgggggtgcgcggagctatcacgcttgcgggggtgctttctatcccgttattgctgccggatggcacaccttttcccgggcgttacttgctggtatttctcgccacaggtgtgatcctcttttcgctggtttgcggcattattattctgccgttattactggggaaaaatgtggggattttcagcgataaccgacaaaaagaagaggaagctgccgatctgtttatggctaaaatggccatactgagtgtgcaaaagaccgagcaacgtttgctgcgcgccagaacagaaaacctcgataacgagttgattatggaaacgggggccagagttatcggttatatgcgacatagtgaagaggatatgtcgcctaatgataattccctgcatatgcagcgtgcgaagctggaaagaacatttaatctggcggcgttaaatgccaaacgcgcggctatttaccagatgcgcgcaaggcaagaagtcagtgatgaaacactggcaaaaatagtcagtgaattagatgtgctggaaacgttaatcatggatagccgataa

SEQ ID NO: 2039 - DNA, 906 bp, Escherichia coli
atgagtcgttcgcagaatttacgtcatagcgtcataaatcaggtgattgaagatatggcgaggggcaatattccttctccgctgccttcacaaagcggactggcagaaatgtataacatcagtcgcactacggtacgccacatactccagcatttaagcgcatgtggcgtgctcaccctggtggggaaaaattatgttatcgcccgcaaacccgaacagaacgatggatttgattgcatcacggcctcgctgaaagagcaaaaccgtcttttcgagcaggcatttttcaccatgattaacctgcgccagttacgcgccggagaaagcttttccgaacttcagctggcgcgagcggcaagcgtcagtccggtagtggtacgagaatatcttttgaaattcggtcgttataatcttattcaaagcgaaaagcgcggccaatggagcatgaagcagttcgatcaatcctacgccgagcagctgtttgagctacgcgaaatgctcgaaacacattccctgcaacactttctcaaccttcccgatgatgaccctcgctggctgcaagcaaaaaccatgctcgaacgccaccggacgctgcgcgacagcattggcagcaactttcgaatgttttctcaattagaccgtgattttcatgccatgctgttatccgctgctgacaacatcttttttaatcaatcacttgaaattatatcggtgatctttcattttcactatcaatgggatgaaagcgatctcaaacagcgcaatatcattgctgttgatgaacatatgaccattctcagcgccctgatttgccgtagcgatttagatgcaataacggcgttgcgaaaccatctggataccgccaaacaatcaatgattcgttccatcaggcaacatcaccgataa

SEQ ID NO: 2040 - DNA, 1023 bp, Escherichia coli
atgtccacaatgaaagtattaatttgtcaggaaataaagaatttagtatgggaagtccgggaaagaccggtgccaggcgataatgaagcattaattaaaattaaaactgtcgggatttgcggtacagatattcatgcctgggcgggcaatcagccatttttcagttatccacgcgttttaggccatgaaatatgtggggagattattgaatcaggaaaaaacattcacaattttaatatcggacagcaagttgcggtaattccgtatatttcttgtcagcaatgcccggcgtgtaaaagcggtcgtaccaattgctgtgaaaaaatttcagtcattggcgtgcatcaggatggcggttttagtgagtatttgagcgtgccggtggcgaacattttgcccgcagacggtattgacccgcaggcggcagcattgattgaacctttcgctattagcgctcatgcggtgcgtcgtgcagctattgcacccagcgagcaggtgctggtggtcggggcggggccaatcggtctgggcgcggcggcaatcgctaaagccgatggcgcgcaggtggtggtggcggataccagtccggcgcgccgtgaacatgtggcaacgcgtctggaattacctgttctggacccgtcagccgaagattttgacgcgcagctgcgggcgcagtttggtggttcgctggcgcagaaagtgattgacgcgacaggtaatcaacatgcgatgaataacaccgtaaatctgattcgtcacggcggcacggtggtatttgtcggcctgtttaaaggtgagttgcagttctccgatccggaattccataaaaaagaaacgacgatgatgggcagccgcaacgccacgccggaagatttcgctaaagtcggtcgattgatggcggaagggaaaatcactgccgacatgatgttaacccatcgctatccgttcgccacgctggcagaaacctacgagcgcgatgtgattaacaatcgtgagttgattaagggcgtaattactttctga

SEQ ID NO: 2041 - DNA, 2292 bp, Escherichia coli
ttgtcagaactactctctttcgccctttttctcgcctctgtgctgatttacgcatggaaagcgggacgtaacacctggtggtttgcagccacattaacggtactggggctatttgtcgttttaaatatcaccctgtttgccagcgactattttactggcgatggtattaacgacgcggttctctataccttaaccaacagcctgaccggtgctggtgtcagcaaatacatcctgcctggtatcggcattgtgctggggctggcggcggtgttcggtgcgctgggctggatcctgcgccgtcgtcgccatcatccgcaccattttggttacagcctgctggcactcttactggcgctgggttcagtggatgccagcccggcatttcgtcagataacggaactggtgaaatcccagtcacgcgacggcgacccggactttgcggcttattataaagagccgtcgagaactatccctgacccgaaactcaacctggtttatatctacggcgaaagtctcgagcggacctattttgataacgaggctttcccggatctcacgcctgaactgggcgcgttgaaaaatgaaggcctggatttcagccacacgcagcagctgccgggaacggattacacgattgcgggcatggtagcttctcagtgcggcataccgctgtttgccccatttgaaggcaacgcctccgcctctgtctccagcttcttcccgcagaacatctgtctgggcgatattctgaaaaactcgggttatcagaactatttcgtgcagggcgcgaatctgcgttttgccggtaaagatgtgttcctgaaatcgcacggcttcgaccacttatacggctcagaagagctgaaaagcgtggtggccgacccgcactatcgcaacgactggggattctacgacgataccgttctcgatgaagcgtggaaaaaatttgaagagctttcccgctcaggtcagcgattctcactgtttaccctgacagtcgatacccatcacccggatggttttatctcgcgcacctgtaaccgcaaaaaatatgattttgacggtaagccgaatcagtcattcagcgcggtaagttgcagccaggagaatattgcgacgtttatcaacaaaatcaaagcgtcaccgtggtttaaagataccgtcatcgtcgtctcttctgaccatttagcgatgaacaatacggcgtggaaataccttaataagcaggatcgcaataacctgttttttgtcatccgtggcgacaagccgcagcaagagacgctggcagtgaagcgtaatacgatggataacggcgcgacggtgctggacattctcggtggcgataactatctcggacttggccgtagcagtttatccgggcagtcgatgtcggaaatcttcctcaatatcaaagagaaaacattggcgtggaagccggatatcatccgcctgtggaaattccctaaagagatgaaagagttcaccatcgaccagcagaaaaacatgattgccttctcaggtagccatttccgtttgccgctgctgttgcgggtttcagacaaacgcgtggaaccgctgccggaaagcgaatactcagcaccgctgcgtttccagctggcagatttcgctccacgcgacaatttcgtctgggttgaccgttgctacaagatggcacaactctgggctccggaactggcactctccaccgactggtgtgtctcgcaagggcagcttggcggtcagcaaattgttcagcatgttgacaaagcaatatggaagggcaaaacggcatttaaagatacggtcatcgacatggcgcgttacaaaggcaatgtcgatacgctaaagattgttgataacgatattcgctacaaagccgacagtttcatctttaacgtcgctggtgcgccagaagaggtgaaacagtttagcgggatttctcgtccagagtcgtggggccgctggtccaacgcacagctgggcgatgaagtaaaaatcgagtacaagcatccgctgccgaagaaatttgacctggtgattaccgccaaagcatacggcaataacgccagccgtcctattccggtacgcgtaggcaatgaagaacaaacccttgtgctgggcaatgaagtgaccaccaccacactgcatttcgataacccaaccgatgccgacacactggtaattgtgccgccggaacctgtctcaaccaacgaagggaatatcctcggacactcgccgcgtaagctcgggatcggcatggtggaaattaaagtggtagaacgtgaagggtaa

SEQ ID NO: 2042 - DNA, 495 bp, Escherichia coli
atgatgaaaactattaaacatcttctgtgctgtgccattgccgccagcgcattaatttccaccggggtgcatgctgcgtcctggaaagatgcgctctccagcgccgccagcgaacttggcaaccaaaacaacacgacacaggaaggcggttggtcgctcgcgtcattaactaacttgcttagcagcgggaaccaggccttaagcgcagataacatgaacaacgccgcaggcattctgcaatactgcgcgaagcaaaagctggcttcggtaaccgatgccgaaaacatcaagaatcaggtactggaaaaactgggcctgaacagtgaagagcaaaaagaagacaccaactatctggatggcattcagggtttgctgaaaaccaaagatggtcagcaactcaatctggataatattggaacgactccgctggcagaaaaggtgaaaaccaaagcctgcgatctggtgttaaagcaggggctgaacttcatttcctga

SEQ ID NO: 2043 - DNA, 738 bp, Escherichia coli
atgaaaaacgttggcgacctgatgcaacgcctgcaaaaaatgatgcctgcccatatcaaacctgcgttcaaaacgggtgaagaattactggcctggcagaaagaacaaggggcgatccgctccgccgctctcgaacgtgaaaatcgggcgatgaaaatgcagcgcacctttaaccgctccggtattcgtccactgcatcagaactgctcctttgagaactatcgcgttgagtgtgaaggacaaatgaatgcgttaagcaaagcgcgccagtatgtcgaggagtttgacggcaacatcgccagcttcatcttttctggtaagccaggaaccggcaaaaaccatctggcggcggcaatctgcaacgagctgctgctacgcggtaaatccgtattgatcatcaccgtggccgatattatgtcggcgatgaaagataccttcaggaatagcggtaccagcgaagaacaactgcttaacgatctgagtaacgttgatctgctggtgatcgatgagatcggcgtgcagaccgaatcgaaatacgaaaaagtgatcatcaaccagatcgtcgatcgccgctcttcttccaaacgcccaaccgggatgctgaccaacagtaatatggaagagatgaccaagttgctgggcgaacgcgtgatggaccgtatgcgcctgggtaacagtttgtgggtgatcttcaactgggatagctaccgtagccgtgtaacaggtaaagagtattaa

SEQ ID NO: 2044 - DNA, 540 bp, Escherichia coli
atgtcttccagagttttgaccccggacgtcgttggtattgacgccctggtacacgatcaccaaaccgttctggcaaaagctgaaggcggtgtggttgccgtatttgctaacaatgccccggcgttttatgccgtcacgcctgcacgcctggctgaactgctggcgctggaagaaaaactggcgcgtccgggaagcgatgtcgctctggacgatcaactctatcaggaaccgcaagccgctcccgttgctgtaccaatggggaaatttgccatgtatccggactggcaacccgatgccgactttatccgcctggcggcgctatggggcgtggcactaagagagccggtgaccgccgaagaactggcgtcattcattgcctactggcaggcggaaggcaaagtctttcaccatgtgcagtggcaacaaaaactggcgcgcagcctgcaaatcggtcgtgccagcaacggcggactgccgaaacgagatgtgaatacggtcagtgaacctgacagccaaattccaccaggattcagagggtaa

SEQ ID NO: 2045 - DNA, 474 bp, Escherichia coli
atgggtgtgatcgaatttctgttagcgttggcgcaggatatgatcctcgccgccattcctgcggtcggctttgcgatggtgttcaacgttcccgtgcgggcgttacgctggtgtgcgctgcttggctcgataggtcatggttcccgaatgatcttaatgaccagcgggttgaatattgagtggtcaacttttatggcttctatgctggtcggcaccattggtattcaatggtcgcgctggtatctggcgcatccgaaagtgtttaccgtggcggctgttatccctatgttccctggcatatcagcttataccgcaatgatttcggcggtaaaaatcagccagctaggttacagcgaaccgttgatgattaccctgttaaccaactttcttacagcttcatcgattgttggtgcgttatccatcggtctttccattcctggattatggttgtaccgcaagcgccctcgcgtataa

SEQ ID NO: 2046 - DNA, 771 bp, Escherichia coli
atgcaaactgagcaacagcgagccgtaacacggctttgtatccagtgtggattatttcttttgcaacatggtgcggaaagcgcgttggttgatgagctttcctcacgactgggtcgggcgttgggaatggacagcgtcgaaagttctatctcttcgaacgccatagtgctgacaaccattaaagatgggcaatgcctgacatcgacacgtaaaaatcaagatcgcggcattaatatgcatgtggtgactgaagtccagcacattgtgattctggcggagcaccatctgctggattacaaaggcgtagagaaacgatttagccaaattcagccattacgttacccaagatggctggtagccttaatggttggcctttcctgcgcctgtttctgtaaactcaataaaggtggctgggatggtgccgtcatcaccttctttgccagtacggccgcgatgtatatccgccagctgctggcacaacgtcatcttcatccacagatcaacttttgcctcaccgctttcgccgccaccaccatttccggattgcttttgcaacttcccactttcagcaatacccccaccattgcgatggccgccagcgttctgctgctggtgccgggctttccgttgataaatgccgtcgccgatatgtttaaaggccacatcaataccggactggcacgctgggcgatcgccagtctgctgacactggctacctgtgtcggcgtagtaatggcactgacgatttgggggctacgcggatgggtgtga

SEQ ID NO: 2047 - DNA, 726 bp, Escherichia coli
atgttgccaggatgctgcaaaaatggaattgttatcagtaaaatacctgttatgcaagcagggttaaaagaggtcatgaggactcacttccctgaatatgaaataatatccaacgcctctgcggaggaccttaccttattacaattacgtcgttccggattagtcattgctgatttggccggtgaaagtgaagatccacgttccgtttgtgagcattattactctttaatctcacaatatcgggaaattcactgggttttcatggtgtcacgctcctggtattcccaggcagtagaattgctcatgtgccctacggcgacgttattgtctgatgttgaacccattgagaatctggtcaagaccgtacgttccggcaatacgcactcagagcgtatcagcgccatgctgacctctccggcaatgactgaaactcatgattttagctatcgctccgtcattctcactctttcagagcgcaaggtactgcggctattaggtaaaggatggggcatcaaccagatagcttcattgcttaagaaaagtaataaaactattagcgcccaaaaaaacagtgcgatgcgtcgactggcaattcacagcaacgctgaaatgtatgcatggataaatagcgcgcagggtgcaagagaacttaacttgccttctgtttatggagatgccgcagaatggaacacagccgaattaagaagagaaatgtcgcactcatag

SEQ ID NO: 2048 - DNA, 678 bp, Escherichia coli
atggaacacagccgaattaagaagagaaatgtcgcactcatagaaaaatgcgtcatgagtcgtatcggtattgagagtttattcagaaagtttgcgggtaacccttataagctccatacctataccagtcaggagtcatttcaggatgccatgtcgcggatctcgtttgcagcggtcattttttctttttctgccatgagaagtgcgcgcagagagggattatcctgcctgactgaactggcgattaagtttccgcgtacccggcgtttagttattgcggatgatgatattgaagctcggctgattggttcattatcgccatcaccgctggacggtgtattaagtaaagcgtcaacgctggagatttttcatcaggaactctttttgtcattaaatggtgtacgtcaggcgaccgatcgactgaacaatcagtggtacattaaccaaagccggacgttaagcccgacggagagagaaatattgcgctttatgtcgcgtggctactcaatgacacaaattgccgagcagcttaaacgcaatatcaaaacgatccgtgcacataaatttaatgtgatgtcgaaactgggcgtcagttctgatgcagggttgttggaggccgcagatattctgttatgtatgcggcattgcgaaacaagtaatgtgttgcatccttattaa

SEQ ID NO: 2049 - DNA, 468 bp, Escherichia coli
atgctggcgctgctgactcaggaaaaagcattagatgtgtcgccggaacatgtccacgttgagtttcacgaaaccggacgcgccgcctgtttctgggtcgatgtgtgtgaagataaaaacgcaacactacattcgccgcagcagcgaatggaaacgttaatcagccaggcgctggttccggttgtgcaggcactagaagcaacgggagagattaacggcaaacttatctggagcaataccggttatttgatcaactggtatctgactgagatgaaacagctgctcggcgaggcgacggttgaatcgctgcgctatgccctcttttttgagaaaacgcttactaccggtgaagataatccactctggcgtaccgtggtgctacgcgacggcctgctggtgcgccgcacttgctgccagcgttatcgcttaccggatgtgcagcaatgtggcgattgtacgctgaaatga

SEQ ID NO: 2050 - DNA, 294 bp, Escherichia coli
atggcctatcgttccgcaccgctctatgaagatgttatctggcgaacgcatctccagccgcaggatgctgggcttgcacaagccgtgcgggcgacgatcgccgaacatcgtgaacatttgctggagtttatccgcctggatgaacccgccccacttaacgccatgacgctggcgcaatggtcatcacctaatgcgctaagttctctactcgcggtctattccgatcatatctaccgcaaccaacctttgatgatccgcgaaaacaaaccgctgatctcactgtgggcgcaatag

SEQ ID NO: 2051 - DNA, 237 bp, Escherichia coli
atgttgcaacgtacgctgggcagtggctggggagtgttgctgccgggattgctgattgcagggctgatgtatgcggatttatcgccggatcaatggcggattgtcattctgatgggattggtattgacgccggtgatgttgtatcacaaacagttacggcattacgttttgctaccatcgtgcctggcgcttattgctggcatcatgctgatgataatgaatttgaatcaggggtga

SEQ ID NO: 2052 - DNA, 384 bp, Escherichia coli
atgtcagttctgtatatccaaattcgtcgtaatcaaattactgttcgcgatcttgaaagcaaacgtgaagtgtcaggagatgctgccttcagtaaccagcgcctgttaatcgccaatttctttgttgcagaaaaagttctgcaagatcttgttctgcaactccacccacgttcaacctggcattcttttttgccagcaaaacgtatggatattgttgtgagcgcgctggaaatgaatgagggcggtttgtcacaggttgaggaacgcattcttcatgaagtggtcgcaggggcaacgttaatgaaatatcgccagttccacatccatgcgcaatcagtggtactcagtgatagtgcggtcctggcaatgtttaagcagaaataa

SEQ ID NO: 2053 - DNA, 444 bp, Escherichia coli
atggttattagtattcgacgctcacggcatgaggagggggaggaactcgttgcgatttggtgtcgttctgtcgatgccactcacgattttttatcagcagagtatcgggccgagctggaagagctggtgcattcctttctgccggaagcaccgttgtgggtcgcggttaatgagcgggatcagccggttgggtttatgttgttaagtgggcagcatatggatgcgctgtttatcgatcctgatgtgcgcggctgcggcgtgggccggatgctggtgaagcatgcgctctcaatggccccggaactgacaaccaatgttaatgagcaaaatgagcaggcggttgggttctataagaaggtgggctttaaggttacggaacgctctgaggtggacgatttggggaaaccgtatccgttgctgaatctggcatatgtgggggtgtag

SEQ ID NO: 2054 - DNA, 930 bp, Escherichia coli
atgccgattcgtgtgccggacgagctacccgccgtcaatttcttgcgtgaagaaaacgtctttgtgatgacaacttctcgcgcgtctggtcaggaaattcgtccgctaaaggtgcttatccttaacctgatgccgaagaagatcgaaactgaaaatcagtttctgcgcctgctttcaaactcacctttgcaggtcgatattcagctgttgcgcatcgattcccgtgaatcgcgcaacacgcccgcagagcatctgaataacttctactgtaactttgaagatattcaggaacaaaactttgacggtctgatagttaccggcgcgccgctgggcctggtggagtttaatgatgtcgcttactggccgcagatcaaacaggtgctggagtggtcgaaagatcacgtcacctcgacgctgtttgtctgctgggctgtacaggccgcgctcaatatcctctatggtattcctaagcaaacccgcaccgacaaactctctggcgtttacgagcatcatattctccatcctcatgcgcttctgacgcgtggctttgatgattcattcctggcaccgcattcgcgctatgctgactttccggcagcgttgattcgtgattataccgatctggaaattctggcagagacggaagaaggggatgcatatctgtttgccagcaaagataagcgcattgcctttgtgacgggccatcccgaatatgatgcgcaaacgctggcgcaggaatatttccgcgatgtggaagccggactagacccggaagtaccgtataactatttcccgcacaatgatccgcaaaacaaaccgcgagcgagctggcgtagtcacggtaatttgctgtttaccaactggctcaactattacgtctaccagatcacgccatacgatctacggcacatgaacccaacgctggattaa

SEQ ID NO: 2055 - DNA, 1602 bp, Escherichia coli
atgactgaacaggcaacaacaatcgatgaactggcttttacaaggccgtatggcgagcaggagaagcaaattcttactgccgaagcggtagaatttctgactgagctggtgacgcattttacgccacaacgcaataaacttctggcagcgcgtattcagcagcagcaggatatcgataacggaatgttgcctgattttatttcggaaacagcttccattcgtgatgctgactggaaaattcgcgggattcctgcggacttagaagatcgtcgcgtagagattaccggacctgtagagcgcaagatggtgatcaacgcgctcaacgccaatgtgaaagtctttatggccgatttcgaagattcactggcaccagactggaacaaagtgatcgatgggcaaattaacctgcgcgatgcggttaacggcaccatcagctatagcaatgaagcaggcaaaatttatcagctcaagcccaatccagcggttttgatttgtcgggtacgcggtctgcacttgccggaaaaacatgtcacctggcgtggtgagacaatccccggtagcctgtttgattttgcgctctatttcttccacaactatcaggcactgttggcaaagggcagcggtccctatttctatctgccgaaaacccagtcctggcaggaagcggcctggtggagcgaagtcttcagctatgcagaagatcgctttaatctgccgcgcggcaccatcaaggcgacgttgctgattgaaacgctgcccgccgtgttccagatggatgaaatccttcacgcgctgcgtgaccatattgttggtctgaactgcggtcgttgggattacatcttcagttatatcaaaacattgaaaaactatcccgatcgcgtcctgccagacagacaggcagtgacgatggataaacccttcctgaatgcttactcacgcctgttgattaaaacctgccataaacgcggtgcttttgcgatgggcggcatggcggcgtttattccgagcaaagatgaagagcgcaataaccaggtgctcgacaaagtaaaagcggataaatcgctggaagccaataacggtcacgatggcacatggatcgctcacccgggccttgctgatacggcaatggcggtattcaacgatattctcggctcccgcaaaaaccagcttgaggtgatgcgcgaacaagacgcgccgattactgccgatcagctgctggcaccttgtgatggtgaacgcaccgaagaaggtatgcgcgccaacattcgcgtggctgtgcagtacatcgaagcgtggatctctggcaatggctgtgtgccgatttatggcctgatggaagatgcggcgacggctgaaatttcccgtacctcaatctggcagtggatccatcatcaaaaaacgttgagcaatggcaaaccggtgactaaagccttgttccgccagatgctgggcgaagagatgaaagtcattgccagcgaactgggcgaagaatgtttctcccaggggcgttttgacgatgccgcacgcttgatggaacagatcaccacttccgatgagttaattgatttcctgaccctgccaggctaccgcctgttagcgtaa

SEQ ID NO: 2056 - DNA, 1305 bp, Escherichia coli
atgaaaacccgtacacaacaaattgaagaattacagaaagagtggactcaaccgcgttgggaaggcattactcgcccgtacagcgcggaagatgtggtgaaattacgcggttcggtcaatccggaatgcaccctggcgcaactgggcgcggcgaaaatgtggcgtctgctgcacggcgagtcgaaaaaaggctacatcaacagcctcggtgcactgactggcggtcaggcgctgcaacaggcgaaagcgggtattgaagcagtctatctgtcgggatggcaggtagcggcggacgctaacctggcggccagcatgtatccggatcagtcgctctatccggcaaactcggtgccagcggtggtggagcggatcaacaatactttccgccgtgcggatcagatccaatggtccgcgggcattgagccgggcgatccgcactatgtcgattacttcctgccgatcgtcgccgatgcggaggccggttttggcggtgtactgaatgcctttgaactgatgaaagcgatgattgaagccggtgcagcggcagttcacttcgaagatcagctggcatcagtgaagaaatgtggtcacatgggcggcaaagttttggtgccaactcaggaagctattcagaaactggtcgcggcgcgtctggcagcagatgtgacgggcgttccaaccctgctggttgctcgtaccgatgccgatgcggcgaatctgattacctccgattgcgacccatatgacagcgaatttattactggcgagcgtaccagtgaaggcttcttccgtactcatgcgggtattgagcaagcgatcagccgtggcctggcgtatgcgccatatgctgacctggtatggtgtgaaacctccacgccggatctggaactggcgcgtcgctttgcacaagccatccacgcgaaatatccgggcaaactgctggcttataactgctcgccgtcgttcaactggcagaaaaacctcgacgacaaaactattgccagcttccagcagcagctgtcggatatgggctacaagttccagttcatcaccctggcaggtatccacagcatgtggttcaacatgtttgacctggcaaacgcctatgcccagggcgagggtatgaagcactatgttgagaaagtgcagcagccggaatttgccgccgcgaaagatggctataccttcgtatctcaccagcaggaagtgggtacaggttacttcgataaagtgacgaccattattcagggcggcacgtcgtcggttaccgcactgactggctccactgaagaatcgcagttctaa

SEQ ID NO: 2057 - DNA, 1725 bp, Escherichia coli
atgccgcgtggcctggaattactgattgcacaaaccattttgcaaggtttcgacgctcagtatggtcgattcctcgaagtgacttccggggcgcagcagcgtttcgagcaagccgactggcatgctgtccagcaggcgatgaaaaaccgtattcatctttacgatcatcacgtgggtctggtcgtggagcaactgcgctgcattactaacggccaaagcacggacgcggcatttttactgcgcgttaaagagcattacacccggctgttgccagattacccgcgtttcgagattgcggagagctttttcaactccgtgtactgtcggttatttgaccaccgctcgcttactcccgagcggctttttatttttagctcccagccagagcgccgctttcgtaccattccacgcccactggcgaaagactttcaccccgatcacggctgggaatctctgctgatgcgcgttatcagcgatctgccgctgcgtctgcgttggcagaataaaagccgtgacattcattacatcgttcgccatctgacggaaacgctggggacagacaacctcgccgaaagtcatttacaggtggcgaacgaactgttttaccgcaataaggcagcctggctggtgggcaaactaataacgccttccggcacgttgccatttttattgccgatccaccagacggacgacggcgagttatttattgatacctgcctgacgacgaccgccgaagcgagcattgtttttggctttgcgcgttcttattttatggtttatgcaccgctgcccgcagcgctggtcgagtggctacgggaaattctgccaggtaaaaccaccgctgaattgtatatggctatcggctgccagaagcacgctaaaaccgaaagctaccgcgaatatctcgtttatctacagggctgtaatgagcagttcattgaagcgccgggtattcgtggaatggtgatgttggtgtttacgttgccgggttttgatcgggtatttaaagtcatcaaagacaggttcgcgccgcagaaagagatgtctgccgctcacgttcgtgcctgctatcaactggtgaaagagcatgatcgcgtgggccgaatggcggacacccaggagtttgaaaactttgtgctggagaagcggcatatttccccggcattaatggaattactgctccaggaagcagcggaaaaaatcaccgatctcggcgaacaaattgtgattcgccatctctatatcgaacgacggatggtgccgcttaatatctggcttgagcaagttgaggggcagcaattgcgtgatgccattgaagagtacggcaacgccattcgccagcttgccgctgccaacatcttccctggggatatgttatttaaaaactttggcgtcacccgtcacgggcgcgtggtgttttatgattacgacgaaatttgctacatgacggaagtgaatttccgcgacatcccgctgccgcgctacccggaagacgaacttgccagcgaaccgtggtacagcgtctcgccgggcgatgttttcccggaagagttccgtcactggttatgtgccgacccgcgtattggtccgctatttgaagagatgcacgccgacttgttccgcgctgattactggcgcgcactacaaaaccgcatacgtgaagggcatgtggaagatgtttatgcgtatcggcgcaggcagcggtttagcgtccgattcgtataa

SEQ ID NO: 2058 - DNA, 825 bp, Escherichia coli
atggtcgcacccattcccgcaaaacgcggcagaaaacccgccgttgccaccgcaccagcgactggacaggttcagtctttaacgcgtggcctgaaattactggagtggattgccgaatccaatggcagtgtggcactcacggaactggcacagcaagccgggttacccaattccacgacccaccgcctgctaaccacgatgcagcaacagggctttgtccgtcaggtcggcgaactgggtcactgggcaatcggcgcacacgcctttatggtcggtagcagctttctccagagccgtaatttgttagcgattgtccatcctattctgcgcaatctaatggaagagtctggcgaaacggtcaatatggcggtgcttgatcaaagcaatcacgaagcgattattatcgaccaggtacagtgtactcacctgatgcgaatgtccgcgcctatcggcggtaaattgccgatgcacgcttccggtgcgggtaaagcctttctggcccaactgagcgaagaacaggtgacgaagctgctgcaccgcaaagggttacatgcctatacccacgcgacgctggtgtctcctgtgcatttaaaagaagatctcgcccaaacgcgcaaacggggttattcatttgacgatgaggaacatgcgctggggctgcgttgccttgcagcgtgtattttcgatgagcaccgcgaaccgtttgccgcaatttcaatttccggaccgatttcacgtattaccgatgaccgcgtgaccgagtttggcgcgatggtgattaaagcggcgaaggaagtgacgctggcgtacggtggaatacgctga

SEQ ID NO: 2059 - DNA, 3684 bp, Escherichia coli
gtgagcagcaaagtggaacaactgcgtgcgcagttaaatgaacgtattctggtgctggacggcggtatgggcaccatgatccagagctatcgactgaacgaagccgattttcgtggtgaacgctttgccgactggccatgcgacctcaaaggcaataacgatctgctggtgctcagtaaaccggaagtgatcgccgctatccacaacgcctactttgaagcgggcgcggatatcatcgaaaccaacaccttcaactccacgaccattgcgatggcggattaccagatggaatccctgtcggcggaaatcaactttgcagcggcgaaactggcgcgcgcctgtgccgacgagtggactgcccgcacgccggagaaaccgcgctacgttgccggtgttctcggcccgaccaaccgcacggcgtctatttctccggacgtcaacgatccggcattccgcaacatcacttttgaccagctggtggcggcttatcgagaatccaccaaagcgctggtggaaggtggcgcggacctgatcctgattgaaaccgttttcgacacccttaacgccaaagcggcggtctttgcggtgaaaacggagtttgaagcgctgggcgttgaactgccgattatgatctccggcaccatcaccgacgcctccgggcgcacgctctccgggcagaccactgaagcgttttacaactccctgcgccacgccgaagcgctgacctttggcctgaactgtgcgctggggccagacgaactgcgccagtacgtacaggaactgtcgcgtattgcggaatgctatgtcaccgcccacccgaacgccgggctgcccaacgcctttggtgaatacgatctcgacgccgacacgatggcaaaacagatacgtgaatgggcagaagcgggctttctcaatatcgtcggcggctgctgcggcaccacgccacaacatattgcagcgatgagtcgtgcagtagaaggattagcgccgcgcaaactaccggaaattcccgtagcctgccgtttgtccggcctggagccgctgaacattggcgaagatagcctgtttgtgaacgtgggtgaacgcaccaacgtcaccggttccgctaagttcaagcgactgatcaaagaagagaaatacagcgaggcgctggatgtggcgcgtcagcaggtggaaaacggtgcgcagattatcgatatcaacatggatgaagggatgctcgacgccgaagcggcgatggtgcgttttctcaatctgattgccggtgaaccggatatcgctcgcgtgccgattatgatcgactcctcaaaatgggacgttattgaaaaaggtctgaagtgtatccagggcaaaggcattgttaactctatctcgatgaaagagggtgtcgacgcctttatccatcacgcgaaactgttgcgtcgctacggtgcggcagtcgtggtaatggcttttgacgaacagggccaggccgatacccgcgcacggaaaatcgagatttgccgtcgggcgtacaaaatcctcaccgaagaggttggcttcccggctgaagatatcatcttcgacccgaacatcttcgcggtcgcaactggcattgaagagcacaacaattacgcgcaggactttatcggcgcgtgtgaagacatcaaacgtgaactgccgcacgcactgatttccggcggcgtttctaacgtttctttctcattccgtggcaacgatccggtgcgcgaagccattcacgcggtgttcctctactacgctattcgcaatggcatggatatggggatcgtcaacgccgggcaactggcgatttacgacgacctgcctaccgagctacgcgacgcggtggaggatgtgatcctcaaccgtcgcgacgatggcaccgagcgtttactcgagcttgccgagaaatatcgcggcagcaaaaccgacgacaccgctaacacccagcaggcggagtggcgctcgtgggaagtgaataaacgtctggaatactcgctggtcaaaggcattaccgagtttatcgagcaggataccgaagaagcccgccagcaggctacgcgtccgattgaagtgattgaaggcccgttgatggacggcatgaacgtggtcggcgacctgtttggcgagggcaaaatgttcctgccgcaggtggtgaaatcggcgcgcgtaatgaagcaggcggtggcgtatctcgaaccgtttattgaagccagcaaagagcagggtaaaaccaacggcaagatggtgatcgccaccgtgaaaggcgatgtccacgacatcggtaaaaatatcgttggtgtggtgctgcaatgtaacaactacgaaattgtcgatctcggcgtgatggtgcctgcggaaaaaattctccgtaccgctaaagaagtgaatgctgatttgattggcctttcggggctgatcacgccgtcgctggacgagatggttaacgtggcgaaagagatggagcgtcagggcttcaccattccgctattgattggcggcgcgaccacctcaaaagcgcacacggcggtgaaaattgagcagaactacagcggcccgacggtgtatgtgcagaacgcttcacgcaccgttggtgtggtggcggcgttgctttccgacactcagcgtgatgatttcgttgctcgtacccgcaaggagtacgaaaccgtgcgtattcagcacggacgaaagaaaccacgcacaccaccggtcacgctggaagcggcgcgtgataacgacttcgcttttgactggcaggcttacacgccgccggtggtgcaccgtctcggtgtgcaggaagtcgaagccagcatcgaaacgctgcgtaattacatcgactggacgccgttctttatgacctggtcgctggccgggaagtatccgcgcattctggaagatgaagtggtaggtgttgaggcgcagcggctgtttaaagacgccaacgacatgctggataaattaagcgccgaaaaaatgctgaacccgcgtggtgtggtgggcctgttcccggcaaaccgtgtgggcgatgacattgaaatctaccgtgacgaaacgcgtacccatgtgattaatgtcagccaccatctacgccaacagaccgaaaaaaccggcttcgctaactactgtctcgctgacttcgttgcgccgaaggtttccggcaaagcggattacatcggcgcatttgccgtgactggcgggctggaagaggacgcactggctgatgcctttgaagcacagcatgatgattacaacaaaatcatggtgaaagcgcttgccgaccgtctggcggaagcctttgcggagtatctccatgagcgtgtgcgtaaagtctactggggctatgcgccgaacgagaacctcagcaacgaagagctgatccgcgaaaactaccagggcatccgtccggcaccgggctaccctgcctgcccggaacatacggaaaaagccacaatctgggagctgctggaagtggaaaaacataccggtatgaaactcacggaatccttcgccatgtggccgggtgcatcggtttcgggttggtacttcagtcatccagacagcaagtattacgcggtggcgcaaattcagcgcgatcaggttgaagactatgcccgccgtaaaggaatgagcgttaccgaagttgagcgttggttggcaccgaatctggggtatgatgccgagtaa

SEQ ID NO: 2060 - DNA, 321 bp, Escherichia coli
atgataaaaattgatgaaatagatttttttgctttcgaaggatgttcagagtccgaagttactgaactattaggaaaaaaaccaacaggttataatcattggataattaatataaaaacaggtgtggagtgggtattttatgatggtcgttattggttagattttcgtaaatccaaagagggtataaggtgtatctcatgcagtattctgtatcacgataaaagtaaagggcgtatcgatgtcttgtttagtgaaggtatagctgacagaggtttaaaaaatacgggtggagtgttaatccaaaaacgcccgcaattataa

SEQ ID NO: 2061 - DNA, 450 bp, Escherichia coli
atgcaacgtcaatataaaagatacattcttcttttttggggtgttatggatgttatcgcgatagccacatatctgttctactcgcttggtaatgatcgtatccctttttattccgatatcgttcattcactttctttacttaaggatatcggtgttgaaggcggtttttacgcttatgcagtcgccactgttacgctacaaatagtattattgttctctttatttttttctgcgcaatgttttttaagacaaaaattatttagtttctcttttttggcgattcaggagtttatgcgttttgctaccgtaagctgttcaatctccgtaataccgttgttacttaattatttttattcacaggatctggtcttaaatatttcgttgtttatcttctcagaggtcacaaaagtgacaacgattatctggtgtaaacgacaggggaaagtgtga

SEQ ID NO: 2062 - DNA, 1632 bp, Escherichia coli
gtgctaactttgcttcacctgctttctgccgtcgccctgctggtctgggggactcatattgttcgaacaggcgtaatgcgcgtcttcggcgcgcgtctgcgtactgtccttagccggagcgtcgaaaaaaagccgctcgccttttgcgcggggatcggcgttaccgcactggtgcagagcagtaatgccaccaccatgctggtgacctcgttcgtcgctcaggatctggttgctctcgcgcctgcgctggtgattgtgctgggtgcagatgtcgggacggcgctgatggcgcgtattctcaccttcgatttatcctggctgtcaccgttacttatttttatcggcgtgatttttttcctcggacgcaaacagtcacgcgccgggcaactgggccgcgtcggtattggtcttgggctgattttactggcgctggagttgattgtgcaggccgtaacgccgatcactcaggcaaacggcgttcaggtgatctttgcctcgctgactggcgacattttgctggatgcgctgattggtgcgatgttcgccattatcagctactccagccttgccgcggtactgctgaccgcgactctgaccgccgcaggcattatctctttcccagtggcgctttgtctggtgattggtgcaaacctcggttccggcctgctggcgatgctcaacaacagtgccgccaatgccgcagcccgccgtgtcgcgctgggtagcctgctgtttaagctggtgggtagcctgattatcctgccgtttgttcatttgctggcagagacaatggggaagttgccattgccaaaagcggaattggtgatctatttccacgtcttctacaaccttgtacgctgcctggtcatgttgccattcgttgacccgatggcacggttttgcaaaacgattattcgcgatgaaccggaactggatacccagctacggcctaaacatctggatgtcagcgcgctggatacgcccacgcttgctctggcgaacgctgcccgcgaaaccctgcgcattggcgacgccatggaacagatgatggaagggttgaataaagtgatgcacggcgagccacggcaggagaaagagctgcgtaagctggctgatgacatcaacgttctctataccgccattaagctgtatctggcgcggatgccaaaagaggaactggcagaagaagagtcgcgccgctgggcggagatcatcgaaatgtcgctcaaccttgaacaggcctccgatatcgtcgagcgcatggggagtgaaattgccgacaaatcgctggcagcaaggcgagcattttcgcttgatggcttgaaggaactggatgcgctctatgagcaattgctcagtaatttaaaactggcaatgtcggttttcttctctggcgatgttaccagcgcccgtcgtttgcgccgcagcaaacatcgttttcgcattcttaatcgccgctattcccacgcccacgtcgatcgcctgcaccagcaaaacgtgcagagtattgaaaccagttcgctacatttaggcttactgggagatatgcagcgtctgaactcgctgttttgttcggtggcttacagtgtgctggaacagccggatgaagatgaaggacgggacgagtattaa

SEQ ID NO: 2063 - DNA, 690 bp, Escherichia coli
atggaactgcttttattgagtaactcgacgctgccgggtaaagcctggctggaacacgcgctgccgctgattgctgaacagttgcagggtcgccgttctgcggtatttattcctttcgctggcgtaacgcagacctgggatgattacacagcgaaaacggctgcggttctcgctccgctgggtgtttctgtcaccggtattcatagcgttgtcgatcccgttgccgcgattgaaaatgcggaaattgtgattgtcggcggcggtaatactttccagttgctgaaacagtgccgcgagcgcgggctgctggcacccattactgacgtggtgaaacgtggcgcgctgtatattggctggagcgcaggcgctaaccttgcttgcccaaccattcgtaccaccaacgatatgccgattgtcgatccgcaaggtttcgatgcgctaaatctgttcccgctacaaatcaacccgcacttcaccaacgcgctgccggaaggccataaaggtgaaacccgtgagcagcgtattcgcgaactgctggtcgtcgcgccagaactgacgattattggtctgccggaaggtaactggatcacagtaagtaaaggtcacgctacgctgggtggcccgaacaccacttatgtgtttaaggctggtgaagaagcggtgccgctggaagcgggtcaccgtttttaa

SEQ ID NO: 2064 - DNA, 1230 bp, Escherichia coli
atgaaaacaacagctctgcgtctttatggtaaacgtgatttacgcctggaaacctttgaccttcctgaaatgcaggaggatgaaatcctcgcaacggtggtcactgacagcctgtgcctctcttcctggaaagaggccaatctgggtgaaaaccataaaaaagtacccgacgatgtggcgaccaaccccatcatcatcggccacgaattttgcggcgatattctggccgtgggtaaaaagtggcagcacaaattccagccgggtcagcgttatgtgattcaggccaacctgcaactccccgaccgcccggattgccccggctactccttcccgtgggtaggcggcgaagcgacgcatgtggttattcccaacgaggtcatggaacaagattgcctgctggcatacgacggcgaaacctattttgaaggctcgctggttgaaccgctttcctgcgtgattggcgcgttcaacgccaactatcatcttcaggaaggtagttataaccacacgatggggattcgcccgcaagggcgcacgctgatcctcggcggcaccggaccaatgggactgttggcgattgattatgcgctacatggacccgttaacccttcgctgctcatcattaccgataccgacaacgacaaattgagttatgcgcgcaagcactatccatcagaaccgcaaacactgattcattatctcaatgccgccgatgcagcatttgatacgttaatggcactgagtggcggtcacggcttcgatgatattttcgtctttgtgcctaatgaaggactggtgactctcgcctcttccttgctggcgacagatggttgtctgaatttcttcgccggaccgcaggataagcacttcagcgcgccaattaatttctacgatgtgcattatgcatttacccactacgtgggcacatcaggcggcaataccgacgacatgcgcgcagcggtcaaattgattgaagagaaaaaagtgcaggccgcaaaagtggtaacacatattcttgggctgaatgccgcgggcgaaaccacgcttgaattgcctgccgtcggcggcggcaaaaagctggtgtataccgggaaatacctgccgctgacgtcactcacgcagattcaggatcaagcactggcggtgattctggcgcatcatcaggggatctggtccggtgaggcggagcaatacctgctcgcccatgcagaggcaatttcccatgattaa

SEQ ID NO: 2065 - DNA, 825 bp, Escherichia coli
atggaacagagaaaaattacacgcagcgatctggtgagcatgtttctgcgctccaacctgcaacaggcatcctttaactttgaacgtattcacgggctgggtttttgctacgacatgatccccgccatcaaacgactttacccattaaaagaggatcaggttgcggcgctcaggcgacacctggtgttcttcaataccacgccagccgtatgtggcccggtcatcggcgtcactgccgccatggaagaggcgcgagccaacggcgcggaaattgatgacggtaccattaacggcatcaaagtaggtctgatgggaccattggcaggagttggcgatccactggtctggggaacgctgcgcccgattaccgccgcgctcggcgcatctctggcactttcgggcaacattctcggccccctgctgttcttctttattttcaacgcggtgcgtctggcgatgaagtggtatggcctacagctcggctttcgcaaaggggtgaatatcgtcagcgatatgggcggtaatttgctgcaaaaactcaccgaaggcgcgtcgattctcgggctgtttgtgatgggcgtgctggtgaccaaatggacgtcaatcaacgtaccgttggtggtttcacaaacgcctgccgccgatggtgccaccgtcaccataaccgtgcagaacatcctcgaccaactttgccctggtttgctggcgctcggtctgacgctgctgatggttcgtctgctcaacaaaaaaattaacccggtatggctgattttcgccctgtttggtttagggattatcggtaatgcgctgggcttcctgtcctga

SEQ ID NO: 2066 - DNA, 798 bp, Escherichia coli
atggaaataagtaccctacaaatcattgctatatttcttttttcctgtattgccggaatgggcagcgtgctggatgaatttcagactcatcgtccgttaattgcctgtacggtgattggtttaattctcggtgatttaaaaaccggaattatgctcggtggtacgctggaattgatagctctcggctggatgaacgtcggcgcggcgcaatctccggattctgcactcgccagcataatctccgccattctggttatcgttggtcagcaaagcatcgccaccggaatcgccatcgcgttgcctgtggctgcggcaggccaggtgctgacggtgtttgcccgtaccatcaccgtagtgttccagcacgcggcggataaagcagcggaagaagcacggtttcgcactctcgatattctgcatgtctccgcgcttggcgtgcaggcactgcgcgttgctattccggcactgattgtctcgctgttcgtcagcgctgatatggtgagcaatatgctgagcgccattcccgaatttgtgacccgtggactgcagattgctggcggttttatcgtggtggtcggttacgccatggtgcttcgcatgatgggcgtgaaatatttgatgcctttctttttcctcggtttcctcgcaggtggctacctcgatctcagtctgctggcgttcggtggcgtcggcgtgatcatggccctgctctacatccagttaaatccacagtggcgtaaagctgaaccacatccccagaccaccactatcaccgcccttgaccaacttgatgattaa

SEQ ID NO: 2067 - DNA, 495 bp, Escherichia coli
atgaacattacgctcgcccgcattgatgaccgcctgatccacggccaggtcactaccgtctggtctaaagtggctaacgcccaacgcattattatctgcaatgacgaagtttataacgatgaagttcgccggacattattgcgtcaggctgcgccaccgggaatgaaggttaacgtggtcaatattgaaaaagccgtcgcggtttatcacaacccgcaatatcaggacgaaaccgttttttatcttttcactcgcccacaggatgccttagcaatggttcgccagggggtaaaaataggtaccctgaatattggcggtatggcctggcgtcctggtaagaaacagttaaccaaagcagtttcattagatgacgatgatattaacgcatttcatgagttaaataatcttggcgtcatactggatttacgcgtcgtagcgtcagatccctcaatcaatattatcgacaaaataaacgaacagttaatcgcaaattaa

SEQ ID NO: 2068 - DNA, 408 bp, Escherichia coli
atggtcaacgccattttttgtgcgcatggcaaattagcttgcgccatgctggaatcggttcagatggtgtacggcgatgccagggtcgaggccgttgaatttgtgcccggcgagaacgccggagacatcgtagcaaagctggaaaagttagtaagcattcacaatcaagatgagtggctaatcgccgtggatttacagtgcggcagcccgtggaatgcggcagcgatgcttgcgatgcgcaatcctcgtctgcgggtaatcagcggcctttctctgccgctggcgctcgaactggttgataaccaggacagcatgaatattgatgaactgtgtgaacacctgacgcaaatcgcaaagcaaacctgcgtcgtctggagacaggtggcaacagcggaggaggatttctga

SEQ ID NO: 2069 - DNA, 807 bp, Escherichia coli
atgcaaacgtggttaaatttgcaggataaaatcattattgtcaccggtggcgcatccggtattggtctggcgattgtagaggaattattagcacaaggcgcgaatgtacagatggtcgatattcacggtggcgatggtcaatatgaaagccataaaggttatcagttctggccgaccgatatttccagcgccaaagagataaatcatacggtagcagaaattatccagcgttttggtcgcatcgacgctctggttaacaacgccggggtcaatttcccgcgtctgctggtcgatgagaaagcgcctgccgggcagtatgaactcaacgaagctgcattcgaaaaaatggtcaatatcaaccagaaaggcgtttttctgatgtcgcaggcggtggcgcgacagatggtcaaacaacatgatggcgtgattgtgaatgtttcctcagaaagtgggctggaaggctcagaaggccaaagctgttacgccgcgaccaaagccgcgctcaatagcttcacgcgctcctggtcgaaagagctgggcaagcacggtatccgtgtggtcggtatcgcgccagggattctggaaaaaacaggactgcgcacgccggaatatgaagaagcgctggcgtggacgcgcaatatcaccgtcgagcagctgcgtgaaggctataccaaaaattccattcctattgggcgcgccggaagattagcagaagtggctgattttgtttgttatctgctgtctgaacgcgccagctatatcaccggagtaaccactaacattgcgggcggcaaaacgcgcggctaa

SEQ ID NO: 2070 - DNA, 948 bp, Escherichia coli
atggaaaacagtgacgatatccgtttgattgtgaagattgcccaactctattacgaacaggatatgacgcaggcgcaaattgcgcgcgaactgggtatttatcgcactaccatcagccgcttgcttaaacgaggccgcgatcagggaattgtcaccatcgccatcaactatgactacaacgaaaatctctggctggagcagcaagtgaagcaaaagtttggcctgaaagacgttgtggtggtgtcaggaaatgatgaggatgaagatattcaactggcgatgatggggttacacggcgcgcaactgctggatcgcttgctggaacctggcgatattgtcggtttttcctggggccgcgcggtgagcgcactggttgaaaacttgccgcaggcggggcaatcgcggcagttaatttgcgtgccgattattggcggcccgtccggtaaactcgaaagccgctatcacgtaaacacattaacctacagcgcggcagcgaagctgaaaggggaatcgcatctcgcggattttccggcgctgctggataacccattaattcgtaatgggatcatgcagtctcagcactttaaaaccatctctgcctactgggataatctggatgtcgccctggtgggaattggctcaccggccattcgcgacggcgctaactggcatgcgttttatggtggtgaagagagtgacgacctgaatgcccgccaggttgctggcgatatttgctcgcgcttttttgatattcacggcgcaatggttgaaacgaatatgagcgaaaaaacactctctatcgaaatgaataaattaaagcaggcacggtattccattggcattgccatgagcgaagaaaaatacagcggaattgttggtgcactgcgtggaaaatatattaattgtctggtaacgaatagcagcacagctgaactattactgaaataa

SEQ ID NO: 2071 - DNA, 873 bp, Escherichia coli
atgctgcccgactcatcagtccgtttaaataaatacatcagcgaaagcggaatttgctcacgccgcgaagcggatcgctatatcgagcaaggcaatgtgttccttaatggcaagcgagccaccattggcgatcaggtgaaacccggcgacgttgtgaaagtaaatggtcagttgattgagcctcgggaatccgaagatttggtacttatcgccctgaacaagcccgtcggtattgtcagcaccaccgaagatggcgagcgcgataacattgtcgatttcgttaaccacagcaaacgcgtgttcccgattggccgcctggataaagattcccaggggctgattttcctcaccaatcacggcgatctggtgaataagatcctccgtgcgggtaacgatcatgagaaagagtatctggtgacggttgataaaccgattaccgatgaatttattcgtggtatgggggcgggagtaccgatcctcgggacggtaactaaaaagtgcaaagtcaaaaaagaagcaccgtttgtcttccgcattaccctggtgcaggggctgaaccgtcagattcgtcgcatgtgcgagcactttggttacgaagtgaaaaagctggaacgtacgcgcattatgaacgtcagcttaagcggcattccgctgggtgagtggcgcgatttaaccgacgatgagttaatcgatctctttaagctcattgaaaattcctcttccgaggcaaaacctaaagcgaaggccaaaccgaaaacggtaggcatcaaacgtccagtcgttaagatggaaaaaacggcggaaaaaggcggtcgcccggcgtccaacggtaagcgttttacctcgccggggcgcaaaaagaaggggcgttaa

SEQ ID NO: 2072 - DNA, 273 bp, Escherichia coli
atggcactcccccgtattacccaaaaagagatgactgaacgcgagcagcgtgaacttaaaacactgctggatcgggcgcggattgcgcatggtcgcgtactgaccaactccgaaactaacagcattaagaaagagtacatcgataaattaatggtcgagcgtgaggctgaagcgaaaaaagcccgccaattgaagaaaaagcaggcttataaaccggatcctgaggcgtcatttagctggtcagcaaatacgtcgacgcgcggcaggcgctga

SEQ ID NO: 2073 - DNA, 1350 bp, Escherichia coli
atgtctgaaattgttgtctccaaatttggcggtaccagcgtagctgattttgacgccatgaaccgcagcgctgatattgtgctttctgatgccaacgtacgtttagttgtcctctcggcttctgctggtatcactaatctactggtcgctttagctgaaggactggaacctggcgagcgattcgaaaaactcgacgcaatccgcaatatccagtttgccattctggaacgtctgcgttacccgaacgttatccgtgaagagattgaacgtctgctggagaatattactgttctggcagaagcggcggcgctggcaacgtctccggccctgacagatgaactggtcagccacggcgagctgatgtcgaccctgctgtttgtcgagatcctgcgcgaacgcgatgttcaggcacagtggtttgatgtacgtaaagtgatgcgtaccaacgatcgatttggtcgtgcagagccagatgtagccgcgctggcggaactggccgcgctgcagctgcttccacgcctcaatgaaggcttagtgatcacccagggatttatcggcagcgaaaataaaggtcgtacaacgacgcttggccgtggaggcagcgattatacggcagccttgctggcggaggctttacacgcatctcgtgttgatatctggaccgacgtcccgggcatctacaccaccgatccacgcgtggtttccgcagcaaaacgcattgatgaaatcgcgtttgccgaagcggcagagatggcaacttttggtgcaaaagtactgcatccggcaacgttgctacccgcagtacgcagcgatatcccggtctttgtcggctccagcaaagacccacgcgcaggtggtacgctggtgtgcaataaaactgaaaatccgccgctgttccgcgcgctggcgcttcgtcgcaatcagactctgctcactttgcacagcctgaatatgctgcattctcgcggtttcctcgcggaagttttcggcatcctcgcgcggcataatatttcggtagacttaatcaccacgtcagaagtgagcgtggcattaacccttgataccaccggttcaacctccactggcgatacgttgctgacgcaatctctgctgatggagctgtctgcactgtgccgggtggaagtggaagagggtctggcgctggtcgcgttgattggcaatgacctgtcaaaagcctgcggcgttggcaaagaggtattcggcgtactggaaccgttcaacattcgcatgatttgttacggcgcatccagccataacctgtgcttcctggtgcccggcgaagatgccgagcaggtggtgcagaagctgcattttaatttatttgagtaa

SEQ ID NO: 2074 - DNA, 1650 bp, Escherichia coli
atgaaaaacatcaatccaacgcagaccgctgcctggcaggcactacagaaacacttcgatgaaatgaaagacgttacgatcgccgatctttttgctaaagacggcgatcgtttttctaagttctccgcaaccttcgacgatcagatgctggtggattactccaaaaaccgcatcactgaagagacgctggcgaaattacaagatctggcgaaagagtgcgatctggcgggcgcgattaagtcgatgttctctggcgagaagatcaaccgcactgaaaaccgcgccgtactgcacgtagcgctgcgtaaccgtagcaataccccgattctggttgatggcaaagatgttatgccggaagtcaacgcggtgctggagaagatgaaaaccttctcggaagcgattatttccggtgagtggaaaggctataccggcaaggcaatcactgacgtagtgaacatcgggatcggcggttctgacctcggcccgtacatggtgactgaagcactgcgtccatacaaaaaccacctgaacatgcactttgtttctaacgtcgatgggactcacatcgcggaagtgctgaaaaaagtaaacccggaaaccacgctgttcctggtagcatctaaaaccttcaccactcaggaaaccatgaccaacgcccacagcgcgcgtgactggttcctgaaagcggcaggtgatgagaagcacgttgcgaaacactttgcggcgctctcaaccaacgccaaagccgttggcgagtttggtattgatactgccaacatgttcgaattctgggactgggtcggcggtcgttactctttgtggtcagcgattggcctgtcgattgttctctccatcggctttgataacttcgttgaactgctttctggcgcacacgcgatggacaagcatttctccaccacgcctgccgagaaaaacctgcctgtactgctggcgctgattggcatctggtacaacaatttctttggcgcggaaactgaagcgattctgccgtatgaccagtatatgcaccgtttcgcggcgtacttccagcagggcaatatggaatccaacggtaagtatgttgaccgtaacggtaaggttgtggattaccagactggcccgattatctggggtgaacctggcacgaacggtcagcacgcgttctatcagctgatccaccagggaaccaaaatggtaccgtgcgatttcatcgctccggctatcacccataacccgctctctgatcatcaccagaaactgctgtctaacttctttgctcagaccgaagcgctggcgtttggtaaatcccgcgaagtggttgagcaggaatatcgtgatcagggtaaagatccggcaacgcttgactacgtggtgccgttcaaagtgttcgaaggtaaccgcccgaccaactccatcctgctgcgtgaaatcactccgttcagcctgggggcgttgattgcgctgtatgagcacaaaatctttactcagggcgtgatcctgaacatcttcaccttcgaccagtggggcgtggaactgggtaaacagctggcgaaccgtattctgccagagctgaaagatgacaaagaaatcagcagccacgatagctcgaccaatggtctgattaaccgctataaagcgtggcgcggttaa

SEQ ID NO: 2075 - DNA, 243 bp, Escherichia coli
atgaaaaaagttctgtatggcatttttgccatatctgcgcttgcggcgacttctgcgtgggctgcacctgtacaggtgggcgaagcggcaggatcggcagcaacgtcggtttcggcggggagttcctccgcgaccagcgtcagcaccgtaagctcggcggtgggtgtcgcgctcgcggcaaccggtggcggtgatggttctaataccgggaccaccacaaccacgaccaccagtacccagtaa

SEQ ID NO: 2076 - DNA, 639 bp, Escherichia coli
gtgaagcgaccagcactcattcttatctgcctgctattacaggcctgttcagccacgactaaagagctgggcaattcactgtgggacagtctgttcggcacgccaggcgtacagctgacggacgatgatattcaaaatatgccctacgccagccagtacatgcagcttaatggcgggccgcagttatttgtggtgctggccttcgctgaagacggacaacaaaaatgggtcactcaggatcaggccacccttgtcacacaacatggtcgtctggtgaagactttgcttggcggcgacaacctgattgaagtgaataaccttgccgccgacccgctgattaaacccgcacaaattgttgatggtgcaacatggacgcgcacgatgggctggaccgagtaccagcaggtacgctacgccaccgcacgctcagtcttcaaatgggatggcaccgataccgtcaaagtcggcagcgatgaaactccggttcgcgtgctggacgaagaagtctccaccgaccaggcgcgctggcataaccgctactggatcgacagcgaagggcaaattcgccagtcggaacagtatctcggcgcggattatttcccggtgaaaaccactctcatcaaggcggcaaaacaatga

SEQ ID NO: 2077 - DNA, 738 bp, Escherichia coli
atgattaaacaaactattgtcgcattgattttgagtgtgggggcgtcatcggtcttcgcggcgggaaccgtcaaggtattcagcaatggcagcagtgaggccaaaacgctgacgggtgcagagcatttaatcgatctggtaggccaaccacggctggcaaacagttggtggcccggtgcggtgattagcgaagagctggcaacggcggcagcattgcgtcagcagcaggcgttgctgacacggctggcagaactggctgcagattccagcgccgacgatgccgccgcgattaacgccttacgccagcaaattcaggcgttgaaagtgacgggcaggcaaaaaatcaatcttgatcccgatatcgtccgcgttgccgaacgcggtaacccgccgttgcagggcaactacacgctgtgggtcggaccaccgccgtccacggtcatgttgttcgggcttatcagccgtcctggcaagcagccattcactccaggtcgcgacgtggcgagctatctctctgaccagagcctgctcagcggtgcggatcgcagctacgcgtgggtggtttaccctgacggacgcacgcaaaaagcgccggtggcttactggaacaagcgtcacgtagagccgatgcccggcagcattatttatgttggcctcgcggactccgtctggagtgagacacctgatgcccttaacgccgacattcttcagactctgacgcagcggataccccaataa

SEQ ID NO: 2078 - DNA, 2097 bp, Escherichia coli
atgaaaaaaagacatctgcttagcttactggcgctgggtattagcacagcttgctacggcgaaacatatcctgcgcccattggtccgtcgcaatcggatttcggtggcgtaggattattacaaacgcccaccgcgcgcatggcgcgggaaggggagctgagcctgaactatcgcgataatgatcagtaccgttattactcagcttcagtgcaactcttcccgtggctggaaacaacgctgcgctacaccgacgtgcgcacccggcagtacagcagcgtcgaagcgttctctggcgatcaaacgtataaagataaagccttcgatctcaaactgcgtttgtgggaagagagttattggctgccgcaagtggcggttggtgcgcgggatatcggcggtacggggctgtttgatgcggaatatcttgttgccagcaaagcctgggggccgttcgattttacgctcggcctgggctggggatatctgggcaccagcggtaatgtgaaaaatccgctctgttcagccagtgataaatattgctatcgcgataacagctacaaacaagcgggatctatcgacggcagtcagatgttccacggcccggcctcactgtttggcggcgtggaataccagacgccctggcaaccgctgcgcctgaaactggagtatgaaggtaataattatcagcaggattttgccgggaagctggagcaaaaaagtaagtttaacgtcggggcgatttatcgcgttaccgattgggccgacgttaaccttagctatgaacgtggcaacacctttatgtttggcgtcacgctgcgcaccaactttaacgatctgcgcccgtcctacaacgataacgcccgaccgaaataccagccgcaaccgcaggatgccattttgcagcactcggtggtggcgaatcagttaacgctgttgaaatacaatgccggactggccgatccgcagatccaggcgaaaggcgatacgctgtatgtcaccggcgagcaggtgaaatatcgtgattcgcgcgaagggatcatccgtgctaatcggatcgtgatgaacgatctgcctgatgggatcaaaacgatccgcattacggaaaatcgccttaacatgccgcaggtgacgacggaaaccgatgtcgccagcctgaaaaatcatctcgccggagagccgttgggccacgaaacgaagctggtgcaaaaacgcgtcgagccagtggttccgaagtccaccgagcagggctggtatatcgacaaatcacgctttgatttccatatcgatccggtgctgaaccagtcggtcggtggcccggaaaacttttacatgtatcagctgggcgtgatgggaacggcggatttgtggctgacggaccatctgctgaccaccggcagcctgtttgctaaccttgccaacaactacgacaagtttaactacaccaatccaccgcaggactcgcacttaccgcgcgtgcgtacccatgtgcgcgagtatgtgcagaatgatgtctatgtgaataacctgcaagccaactacttccagcatctgggcaacggcttctacggtcaggtctacggaggttatctcgaaaccatgtttggcggcgtgggggcagaagtgttgtatcgcccgctggatagcaactgggcgtttggtctggatgccaactacgttaaacagcgcgactggcgtagcgcaaaagatatgatgaaattcaccgattacagcgtgaaaaccggacatctgaccgcgtactggacgccatctttcgcccaggacgtgttagtgaaagcgagcgtcgggcagtatctggctggggataaaggcggcacgctggagatcgccaaacgctttgatagcggcgtggtagtggggggctatgccacgatcacgaatgtttcgaaagaggagtacggcgaaggggacttcaccaaaggcgtgtatgtctctgtaccgctggatctcttctcgtctggcccgacacgcagccgtgcggcgattggctggacgccgctgacgcgtgacggtggtcagcaacttgggcgtaagttccagttgtatgatatgaccagcgaccgtagcgtcaatttccgctaa

SEQ ID NO: 2079 - DNA, 411 bp, Escherichia coli
atgacgtcactctctcgtccgcgcgtggagtttatatccaccattttgcagaccgtactcaatcttggcctgttgtgcctcggcctgattttggttgtcttcctcggcaaagaaacggtgcatctggctgatgtgctgttcgcgccagaacaaaccagtaaatatgagctggtagaagggctggtggtttactttctctatttcgaatttatcgcgctgattgtgaagtactttcagtccggttttcacttcccgctacgttactttgtctatattgggatcaccgccattgtgcgcttgatcatcgtcgatcataaatcgccactggatgtgttgatctactcggcagcgatcctgttactggtgatcaccctgtggctgtgtaattcgaaacggctgaagcgggagtaa

SEQ ID NO: 2080 - DNA, 891 bp, Escherichia coli
atggcaatggtccaaccgaaatcgcaaaaagcacgtttgtttattactcacctgctactgctactttttatcgcggcgattatgttcccgctgctgatggtcgtcgccatctcgctgcgtcaggggaacttcgcgaccggtagtctgatcccggagcaaatctcctgggatcactggaaactggcgttaggttttagtgtggaacaggctgatggtcgcattacgccaccgccattcccggtactgctgtggctgtggaactcggtaaaggtcgccgggatttccgcgattggcattgtggcgctctccaccacctgcgcctacgctttcgcccgtatgcgctttccaggcaaagcgacgctgctgaaaggaatgctgattttccagatgttcccggcagtactttcactggtcgcgttgtatgcgttgtttgatcgtttgggtgagtacattccattcattggcctgaatactcacggcggcgtaattttcgcgtatctgggcgggattgcgctgcatgtctggaccatcaaaggttatttcgaaaccatcgacagttcgctggaagaagcggcggcgctggatggtgcgacaccgtggcaggccttccgccttgtcctgttgccgctgtcagtaccgattctggcggttgtgttcatcctgtcgtttatcgctgccattactgaagttccggtcgcgtcgctattactgcgtgacgtaaacagctacaccctggctgtggggatgcagcaatacctcaacccgcaaaactacctgtggggtgactttgccgccgctgccgtgatgtctgcattaccgatcaccatcgtcttcttgctggctcaacgctggctggtcaacggcctgacggcaggtggtgtgaaaggttaa

SEQ ID NO: 2081 - DNA, 1545 bp, Escherichia coli
atggatgtcattaaaaagaaacattggtggcaaagcgacgcgctgaaatggtcagtgttaggtctgctcggcctgctggtgggttaccttgttgttttaatgtacgcacaaggggaatacctgttcgccattaccacgctgatattgagctcagcggggctgtatattttcgccaatcgtaaagcctacgcctggcgctatgtttacccgggaatggctggaatgggattattcgtcctcttccctctggtctgcaccatcgccattgccttcaccaactacagcagcactaaccagctgacttttgaacgtgcgcaggaagtgttgctagatcgctcctggcaagcaggcaaaatctataattttggtctttatccggcgggcgatgagtggcaactggcgctcagcgacggcgaaaccggcaaaaattacctctccgacgctttcaaatttggcggcgagcaaaaactgcaattgaaagaaagcgccacgcagcctgaaggcgagcgcgcgaatctgcgcgtgattacccagaatcgtcaggcactgagtgacattaccgccattctgccggatggcaacaaagtgatgatgagctccctgcgccagttttctggcacgcaaccgctctacacactcgacggtgacggcacgttgacgaataatcagagcggcgtgaaatatcgtccgaataaccaaattggcttttaccagtccattaccgccgatggcaactggggggatgaaaagctaagccccggttacaccgtgaccaccggctggaaaaactttacccgcgtctttaccgacgaaggcattcagaaaccgttcctcgccattttcgtctggaccgtggtgttctcgctgatcactgtctttttaacggtggcggtcggcatggttctggcgtgtctggtgcagtgggaagcgttgcgcggcaaagcggtctatcgcgtcctgcttattctgccctacgcggtgccatcgttcatttcaatcttgattttcaaagggttgtttaaccagagtttcggtgaaatcaacatgatgttgagcgcgctgtttggcgtgaagcccgcctggttcagcgatccgaccaccgcccgcacgatgctgattatcgtcaacacctggctgggttatccgtacatgatgatcctctgcatgggcttgctgaaagcgattccggacgatttgtatgaagcctcagcaatggatggcgcaggtccattccagaacttctttaagattacgctgccgctgctgattaaaccgctgacaccgctgatgatcgccagctttgcctttaactttaacaacttcgtgctgattcaactgttaaccaacggcggcccggatcgtcttggcacgaccacgccagccggttataccgacctgcttgttaactacacctaccgtatcgcttttgaaggcggcgggggtcaggacttcggtctggcagcagcaattgccacgctgatcttcctgctggtgggcgcgctggcgatagtgaacctgaaagccacgcgaatgaagtttgattaa

SEQ ID NO: 2082 - DNA, 1191 bp, Escherichia coli
atgaaaataaaaacaggtgcacgcatcctcgcattatccgcattaacgacgatgatgttttccgcctcgactctcgccaaaatcgaagaaggtaaactggtaatctggattaacggcgataaaggctataacggtctcgctgaagtcggtaagaaattcgagaaagataccggaattaaagtcaccgttgagcatccggataaactggaagagaaattccctcaggttgcggcaactggcgatggccctgacattatcttctgggcgcacgaccgctttggtggctacgctcaatctggcctgttggctgaaatcaccccggacaaagcgttccaggacaagctgtatccgtttacctgggatgccgttcgttacaacggcaagctgattgcttacccgattgctgtcgaagcgttatcgctgatttataacaaagatctgctgccgaacccgccaaaaacctgggaagagatcccggcgctggataaagaactgaaagcgaaaggtaagagcgcgctgatgttcaacctgcaagaaccatacttcacctggccgctaattgcggctgacgggggttatgcgttcaagtatgaaaacggcaagtacgacattaaagacgtaggcgtggataacgctggcgcgaaagcgggtctgaccttcctggttgatctgattaaaaacaaacacatgaatgcagacaccgattactccatcgcagaagctgcctttaataaaggcgaaacagcgatgactatcaacggcccgtgggcatggtccaacatcgacaccagtaaagtgaattatggtgtaacggtactgccgaccttcaaaggtcaaccatctaaaccgttcgttggcgtgctgagcgcaggtattaacgccgccagtccgaacaaagagctggcgaaagagttcctcgaaaactatctgctgactgacgaaggtctggaagcggtcaataaagacaaaccgctgggtgcagtagcgctgaagtcctatcaggatgaacttgcgaaagatccacgtattgccgccaccatggataacgctcagaaaggtgaaattatgccgaacatcccgcagatgtccgctttctggtatgccgtgcgtactgcggtgatcaacgccgccagcggtcgtcagactgtggatgctgcgctgaaagatgcacagactcgtatcaccaagtaa

SEQ ID NO: 2083 - DNA, 1116 bp, Escherichia coli
atggcgagcgtacagctgcaaaatgtaacgaaagcctggggcgaggtcgtggtatcgaaagatatcaatctcgatatccatgaaggtgaattcgtggtgtttgtcggaccgtctggctgcggtaaatcgactttactgcgcatgattgccgggcttgagacgatcaccagcggcgacctgttcatcggtgagaaacggatgaatgacactccgccagcagaacgcggcgttggtatggtgtttcagtcttacgcgctctatccccacctgtcagtagcagaaaacatgtcatttggcctgaaactggcaggcgcaaaaaaagaggtgattaaccaacgcgtcaaccaggtagcggaagtgctgcaactggcgcatttgctggatcgcaaaccgaaagcgctctccggtggtcagcgtcagcgtgtggcgattggccgtacgctggtggccgagccaagcgtatttttgctcgatgaaccgctctccaacctcgatgctgcactgcgtgtgcaaatgcgtatcgaaatctcccgtctgcataaacgcctgggccgcacaatgatttacgtcacccacgatcaggtcgaagcgatgacgctggccgacaaaatcgtggtgctggacgctggtcgcgtggcgcaggttgggaaaccgctggagctgtatcactatccggcagaccgttttgtcgccggatttatcggttcgccaaagatgaacttcctgccagtaaaagtgaccgccaccgcaatcgatcaagtgcaggtggagctgccgatgccgaatcgtcagcaagtctggctaccggtcgaaagccgtgatgtccaggtgggagccaatatgtcactgggtattcgcccggagcatctactgccgagtgatatcgctgacgtcatccttgagggtgaagttcaggtcgtcgagcaactcggcaacgaaacgcaaatccatatccagatcccttccattcgtcaaaacctggtgtaccgccagaacgacgtggtgttggtagaagaaggtgccacattcgctatcggcctgccgccagagcgttgccatctgttccgtgaggatggcactgcatgtcgtcgactgcataaggagccgggcgtttaa

SEQ ID NO: 2084 - DNA, 1341 bp, Escherichia coli
atgatgattactctgcgcaaacttcctctggcggttgccgtcgcagcgggcgtaatgtctgctcaggcaatggctgttgatttccacggctatgcacgttccggtattggctggacaggtagcggcggcgaacaacagtgtttccagactaccggtgctcaaagtaaataccgtcttggcaacgaatgtgaaacttatgctgaattaaaattgggtcaggaagtgtggaaagagggcgataagagcttctatttcgacactaacgtggcctattccgtcgcgcaacagaatgactgggaagctaccgatccggccttccgtgaagcaaacgtgcagggtaaaaacctgatcgaatggctgccaggctccaccatctgggcaggtaagcgcttctaccaacgtcatgacgttcatatgatcgacttctactactgggatatttctggtcctggtgccggtctggaaaacatcgatgttggcttcggtaaactctctctggcagcaacccgctcctctgaagcgggtggttcttcctctttcgccagcaacaatatttatgactataccaacgaaaccgcgaacgacgttttcgatgtgcgtttagcgcagatggaaatcaacccgggcggcacattagaactgggtgtcgactacggtcgtgccaacctgcgtgataactatcgtctggttgatggcgcatcgaaagacggctggttattcactgctgaacatactcagagtgtcctgaagggttttaacaagtttgttgttcagtacgctactgactcgatgacctcgcagggtaaaggtctgtcgcagggttctggcgtcgcgtttgataacgaaaaatttgcctacaatatcaataacaacggtcacatgctgcgtatcctcgaccacggtgcgatctccatgggcgacaactgggacatgatgtacgtgggtatgtaccaggatatcaactgggataacgacaacggcaccaagtggtggaccgtcggtattcgcccgatgtacaagtggacgccaatcatgagcaccgtgatggaaatcggctacgacaacgtcgaatcccagcgcaccggcgacaagaacaatcagtacaaaattaccctcgcacaacaatggcaggctggcgacagcatctggtcacgcccggctattcgtgtcttcgcaacctacgccaagtgggatgagaaatggggttatgactacaccggtagctcttcaaccaacccatactacggcaaggctgtgtcggctgatttcaacggcggtagcttcggtcgtggcgacagcgacgagtggaccttcggtgcccagatggaaatctggtggtaa

SEQ ID NO: 2085 - DNA, 921 bp, Escherichia coli
atgaaaatgaataaaagtctcatcgctctctgtttatcagcagggttgctggcaagcgcacctggaatcagccttgccgatgttaactacgtaccgcaaaacaccagcgacgcgccagccattccatctgccgcgctgcaacaactcacctggacaccggtcgatcaatctaaaacccagactactcaactgtcgaccggcggccaacaactgaatgtccctggcatcagtggtccggttgctgcgtacagcgtcccggcaaacattggtgaactgacactgacgctgaccagcgaagtgaacaaacaaaccagcgtatttgcgccgaatgtgctgattcttgatcagaacatgaccccatcagccttcttccccagcagttatttcacctaccaggaacccggcgtgatgagtgcagatcggctggaaggcgttatgcgcctgacaccggcgttggggcagcaaaaactttatgttctggtctttaccacggaaaaagatctccagcagacgactcaactgctcgacccggctaaagcctatgccaaaggcgtcggtaactcgatcccggatattcccgatccggttgctcgtcataccaccgatggcttactgaaactgaaagtgaaaacgaactccagctccagcgtgttggtaggaccactatttggttcttccgctccagctccggttacggtaggcaacacggcggcaccagctgtggctgcacccgctccggcaccggtgaagaaaagcgagccgatgctcaacgacacggaaagttattttaataccgcgatcaaaaacgctgtcgcgaaaggtgatgttgataaggcgttaaaactgcttgatgaagctgaacgcctggggtcgacatctgcccgttccacctttatcagcagtgtaaaaggcaaggggtaa

SEQ ID NO: 2086 - DNA, 498 bp, Escherichia coli
atgtcacaccccgcgttaacgcaactgcgtgcgctgcgctattttacagagatccctgccctggagccgcaactgctcgactggctgttgctggaagattccatgacaaaacgttttgaacagcagggaaaaacggtgagcgtgacgatgatccgcgaagggtttgtcgagcagaatgaaatccccgaagaactgccactgctgccgaaagagtctcgttactggttacgtgaaattttgttatgtgccgatggtgaaccgtggcttgccggtcgtaccgtcgttcctgtgtcaacgttgagcgggccggagctggcgttacaaaaattaggtaaaacgccgttaggacgctatctgttcacatcatcgacattaacccgggactttattgagataggccgtgatgccggactgtgggggcgacgttcccgcctgcgattaagcggtaaaccgctgttgctaacagaactgtttttaccggcgtcaccgttgtactaa

SEQ ID NO: 2087 - DNA, 873 bp, Escherichia coli
atggagtggagtctgacgcagaataagctgctggcgtttcatcgcttaatgcgtacggataagccaattggcgcgttactgctgctctggccaacattatgggcgttgtgggtggcgacaccgggcgttccccagctctggatcctggcggtgtttgtcgcgggcgtctggctgatgcgcgctgctggttgcgtggtgaatgattatgctgaccgcaagtttgatggtcatgttaagcgcacggcgaaccgaccacttcccagcggcgcggtaacggagaaagaggcgcgcgcgctgtttgtagtgctggtactgatttcatttttactggtgctgacgctgaatacgatgactattctgttgtcgattgccgcgctggcgctggcgtgggtgtacccgtttatgaagcggtatacccatctaccacaagtggtgctgggcgcggcgtttggctggtcgattccaatggcttttgccgctgtgagtgagtcggtgccattgagttgctggttaatgttcctcgccaatattctctgggcggtggcttacgacacgcagtatgcgatggttgaccgcgatgatgatgtgaagattggcattaaatccaccgcaatcctgttcggccaatacgataaattgattattggtattttgcagattggcgttctagcgctgatggcgatcatcggtgagttaaatggcttaggctggggatattactggtcaattctggtagctggcgcgctgtttgtttatcaacaaaaactgattgccaaccgcgagcgtgaagcctgctttaaagcatttatgaataataactatgttggtctggtactgtttttagggctggcaatgagttactggcatttctga

SEQ ID NO: 2088 - DNA, 2424 bp, Escherichia coli
atgtccggctggccacgaatttactacaaattactgaatttaccattaagcatcctggtaaaaagcaagtctattccggcggatcctgccccggaactggggctggatacctctcgtccaattatgtacgttttaccgtacaactcgaaagctgacttgctgacgttgcgcgcccagtgtctggcacatgacctgcctgacccgttagagccgctggaaatcgacggcacgctactgccgcgctatgtgttcattcacggcgggccgcgtgtgttcacctattacacgccgaaagaagagtctattaagctgttccacgactatctcgatttgcaccgcagcaacccaaatctggatgtgcagatggtgccagtatcggtgatgtttggtcgcgcgccggggcgtgaaaaaggcgaagtgaacccgccgctgcgtatgcttaacggtgtacagaaatttttcgctgtactgtggctcggtcgcgacagttttgtgcgtttctcgccgtcagtttcgctgcgccgtatggcggatgaacacggcacggataaaactatcgctcagaaactggcgcgcgtggcgcgtatgcactttgcccgtcaacgcctggctgccgtgggtccacgtctgcctgctcgtcaggatctgtttaataagctgctcgcctcccgcgccattgcgaaagcggtagaagatgaagcgcgcagcaaaaaaatctcccatgaaaaagcgcagcagaacgcgattgcgctgatggaagagattgcggcgaatttctcttacgagatgatccgcctgactgaccgcattctgggcttcacctggaaccgactttaccagggtatcaacgtccataacgccgagcgcgttcgccagctggcccacgacggccatgagctagtgtatgtgccttgccaccgcagtcacatggactacctgctgctttcttacgtgctgtatcaccaggggctggtgccgccgcatatcgccgccgggatcaacctgaacttctggccggccgggccgattttccgccgtctgggggcgttctttattcgccgtacgtttaaaggcaataaactttattccaccgttttccgtgagtatctcggcgaactgttcagccgtggttattccgtcgagtatttcgtggaaggcggtcgttcccgtacggggcgtttgctggatccgaaaaccggtacgctgtcgatgaccattcaggcgatgctgcgtggcggcactcgtccgattacgctgattccgatctatatcggttatgagcacgtcatggaagtgggtacttacgccaaagaactgcgcggtgcgacgaaagagaaagagagcctgccgcagatgctgcgtggtttaagcaagctgcgtaatctcggtcagggttacgtcaacttcggtgaaccaatgccgttgatgacctaccttaaccagcacgtaccagactggcgtgaatctatcgatcccatcgaagcggtgcgtccggcctggttaacgccgacggtcaataatattgctgccgatctgatggtacgcattaacaacgcaggcgcggcaaacgccatgaacctgtgctgtactgcgcttctggcgtcacgtcagcgctcactcacccgcgagcagttaaccgagcaactcaactgctacctggatctgatgcgcaacgtgccttactccacggactctaccgttccttcagctagcgccagcgagcttatcgatcacgcgctgcaaatgaacaagtttgaagttgagaaagacactatcggcgacatcatcattctgccgcgcgagcaagcggtgctgatgacctactatcgcaacaacattgcacatatgttggtgctgccttcgctgatggcggcaattgtcacccagcatcgccacatctcccgcgacgtattgatggagcacgtcaatgtgctttacccaatgctgaaagcggagctgttcctgcgctgggatcgcgacgagttaccggacgttattgatgcgctggcaaatgagatgcaacgtcaggggctgattaccctgcaagatgatgagttgcatatcaacccggcgcattctcgcacactacagctgctggccgcaggcgcgcgcgaaacgctgcaacgttatgccatcaccttctggctgttgagtgccaacccgtcgatcaaccgcggtacactggagaaagagagccgcaccgtcgcgcaacgtctctccgtgctgcacggtatcaacgcgccggagttcttcgacaaggcggtgttcagttctctggtgctgacactgcgtgatgaagggtatatcagcgatagcggcgacgccgaaccggcagaaacgatgaaggtatatcagttgctggcggagttgattacatcagacgtgcgtttgacgattgagagtgcgacacagggcgaagggtaa

SEQ ID NO: 2089 - DNA, 369 bp, Escherichia coli
atggccaataataccactggattcatccgaattattaaagctgctggctattcctggaaaggtttacgcgctgcatggatcaacgaagcggcattccgtcaggaaggcgtagcggtattgttagcggtggttatcgcctgctggctggatgtggacgcgattacccgcgtgctgcttatcagctccgtgatgctggtgatgattgtggaaattctcaatagcgccatcgaagctgtggttgaccgaattggctctgaataccatgagctttccggacgcgctaaagatatgggatccgccgcagtgctgattgccattatcgtcgccgtgattacctggtgcatcctgttatggtcgcattttggataa

SEQ ID NO: 2090 - DNA, 609 bp, Escherichia coli
atgaaagcgttaacggccaggcaacaagaggtgtttgatctcatccgtgatcacatcagccagacaggtatgccgccgacgcgtgcggaaatcgcgcagcgtttggggttccgttccccaaacgcggctgaagaacatctgaaggcgctggcacgcaaaggcgttattgaaattgtttccggcgcatcacgcgggattcgtttattgcaggaagaggaagaagggttgccgctggtaggtcgtgtggctgccggtgaaccgcttctggcgcaacagcatattgaaggtcattatcaggtcgatccttccttgttcaagccgaatgctgatttcctgctgcgcgtcagcgggatgtcgatgaaagatatcggcattatggatggcgatttgctggcagtgcataaaactcaggatgtacgtaacggtcaggtcgttgtcgcacgtattgatgacgaagttaccgttaaacgcctgaaaaaacagggcaataaagtcgaactgttgccagaaaacagcgagtttaaaccaattgtcgttgaccttcgtcagcagagcttcaccattgaagggctggcggttggggttattcgcaacggcgactggctgtaa

SEQ ID NO: 2091 - DNA, 1326 bp, Escherichia coli
atggcattcctcacttcatctgataaagcactctggcatctcgccttacccatgattttctccaatatcaccgttccgttgctgggactggtcgatacggcggtaattggtcatcttgatagtccggtttatttaggcggcgtggcggttggtgcaacggcgaccagctttctctttatgttgttgctgtttttacgcatgagcaccaccgggctgactgcacaggcttatggtgccaaaaatcctcaggcattagcccgtgcgctggtgcaaccgttgctgttggcgttgggggccggggcgttaattgcgctgctgcgtacgccgattatcgatctggcgctgcatattgttggtggtagtgaagcagtcctggaacaggcgcgacgctttcttgaaatccgctggttaagcgcaccggcgtcgctggcgaatctggtattacttggttggttactcggcgtgcaatatgcccgtgcgccagtaattttgttagtggtcggcaatatcctcaacattgtgctggatgtctggctggtgatggggctgcatatgaacgtgcagggcgcggctctggcaacggttattgcggaatatgcaacattgctgattggtctgctaatggtgcgtaaaatcctcaaactacgcggaatctccggcgaaatgctgaaaacagcctggcgaggaaacttccgtcacttgctggcgcttaaccgcgatatcatgctgcgctcgctgttgctgcaactctgtttcggcgcgatcactgtacttggcgcgcgactggggagtgacattatcgctgttaacgcggttctgatgacgctactcacctttaccgcctatgcgttggatggttttgcctacgcggttgaagcacattccggtcaggcatacggtgcgcgcgacggtagtcaattgctggatgtctggcgggcagcgtgccgccagtcggggatcgtagcgttactgttttcggtggtttatttgctggcaggggaacacatcattgcgttgctgacgtcgttaacccagattcagcagctggctgaccgctatcttatctggcaggtgattttgccgttggtcggcgtctggtgttatctgctggacggcatgtttataggcgcaacgcgtgccgccgaaatgcgtaacagtatggcggtggccgccgcaggttttgcgctgacgctccttacgctgccgtggctggggaatcatggtttgtggctggcgttaaccgtctttctggcgttacgcgggctttctctggcggctatctggcggcgtcactggcgtaacgatacctggtttgtcgcaacgtga

SEQ ID NO: 2092 - DNA, 210 bp, Escherichia coli
atgaataaagatgaagccggcggtaactggaaacagtttaaaggtaaagtgaaagagcaatggggcaaactgaccgatgatgatatgacgatcattgaaggaaaacgtgatcagttagtgggtaaaatccaggaacgctacggttatcagaaagatcaggcagaaaaagaggttgatagttgggaaaaacgccatgattaccgctggtaa

SEQ ID NO: 2093 - DNA, 516 bp, Escherichia coli
atggaaaagaccacaacgcaggagttattagcgcaggctgaaaaaatctgcgcacagcgtaatgtgcgcctgaccccacagcgtctcgaagtgttgcgcctgatgagtctgcaggatggcgctatcagcgcttatgatctgcttgatttgctgcgcgaagctgaaccgcaagccaagccgccaacggtttatcgcgcgctggagtttctgcttgaacaaggttttgtgcataaggtggaatccaccaacagttatgtgctctgtcatctgttcgatcagcccacccatacttcagccatgtttatttgcgatcgctgcggcgcggtgaaagaagaatgtgctgaaggcgtggaagacatcatgcatacgctggcggcaaaaatgggttttgccctgcggcataatgttattgaagcacatggattatgttcagcatgtgtagaagtagaagcgtgtcgtcatcccgaacagtgccatcatgaccactctattcaggtgaaaaagaaacctcgctaa

SEQ ID NO: 2094 - DNA, 996 bp, Escherichia coli
atgccagcagaatcacacactgtttatcccgcttaccgtttctcgattgccccgatgcttgactggacggacagacattgccgttatttcctgcgtctgctttcccgcaatacgttgctgtataccgaaatggtgaccacaggggcgattattcacggtaaaggtgattacctggcgtacagtgaagaagaacatccggtagcgttgcaactcgggggtagcgatccggcggcgctggcacagtgtgcgaagctggcagaagcgcgcggatatgatgagatcaacctgaatgtcggctgcccgtctgaccgggtgcagaacggcatgtttggtgcgtgtctgatgggtaatgcgcagctggttgccgactgcgtgaaagcgatgcgcgatgtggtgtcgattccggtgacggtgaaaacgcgtattggcatcgatgatcaggacagctatgaatttctctgcgatttcatcaacaccgtttccggcaaaggtgagtgtgagatgttcatcatccacgcacgtaaagcctggctttctgggttaagtccgaaagaaaaccgtgagatcccgccgctcgattatccgcgtgtgtatcaactgaagcgtgactttccgcatctgacgatgtcgattaacggtggtatcaagtcgctggaagaagctaaagcgcatttgcaacatatggatggcgtgatggtcgggcgcgaggcgtatcagaatccgggtattctggcggcggtagaccgagagatttttggttcctcggatactgatgctgatccggtggcggtagtgcgcgccatgtatccgtacattgagcgtgaactcagccagggtacgtatctcggccatattacccggcatatgctgggcttgttccagggtattcctggcgcgcggcagtggcggcgttatttaagtgaaaatgcccataaagcgggtgcagacattaatgtgctggaacacgcgctcaaactggtggcggataagcgttaa

SEQ ID NO: 2095 - DNA, 243 bp, Escherichia coli
atgctggaactactttttgtaattggcttttttgtcatgctgatggtcaccggtgtttcgttgctgggtattatcgccgcgctgattgtggcgacggcctttatgttcctcggcggtatgctggcattgatgattaagttgctgccgtggctgctgttggcggttgcggtggtgtgggtgatcagggcgattaaagcaccaaaagtgccgaaatatcagcgttatgaccgctggcgttactaa

SEQ ID NO: 2096 - DNA, 984 bp, Escherichia coli
atggcaacacgaattgaatttcacaagcacggtggcccggaagtacttcaagccgtagagttcactcctgccgatccggcggagaatgaaatccaggtcgaaaataaagccatcggcatcaattttatcgacacatatatccgcagcggcctttacccgccaccatcgttacccagcggattaggtactgaagcggcaggcatcgtgagtaaagtcggcagtggtgtaaagcatattaaggcaggcgatcgcgtagtctatgcacaatcggcattaggcgcttacagctctgtgcataacattaatgcggataaagcggcgattctgcctgcggcaatttcttttgagcaagctgcggcatccttcctgaaaggcttaacggtttattatctgctgcgcaaaacctatgaaattaaacccgatgaacaattcctgttccacgcagcggctggcggcgttggcttgattgcctgccagtgggcaaaagccctgggcgcgaaacttatcggcaccgtaggaaccgcgcaaaaagcgcagagtgcgctaaaagcgggcgcgtggcaggttattaactatcgtgaagagaatctggtcgagcgattgaaagagatcaccggtggtaagaaagtgcgcgtggtgtacgattcagtgggcagagacacctgggaacggtcgctggattgcctgcaacgccgcggcttaatggtgagctttggcaactcatcaggtgcggttaccggtgtgaacttaggcattctcaatcagaaaggctcgttgtatgtgacacgcccttccctgcaaggctatatcaccacgcgggaggaattaaccgaggccagtaatgaactgttctctttgattgccagcggtgtgattaaggtcgatgtcgccgagcagcagaaatatccgctgaaggatgcgcggcgtgcgcatgagattctggaaagccgggcgacgcagggttccagcctgttgattccataa

SEQ ID NO: 2097 - DNA, 1416 bp, Escherichia coli
atggcaggaaataaacccttcaacaaacagcaggctgaaccccgcgaacgcgatccacaagttgccgggctgaaagtgcctccgcactcgatcgaagcggagcagtcggtgttgggcggtttaatgctggataacgaacgctgggatgatgtagccgagcgtgtggtggcagacgatttttacacccgcccacaccgtcatatctttactgaaatggcgcgtttgcaggaaagcggtagtcctatcgatctgattacccttgcggaatcgctggaacgccaggggcaactcgatagcgtcggtggttttgcttatctggcagagctgtcaaaaaatacgccaagtgcggcgaacatcagtgcatatgcggatatcgtgcgcgaacgtgccgttgttcgtgagatgatctccgttgctaacgagattgccgaagctggttttgatccacaagggcgtaccagtgaagatctgctcgaccttgctgaatcccgcgtctttaaaattgccgaaagtcgtgcaaacaaagacgaagggccgaagaacatcgccgatgtgctcgacgcaaccgtggcgcgtattgagcagttgtttcagcagccacacgatggcgttaccggggtaaataccggttatgacgatctcaacaaaaaaaccgctggcttgcagccgtcggatttgatcatcgtcgccgcgcgtccgtcgatgggtaaaacaacatttgcgatgaatctcgtcgaaaacgcagcgatgttgcaggataaaccggtgcttatcttttcgctggagatgccatcagaacagattatgatgcgttctctggcgtcgctgtcgcgcgttgaccagactaaaatccgtaccgggcagctcgatgatgaagactgggcacgcatttccggcaccatgggtattttgctcgaaaaacgcaatatctatatcgatgattcctccggcttgacgccaacggaagtgcgttcccgcgcacgccgtattgcccgtgaacacggcggcatcgggcttatcatgatcgactacctgcaactgatgcgcgtaccggcgctttccgataaccgtacgctggaaattgcagaaatctcccgctcgctgaaagcactggcgaaagaactgaacgtgccggtggtggcgctgtcccagttgaaccgttctctggaacaacgtgccgacaaacgcccggtcaactccgacctgcgtgaatctggctctatcgagcaggatgcggacttgatcatgtttatctatcgtgatgaggtgtatcacgaaaacagtgatttaaaaggcatcgcggaaattattatcggtaaacaacgtaacggcccaatcgggacggtacgcctgacctttaacggtcaatggtcgcgcttcgacaactatgcggggccgcagtacgacgacgaataa

SEQ ID NO: 2098 - DNA, 1080 bp, Escherichia coli
atgcaagcggcaactgttgtgattaaccgccgcgctctgcgacacaacctgcaacgtcttcgtgaactggcgcctgccagtaaaatggttgcggtggtgaaagcgaacgcttatggtcacggtcttcttgagaccgcgcgaacgctccccgatgctgacgcctttggcgtagcccgtctcgaagaagctctgcgactgcgtgcggggggaatcaccaaacctgtacttttactcgaaggcttttttgatgccagagatctaccgacgatttctgcgcaacattttcataccgccgtgcataacgaagaacagctggctgcgctggaagaggctagcctggacgagccggttaccgtctggatgaaactcgataccggtatgcaccgtctgggcgtaaggccggaacaggctgaggcgttttatcatcgtctgacccagtgcaaaaacgttcgtcagccggtgaatatcgtcagccattttgcgcgcgcggatgaaccaaaatgcggcgcaaccgagaagcaactcgctatctttaataccttttgcgaaggcaaacctggtcaacgttccattgccgcgtcgggtggcattttactctggccacagtcgcattttgactgggtgcgcccgggcatcattctttacggcgtatctccgctggaagatcgctccaccggtgccgattttggctgtcagccagtgatgtcgctaacctccagcctgattgccgtgcgtgagcataaagccggagagcctgtcggttatggtggaacctgggtaagcgaacgtgatactcgtcttggcgtagtcgcgatgggctatggcgatggttatccgcgcgccgcgccgtccggtacgccagtgctggtgaacggtcgcgaagtgccgattgtcgggcgcgtggcgatggatatgatctgcgtagacttaggtccacaggcgcaggataaagccggggacccggtcattttatggggcgaaggtttgcccgtagaacgtatcgctgaaatgacgaaagtaagtgcttacgaacttatcacgcgcctgacctcaagagtcgcgatgaaatacgtggattaa

SEQ ID NO: 2099 - DNA, 1194 bp, Escherichia coli
gtgtttcaaaaagttgacgcctacgctggcgacccgattcttacgcttatggagcgttttaaagaagaccctcgcagcgacaaagtgaatttaagtatcggtctgtactacaacgaagacggaattattccacaactgaaagccgtggcggatgcggaagcgcgcctgaatgcgcagcctcatggtgcttcgctttatttaccgatggaagggcttaacagctatcgccatgccattgcgccgctgctgtttggtgcggaccatccggtactgcaacaacagcgcgtagcaaccattcaaacccttggcggctcaggggcattgaaagtgggcgcagatttcctgaaacgctacttcccggaatcaggcgtctgggtcagcgatcctacctgggaaaaccacgtagcaatattcgccggggctggattcgaagtaagtacttacccctggtataacgaagcgactaacggcgtgcgctttaatgacctgttggcgacgctgaaaacattacctgcccgcagtattgtgttgctgcatccatgttgccacaacccaacgggtgccgatctcactaatgaccagtgggattccgtgattgaaattctcaaagcccgcgagcttattccatttcttgatattgcctatcaaggatttggtgccggtatggaagaggatgcctacgccattcgcgccattgccagcgctggattacccgctctggtgagcaattcgttctcgaaaattttctccctttacggcgagcgcgtcggcggactttctgttctgtgtgaagatgccgaagccgcaggccgcgtactggggcaattgaaagcaaccgttcgccgcaactactccagcccgccgaattttggtgcgcaggtggtggctgcggtgctgaatgacgaggcattgaaagccagctggctggcggaagtagaagagatgcgtactcgcattctggcaatgcgtcaggaactggtgaaggtattgagcacagagatgccagagcgcaatttcgattatctgcttaatcagcgcggcatgttcagttataccggtttaagaaccgctcaggttgaccgactacgtgaagaatttggtgtctatctcatcgccagcggtcgcatgtgtgtcgccgggcttaacgcgcaaaatgtgcatcgcgtggcaaaggcgtttgctgcggtgatgtga

SEQ ID NO: 2100 - DNA, 2745 bp, Escherichia coli
atggagaacatgacctcgcccggcacgctgcttagtggagataacgcgacctggcttgaagagtactaccagacctggttgcgtacgccggaaaaactcccggaagactggcggcgtttttttctttcacctgaactgactgtccaaagcgtatccggtgataacaacgtcagcggtgcgacgttaaaaaaacaggctgcggtaatacaactgatcaatgcctggcgcacgcaggggcatctgcgcgcaaagcttgatccacttggtttgaatcccccggctgacgttccctccctccagcctggtttttggggattaagcgaagaagacttgttgcaggaatttagcgtcacctttggcgcacacaccacgcaaatgccacttaagcaactgcttaacctgctggagcaagcctgggcgggtagccaggcttatgaacttgctcatctggaaaatcgtgaagaaatcaactggttgttatcacggattgagagcagcaatgcgccacaagcagatgtacaaacctgtattgctcgttttgaaaaactgatggcggcagagacgttagagcgttatctgcatacccgttatgttgggcagaaacggttttctctggaagggggcgaaagtgcaatcccggcgctcgatacgctgacaaaacgcctgcgtgcgcaaggtgtggaggaaatggtcattggcatggcgcaccggggaagacttaatgttctggttaatctgttgaataaagacccggcacagctttttgctgagtttgaaggcaagcagacgatcggcagtggttcaggcgatgtgaaataccacatggggtattccagcaatctggaaacacctgccggttcgctgcatgtggcgctggcgtataacccctcacatctggagatcgtgaatccggtggtgctgggccaggtgcgagccaggcaggaacgccgtggtgaggatggtcaggcaaaagtggtgggcgtacttattcatggggattccgcgttgggcggcctcggcgtcaaccaaaccacgtttaacttatcgcagactcagggctacggcactggcggtacgctacatctggtgattaacaatcagattggcttcaccacttcccgcttgcaggatatgcgttcttcacggtactgcaccgatattgccaaaatggtagcggccccaattatccacgttaatggcgatgacgttgacgctgtttgccaggtaatggaactggcgtgcgaatggcgagacaccttccggcgcgacatcatcatcgatatttgctgcttccgtaagcacggacacaacgaaagcgatgagccacgtcttacccagccacaaatgtatcaggcagtggatgctcaccctggtacgctcgcccgttatggtgaatctcttgcccgccgcggcctgttaactcaggcgcaacaagatgagatgacggcacgctatcgcgactggctggatagctgccagaaatgtgaaccgcagcctctcaaacctgcaattcactcttttagcgctaactggtatgggttgaccaaccctcactggagcgccccggtatctacggcattgcctcggcaaaagctggcagcgtatggtgaaatcatttctacactgccacccgatgtggtcgcacatcctaccattaaacggcaactggcgttacgccaggatatggccgcaggtactcagccaatagactggggaatggctgaaatgctggcctatgcatcgcttgtggatgcgggtgttggtgtgcgtctttctggtgaagactcagggcgtggcacgttcagtcatcgccatgcagtggtacatcatcaaactgaagcccgtcgttatctgccgttacagcatatccgcgctggtcaggcatctttcgatgtttatgattcggtgcttaatgaagaagcgctcttagcctttgaatatggctattcaacgtctgcgcctcagcaactggttatttgggaagcgcagtttggtgactttgccaacggcgctcaggttgctattgaccagtttatctcgtctggcgaaaccaagtgggatcgctatagcggtttaaccattcttctgccgcatggctatgacggacaagggccggagcactcttctgcgcgtcctgagcgctggctgcaactgtgcgcagaaaacaacatgcaggtggtgatgcccagtgagtcagcacaaatgttccatttgttgcgcggtcaggcattacgcccaatgcgcaaaccgttagtgataatgatgagtaagcgtttacttcgttttaaaggcgctatgagcgagctttgtgaattcactgatggcgcttataaaccggtaatcaccgatccgcaattgcatcagtcccagaaagttaagcgcgttattttgtgtagcggccaggtctattacgacgtactggaagcccgtaagcagcgtgagcatgaagacgaagtggcgattgttcgcctggagcaactctacccgttcccggtcgcagaactgaatgatgttctggcgagttggccgaactgctgcgaatggatttggttgcaggaagagccagaaaaccagggcgcgtggcggcagattcgtcatgagctggcggcactgaaaattaacactccttactggcagtatgcaggccgcccggcagcggcagctccggcgacagggtatgggcgtgtacataaacaacaaatcgacgaatttcttgctgctgcgtttgcagatattcagccatga

SEQ ID NO: 2101 - DNA, 1155 bp, Escherichia coli
atgatcgaaattactgtccctgtattaccggaatctgtcacggaaggcacgctgacaacctggtgtaaacaagaaggcgagcacgtaaaacgcgatgatgtgattgccgagctggaaaccgataaagtcattctggaaataccggccccgcacgatggcgtgttaagcaatattatcgtcagcgaaggtagcacggtcacgtccgcgcaactgttggcgcatcttaagccgcaagctgtcatagaagaaaccgtcacaccagtcaccgaaaccctggcgatgccttccgcacggctggaggcacagcgtagtggtgtcgaacttgctgacgttgcggggagcgggagaaatggacgtatcctgaaagaggatgtacagcgcgttactcctgcaccagtcattcagcctgaacgggtggcggagatcgcgccagctaaacccttgacaccgggtgctcgtcaggaacgtcgtgagccgatgtcgcgcttacgtcagcggattgctgagcgtctgctggcttcccaacaaaataacgccattcttaccacattcaacgaagtaaacatgcagagcgtgatggatttacgcgcccgctggaaagatcgttttgccgagaagcacggcgtgaagctgggctttatgtccttctttgttaaggccgttacccgggcgctggagcgcttccctgtagtgaatgccagcgttgatggcaacgagattatctggcgtgattattgcgatatcggcattgcagtgagcagcaaccgcggcctggtagtgcctgtgttacgcaatgcgcaatcactctctttggtggaaattgaacggcaaattgccgaatacgccacacaggcacgcaatggcaaattgccgctggaggcgttacagggcggcacgttctctatcaccaacggcggtacttttggttcgatgatgtcaacgccaatcattaacccgccgcagtcggccattcttgggatgcatgccatcacgccgcgcccggtcgcagaaaacggccaggttgttattcgtcccatgatgtaccttgctctcagctatgaccatcgcattatcgatggtcaggaagccgtgcagacattggtggcaatacgtgagctactggaatcaccggaacaactgttgctggatctttaa

SEQ ID NO: 2102 - DNA, 1197 bp, Escherichia coli
atgaccgaatccagcgattacgaatccgtccaggtctttatcggcgttgatgtcggtaaagatacgcatcacgctgtagccattaatcgttcaggtaaacgcctgttcgataaagcattacccaacgacgaaaacaaactcaggtcgctaatatctgacctgaaacaacatggtcagatactgctggttgttgatcagccagctaccatcggtgcgttacctgtcgccgttgcccgctcagaaggagtccttgtcggatacctccctggactggccatgcgccgcatagccgacttacacgccggtgaagctaaaactgatgctcgtgacgctgccatcattgccgaagctgcccgtaccctgcctcacgcgctacgcacgctgaaactggctgacgagcaaatcgccgaactctccatgctctgcggcttcgatgatgatcttgccgcacagacaacgcaggccagcaaccgtatccgcggccttctgacccagatacatccggcactggagcgcgttctcggtccgagacttgatcacccggcggtactcgatcttctccagcgatatccctcaccagaaaaactcgcttcgctgggtgagaagaagctggcagcccggctctgcaaacttgcgcctcgtctgggtaaacgccttgcagcagacatagctcaggcactggccgaacaaaccgtcgtcgttcccggcacgaatgccgctgccgtagtactgccacgtctggcactccagctcatcacgctgcgtaagcaaagagacgaggtggcgcttgcggtagaacagcgagttcttgctcaccctctttacccggtcctgaccagtatgcccggagtcggtgtcaggaccgcagccagactcctcaccgaggtcgcctgccgcgccttcgcctctgccgcacatctcgctgcttatgctggccttgcgccggtaactcggcgatccggctcgtcaatacgcggtgagcatccctcgcgacggggtaataaagctctcaaacgggcgttgttcctgtcggccttcgccgcgctcagggatccgctctccagggcttactacacccgcaaaatgagtcagggaaaacgacacaatcaggcgcttatcgccctggcgagacgacgctgcgacgttctgttcgccatgatgcgcgacgggactttttataccccgcaggcgtcataa

SEQ ID NO: 2103 - DNA, 1212 bp, Escherichia coli
gtgcagcatgaggcgagcattcatggcgttaatgttgacggcgtatctttcaatgcagctgcgatgattcaacgtaaagacgccatagtaagccgcctgacaatgggcatcggcttgctgtttaagaaaaataaagtgaagtacctgtgcggcctcgcaacgttagaacatgctcgggatgagatttggcaattacgtgtaaacgatcaacaaatccgcgcccgtaatgtggtgattgcaacaggttctcagccgcgtcaactgcctggcgttaccattgataatcagcaaattctcgataatcgcggcgccctggcgttaaccgctgtgccgccgcgtctcggtgtgatcggcgctggcgtgattggccttgaactggggtctgtgtggaatcgggtcggttcagacgtcacgttgctggagatggcgccaacgttcttgcctgcactggaagctcgcctgtcgaacgaagtccgtaaagcaatgattgccagtgggatgaaaatgcaactggcagtagagattgaggctattgaacaacgggatgacggtgtgcatgtgcgctggcggcagggtgagaagcgagaagaaagccgcttcgataaattaattcttgccattggacgtgtaccgcgactttctggtgtcgatctcgtgcaactcggtcttgaagccgacaaccgtggcggtattgccgtcgataacttatgccgtaccgggaaagccgggctgtgggcaattggtgatgtcgtgcgagggccgatgctggcgcataaagcgatggctgaaggtgtggtggttgcggatcaaattgccggactggcggtagagccgattaattttgcgctgatcccttcggtgatttacacccaaccggaagttgcgtgggtaggggaaaacgaggcctcactgaaagccgctggcagagtctttaacaaaggaaattctctgtttgccggtaacggtcgcgccttagcattaggccaggaaggtgggcgttgcacgttatacagcgataaacacactgaccgcgtacttggcggagcgattgttggcccgcaggcatcggagctgatcaatgaaattgcgctggcgatgacttttagcgcctctggcgaggatattgcctgtgcgatccatgcgcatccgaccttaagcgaagtcatccacgaagcagcaatggccttgaataataaagcattacacggataa

SEQ ID NO: 2104 - DNA, 1170 bp, Escherichia coli
atgaatttacatgagtatcaggccaaatcgttactggctggcatggggatgccgtgtccaaaagagatagccatccaacagatttcgcaactggcagatgcctggcaacatattgcttgcccgagtaaaggcgcggtacttaaagcgcaggtacatgctggtgggcgcggtaaagctggcggcgtaaaagtgcttaagcagctgccggaagcacaggcttttgtacagcaaatgttgggatcgcaactggtgacttatcagaccgggccagaagggcagtatgtcagcagtattttgctgtgcgaaaacatctatccggtacgccaggaactctattttggcatggtggtggatcgtgaaagccagcgggtcacgtttattgtcagcccggaaggtggtgtggaaattgaaaaagtcgcccatgagacaccggagaaaatcagcagtgtcagcattgatccactgacaggcgtgcagccttgccatatccgcgaaatgtttgctgttctgcaactggaacacgggctatttgctgcctttagtcgcctggttaatcaggcgtggaaagcctttaacgaactggatttcgccctgctggaaattaaccctctggtgttgcgggaaacgggcgaatttatgtgtgcagacgcgaaagtatcgctggatgataacgcgctgtatcgtcacccggaactccaggtgctacgtgatgaaacccaggaagatccacgcgaaagccaggcagcgaagcttgatcttaattatgtctcgctggacggaaatatcggctgcatggtcaatggtgcagggctggctatggcaaccatggacatcatcaagctatacggtgaacaacccgcaaacttcctggatgttggcggtggcgcaacccaggagcgcgtcagtgaagcctttcggctgattgtttccgacagcaaagtgaaagccattctggttaatatttttggtgggattgtccgttgcgacatgatcgccagagccattattcatgctctgaatgaggcccgtatcaccctgcctgtcgtggtgcgtctctccggtaataacgctgccgaagggcagcggttactggcagaaagtggcctgacggtggaagccgtcaattctctggatgatgccgctaaacgcatcattgcgttactgaattaa

SEQ ID NO: 2105 - DNA, 873 bp, Escherichia coli
atgagcgttttgatcaacaaacacacgcgggtactggtgcagggcattaccggcaaaaacggcacatttcatacagagcaggctattgcgtatggcacgcagattgtgggtggagtgacgccaggtaagggcgggcaacggcatctggatcgcccggtttttgattcaatgaaagaagcgatgcgacaaactgaggctgatgccagcgtgatttatgtgcctgcaccgtttgtgctggattctgttgttgaggctattgaagctggcgtcaaattggttgtggtgatcactgaaggtgtaccgacactggatatggtgaaagttcgtcggctgcttgactgccacccggatgtgcggctgattgggccaaactgcccaggagttatcacgccgggcgagtgcaaaatcgggattatgcctggtgaaatccaccgcccagggcgtattgggattgtttcccgctccggtacattaacctacgaagctgtagcgcaaaccacggcgctgggacttgggcaatccacctgtattggtattggcggcgatccggttccggggactaactttattgatgcgctgcgtttattcgaaaatgatccgcaaacagacgcggtaattatgatcggtgaaattggtggtaatgcggaagaacgggccgcggaatttattcgtgatgaaatgaataaaccggtcgtaggttatattgccggtgttactgcaccaaaaggaaaacgcatggggcacgccggagccattatttctggcggtagcggcagtgcagaggataaattccgtgcgttcgataaagcaggcatggcatggacaagaaacccggcgttgcttggcgaaacgttatggaatgttattaagtaa

SEQ ID NO: 2106 - DNA, 1500 bp, Escherichia coli
atgtcatcaatatcccatggcgcaccacaaaagcgtcgaattatccctaatcccggcctgtggttggcgatcattgccggaattattattacccttctgccactgggcgataccttgcccgtcgctggacaaaatatgatcgccattctggtgtttgccattattgtctggatcagcgaagcgatggattacaccgccagtgcaattgttatttccgcactgattatctttatggttggttttgccccggatatgaatcacccggacacgatccttggcaccgcgaaagcgctgaaaatgactctgtcgggtttttctaattctgctctggcgctggtggcagcagcaatgtttatcgcggcggcaatgaccattaccgggctggataaacgcattgcgctgtttactatgtcgaaaataggtgccagcagccgcagcattattatcggtgccattgtggtgaccatcgtcctgagcctggttgtacccagtgccactgcccgtacggcttgcgtggtgccgattatgatgggggtcattgcggcatttaaggtggataaacattcacgtttagcggcgtcaatgatgattgttatcgcccaggcgaccagtatctggaacgttggtattcaaacttcggcggcgcaaaacctgctttctatcggttttatcaataaaactttcggcgccgggcattctgtcagctggcttgactggctgttagcgggcgcgccctggagcctcaccatgtcggcgatcctctatttcctcgcacgtaaattgttgccgccagaaacggaagctgttgaaggggggagcgaggccattaaaaaagcacttgcagagttagggccaaccactggtaaagaaaaacgtttgatcggtatttcgctattgttactgctcttttggtctactggcggaaaattacacagtattgataccacctctgtcacccttgccggactggcgattatgttgctgccaggcatcggtgtaatgagctggaaagaggtcgaaaaacgtgtgcagtggggcacgttgcttatgtttggtattggtatcagcctggggtccacgctgcttgatacgcaggcagcttcatggatggcgaactatgtggtgaaaggttttggtctcgatggcttgccatcattagccatcttcgcgattctcgccgctttcttgataattattcacctggggtttgccagtgccactgcgctaactgccgcattgctgcccatcctgattagcctgttaagcagtctgccgccagaactcggcgttaacccggtcggcatgaccattctgctcgccttcagtgtcagttttggcttcatcctgccgattaacgcgccacaaaatatggtgtgtatgggtacggataccttcacgccacgccagtttacccgtgtgggactgtacctgacggtaatcggctacctgttgttgctactgtttgccgccacttggtggaaaattttaggtctaatgtga

SEQ ID NO: 2107 - DNA, 1074 bp, Escherichia coli
atgtcattacaaattactgttgaaaaagtgcgttggttagctgccgggctgctggaacttaatggctgtgatgccgatatcgctcaggatgtggcggaacatatgattgaagcggaacgttatggctttgccagccacggcgtcacgctgctaccgaaatatctggaaaatatcgctcgtggcgatgtaaccgcgaatgcccgcccggaatgcttaacaagtgaaggtaatttacaacgttttcatgcccacaatggctttggtcaacacgccggaaaagtggcggtaaatgctgccatcgaacaagcaaaacaccgcggtttttgcctgttaacgttgtgccatgcgcatcatttagggcgtatggggcattacgggcaaatggttgctgatcaaggcctggcgatgctggccatgagtaacgtcaccgggcgtcctgcactggtcgccccgtggggcggtgcggaaccgcgtatgaccactaaccctttctgctttgcctggccgttcagtgatgggcgtccgccgattctggttgattttgccaccagtagcatggcgctaaataaagcacgggtaatgtcgtccaccgggaagcaggccgcgccgggacaattgatcgatgcacaggggaatccaagcaatgatcctggggtgttattcagcaatcctccaggggcgttactgccatttggtgagcataaaggatttggcctggcactgatgattgaaatgatggcggggatcttatctggtggtgacacgatcgccgaagatcatcagacggatggatctgcgcataatcatctttttgcgttgattatcgatcctgatcaattcaccgatctggcaggggagaaagggcagttctttgcggattatctgttagctacgcagcctcaacctggcggcaatccggtgatttaccccggtatgccagaagctgccaaccgggaacgcaatgcgaagatgattacgatcccggtatcattctggtcctgggtagttgaacattacgcccgcaaaggtatcgatttggggttacatcctcaggaatcagcattagctggatga

SEQ ID NO: 2108 - DNA, 1359 bp, Escherichia coli
atgaataataaatccagtgaaattactatagtttatattgaggatagtgacgatgtacgttttgcctgtgaacaaacgctcacgctggctggttatcgtgttatttcctgttgcgatgcagaacacagtatttcccttattcaaagtcaagccaacattattatactgaccgatgtcaggttacctggaatatcaggactagagctcctcagttacatcaacgaaatggatagcaaaattccggttattttaattaccggacacggtgacgtggaaatggcggtggatgccatgcgtaatggtgcattcgatttcattgagaaaccaagtagctcagataaattattgagtattattgccagagcggtagaaaaacggcgattggttttagaaaatcagcaattactggcgaatctgcaacaggaaaatggcccggtgctgattggtcgtagtccgcagatgcaacaactgcgtaaaatgatccttaatgtcgcagataccggtgccgatgtccttatttatggtgaaacaggttgtggtaaagaagtcgtcgccagaatgctgcatcactggagtacccgccgtcaggggcagtttgttgccttaaactgtgcaggcttaccagaaacgttgtttgaaagcgaaatatttggtcatgaggcgggcgcatttaccggtgcggttaaaaagcgtattggaaaaattgaacatgcaaatggtggtacgttatttctcgatgaaatagagggaatgccatcaggaatgcaggtaaaactgctacgtgtattgcaggaaagaaccattgaacgattaggtgccaatcaattaattccggtgaattgccgtgttattgcagcgaccaaggaagatttactgcgtcgcagcgaagaacatctgtttcgtctcgatctctattatcgtctgaatgtggttagcctgaatattccacctctacgccagcgacgagaagatatccctgaactgttttactggttcgccagtcaggcggcacaaaaatataatcgtcctctgcctgatatttctcccatgttactggcctggttgcagtcacaaagttggcctggcaatgtacgtgaacttaaacacaatgcagagcgttttgttctcggtttactgacccaccaccagccagtgccaatgactcagcaagaagagagtggtcttaccgcctgcattgatgctttcgagaaaaagttaatcgaagatatgctgcgacaaacggaaggccaggtcagtttgacagcgcggctattacagctgccgcgcaagactttatatgacaaactcaacaaacatcagattcaaccgcaagtttatcgaccagaatcatccagctaa

SEQ ID NO: 2109 - DNA, 1821 bp, Escherichia coli
atgaaaatatcgtggaattatatatttaagaacaaatggcgatttcacattacaagcatttcactttttcttatcatgctcgcggtttcaatcgcttttttgcacttgcgttttaataccttgtccggtaccgataaaatgcggcttgaaatgtataagtccacattatattccaccatcgagcaattttatgttttaccctatatgctctcaacagaccatatcatccgtcaggcggtaattacgcctgacgatatgacgtccagcgaactcaatcaacgaattgcacatttcaatactcaactcaaaaccgcagcaatatttattctggatacccaaggtaaggccatcgcttctagcaactggcaggaccccggcagctatgtagggcaaaattatagctatcgcccctattataaacacgccatgtctggcttaaatggacgcttttacggtattggtagcactacgaatacaccgagattcttcctctctacaagtataaaagataaaggaaaaattgtcggtgttgtagtagtaaaaataagtcttaatgaaattgaaaaagcatgggccgaaggtcctgaaaatattatcgtgaatgatgaacatgggattatatttttaagttcaaaatcgccatggcgaatgcgaacactgcaaccgttacctgttcaggcaaaacaaaaactacaatctacccgtcaatatagtctcgacaatcttttaccggcggattattatccttgttataccgtgagcaattttactttcctgaaagataaaaaagaacaactctgtttattcccgcaatattatacgcaacaaatagccattccagaatttaactggaaaatgacaattatggtccccttagataacctgtactggtcatgggctatttcgttagtcattacactaattatttacctgctgtttttgttatttattaaatactggagaatgcgatctcatgcacaacaattattaacactggcgaatgaaacattagaaaaacaggttaaagagcgtacatctgccctggaattgatcaatcaaaaattaatacaggagataaaagagcgcagtcaggctgaacaagtattacaaattacgcgtagtgaactggcagagtccagcaaactggcggcgcttggacagatggcaaccgaaattgcccatgaacaaaatcaaccgttagccgccattcacgcacttactgataacgcgcgtactatgctaaaaaaagagatgtatccgcaggttgaacagaatctgaaacacattatttcagtgattgagcggatgacgcagctcatttccgaacttaaagcatttgcctcgcgccatcgcgtacctaaaggttctgccgatgtcatcaaagtgatgtatagcgccgtggcgttacttaatcacagcatggagaaaaataacattgagcgacgaataaaagccccatccatgccgttatttgtcaattgcgatgagctcggtcttgaacagatattcagtaatttaattagcaacgccttagattctatggaaggtagctcttacaaacgactggatatcgccattcgccaggcaaataacaaagttattattaccattaaagacagcggtggcggttttgcacctgaagttgtcgatcgcatatttgaaccattttttaccactaaacgtagaggaatggggttgggactggcaatagtcagcgaaattgtccgaaattcgaacggcgcactccacgccagtaatcatcctgaaggcggcgcagtaatgacattaacctggcctgaatggggagaagaacatgaataa

SEQ ID NO: 2110 - DNA, 714 bp, Escherichia coli
atgcgcaagatcacacaggcattgagtgccgtttgcttattgttcgctctaaacagttccgctgttgccctggcctcatctccttcaccgcttaatccgggtactaacgtagccaaactcgctgaacaggcgccaattcattgggtttcggttgcacaaattgaaaatagcctcgcaggacgtccgccaatggcggtggggtttgatatcgatgatacggtacttttttccagtccgggtttctggcgcggcaaaaaaaccttctcgccagaaagcgaagattatctgaaaaatcctgtgttctgggaaaaaatgaacaatggctgggatgaattcagcattccaaaagaggtcgctcgccagctgattgatatgcatgtacgccgcggtgacgcgatcttctttgtgactggtcgtagcccgaccaaaacagaaacggtttcaaaaacgctggcggataattttcatattcctgccaccaacatgaatccggtgatctttgcgggcgataaaccagggcaaaatacaaaatcgcaatggctgcaggataaaaatatccgaattttttatggtgattccgataacgatattaccgccgcacgcgatgtcggcgctcgtggtatccgcattctgcgcgcctccaactctacctacaaacccttgccacaagcgggtgcgtttggtgaagaggtgatcgtcaattcagaatactga

SEQ ID NO: 2111 - DNA, 417 bp, Escherichia coli
atgtggtatcaaaagacgctcacgcttagcgccaaatctcgtgggtttcatctggtaacggatgaaattctgaatcagctggctgatatgccgcgcgttaacatcggcttactgcatctgttgctgcaacatacctccgcctctctgacacttaatgagaactgcgatcccaccgtacgccacgacatggagcgttttttcctccgcgccgttcccgataacggaaattatgagcatgactatgagggagcagacgatatgccttctcatatcaaatcctcaatgctgggaacatcgcttgtattgccggtgcataaagggcgtattcagaccggtacctggcaaggcatctggctgggggaacatcgcatccacggcggatcgcgtcgcatcatcgcgacacttcaaggggagtaa

SEQ ID NO: 2112 - DNA, 357 bp, Escherichia coli
atgaccatttcggagttgctacaatattgcatggcaaaaccaggcgcagaacagagcgtgcataacgactggaaagcgacgcagatcaaagtggaagatgtgctgtttgcgatggtgaaagaagtagaaaatcgcccagctgtttcgctgaaaaccagcccggagctggcggagctgctacgtcagcagcacagcgatgtgcgtccaagccgccatctgaataaagcgcactggagcaccgtgtatctcgacggttcgctgccggattcgcaaatctattatctggtggatgcgtcttatcagcaggcggtgaatttgctgccggaagaaaaacgtaaattgctggtgcaactctga

SEQ ID NO: 2113 - DNA, 2823 bp, Escherichia coli
atggataagatcgaagttcggggcgcccgcacccataatctcaaaaacatcaacctcgttatcccccgcgacaagctcattgtcgtgaccgggctttcgggttctggcaaatcctcgctcgctttcgacaccttatatgccgaagggcagcgccgttacgttgaatccctttccgcctacgcacggcagtttctgtcactgatggaaaagccggacgtcgatcatattgaggggctttctcctgccatctcaattgagcagaaatcaacgtctcataacccgcgttctacggtggggacaatcaccgaaatccacgactatttgcgtttgttgttcgcccgcgtcggcgagccgcgctgtccggaccacgacgtcccgctggcggcgcaaaccgtcagccagatggtggataacgtgctgtcacagccggaaggcaagcgtctgatgctgcttgcaccaatcattaaagagcgcaaaggcgaacacaccaaaacgctggagaacctggcaagccagggttacatccgtgctcgtattgatggcgaagtctgcgatctttccgatccgccgaaactggaactgcaaaagaaacacactattgaagtggtggttgatcgcttcaaggtgcgtgacgatcttacccaacgtctggccgagtcgtttgaaaccgcgctagagctttccggtggtaccgcggtagtggcggatatggacgacccgaaagcggaagagctgctgttctccgccaacttcgcctgcccaatttgcggttacagtatgcgcgagctggaacctcgcctgttttcatttaacaacccggcgggagcctgcccgacctgtgacggtcttggcgtacagcaatatttcgatcctgaccgcgtgatccagaatccggaattatcgctggctggcggtgcgatccgtggctgggatcgccgcaacttctattatttccagatgctgaaatcgctggcagatcactataagttcgacgtcgaagcgccgtggggcagcctgagcgcgaacgtgcataaagtggtgttgtacggttctggcaaagaaaatattgaattcaaatacatgaacgatcgtggcgatacctccattcgtcgtcatccgttcgaaggcgtgctgcacaatatggagcgccgttataaagagacggaatccagtgcggtacgtgaagaattagccaagtttatcagcaatcgtccgtgcgccagctgcgaaggaacccgtctgcgtcgggaagcacgccacgtgtatgtcgagaatacgccgctgcccgccatctccgacatgagcatcggtcatgcgatggaattcttcaacaatctcaaactcgcaggtcagcgggcgaagattgcagaaaaaatccttaaagagatcggcgatcgtctgaaattcctcgttaacgtcggcctgaattacctgacactttcccgctcagcagagacactttccggcggtgaagcccagcgtattcgtctggcgagccagattggtgcaggcctggttggcgtgatgtacgtgctggatgagccgtctatcggcctgcaccagcgcgataacgagcgcctgctgggtacgcttatccatctgcgcgatctcggtaataccgtgattgtggtggagcacgacgaagacgcgattcgcgccgctgatcatgtgatcgatatcggcccgggtgcgggtgtacacggcggtgaagtcgtcgcggaaggtccgctggaagcaataatggcggtgccagagtcgttgaccgggcagtacatgagcggtaaacgcaagattgaagtgccgaagaaacgcgttccggcaaatccggaaaaagtgctgaaactgacgggcgcacgcggcaacaacctgaaagacgtgacgctgacgctgccggtaggtctgtttacctgcatcacaggggtttcaggttccggtaaatcgacgctgattaacgacacactgttcccgattgcccaacgccagttgaatggtgcgactatcgccgaaccggcaccgtatcgcgatattcagggactggagcatttcgataaagtgatcgatatcgaccaaagcccaattggtcgtactccgcgttctaacccggcgacctataccggcgtgtttacacctgtgcgcgaactgtttgcgggcgtaccggaatcccgtgcgcgcggctatacgccaggacgtttcagctttaacgtccgtggcggacgttgcgaggcctgtcagggcgacggcgtgatcaaagtggagatgcacttcctgccggacatttacgtaccgtgcgaccagtgcaaaggcaaacgctataaccgtgaaacgctggagattaagtacaaaggcaaaaccatccacgaagtgctggatatgaccatcgaagaggcgcgtgagttctttgatgcggtgccagctctggcgcgtaagctgcaaacgttgatggacgttggcctgacgtacattcgcctcgggcagtccgcaaccacactttctggtggtgaagcccagcgcgtgaagctggcgcgtgagctgtcaaaacgcggcaccgggcagacgctgtatattctcgacgagccgaccaccggtctgcacttcgccgatattcagcaactgctcgacgtactgcataaactgcgcgatcagggcaataccattgtggtaattgagcacaatctcgacgtgatcaaaaccgctgactggattgtcgacctgggaccggaaggcggcagtgggggcggcgaaatcctcgtctccggtacgccagaaaccgtcgcagagtgcgaagcttcacatacggcgcgcttcctcaagccgatgctgtaa

SEQ ID NO: 2114 - DNA, 537 bp, Escherichia coli
atggccagcagaggcgtaaacaaggttattctcgttggtaatctgggtcaggacccggaagtacgctacatgccaaatggtggcgctgttgccaacattacgctggctacttccgaatcctggcgtgataaagcgaccggcgagatgaaagagcagactgaatggcaccgcgttgtgctgttcggcaaactggcagaagtggccagcgaatatctgcgtaaaggttctcaggtttatatcgaaggccagctgcgtacccgcaaatggaccgatcaatccggtcaggatcgctataccacagaagtcgtggtgaacgttggcggcaccatgcagatgttgggtggtcgtcagggtggtggcgctcctgcaggtggcaatatcggtggtggtcagccgcagggcggttggggtcagcctcagcagccgcagggtggcaatcagttcagcggcggcgcgcagtctcgcccgcagcagtccgctccggcagcgccgtctaacgagccgccgatggactttgatgacgatattccgttctga

SEQ ID NO: 2115 - DNA, 282 bp, Escherichia coli
atggctaccctcaccactggcgtggttcttcttcgctggcaacttcttagtgccgtaatgatgtttctggctagcacgctcaacatccgttttcgtcgggctgattatgtcgggcttgcagtgatcagcagcggtctgggcgtagtttccgcctgctggttcgcaatggggttgcttggcatcacaatggcggatatcaccgccatctggcacaacatcgagtcggtgatgatagaagagatgaatcaggcaccgccacaatggccaatgattttgacttga

SEQ ID NO: 2116 - DNA, 1554 bp, Escherichia coli
atgagtcatcgtgcacgacaccaattactggcgtttccgggcattatctttttagttctctttcccatcattctgtcgctatggattgccttcttttgggcaaaatcagaagtgaataatcagctccgaacctttgctcagctggcgttggataaatctgagctggtcattcgtcaggcagatttagtgagcgatgcagctgaacgctatcaggggcaagtttgcactccagcccatcaaaagcgaatgttgaatattattcgtggctatctttatattaatgaattgatttatgctcgtgataaccattttttatgctcatcgctgatagcgtctgtaaatggctatacgattgcaccggccgattataagcgtgaacctaacgtttctatctattattaccgtgatacgccttttttctctggctataaaatgacctacatgcagcggggaaattatgtggcggttatcaaccctctcttctggagtgaagtgatgtctgatgatccgacattgcaatggggtgtgtatgatacggtgacgaaaacctttttctcgttaagcaacgaggcctcggcagcaacgttttctccgctgattcatttgaatgatttaaccgtacaacgaaatggctatttatatgcgacagtttattcgacaaaacgcccaattgcagccattgttgcgacttcatatcaacgtcttataactcatttttataatcatcttatttttgcgttgcccgccggtattttggggagtcttgttctgctattactctggctacgtattcgacaaaactatttgtctcccaaacgcaaattgcaacgcgccctcgaaaaacatcaactttgcctttattaccagccaataatcgatatcaaaacagaaaaatgtatcggcgctgaagcgttgttacgttggcctggtgagcaggggcaagtaatgaatccggcagagtttattccgctggcagaaaaggaggggatgatcgaacaggtaactgattatgttattgataatgtcttccgtgatttgggcgcgtatctggcaacacataccgatcgctatgtttctattaacctgtcagcctccgattttcatacctcacggttgatagcgcgaaccaatcagaaaacagagcaacatgcggtgcgcccgcagcaaattaaatttgaagtgactgaacatgcatttcttgatgtcgacaaaatgacgccgattattctggctttccgcaaggccggttacgaagtggcaattgatgattttggtattggctactctaacttgcataaccttaaatcattgaatgtcgatattttgaaaatcgataaatcgtttgttgagacgctgaccacccacaaaaccagtcatttgattgcggaacacatcatcgagctggcgcacagtctgggattaaaaacgatcgctgaaggtgtcgaaactgaggcgcaggttaactggctgcgcaaacacggcgtgcgctattgccagggatggttttttgcgaaggcgatgccgccgcaggtgtttatgcaatggatggggtaa

SEQ ID NO: 2117 - DNA, 324 bp, Escherichia coli
atgtcccatcagaaaattattcaggatcttatcgcatggattgacgagcatattgaccagccgcttaacattgatgtcgtcgcaaaaaaatctggctattcaaagtggtacttgcaacggatgttccgcacggtgacgcatcagacgcttggcgattacattcgccagcgccgtctgttactggccgccgttgagttgcgcaccaccgagcgtccgatttttgatatcgcaatggacctgggttatgtctctcagcagaccttctcccgcgttttccgtcggcagtttgatcgcactcccagcgattatcgccaccgcctgtag

SEQ ID NO: 2118 - DNA, 465 bp, Escherichia coli
atggaaaagaaattaccccgcattaaagcgctgctaacccccggcgaagtggcgaaacgcagcggtgtggcggtatcggcgctgcatttctatgaaagcaaagggttgattaccagtatccgtaatagcggcaatcagcggcgatataaacgtgatgtgttgcgatatgtcgcaattatcaaaattgctcagcgtattggcattccgctcgcaaccattcgtgaagcgtttggcgtgttgccagaagggcatacgttaagtgcgaaagagtggaaacagctttcgtcccaatggcgagaagagttggatcggcgcattcataccttagtggcgctgcgtgacgaactggatggatgtattggttgtggctgcctttcgcgcagtgattgcccgttgcgtaacccgggcgaccgattaggagaagaaggtaccggcgcacgcttactggaagatgaacaaaactaa

SEQ ID NO: 2119 - DNA, 1350 bp, Escherichia coli
atgtctacgccatcagcgcgtaccggcggttcactcgacgcctggtttaaaatttcacaacgtggaagcactgtccgtcaggaagtggttgccgggttaacaacgtttctggcgatggtctactcggttatcgtcgttccaggcatgttgggtaaagcgggcttcccgcctgcggcagttttcgttgcaacctgtctggttgccggactcggttctatcgtgatgggtctgtgggctaatctgccgttggcgattggttgcgccatctctctgacggcgtttaccgcattcagtctggtgctggggcaacatattagcgtacctgtcgcgctgggtgccgtgttcctgatgggtgtgctgtttacggtaatttctgccacgggtatccgtagctggattttgcgcaacttgccgcacggtgtggcgcacggcacggggattggtatcggtctgttcctgctgctgattgctgctaatggtgtcggtctggtgattaaaaacccacttgatggtctgcccgtcgcgctgggggatttcacgacctttccggtgatgatgtcgttggtggggctggcagtgattatcggcctggaaaaactgaaagtccctggtggcattctgctgaccattatcggtatctcaattgtcggtttgatcttcgatcctaacgtccatttctccggcgttttcgccatgccttcattgagcgatgaaaacggcaattcactgataggcagcctggacattatgggtgcgctgaatcctgtagtcctgccaagtgttctggcactggtgatgacggcagtatttgatgccaccggaactatccgtgccgtcgccggtcaggcgaacctgctggataaagatgggcagatcatcgacggcgggaaagcactgaccaccgactccatgagcagcgttttttctggcctcgtgggtgcagctccggcagcggtatacatcgagtctgcggcgggtacggcggcgggcggtaaaaccggtttgacggctatcactgttggcgtgctgttcctgctgattctgttcctctctccgctctcttacctcgttccggggtacgcaacggctccggcgctgatgtacgtcggcctgctgatgctgagcaacgtggcgaaaatcgactttgctgattttgttgatgcgatggcgggtctggttacggcggtattcatcgtgctgacctgtaacatcgtaacaggcatcatgattggcttcgcgactctggtgattggtcgtctggtttccggcgaatggcgcaagttgaacatcggtacggtcgttattgccgtggcgctggtgaccttctatgcgggtggctgggctatctaa

SEQ ID NO: 2120 - DNA, 1650 bp, Escherichia coli
atggaaatcttcttcaccatactgataatgaccctcgtggtctcgctgtccggggtggtcactcgtgtcatgccctttcagatcccgcttccgcttatgcaaatcgccatcggtgcgctactggcgtggccgacgtttggtttgcatgtggagtttgatcctgaactctttttagtcttgtttatcccgccgttgctgttcgctgatggctggaaaacgccgacccgtgaatttctcgaacatgggcgagagattttcggcctcgcgctggcgctggtggtggtcaccgtggtcggcattggcttccttatttactgggtggtgccgggcattccgctgatccccgcctttgcgctggctgcagtgctttctccgaccgatgctgtagcgctctccgggattgttggcgaggggcgcatcccgaaaaaaatcatgggcattttgcagggcgaagcgttgatgaatgacgcctccggcctggtgtcgttgaagtttgccgtggcagtggcgatggggacaatgatcttcaccgtcggcggtgcgacggtcgaatttatgaaagtggcaataggcggtattctcgccggttttgtggtgagctggctgtatggtcgctcgctgcgattcctcagccgctggggcggtgatgaacccgcgacgcagatcgttctgctgttcttgctgccattcgcttcttatctgattgcggaacatattggcgtttccggcatcctcgctgcggttgccgccgggatgaccatcacccgctccggtgtgatgcgccgtgcgccgctggcaatgcgcctgcgcgcaaacagcacctgggcgatgctggaatttgtctttaacggcatggtgttcctgctgttaggtctgcagttgccggggattctggagacgtcgctgatggcggcagaaatcgaccctaacgtcgaaatctggatgctgtttaccgatattattctgatatatgcggcactgatgctggtccgtttcggctggctgtggacgatgaaaaagttcagcaaccgcttcctgaagaagaagccgatggagtttggttcgtggactacacgagaaatcctgatcgcgtctttcgccggggtgcgtggggcgatcactctggccggtgtgctctctatcccgcttctcttgccggatggtaacgtcttccctgcgcgctatgagttggtgttcctggcggctggcgtcattctcttctcgttgtttgtcggcgtggtgatgttgcctattctgctacaacacatagaagtcgcggaccattcgcaacaattgaaagaggaacgtattgcacgagcggcaacggcagaagtggcgattgtggcgatccagaaaatggaggagcgtttggcggcggataccgaagagaatatcgataaccagctgctcacagaggttagttctcgcgtcattggtaacctgcgtcgtcgcgccgatggacgtaatgatgtagaaagttcaatcctggaagagaacctggagcgtcgcttccgtctggcggcattgcgttctgaacgtgctgaactgtaccacctgcgcgccacgcgggagatcagtaacgaaacgctgcaaaaattactgcacgatctcgatttgcttgaagcgttgctgattgaggaaaatcagtaa

SEQ ID NO: 2121 - DNA, 885 bp, Escherichia coli
atggatatcagaacgctgcgttattttgtcgaagtcgtgcgccagcaaagcttcacccgcgcagcggagaagttgtttgtcacccaaccaactatcagcaagatgctgaagaatctcgaagatgagctgaactgtatattgttgatccgcgatggtcgtcggctgcttctcactgatactggtcgcgtcgtatttgagcgcgggctggctttactggctgagtttcggcaactggaagctgagcttagcgatatcaatcagcttaaaaccggcgttttgcggctgggaatcccgccgatggttgggatgttgatggccgggccgattggcctttttcgccagcgttaccccggcgtagaattgaaaatttcggagtttggtggtctgacggtacaacaagcggtgatgaacggtgaactggatatggcactgacagccctgccagtagaagaaagcggcctgacaacgttatcgctgtttagtcatccactatgtgtactgacgccacattcaggtaaatggcttgaatgtgatgccgtctcaccggagacattggcgaaacatcctctacttatctataacgaagattttgccttaagtaagcaattgatgaagttattcgatgaacatggcgttaagccgagaattgcagttcgcagcgggcaatgggattttctcgccgcgatggttcaggccggtgtcggaatagccatattgccggaacccatttgccagcgattagataaaaacaccttaaaatggctaccgctggaaagcgaactaagctggaaattaggaatgatttggcgtgagggcgtttacctttcccactctgcccacgcgtggctgagctgttgtgaaggatactggttaacgccagagtaa

SEQ ID NO: 2122 - DNA, 411 bp, Escherichia coli
atgcccgtggcgcttcgccgcattacccctgccgtagtgcaatctatccaggtattttttcaggttgtgctgtatgcaggtttatttatttttgcgcagtatctcgtctcctggctgcatttgtcgctgcctgccaacctggtggggatgatcctgatgctggcgctgattgtttgtcgcattcttcctctgcaatgggttcgagccggggcgcgttggctattggccgaaatgttgctgttttttgtccctgccgtggtggctgtggtgaactatgcacaactattactggtggatggctggcgtatttttgctgtgatcgcgctgagtacggtgatggtgctgggcacgactgcctgggtagtggaaaaagtctatcgctatgaaatgcgcaggttaaaccgtggctaa

SEQ ID NO: 2123 - DNA, 690 bp, Escherichia coli
gtggctaattttcagctaagtatgctctgtctggcaattacgctagttatctattttcttaacaaacgcctttatcgccgctttcgtaaattgccattgatgcctctggtgctgacgcctacgctactggttatgctgctggtttttggcaatatttcctggcaaaactatattggcgaagcgcactggttactatggctattaggtccggccaccatcgcctttgcggtaccagtgtatgacaatcgggcgatcattaagcgtcactggatgtcgttgacggcaggcgtactgacggcaacggtggtggcagtgaccagctcagtgtggctggcgcgattgtttaccctgccagatgagatccagcgtagcctggcggtgcgttcggtcactacgccatttgctttggcagcgagccagtcgctcggcggacagcctgatctggtggcgctatttgtggtggtcaccggtgtgtttggcatggcgattggcgacgtgttgtttttacgtctctctattcgcgaagggatggcgaaaggtgctggattcggcgcggcatctcatggtgccgggactgcgcggtcgtatgaactgggtcaacaagaaggcgtagttgcaagcctggtcatgatgctttcaggtgtattgatggtattggtttcgccgctggtggccaggatgatgttctga

SEQ ID NO: 2124 - DNA, 1650 bp, Escherichia coli
atgaaaagagttctgacggcgcttgccgccacactccctttcgcagctaacgccgcggatgctattagcggggccgtagagcgtcagccaacgaactggcaggctattattatgttcctgattttcgttgtgtttacgctcggcattacctactgggcgtcaaaacgcgtacgttcgcgtaatgactactacaccgcaggcggcaatatcaccggttttcagaacgggctggcgattgccggggactatatgtccgccgcctcattcttggggatctccgcgctggtgtttacctccggctatgacggcttaatttattcgctgggcttcctggtgggctggccgatcattctgttcctgattgccgaacgtctgcgtaacctcggtcgctacacctttgccgatgtggcctcttaccgtctgaaacaagggccgattcgtattctttcggcctgtggttctctggtggtggtggcgctttaccttatcgcccagatggtgggcgcaggtaaactgatcgagctgctgtttggccttaactatcacattgcggtagtgctggtcggcgtgctgatgatgatgtacgtcctgttcggcggcatgctggcgaccacctgggtacaaattattaaagccgtgctgttgctgttcggtgccagctttatggcctttatggtgatgaaacacgtcggctttagcttcaacaatctgttcagcgaagcgatggcggtacacccgaaaggtgtcgacatcatgaagccgggcgggctggtgaaagatcctatctccgcgctctctttggggctaggactgatgtttggtacggcgggcttgccgcatattctgatgcgcttctttacggtcagcgatgcccgcgaagcacgtaagagcgtgttctacgccaccggatttatgggctacttctacatcctgacctttattatcggctttggcgcgatcatgctggtcggtgcgaatccggaatataaagacgcggcgggccatctgattggtggtaacaacatggcagcagttcacctggccaatgcggtgggcggcaacctgttcctcggctttatttcagcggttgctttcgccaccattcttgcggtggttgcgggtctgacgctggcgggcgcatcggcggtgtctcacgacctgtacgctaacgtcttcaaaaaaggtgcgaccgaacgtgaagagctgcgggtatcgaaaatcaccgtactgatcctcggtgtgattgccattatcctcggcgtgctgtttgagaatcagaacatcgcctttatggtggggctggcgtttgccatcgcggcgagctgtaacttcccgatcattctgctttccatgtactggtcgaaactgactacccgtggcgcaatgctgggcggctggttaggactgattactgcggtggtgctgatgatcctcggcccgactatttgggtacagatcctcggtcacgaaaaagccatcttcccgtatgaatacccggcgctgttctctatcagcgtggcattcctcggtatctggttcttctcagcaacggataattcagcggaaggtgcgcgcgagcgtgaactgttccgtgcgcagtttatccgctcccagactggctttggcgttgagcaaggccgcgcgcattaa

SEQ ID NO: 2125 - DNA, 315 bp, Escherichia coli
atgaatggtacgatttatcagcggatagaagacaatgcgcatttcagggagttagtcgaaaaacggcaacggtttgccaccatcctgtcgattattatgctggcagtttatatcggctttattttactgatcgccttcgcgcccggctggctgggcaccccgctgaatccgaacaccagcgtcacacgcggtattccagtcggtgtcggggtaattgtgatctcctttgtcctcactggtatctacatctggcgggcgaacggcgaattcgaccgtcttaataacgaagtcctgcatgaggtacaagcatcatga

SEQ ID NO: 2126 - DNA, 1959 bp, Escherichia coli
atgagtcaaattcacaaacacaccattcctgccaacatcgcagaccgttgcctgataaaccctcagcagtacgaggcgatgtatcaacaatctattaacgcaccagataccttctggggcgaacagggaaaaattctcgactggatcacaccgtaccagaaggtgaaaaacacctcctttgcccccggtaatgtgtccattaaatggtacgaggacggcacgctgaatctggcggcaaactgccttgaccgccatctgcaagaaaacggcgatcgtaccgccatcatctgggaaggcgacgacgccagccagagcaaacatattagctataaagagctgcaccgcgacgtctgccgcttcgccaataccctgctcgaactgggcattaaaaaaggtgacgtagttgcgatttatatgccgatggtaccggaagccgcggtcgcgatgctggcctgtgcccgcattggcgcggtacattcggtgattttcggcggcttctcgccggaagccgttgccggacgcattatcgactccagttcacgactggtgatcacttccgacgaaggtgtgcgtgccggacgtagtattccgctgaagaaaaacgttgatgacgcgctgaaaaacccgaacgtcaccagcgtagagcatgtggtggtactgaagcgtactggcggaaaaattgactggcaggaagggcgcgacctgtggtggcacgacctggttgagcaagccagcgctcagcaccaggcggaagagatgaacgccgaagatccgctgtttattctctatacctccggttctaccggtaagccaaaaggcgtgctgcacactaccggcggttatctggtgtacgcggcgctgacctttaaatatgtctttgattatcatccgggcgacatctactggtgcaccgccgatgtgggctgggttaccggacacagttatttgctgtatggcccgctggcctgcggcgcgaccacgctgatgtttgaaggcgtaccgaactggccgacgcctgcccgtatggcgcaggtggtggacaagcatcaggtcaatattctctataccgcgcccacggcgattcgcgcgctgatggcggaaggcgataaagcgatcgaaggcaccgaccgttcgtcgctgcgcattctcggttccgtgggcgagccaattaacccggaagcgtgggagtggtactggaaaaaaatcggcaacgagaaatgcccggtggtcgacacctggtggcagacagaaactggcggtttcatgatcaccccgctgcctggcgctaccgagctaaaagccggttcggcaacacgtccgttcttcggcgtgcaaccggcgctggtcgataacgaaggtcacccgctggaaggggccaccgaaggcagcctggtgattactgactcctggccgggtcaggcgcgtacgctgtttggcgatcacgaacgttttgagcagacctatttctccaccttcaaaaatatgtatttcagcggcgacggcgcgcgtcgcgatgaagatggctattactggatcaccgggcgcgtggacgacgtgctgaacgtctccggtcaccgcctggggacggcagagattgagtcggcgctggtggcgcatccgaaaattgccgaagccgctgtggtcggtattccgcacaatattaaaggtcaggcgatctacgcctacgtcacgcttaatcacggggaggaaccgtcaccagaactgtacgcagaagtccgcaactgggtgcgtaaagagattggcccgctggcgacgccagacgtgctgcactggaccgactccctgcctaaaacccgctccggcaaaattatgcgccgtattctgcgcaaaattgcggcgggcgataccagcaacctgggcgatacctcgacgcttgccgatcctggcgtagtcgagaagctgcttgaagagaagcaggccatcgcgatgccatcgtaa

SEQ ID NO: 2127 - DNA, 1437 bp, Escherichia coli
atgacaaggataaaaataaacgcacgccgtatcttcagcttattgattccttttttctttttcacttctgttcacgctgaacaaacggctgctcccgcaacacctgtaactgtggaagcgaagaatgaaacctttgccccgcagcatcccgatcaatatctctcctggaaagctacctcggaacagtcagagcgtgttgacgccctggcggaagatccacggctggtgatcctgtgggcagggtatcccttctcgcgcgattacaacaagccgcgtggacatgcctttgctgtgaccgatgtgcgtgaaaccctgcgtaccggtgcgccgaaaaacgctgaagatggtccgctaccgatggcgtgctggagttgtaaaagcccggatgtggcgcgtctgatccagaaagacggcgaagatggctacttccacggaaaatgggcgcgcggcggcccggaaatcgtcaacaacttaggttgtgccgattgccataacaccgcctcaccagagttcgccaaaggcaaaccggagttaaccctttcccgtccgtatgcggctcgcgcgatggaagccattggtaaacctttcgagaaagccggacgtttcgaccagcaatcgatggtttgcggtcagtgccatgtggagtattacttcgacggcaaaaacaaagcggttaaattcccgtgggatgacggcatgaaagtcgaaaatatggagcagtattacgacaaaattgccttctctgactggactaactccctgtcgaaaacgccaatgctgaaagcgcagcacccggaatatgaaacctggacagcgggcattcacggcaaaaacaacgtgacctgtatcgattgccatatgccaaaagtgcagaacgccgaaggcaaactctacaccgaccataaaattggtaatccgtttgataacttcgcccagacttgtgcgaactgccatacccaggacaaagctgccttgcaaaaagtggtcgcggaacgtaagcagtcgattaacgacctgaaaatcaaggttgaagatcaactggttcacgctcacttcgaagcgaaagcggcgctggatgcaggcgcaacggaagccgaaatgaagccgattcaggacgatatccgtcatgcccagtggcgttgggatttggcgatcgcttcccacggcattcatatgcacgcaccggaagaaggtctgaggatgctcggtacggcgatggataaagcggcggatgcacgcaccaaactggcgcgcctgctggcgaccaaaggcataacccatgaaatccagatcccggatatctcgaccaaagagaaagcccagcaggccattggcctgaacatggagcaaatcaaggccgagaagcaggacttcatcaaaacggtgatcccgcagtgggaagagcaggcacgtaaaaacggtctgttaagccaataa

SEQ ID NO: 2128 - DNA, 567 bp, Escherichia coli
atgagcgtattacgttcgttattaactgccggggtgctggcgtcgggcctgttgtggagcctgaacggaattaccgctacccctgcggcgcaggcatctgatgatcgctacgaagttacccagcagcgtaacccggatgccgcctgtctggactgtcataagccagataccgaaggtatgcatggcaaacatgcttctgttatcaacccgaataacaaactgccggtcacctgcaccaactgccacggtcagccatcaccgcaacaccgcgaaggggtgaaggatgtgatgcgctttaacgagccgatgtacaaggttggagagcagaacagcgtctgtatgtcctgccatctgccggaacagttgcaaaaagcgttctggccgcacgatgtccacgtaaccaaagtggcgtgcgccagctgccattccctgcatctacagcaagatacgatgcagacgttaagtgacaaaggacggattaagatttgcgtcgattgccacagcgatcagcgcaccaatccgaactttaacccggcgtctgttccgttgcttaaggagcagccatga

SEQ ID NO: 2129 - DNA, 672 bp, Escherichia coli
atgacctggtctcgtcgccagtttctcaccggcgtcggcgtgctggcagccgtcagcggcaccgcaggacgcgtggtggcgaaaacgttgaatatcaatggggtgcgttacggcatggtgcatgacgagtcgttatgcatcggctgtaccgcctgtatggatgcttgtcgggaagtgaacaaggtgccggaaggcgtctcgcgcctgacgattattcgtagcgagccgcagggcgaatttcctgatgtgaaatatcgcttcttccgtaagtcttgccagcactgcgatcatgcgccgtgcgttgacgtttgcccgaccggtgcgtcttttcgcgacgctgccagtgggattgtcgatgttaatccggatctctgcgtcggttgtcagtactgcatcgccgcctgtccgtaccgcgtgcgctttatccatccggtcacgaagacggcggacaaatgcgatttctgccgtaagacccatttgcaggccggtaagctgcccgcgtgcgttgaggcttgcccgacgaaggcgctgacgtttggcaatctggacgatcccagcagtgagatttcgcaactgctgcgccagaagcccacttaccgctacaagctggcgctgggaaccaaaccgaagctgtaccgcgtaccgtttaaatacggggaggtgagccaatga

SEQ ID NO: 2130 - DNA, 957 bp, Escherichia coli
atgacgcagacttccgcatttcattttgaatcgctggtgtgggactggccgattgccatctacctgtttttgattggtatttctgccggtctggtgacgctggccgtgctgttacgtcgtgtctacccgcaggcgggcggtgcagacagtacgttgttgcgcaccacgctgattgtcgggcctggcgcggtgatcctcggtctgttgatcctcgtcttccacctgacaagaccgtggaccttctggaagctgatgttccactacagttttacctcggtgatgtcgatgggggtgatgctgtttcagctttacatggtggtgctggtgctgtggctggcgaaaatctttgaacatgatttgcttgccctgcaacaacgctggttgccgaagctggggatcgtgcaaaaggttctgagcctgctgacgcccgttcatcgcggactggaaacattgatgctggtgctggcggtgttgttgggggcttataccggctttctgctgtcggcgctgaaatcgtatccgttcctcaataacccgatcctgccggtgctgttcctcttctccggcatctcgtctggtgcggcggtggcgctgatcgccatggcgatacgccaacgcagtaacccgcattccacggaagcgcactttgtacaccgtatggaaatccccgtggtatggggtgaaatcttcctgctggtggcgttttttgtcggtctggcgctgggcgatgacggtaaagtgcgtgcgctggtggcggcattgggcggcggtttctggacgtggtggttctggcttggtgtcgccgggctggggctgattgtgccaatgttgctcaaaccgtgggtcaatcgcagttccggcattcctgccgtgctggcggcatgtggggccagcctggtcggcgtgttgatgctgcgctttttcattctctacgccgggcagttgacggtggcgtaa

SEQ ID NO: 2131 - DNA, 1623 bp, Escherichia coli
ttgcgctggcctgccatgatgcgactcacttgcatcggcattctggcgcagttcgcgctcctgctgctcgcctttggcgtactgacgtattgttttctcatcagcgatttctcggtcatttatgtcgcccaacatagctatagcctgctgtcgtgggaactcaaactggcggcggtgtggggcggtcatgaaggttcgctgctgctttgggtgctgctgctttccgcctggagcgtgctgtttgcctggcattatcgacagcaaaccgatccgctatttccgctcacgttaacggttttatcgctgatacttgccgcactgctgctgtttgttgtcggatggtccgatccttttgtgaggatatttccgcccgcaatagaagggcgcgatctcaacccaatgctgcaacatcccggtcttatctttcatccaccgctgctttatctcggctacggcggtttgatggtggcggcgagcgtggcgctggcgagtttactgcgcggcgagtttgatggtacctgcgcccgaatttgctggcgttgggcactacctggctggagcgcattaaccgcagggatcattctcggttcctggtgggcttattgcgaactgggctggggcggttggtggttttgggatccggttgaaaacgcgtcgttattaccctggctttcatctactgcgttgctacacagtttgtctttgacacgccagcgggggattttccgccactggtcgctgttgctggcgatagtaactctgatgctgtcgctgctgggcaccttaattgtccgttctggcattctggtttcggttcatgcgttcgcgctggataacgtccgcgccgtgccgttgttcagcctgtttgcactgattagccttgcgtctctggctctgtatggctggcgagcgcgggacggtggcccggcggtgcgtttttcggggttatcgcgggaaatgttaatcctcgctacgctgttgctgttttgcgcagtgctactgatcgtgctggtgggaacgctttatccgatgatttacggcctgctgggctggggacgcctctccgttggcgcgccgtattttaaccgcgcgacgttaccgtttgctctgttgatgctggtggtgattgtgctggcgacgtttgtctctggcaaacgtgctcagcttccggcgctgctggcgcatgcgggcgtgctgttatttgccgcggggattgtggtttccagcgtcagccgtcaggagatcagcctgaatttacagccgggtcagcaggtgacgctggcaggatacaccttccgttttgagcgcctcgatctgcaagccaaaggcaattacaccagcgaaaaagcgatagtggcactgtttgaccatcagcaacgcattggtgaattaacgccggagcggcgtttttacgaagcacgtcgtcagcaaatgatggaaccgtcaattcgctggaatggcatccatgactggtatgcggtcatgggcgagaaaaccggagcggatcgttacgcttttcgtttgtatgtacaaagcggtgtgcgctggatctgggggggaggattgttgatgatttcgggcgcattgttaagcggatggcggggaaggaagcgcgatgaataa

SEQ ID NO: 2132 - DNA, 384 bp, Escherichia coli
atgaataaagggcttctcacgctactgctgttatttacctgttttgcgcgcgctcaggttgtagacacctggcaattcgccaatccgcaacaacagcaacaggcgttaaatattgccagccagttacgttgtccgcagtgccagaatcagaacttactggaatccaatgcgccggtggcagtcagtatgcgccatcaggtttacaccatggtggaagaggggaaaagtgaagtcgaaatcattggctggatgaccgaacgctacggagattttgttcgctataacccaccgttaacgggtcagacgctggtgttgtgggcgctgccagtagtgttgttactgctgatggcactgatcctctggcgagtgagggcgaagcgatga

SEQ ID NO: 2133 - DNA, 597 bp, Escherichia coli
atgaaacagccccaaataccggtgaaaatgctgacaacactcacgatttttatggtatttctctgtgtcggcagttatctgttaagtccaaaatggcaggcggtacgtgcggagtatcagcgtcagcgcgatccgctgcatcagtttgccagccagcaaaccccggaagcgcagcttcaggcattgcaggataaaatccgtgctaatccacaaaacagcgaacagtgggcgttactgggcgagtattatctgtggcaaaacgattacagcaattcgctgctggcgtaccgtcaggcgttgcaactacgtggtgagaacgctgaactgtatgcggcgctggcgacggtgctgtattaccaggccagccaacatatgaccgtccaggctcgcgcaatgatcgacaaagccctcgcgctggactctaacgaaatcaccgctctgatgctgctggcttccgatgcgtttatgcaggcgaattacgcgcaagccatcgaactatggcaaaaagtgatggatctcaactcaccccggatcaaccggacacagctggtcgagtcgattaatatggcgaaattgttgcagcggagatcagattaa

SEQ ID NO: 2134 - DNA, 1314 bp, Escherichia coli
atgaaaaatataaaattcagcctggcctggcagattctgtttgctatggtgctgggcattctcctgggaagctacctgcactaccatagcgacagccgcgactggctggtcgtcaatttgctctctccggcgggtgatatcttcatccatctgatcaaaatgattgttgtgccgattgtgatctccacactggtggtgggtatcgcgggtgttggtgatgccaaacagctcgggcgtattggtgcgaaaaccattatctacttcgaggtgatcaccaccgtcgccatcattttggggatcactctggcgaacgtcttccagcccggtgccggggtggatatgtcgcagctggcgaccgtcgatatctcgaaatatcagagcactacggaagcggtacaaagcagttcccacggcattatgggcacgattttgtcgctggtgccgacgaacattgtggcgtcgatggcgaaaggcgaaatgctgccgatcatcttcttctcggtgctgtttggtctggggctttcctccctgcccgcgacgcatcgtgaaccgctggtgaccgttttccgctccatctctgaaaccatgtttaaagtgactcacatggtgatgcgttatgcgccggtgggtgtgtttgcgctgattgcggtgacggtggctaactttggtttctcttctctgtggccactggcgaaactggtgctgctggtgcattttgccattctgttcttcgcgctggtcgtactgggaattgtggcgcgcctgtgcgggttaagcgtctggatcctgattcgtattctgaaagatgagctgattctggcgtactccactgccagctctgaaagcgtgctgccgcgaattattgagaagatggaagcctacggagcaccggcgtcgatcaccagtttcgtggtgccgaccggttactcttttaaccttgatggttcgacgctgtatcaaagtattgccgctattttcatcgctcagctgtatggcattgacctctccatctggcaggaaatcattctggtgctgacgctgatggtgacctcgaaagggattgctggcgtgccgggcgtgtcgtttgtggtgttgctggcaacgctgggcagcgtagggatcccgctggaaggtctggcgtttattgccggtgttgaccgtatcctcgacatggcgcgtactgcgctgaacgtggtgggtaatgcgctggcggtgctggtgattgccaaatgggaacacaaatttgaccgtaagaaagcgctggcttatgagcgtgaagtactgggcaaatttgataaaactgcggatcagtaa

SEQ ID NO: 2135 - DNA, 690 bp, Escherichia coli
atgaaaaaaattatcactttgatgttgtttttgacattctttgcccacgcgaacgactccgagcctggcagccagtatttaaaggcagcagaggccggagaccgacgcgcacaatattttcttgccgacagctggtttagctccggcgatttgagcaaagccgaatattgggcacagaaagccgccgacagcggtgatgccgatgcctgcgcgctgttggcgcagatcaaaatcaccaatccggtcagtctggactatccacaagcaaaagtgcttgccgagaaagcagcgcaagcgggcagtaaagaaggtgaagtaacgctggcgcatattctggtaaatacgcaagcgggtaaaccggattatccaaaggcgatttcgctgttagaaaacgcctcggaagatctggagaacgactctgccgtcgatgcccaaatgctgcttggtttgatttacgccaacggcgtgggcattaaggccgacgatgacaaagcaacctggtatttcaaacgtagctccgcgatttcccgaaccggttattccgaatactgggcgggaatgatgttcttaaacggtgaagagggttttatcgagaagaacaaacaaaaggcgctgcactggttgaacctgagctgtatggaagggtttgataccgggtgtgaagagtttgaaaaattaaccaacggttaa

SEQ ID NO: 2136 - DNA, 705 bp, Escherichia coli
atgacgattgttgaaattaatcacttacaggtgacttttgctgagaaaaccgcagtttctgccgccagtttttcggttaatgccggagagacatttagtttaattggcgaatcaggctgcggaaaatccacgattttgcgcgtaattgctggattacagcgcgactggcacggtcaggtgtcactgtttgggcacaccatcaaaccaggaatgcgttttcagggcgatctccgccgcaatgtgcaaatggtgtttcaggatccctatgcctcgttgcatcccaatcatactctgtggcgaacgctggctgaaccactcaaaattcgtggcgaaagagaaatagaaaaacgcgtccagactgcactggaacaggttggcttgcctttcgacgccgctcgtcgctacccacaccagctttccggtggtcaacggcaacgtgtggttattgctcgcgccctgttgttacgaccacaacttcttctgctggatgaacccacctcggcgttggatatgtcggtacaagcggaaatccttaatttgttgaatcaacttaagctggaacaccaaatgacatatctgctggtcagtcacgatgccgatgtcatcgcgcatatgtctgatcgagcggcattgatgtccgagggaaaaattcagcgattttttgatcgcgacgccatggaaaagggggaacatcggatggattaa

SEQ ID NO: 2137 - DNA, 837 bp, Escherichia coli
atgactgactcacgtcttagtatcaacaatctctgcgtcgattatccggagtcccgggtcgtcaacaatgtcagttttacattaggcaatgaacgtctggcgctggtcggtgagtcgggttcaggtaagtccatgaccgcccgcgccctgatggggctggtgcgtaaaccgggtgtagtaaccgcggacacacttaacattctggggcgtgatgcactcacccttaacgcgcgtggatggcaacagttgcgcggtaacgatatcgcgatggtattgcaagatccgcgttacgcgcttaatccagtaaagacagtaaaagcgcaactggaagaggcgcttacgctccatcaacgtctgaaccgccgcgagaaagaagagaaaataaacaccgcaattcaggctgtcggcctcaatacgcgagtactgcaaagctatcctcgtgaactttctggcggcatggggcagcgagtgatgattgcaattgcgctcatcaacgatccccgggtattgattgccgatgagccaacatcagcactggatgtgcgcctgcgtaatcagattctggaactgctggttacccagtgtgaacaacgtcagatggcaatgttgctgatcagtcacgacctgccattagttgcccaattttgccatcgggtgctggtgatgtatcagggaaataaggtggatgaaatgcacgctgctgcgctacctacagcaacgcatccttacacgcgcacactgtggacttgccgcccaaatgcacaaacttacgggcagatgctgccgacgctggacaggacggcaatgacgccggagaaataccatgacgattgttga

SEQ ID NO: 2138 - DNA, 834 bp, Escherichia coli
atgccgatgtttctctttttacgccgtttacgccattcacccgccgcgttttgcgggttgataattatcctgttattgatgctaattgcgctcttcgcgccgtggctggcacctcacgatcctaactggcaggatgcggcggcgcggttacaagcaccgagtcgtcagcactggctcggcactgacagttacgggcgagacctactttcacgtttaatctacggcagccgcccggcactggggctggtggcattggtaacaatcattacactcccggtcggtctgctgattggcattttagccgggtactacggcggctggctggaacgcgtgctgatgcgttttactgacgtagtaatgtcaatgccgcgtttaattctggcttttgcttttgttgccatgctggggccggggctggttaacggcgcactggcgctggcattaaccacctggcctgcttatgcgcgtcaggcacggagtgagatccaacgtctgcgacacagtgattatcttgccgccgcagaaatgatgggcatccgcggcaggcgtctgctggctggtcatattttaccattgtgcctgccatctgccattgtccgtctggcgctggatttagcgggtatcattctggcggctgctggcctgggttttcttgggcttggtgctcgcccgccaatggcggaatggggagccatgatcgccgacggtatgcaggtcatttttgatcaatggtggattgccgccgctcccggcgcaattatcttaattgccagtctggcctttaatctgctgggtgatggcttgcgcgatgttctggagcctcaacatgactga

SEQ ID NO: 2139 - DNA, 1050 bp, Escherichia coli
atgtctgtcgttttttccactcgcgcgagatggcgaggcaaacgccctctgctcgcgctgttgcaagggctgtttaccgttgctctgacgctactcggcctgctgctgattacctttgcgctttcggctctctcaccggtcgatcgcgtactacaaatcgttggcgatcacgccagccagtccacctatgatcaggtacgccaccagttaggattggatcagccgttagccgtccagttctggcattacctgatgaatctggcacacggcgatctgggcatcgccagctccaccgggcaaccagtactccaggacttgctatcagcattcccggtgaccattgaactggcaacgttggcgcttattgtcggtgctgttgtcggcgtcattgcgggtgtactttgcgcccgttatgtcggttctccgctggatttcaccgtgcgaacattaactctactgggaaattccgtccctgttttttggcttggtctgctgatgctggcgctgttctacgccagactgcaatggagtgccgggccgggcaggctggatgatatttatcaattcaccatagaaccccgcagcggatttgcgctgattgatacgtggctttctggcgatcgcgaggcatttaccaatgcaatcaaccatttgatacttccggttttattactggcgtacttctcgctcgccagtattacgcgcctgactcgttccgcctgtcttggcgaaatgaataaagaatatattctgctggcgcgcgccaaaggggccagcgagatgacaattttgctacgtcatgttttacccaacattcgcggcaccttgctcaccgttatcgccctcgcctatacatcaatgctggaaggcgcggtactgacagaaaccgtcttttcatggccaggtattgggcgctacctcactacagcgctcttcgcgggtgataccacagcaatcatgggaggaacgctgctgattggcgtctgctttgtgttgataaataacttaaccgacctgctggtccggctgaccgatccgaggttacgctga

SEQ ID NO: 2140 - DNA, 1569 bp, Escherichia coli
atgattaaaaaactattacctttactggttttaagcacaatttccgccacaaccgttgccgctacaccgcctaatacgttggttgtagcccagggactggatgatattgtgagtctggacccggcagaagctaatgaactctcaagtattcagactgtaccaagtctgtatcaacgcgtagtacaaccggaccgtaatgatccgacgaaaatcactccgattctggcggaaagttggcaggctgaccccgcagccaaaacgctaaccataaaactgaaaagcgatgcgaaatttgcctctggtaatccggtacgcccggaagatgtgatttactcttatgtccgggctgtcacactgaataaatccggtgcgtttattctcaatgtgctgggatggcagccggaaaatatcgccagccagttgaagaaaatcgatgaccataccgtccaggtacaatggagtgccgacgtcagcccggcgctggcactgaatattctctccacaccaatcgcctcaattgttgacgagaagctggttgcgccaaacgccaaaaataacgactttggtaatgaatggctgaagatgcattccgctggcagcggcgcgtttaaaatgcgtacttaccaaccgcatcaggccatcgtgatggaagccaacaccagctcaccaaccggcgccccgaaactgaaaagcgtcatcatcaaaaatgttcccgatccggcaacgcgtcgcctgctgatccaacaaggtgatgctgatatggctcgtgatctgggagccgatcaaatcgatgcattacagggtaaacctggcgtaaaagtgatgagcattgcctccgccgaacagaactacctggccttcaataccggtaacaaggataacccgctgatgagtaatcctgcgttctgggaggccgctcgctggttggtcgattacgacggcatcaccaaaaatctcttaaaaggacaatattttacccatcaaagtttcctgcccgtgggctttcctggagcactggaagaaacaccgtttacctttaatccagccaaagcaaaagagatcctcgctaaagccggaatcaaagacccgcacttcacgcttgatgtcgaaaataaaccgccatttattaccatcgcgcagtcaattcaggccagctttgctcagggcggtgtaaaagttgatttgctgccagccgcagggagtcaggtctactctcgcgttcgcgcccaccagcatcagggggccattcgtatgtggttgcctgattattttgacgcacattccaacgccagctctttcgcctataacgatggcaaatccagcaccgttgccgggttaaacggctggaaaatcccggaactgaacaaagaaacgctggcggccatcgctgaacctgatagcgctaaacgtcttgatttgtataagaaaatgcaacaagaactacaacgtagttccccgtatgtctttattgatcaaggcaaaacgcaaattgtcatgcgtgataatgtgcaggggtatcaacaagggttgaatgccgatatggtctggtttgatcaggtaaccaaataa

SEQ ID NO: 2141 - DNA, 1680 bp, Escherichia coli
atgagcaatgctattaacgaaattgataataccgatttagtgttcgttttcgggtataacccggcggattcccacccaatcgtggcgaatcacgtaattaacgctaaacgtaacggggcgaaaattatcgtctgcgatccgcgcaaaattgaaaccgcgcgcattgctgacatgcacattgcattgaaaaacggctcgaacatcgcgctgttgaatgcgatgggccatgtcattattgaagaaaatctgtacgacaaagcgttcgtcgcttcccgtacagaaggctttgaagagtatcgtaaaatcgttgaaggctacacgccggagtcggttgaagatatcaccggcgtcagcgccagtgagattcgtcaggcggcgcggatgtatgcccaggcagaaagcgccgccatcctgtggggcatgggggtaacccagttctatcagggcgtggaaaccgtgcgttctctgaccagcctcgcgatgctgaccggtaacctcggtaagccacatgcgggtgtaaacccggttcgtggtcagaacaacgtgcagggtgcctgcgatatgggcgcgctgccggatacgtatccgggctatcagtacgtgaaagatccggctaaccgcgagaaattcgccaaagcctggggcgtggaaagcctgcctgctcataccggctatcgcatcagcgagctgccgcaccgcgtggcgcatggtgaagtgagagcggcgtacattatgggcgaagatccgctgcaaactgacgcggaactgtcggcagtacgtaaagcctttgaagatctggaactggttatcgttcaggacatctttatgaccaaaaccgcgtcggcggcggatgtcattttaccgtcaacgtcgtggggcgagcatgaaggcgtgtttactgcggctgaccgtggcttccagcgtttcttcaaggcggttgagccgaagtgggatctgaaaacggactggcaaatcatcagtgaaattgccactcgtatgggttatccgatgcactacaacaacacccaggagatctgggacgagttgcgtcatctgtgcccggatttctacggtgcgacttacgagaaaatgggcgaactgggcttcattcagtggccttgccgcgatacttcagatgccgatcaggggacttcttatctgtttaaagagaagtttgataccccgaacggtctggcgcagttcttcacctgcgactgggtagcgccaatcgacaaactcaccgacgaatacccgatggtactgtcaacggtgcgtgaagttggtcactactcttgccgttcgatgaccggtaactgtgcggcactggcggcgctggctgatgaacctggctacgcacaaatcaataccgaagacgccaaacgtctgggtattgaagatgaggcattggtttgggtgcactcgcgtaaaggcaaaattatcacccgtgcgcaggtcagcgatcgtccgaacaaaggggcgatttacatgacctaccagtggtggattggtgcctgtaacgagctggtgaccgaaaacttaagcccgattacgaaaacgccggaatacaaatactgcgccgtgcgcgtcgagccgatcgccgatcagcgcgccgccgagcagtacgtgattgacgagtacaacaagttgaaaactcgcctgcgcgaagcggcactggcgtaa

SEQ ID NO: 2142 - DNA, 420 bp, Escherichia coli
atgaaaaaagtcgtcacggtttgcccctattgcgcatcaggttgcaaaatcaacctggtcgtcgataacggcaaaatcgtccgggcggaggcagcgcaggggaaaaccaaccagggtaccctgtgtctgaagggttattatggctgggacttcattaacgatacccagatcctgaccccgcgcctgaaaacccccatgatccgtcgccagcgtggcggcaaactcgaacctgtttcctgggatgaggcactgaattacgttgccgagcgcctgagcgccatcaaagagaagtacggtccggatgccatccagacgaccggctcctcgcgcggtacgggtaacgaaaccaactatgtaatgcaaaaatttgcgcgcgccgttattggtaccaataacgttgactgctgcgctcgtgtctga

SEQ ID NO: 2143 - DNA, 1467 bp, Escherichia coli
atgatcaatcgtcaactttcacgtctgctgttgtgcagcattctcggcagcacgacgctgatttccggctgtgccctggtacgtaaggattctgcgcctcatcaacagctcaaaccggaacaaatcaaactggccgatgatattcatcttgccagctccggctggccgcaggcgcagtggtggaaacaatttaacgacccgcagctggatgcgctgatccaacggacgctaagtggttcacaccccctcgccgaagcgaaactgcgggaagaaaaagcgcagtcccaggccgatttgttagatgccggttcacaattacaggtcgcagcgttagggatgctcaaccgccaacgcgtctcggcgaacggctttttaagcccttatgcgatggatgcgccagcactgggtatggacgggccgtactatacggaagccacagtcggtttgtttgccggactggatctcgatttgtggggtgtgcatcgctcagcggttgctgccgccattggcgcgcataatgccgcgctggcagaaaccgcagcagtagagctatcgctgaccacgggcgtagcgcagctttattacagtatgcaggccagctatcaggtgctcgatctgttagaacaaactcgcgatgtgattgattacgcggtgaaagcgcaccagagtaaagtggcgcacggtctggaagcgcaagtgcctttccacggcgcgcgggcacagattctggcggtcgataaacaaattgctgccgtcaaagggcaaatcactgaaacgcgagaatctctgcgtgcattgattggcgcgggagccagcgatatgccggagatcaaaccggtggcattaccacgagtacagaccggcattccggcaacgctctcttatgagttgctcgccagacgcccggatctgcaagccatgcgctggtatgttcaggcgtcattagatcaggtggattccgcgcgggcgctgttctacccgagctttgatatcaaagcgtttttcggtctggactccatccacctggataccttattcaaaaaaaccagtcgccagttcaacttcatcccgggtctgaaattgccgctgtttgacggtggacggttgaatgccaatctcgaaggcactcgcgccgccagcaacatgatgattgaacgttacaaccagtcagtactgaacgcggtgcgtgacgttgccgtcaacggcacacgtctgcaaacgctcaacgacgagcgagagatgcaggctgaacgcgtagaagcaacgcgcttcacccagcgcgcagccgaggccgcctatcagcgcggcttaaccagccgcttacaggccaccgaagcccggttgccagtgcttgccgaagagatgtcattactgatgctggacagccgccgggtgatccaaagcattcagttgatgaaatcgctgggcggcgggtatcaggcagctcccatcgtcgagaaaaaataa

SEQ ID NO: 2144 - DNA, 2052 bp, Escherichia coli
atgagcgcgctcaactccctgccattaccggtggtcaggctgctggcgttctttcatgaagagttaagcgagcggcgaccagggcgcgtgccacagacgatgcaactctgggtaggttgcctgctggtgattctgatctcgatgacttttgagatcccttttgtggcgttatcactggcagtgctgttttacggtattcagtcgaacgcgttttacaccaaatttgtggcgatcttgtttgtggtcgccacggtgctggagatcgccagcctgtttttgatctacaaatggtcatatggcgaaccgttgatccgattgatcattgccgggccgatcctgatgagctgtatgtttttgatgcgcacccatcggttggggctggtctttttcgccgtcgccattgtcgctatttacgggcaaaccttccccgccatgctcgactatccggaagtggtcgtgcgcttaacgctgtggtgtatcgttgttggcctctatccaaccttgctgatgacgttaatcggcgtgctgtggtttcccagtcgtgccattacgcagatgcatcaggcgcttaatgatcgacttgatgatgccattagccacctgacggacagcctcgcaccgctacccgaaacgcggattgaaagagaggcgctggcgctgcaaaaactcaatgtcttttgcctcgcggatgatgccaactggcgaacccagagcgcatggtggcaaagctgcgtggcaacggtaacctacatttactcgacgctgaatcgctacgatcccacctcttttgctgattctcaggcaattattgaattccgacaaaaattagcttcagaaatcaacaagctgcagcattccattaccgaaggtcagtgctggcaaagcgactggcggatcagtgaaagtgaagcgatgacggcacgggaatgtaacctggagaatatctgccagacgctgttacagcttggtcagatggacccgaatacgccgccaacgcccgcagccaaaccgccatcaatggtcgccgatgcttttaccaatccagactatatgcgctacgcggtaaaaacgctgctcgcctgtttgatctgttacaccttctacagcggcgtggactgggaaggcattcatacctgtatgctgacctgcgtgatcgtcgctaatccaaatgtcggttcgtcgtaccagaagatggtgctgcgttttggtggggccttttgcggcgcgattctggcgctgttattcacgctactggtcatgccctggctggacaatattgtcgaattgctgtttgtgctggcaccgattttcctgttgggcgcatggattgccaccagctctgaacgctcttcttatatcggcacacagatggtggtcaccttcgcgctcgccacgctcgaaaacgtttttggcccggtgtacgacctggtggaaattcgcgatcgcgctctgggtatcatcattggtaccgtggtgtcggcggtgatttacacctttgtctggcctgaaagcgaagcgcgcacgctgccgcaaaaactggctggcgcgctgggtatgttgagtaaagtaatgcggatcccacgccagcaggaagtcacggctctgcgcacttatctgcacattcgcataggtctgcatgcggcgtttaatgcctgtgaagagatgtgccaacgcgtggtgctggagcgtcaactggacagcgaagaacgcgcattactgattgaacgttcgcaaacggttattcgtcagggccgcgatattcttcacgcctgggatgccacctggaactcggcgcaggcgctggataacgcactacagccggacagagcaggtcagtttgccgacgccctggagaaatacgccgccggtctggcaaccgcactcagccgttctcctcaaataacgcttgaagaaacacccgcctcgcaggccattctgccgaccttattaaaacaggagcaacacgtctgccagcttttcgcccgcttgccagactggacagccccggcattaacgcccgccaaggaacaggcacaaggagccacgcaatga

SEQ ID NO: 2145 - DNA, 1032 bp, Escherichia coli
atggaaagtacgccgaaaaaagctcctcgcagtaaattccctgctctgttagtggttgcgttggcgctggttgcccttgttttcgttatctggcgcgtagacagtgcgccatcaactaatgacgcttacgcgtcagcagataccattgatgtggtgccggaagtcagcggtcgcattgtagaactggcggtcaccgacaaccaggcggtgaaacagggcgatttgctgttccgcattgacccgcgcccgtacgaagccaatctggcgaaagctgaagcctccctcgcggcgctggataagcaaattatgctcacccagcgtagcgttgacgcacaacagtttggtgccgactcggttaatgccacggtagaaaaagcccgtgccgccgcgaaacaagccagcgatacgttacgccgtaccgaaccgctactgcgagaaggttttgtttctgcggaagaggttgaccgtgcaagaaccgcacagcgtgcggcagaagcggaccttaatgccgtattgttgcaggcgcagtcagccgccagcgccgtcagcggcgtggatgcgctggtggcgcagcgtgcggcagtggaagcggatattgccctgaccaaactgcatctggaaatggcaaccgttcgcgcgccgtttgatggccgggtcatttccctcaaaacctcggttgggcaatttgcttctgccatgcgccctattttcaccctaatcgacactcgtcactggtacgtgatcgccaacttccgcgaaaccgatctgaaaaatattcgctcaggtacacccgcaaccattcgcctgatgagcgacagcggcaaaaccttcgagggtaaagtggattcgattggctacggcgtgctaccggatgacggcggcctggtgctgggcggcctgccgaaagtgtcacggtctattaactgggtccgcgttgcccagcgttttccggtcaaaatcatggttgataaacctgacccggaaatgttccgcatcggcgcttcggcagtcgctaatcttgagccacaataa

SEQ ID NO: 2146 - DNA, 276 bp, Escherichia coli
atgccaacagttctctctcgcatggcgatgcaactcaaaaagacagcctggataattcccgtcttcatggtatcgggatgctcattatctccggcaatcccggtgatcggcgcttattatcccggctggtttttctgcgccattgccagccttattttgacgctcatcacgaggcgaattattcagcggacaaatatcaatctggcatttgtcggaattatttataccgccctttttgctctctacgccatgctgttctggctggcatttttctaa

SEQ ID NO: 2147 - DNA, 1986 bp, Escherichia coli
atgaataactctcggttattccgtttgagcaggattgttattgcgttcactgccgccagcggcatgatgataaataccgcttacgcaacagatgaagcgaaagccgccactcaatatacccaacaggttaatcagaattacgccaaatcattaccgtttagcgatcgtcaggattttgacgatgcccagcgtggatttatcgctccgctgctggatgaaggtattctgcgtgatgcgaacggtaaaatttactaccgcgcgaatgattacaaatttgatattaatgccgctgcgccggaaaccgtaaaccccagcctgtggcgtcagtcgcagatcaacggcatttcaggcctgttcaaagtcaccgataaaatgtatcaggtgcgcggccaggatatctctaacattacgttcgttgagggcgagaaaggcattattgttattgacccactggtgacgccacctgccgcaaaagccgcacttgacctttacttccagcatcgtccgcaaaaaccgattgttgccgttatctacactcacagccacgccgaccactatggcggcgtgaaaggtattatctctgaagccgatgttaaatccggcaaagttcaggtgattgctccggctggctttatggacgaagccatcagcgaaaacgtgctggcgggtaacatcatgagccgccgtgcgctctactcttacggtctgttactgccgcacaacgcgcaaggcaatgtgggtaatggccttggcgtgacgctggcaacgggcgacccgagcattattgcaccgactaaaactatcgtcagaactggcgagaagatgattatcgacggcctggagtttgacttcctgatgaccccaggtagcgaagcgccagcggaaatgcacttctatattccggccctgaaagccctgtgtaccgccgagaatgccacgcataccctgcacaacttctacaccctgcgcggcgcgaaaacccgcgacaccagcaagtggaccgagtatctgaacgaaacattggatatgtggggtaacgacgcggaagtactgtttatgccgcacacctggccggtctggggcaataagcatatcaatgattatattggtaaatatcgcgatactatcaagtacattcacgaccagaccctgcacctggcgaaccagggctacaccatgaatgaaatcggcgacatgattaagctgccgcctgcgcttgccaataactgggccagccgcggctattacggttctgtcagccacaacgcccgcgcggtatataacttctatcttggctattacgacggtaacccggctaacctgcatccgtatggtcaggtggagatgggtaaacgttacgtgcaggcgctgggcggttctgcccgcatcatcaacctggcgcaagaagcgaacaagcaaggtgattatcgctggtcggcagaactgctgaaacaggtgattgccgccaacccgggtgaccaggtcgcgaagaatctgcaagcgaataactttgaacagctgggctatcaggccgagtccgccacatggcgcggtttctacctgaccggcgcgaaagagctgcgcgaaggggtgcataagttcagccacggcaccaccggttccccggacaccattcgtgggatgtcggtcgaaatgctgttcgactttatgtccgttcgcctcgatagcgcgaaagccgcgggtaaaaatatcagcctgaacttcaatatgaacaacggcgataacctcaacctgacgctgaacgatagcgtgcttaactaccgtaaaacactgcaaccgcaagctgacgcctctttctacatcagccgtgaagatctgcacgccgtgctgaccggacaggcaaaaatggccgatctggtaaaagcgaagaaagccaaaattattggcaatggcgcgaaactggaagaaattatcgcctgtctggataatttcgatttgtgggtgaatatcgtaaccccaaattaa

SEQ ID NO: 2148 - DNA, 930 bp, Escherichia coli
atgcaaaaacagcataacgtcgtagcgggcgtggatatgggggcaacgcatatccgcttttgtctgcggacagcagaaggtgaaacgctacactgcgaaaaaaagcggaccgcagaagttattgctcccgacctggtgtcgggtatcggcgaaatgattgacgagcaactcaggcgctttaacgctcgctgtcatggtctggtgatgggatttccggcgctggtcagtaaagataaacgcaccattatttctacgcctaacctgccgttaacagcggcagatttatatgatctcgccgataagctcgaaaatacgctgaattgtccggttgagttttcccgcgacgttaacctgcaactctcctgggacgtagtagaaaatcgccttacgcaacaactggttctggcagcctatctcggtacggggatggggttcgcagtgtggatgaacggtgcgccgtggacgggtgcacacggtgtggcaggcgaactgggccatatccccctgggagatatgacccaacactgcgcgtgtggcaattctgggtgcctggaaaccaattgctctggaatggcgctaagacgctggtacgaacaacagccccgaaattacccattgagcgatcttttcgtccatgcggaaaacgcccctttcgtccagagtctgcttgaaaacgcggcacgagccattgccaccagcattaatctgttcgatcccgatgcggtgattctgggtggtggcgtgatggatatgcccgccttcccacgcgagactctcattgccatgacccaaaagtacctgcgccgtccactgccgtatcaggtcgtgcgctttattgccgcctcatcttctgactttaatggcgctcagggtgcagcaatattggcgcatcaacgttttttgccacagtcctgtgctaaagtcccatga

SEQ ID NO: 2149 - DNA, 696 bp, Escherichia coli
atgaaaatctccccctcgttaatgtgtatggatctgctgaaatttaaagaacagatcgaatttatcgacagccatgccgattactttcacatcgatatcatggacggccactttgtgccgaatctgacgctctcaccgttcttcgtaagccaggtaaaaaaactggcgagtaaaccgctcgactgccatctgatggtaacgcgtccgcaggattacattgctcaactggcacgtgcgggagctgatttcatcactttgcatccggaaactatcaacggtcaggcattccgcctgattgatgaaatccgccgtcatggcatgaaagtggggctgattcttaatccggaaacgccggttgaggccatgaaatactatatccataaggctgataaaattacggtcatgactgtcgatcccggttttgccggacaacccttcattcctgaaatgctggataaagttgccgaactgaaggcatggcgtgaacgagaaggtctggagtacgaaattgaggtggacggttcctgcaaccaggcaacttacgaaaaactaatggcggcaggggcggatgtctttatcgtcggcacttccggcctgtttaatcatgcggaaaatatcgacgaagcatggagaattatgaccgcgcagattctggctgcaaaaagcgaggtacagcctcatgcaaaaacagcataa

SEQ ID NO: 2150 - DNA, 981 bp, Escherichia coli
atgggctttaccacaagagtaaaaagcgaagcgagcgagaagaaaccgttcaactttgcgctgttctgggataaatacggcaccttttttatcctggcgatcatcgtcgccatttttggttcgctgtcgccagaatattttctgaccaccaataatattacccagatttttgtgcaaagctccgtgacggtactgatcggcatgggggaattcttcgctatcctggtcgccggtatcgacctttcggttggcgcgattctggcgctttccggtatggtgaccgctaaactgatgttggcaggtattgatccgtttctcgcggcgctaattggcggtgtactggttggcggcgcactgggggcgatcaacggctgcctggtcaactggacgggactacacccgttcattatcacccttggcaccaacgctattttccgtgggatcacgctggtgatctccgatgccaactcggtatacggcttctcatttgacttcgtgaacttctttgccgccagcgtaattgggatacctgtccccgttatcttctcgctaattgtcgcgctcatcctttggtttctgacaacgcgtatgcggctcgggcgcaacatctacgcactgggcggcaacaaaaactcggcgttctattccgggattgacgtgaaattccacatcctggtggtgtttatcatctccggtgtttgtgcaggtctggcaggcgtcgtctcaactgcacgactcggtgccgcagaaccgcttgccggtatgggttttgaaacctatgccattgccagcgccatcattggcggcaccagtttcttcggcggcaaggggcgcattttctctgtggtgattggcgggttgatcatcggcaccatcaacaacggtctgaatattttgcaggtacaaacctattaccaactggtggtgatgggcggattaattatcgcggctgtcgcccttgaccgtcttatcagtaagtaa

SEQ ID NO: 2151 - DNA, 1533 bp, Escherichia coli
atggccacgccatatatatcgatggcggggatcggcaagtcctttggtccggttcacgcattaaagtcggttaatttaacggtttatcctggtgaaatacatgcattactaggagaaaatggcgcgggtaaatccacgctaatgaaagtgttatccggaatacatgagccgactaaaggcaccattaccattaataacattaactataacaagctggatcataaattagcggcacaactcggcatcgggattatttatcaagaactcagcgttattgatgaattaaccgtactggaaaatttatatattggtcgtcatctgacgaaaaaaatctgtggcgtcaatattatcgactggcgagaaatgcgtgtccgcgccgccatgatgttattacgcgtgggcttgaaagttgatttagatgagaaagtggcgaatttatctatcagccacaagcagatgctggaaattgccaaaacgctgatgctcgatgccaaagtcatcatcatggatgaacccacctcctcactcaccaataaagaggtggactatctgtttctgatcatgaatcagttgcgtaaagagggtacggccatcgtctatatctcgcataagttggcggaaattcgccgtatttgcgaccgctatacggtgatgaaagacggcagcagcgtttgcagcggcatggtgagcgatgtgtcaaatgacgatatcgtccgtctgatggtaggccgcgaactgcaaaaccgttttaacgcgatgaaggagaatgtcagcaaccttgcgcacgatacggtttttgaggtgcgcaacgtcaccagccgtgacagaaaaaaggtccgggatatctcatttagcgtctgccggggagaaatattaggctttgccggactggtcggttccggacgtactgaactgatgaactgcctgtttggcgttgataaacgcgctggcggagaaatccgtcttaatgacaaagagatctctccacgctcacccctggatgccgtgaaaaaagggatggcttacatcactgaaagccgccgggataacggttttttccccaacttttccatcgctcagaacatggcgatcagccgcagtctgaaagacggcggctataaaggcgcgatggggttgtttcatgaagttgacgagcaacgtaccgctgaaaatcaacgcgaactgctggcgctgaaatgtcattcggtaaaccagaacatcactgaactctccggcggtaaccagcagaaagtcctgatctccaaatggctgtgctgtcgcccggaagtgatcattttcgatgaacctacccgtggcatcgatgttggcgcgaaagccgaaatttacaaagtgatgcgccaactggcggacgacggaaaagtcatcctgatggtgtcatctgaactacctgaaattatcaccgtctgcgaccgcatcgccgtgttctgcgaaggacgactgacgcaaatcctgaccaatcgcgatgacatgagcgaagaggagattatggcatgggctttaccacaagagtaa

SEQ ID NO: 2152 - DNA, 936 bp, Escherichia coli
atgaataaatatctgaaatatttcagcggcacactcgtgggcttaatgttgtcaaccagcgcttttgctgccgccgaatatgctgtcgtattgaaaacactctccaacccattttgggtagatatgaaaaaaggcattgaagatgaagcaaaaacgctgggcgtcagcgttgatatttttgcctctccttcagaaggcgattttcaatctcaattgcagttatttgaagatctcagtaataaaaattacaaaggtatcgccttcgcgccattatcctcagtgaatctggtcatgcctgtcgcccgcgcatggaaaaaaggcatttatctggttaatctcgatgaaaaaatcgacatggataatctgaaaaaagctggcggcaatgtggaaggttttgtcaccaccgataacgttgctgtcggggcgaaaggcgcgtcgttcattattgataaattgggcgctgaaggtggtgaagtcgcaatcattgagggtaaagccggtaacgcctccggtgaagcgcgtcgtaatggtgccaccgaagccttcaaaaaagcaagccagatcaagcttgtcgccagccagcctgccgactgggaccgtattaaagcactggatgtcgccactaacgtgttgcaacgtaatccgaatattaaagcgatctattgcgcgaatgacacgatggcaatgggtgttgctcaggcagtcgcaaacgccggaaaaacgggcaaagtgttggtcgtcggtacagatggaattccggaagcccgcaaaatggtggaagccggacaaatgaccgcgacggttgcccagaacccggcggatatcggtgcaacgggtctgaagctgatggttgacgctgagaaatccggcaaggttatcccgctggataaagcaccggaatttaaactggtcgattcaatcctggtcactcaataa

SEQ ID NO: 2153 - DNA, 891 bp, Escherichia coli
atgagccagtcagagtttgattcagcgcttccgaacggtatcgggttagcgccttacctgcgaatgaagcaggaaggaatgacagaaaacgaaagccgcatcgtggagtggttactcaaacccggtaacctgagttgtgcacccgcaattaaagatgtcgcagaagctctggcggtatctgaagcgatgatcgttaaggtatcaaagctgctggggtttagcggctttcgtaacttacgcagtgcgctggaagattatttttcgcagtcagaacaggtattgccgtccgagttggcttttgatgaagcgccgcaggatgtggtgaataaggtatttaacatcactttacgcaccattatggaaggtcagtcgatcgtcaacgttgatgagatccaccgtgccgcccgctttttctatcaggccagacagcgggatttgtacggtgccggaggatcaaatgctatctgtgctgatgtacagcacaagtttttacgcattggcgtacgctgccaggcctatccggacgctcacatcatgatgatgtctgcttcgttgttacaggaaggagatgtggtgctggtggtgacccattccgggcgaaccagtgatgtaaaagcggctgtagaactggcaaaaaagaacggggcaaagattatttgtataacgcatagctaccattcaccgatagcgaagctggccgattatattatttgctcaccggccccggaaacaccgttattaggtcgtaatgcctcggcaagaatattacaactaactttgctggacgcgttttttgtctctgtcgcccagctcaacattgaacaagctaatattaatatgcaaaaaaccggcgcaattgttgatttcttctcaccaggcgcgctgaaataa

SEQ ID NO: 2154 - DNA, 450 bp, Escherichia coli
atgaaaaagattgcatttggctgtgatcatgtcggtttcattttaaaacatgaaatagtggcacatttagttgagcgtggcgttgaagtgattgataaaggaacctggtcgtcagagcgtactgattatccgcattacgccagtcaagtcgcactggccgttgctggcggagaggctgatggcgggattttgatttgtggcactggcgtcggtatttcgatagcggcgaacaagtttgccggaattcgcgcggtcgtttgtagcgaaccttattccgcgcaactttcgcggcagcataacgataccaacgtgctggcttttggttcacgagtggttggcctcgaactggcaaaaatgattgtcgatgcgtggctgggcgcacagtacgaaggcggtcgtcatcaacaacgcgtggaggcgattacggcaatagagcagcggagaaattga

SEQ ID NO: 2155 - DNA, 330 bp, Escherichia coli
atgaaacgctttccgctatttcttttattcaccctgctcacgctgtccaccgttccggcccaggccgatattatcgacgacaccattggcaatattcagcaggcgattaacgacgcttataaccctgaccgtgggcgagactatgaagattcgcgcgacgacggttggcaacgccaggtgagcgacgatcgtcgcaagcaatataacgatcgccgccgccagtttgaagatcgccgcaggcagctggacgatcgccagcgccagcttgatcaggagcgtcggcaactggaagatgaagagcggagaatggaagatgagtatgggcgttga

SEQ ID NO: 2156 - DNA, 759 bp, Escherichia coli
atgagcctgaccctcacgctcaccggcaccggcggcgcacagggcgttccggcatggggctgcgagtgcgcggcctgcgccagagcacgacgctcgccgcagtatcgccgccagccatgcagcggcgtagtgaagtttaacgaggcgatcaccctgatcgacgccgggcttcacgatctcgccgatcgctggtctcccggatcgttccagcagtttttgctgacgcattatcatatggatcacgtccaggggctgtttccgctgcgctggggcgtgggcgatcagatcccggtctacggcccgccggatgaacagggctgcgacgatctgtttaaacatccgggcctgcttgatttcagccacacgatggaaccgtttgtggtgtttgatttacaggggttacaggtcacgcccctgccgctcaaccactcaaaactgaccttcggttatctgctggaaacggcgcacagccgggtggcgtggctatctgacaccgcaggcctgccggaaaaaacgctgaaatttttacgcaataatcagccgcaggtaatggtgattgattgcagccacccgccgcgcgaggatgcaccgcgtaatcactgtgatttaaataccgtgcttgcgctgaatcaggttatccgctcgccgcgggttattctgacccatatcagccatcagtttgatgcgtggctgatggaaaacgcgctaccatcggggtttgaggcggggtttgatgggatggagattgaggtggcgtga

SEQ ID NO: 2157 - DNA, 435 bp, Escherichia coli
atgcctgcttgtgagcttcgcccggctacgcagtacgacaccgacgcagtttacgcgctgatttgtgagctaaaacaggcggagtttgaccaccaggcgtttcgcgtgggctttaacgccaacctgcgtgacccgaatatgcgctaccatctggcgctgttggatggcgaggttgtcggcatgatcggcctgcatttgcagtttcatctgcatcatgtcaactggatcggcgaaattcaggaactggtggtgatgccgcaggcacgcggtctgaacgtcggcagtaaattactggcatgggcagaagaagaagcccgccaggctggggccgaaatgaccgagctttccaccaacgtgaagcgccacgacgcgcaccgtttttacctgcgtgaaggctacgagcagagccacttccgcttcaccaaggcgctgtaa

SEQ ID NO: 2158 - DNA, 558 bp, Escherichia coli
atgacgggaaaactgatttggttaatgggggcctctggctccggaaaagacagtctgttgacggaactccgccagcgggaacaaactcagctactggtagcgcatcgctacatcacgcgcgccgccagcgccggaagtgaaaaccatatcgccctgagcgagcaggagttttttacccgcgcggggcagaaccttctggccttaagctggcacgctaacggtctgtattatggcgtcggcgtcgagattgacctctggctgcacgctggatttgacgtggtggtcaacggctcacgcgcccatctgccgcaggcgcgggcgcgctatcaatcggcgctgctgcccgtttgtttacaggtttcgccagagatcctgcgccagcgcctggaaaaccgtggtcgtgaaaatgccagtgaaattaacgcccggctggcgcgcgctgcccgctatactcctcaggattgtcttacgctcaataatgacggcagcctgcgccagtcggtcgacaagctgctgacgctgattcatcagaaggagaaacaccatgcctgcttgtga

SEQ ID NO: 2159 - DNA, 1137 bp, Escherichia coli
atgattatcaataacgtcaaactggtgctggaaaacgaggtggtacacggttctctggagatgcaggacggcgaaatccgcgcctttgccgaaagccagagtcacctgtcagaagcaatggacggcgaaggcggctggctgctaccggggctgattgagctgcataccgataatctggataaattcttcaccccgcgcccgaaagttgactggcctgcccactcggcgatgagcagccacgacgcgctgatggtggcgagcggcatcaccaccgtgctggacgccgtggcgattggtgatgtacgcgacggcggcgatcggctggagaatctggagaagatgatcaacgccatcgaagagacgcagaaacgcggcgtcaaccgtgccgagcaccgtctgcacctacgctgcgaactgccgcatcacaccacgctgccgctgtttgaaaaactggtacagcgcgaaccggtaacgctggtgtcgctgatggatcactcaccgggccagcgccagttcgctaaccgcgaaaaatatcgtgaatattatcagggcaaatactcgctcaccgatgcgcagatgcaacagtacgaagaggagcaactggcgctcgccgcacgctggtcacagccgaatcgcgaatccatcgccgcaatgtgccgcgcgcgacacattgcgctcgccagccacgatgacgccacgcacgcccacgtagcccaatcccatcagcttggcagcgtgatcgccgaatttcctaccacattcgaagcggcagaagcctcgcgcaagcacggcatgaacgtactgatgggcgcgccgaatatcgtgcgcggcggttcgcactccggcaacgtggcggccagtgaactggcgcagcttggcctgctggatatcctctcttccgactactaccccgccagcctgctggatgcggcgtttcgcgtggccgatgaccagagcaaccgctttacgctgccgcaggcggtgaagctggtgactaaaaatccggcgcaggcgcttaatcttcaggatcgcggggtgattggcgagggcaaacgcgccgacctggtgctggcgcatcgcaagggcaaccacattcatatcgaccacgtctggcgtcagggtaaaagggtgttctga

SEQ ID NO: 2160 - DNA, 681 bp, Escherichia coli
atgattaacgtacaaaacgtcagtaaaaccttcatcctgcaccagcaaaacggcgtgcgcctgcctgtattacaaggcgcctcactcaccgtcaacgccggcgaatgcgtggtactccacggccattccggcagtggaaaatcaactctgctacgctcgctgtatgccaactatctacccgacgaagggcaaatccagatcaaacacggtgatgaatgggtcgacctggtcaccgcgccagcgcgcaaagtggtggagatccgcaaaaccactgtcggctgggtaagccagtttctgcgcgtcatcccacgtatttcggcactggaagtggtgatgcagccgctgctcgataccggcgtaccgcgtgaagcctgcgccgctaaagccgcgcgtctcctcacccgcctgaacgtgcctgaacgcctgtggcaccttgcgccatcgaccttctccggcggcgaacagcagcgcgtcaacatcgcccgtggctttatcgtcgactaccccattctgctgctcgacgaacctaccgcctcgctggacgctaaaaacagcgccgccgtagtggaactgatccgcgaagccaaagcccgcggcgcggccatcgtcggtatcttccatgacgaaaccgtgcgcgagcaagtcgccgaccgcctgcacccaatgggagtctcttcatga

SEQ ID NO: 2161 - DNA, 759 bp, Escherichia coli
atgaatcaaccgttactttcggtcaataacctgacccacctttatgccccgggcaaaggcttcagcgatgtctcttttgatttatggccgggagaagttctgggcattgttggggagtccggttccgggaagaccacgctactgaaatcaatttccgcccgcctgacaccacagcaaggggaaattcgctacgagaaccgttcgctgtacgcgatgagcgaggccgaccgccgtcgcctgctgcgcaccgaatggggtgtggtgcatcagcatccgcttgacggcctgcgccgccaggtgtcggcaggcggcaatatcggcgaacggttgatggcaaccggagcgcgtcattacggcgatattcgcgccaccgcgcagaaatggctggaagaggtggagattcccgccaaccggatcgacgacctgccgaccaccttttccggcggcatgcagcaacgtttgcagattgcccgcaacctggtgacgcatccgaagctggtgtttatggatgaacccactggcgggctggatgtgtcggtacaggcgcgcctgctggacctgctccgcggtctggtgatggagcttaacctggcggtggtgattgtcacccacgatttaggcgtcgcccgtctgctggcggaccgtttgctggtaatgaagcaagggaaagtggtggagagtgggttgaccgaccgggtgctcgacgacccgcaccatccgtatacccagttgctggtgtcatcggttttgcagaattga

SEQ ID NO: 2162 - DNA, 846 bp, Escherichia coli
atggctaatctgagcggctacaactttgcttacctcgacgagcagaccaaacgcatgatccgccgcgctatcttaaaagcggtggcaatccccggttatcaggtgccgtttggcggacgcgagatgccgatgccctacggctggggaaccggcggcattcagctcaccgccagcgtgattggcgaaagcgacgtgttgaaggtgattgaccagggcgcagacgacaccaccaacgccgtgtcgattcgtaacttctttaagcgcgtgactggggtgaacaccaccgagcgcacggacgatgcgacacttatccagacgcgtcaccgcatacccgaaacgccgctgaccgaagatcagatagttatcttccaggtgccgatccccgaaccgctgcgctttattgagccgcgagagacggaaacgcgcaccatgcacgcgctggaggagtacggcgtgatgcaggtgaaactgtatgaagatatcgcccgcttcggtcatatcgccaccacctacgcctatccggtgaaggtgaacgggcgctacgtaatggacccgtcgccgatcccgaaattcgataacccgaaaatggacatgatgcccgccctgcaactgtttggcgcggggcgcgagaagcgcatctatgccgtgccaccgtttacccgcgtggaaagcctcgatttcgatgatcatccgttcaccgtccagcagtgggatgaaccatgcgccatctgcggatcgacccacagctatcttgatgaagtggtgctggatgacgccggaaaccgcatgtttgtctgctccgataccgattattgccgccaacagagcgaggccaaaagccaatga

SEQ ID NO: 2163 - DNA, 1065 bp, Escherichia coli
atgtacgttgccgtgaaagggggcgaaaaggcgatcgacgccgcccacgccctgcaagagagccgacgccggggcgatactgatttgcctgaactgagcgtcgcccagattgaacagcagcttaacctcgcggtagatcgcgtgatgaccgaaggcggtattgccgaccgcgagctggccgcgctggcgctgaaacaggccagcggcgataacgtcgaagcgatttttctgctacgcgcctaccgcaccacgctggcgaagctggcggtcagtgagccgctcgacaccaccgggatgcgtctcgaacggcgtatttcagcaatttataaagacattcccggcggccaactgcttggccccacctacgactacacccatcgcctgctcgatttcaccctgctggcaaacggcgaaacgccaacgctgaccaccgctgacagcgaacagcaaccgtcgccacacgtcttcagcctgctggcgcgtcaggggctggcgaagtttgaagaagatagcggcgcacaaccggacgacatcacccgcacgccgccggtttatccctgttcgcgttcttcccgtctacaacaattaatgcgcggtgacgaaggctatttgttggcgctggcctactccacccaacgcggttacgggcgcaatcacccgttcgcaggcgaaattcgcagtggctatatcgatatatttattgtgccggaagagctgggatttgcggtgaacgtcggcgaattgttgatgaccgagtgtgaaatggtcaacggttttatcgacccgccggatgaaccaccgcattttacacgcggctatgggctggtgttcggcatgagcgagcgcaaagcaatggcgatggcgctggttgaccgtgcgttgcaggcaccggaatacggcgagcacgcaacaggtccagcacaggatgaagagttcgtgctggcccatgccgacaacgtcgaagccgcaggctttgtttcgcatctcaaactcccgcactacgtcgatttccaggccgaactggagctactcaaacgtctgcaacaggagcagaaccatggctaa

SEQ ID NO: 2164 - DNA, 585 bp, Escherichia coli
atgaccctggaaaccgcttttatgcttcccgtgcaggatgcccagcacagttttcgtcgcctgttaaaggccatgagcgagccgggcgtgattgtcgccctgcatcagctcaagcgcggctggcagccgctgaatatcgccaccaccagcgtgctgctgacgctggccgataacgacacgccggtgtggcttgccgcaccattgagcaacgatatcgtcaatcagagcctgcgttttcataccaacgcgtcgctggttaatcagccggaacaggcgaccttcgcggtaacagatgaggcgatctccagcgagcagctcaacgccctttccaccggcactgccgttgcaccagaagcgggcgcaacgctgattttacaggtcaccagcctgagcggtgggcgtatgttgcgcctcaccggcgcaggtattgccgaagaacggatgatcgccccgcaactgccaaagtgcattcttcatgaacttaccgagcgcccgcacccgttcccgctcggcatcgacctgatcctgacctgcggcgagcgcctgctggctattccgcgaaccactcatgtggaggtgtgctga

SEQ ID NO: 2165 - DNA, 453 bp, Escherichia coli
atgcacgcagataccgcgacccgccagcactggatgtccgtgctggcgcacagccaaccggctgaactggcagcccgcctgaacgcgctgaacatcaacgccgattatgaggtgatccgcgccgctgaaactggcctggtgcagattcaggcgcgaatgggcggcaccggcgaacgcttttttgctggcgacgccacgctcacccgcgccgccgtgcgtctgactgacggcacgctcggctatagctgggtgctggggcgcgacaaacagcacgccgaacgttgtgcgctgattgatgcgctgatgcagcaaaaccgccactttcaaaacttatcagaaacccttattaccccgctggacgctgaccgtatggcacgcattgccgcgcgtcaggccgaagtgaacgccagccgggtcgacttctttacgatggttcgcggagacaacgcatga

SEQ ID NO: 2166 - DNA, 726 bp, Escherichia coli
atgcacttgtctacacatccgaccagctacccaacacgctatcaggagatagccgcaaaacttgagcaggagcttcgtcaacactaccgctgcggcgactatcttcccgccgagcagcaactggcggcgcgctttgaggtgaaccgccacaccctgcgccgcgccatcgaccaactggtggaaaaaggctgggtacagcgccgtcagggcgtcggcgtactggtgctgatgcgcccgttcgattacccgctcaacgcccaggcgcgttttagccagaacctgctggaccagggcagccatcccaccagcgaaaaattgctatcggtgctgcgccccgcctccggtcacgtcgctgacgcgctggggataaccgagggggagaacgtcatccacctgcgcaccctgcgtcgggtcaacggcgttgcgctctgtttaatcgaccactacttcgcagatctcacgctctggccaacgcttcaatgctttgacagcggttcgctgcacgattttctgcgcgagcaaacggggattacgctacgccgcagccagacgcggatcagcgcccgccgcgcccaggccaaagagtgccagcgtcttgaaatcccgaatatgtcgccgctgctgtgcgtgcgcacccttaaccaccgtgacggtgaaagcagcccggcggagtactccgtcagcctgacgcgcgccgacatgattgaattcactatggagcactga

SEQ ID NO: 2167 - DNA, 780 bp, Escherichia coli
atgcaaaccatcaccatcgccccacccaagcgcagctggttctcgcttctgagctgggccgttattatcgccgtgctgatcgtctcgtggcagggcgcggaaatggccccgcttacgctgattaaagatggcggcaacatggcgacgttcgccgccgacttcttcccgcccgatttcagccagtggcaggattacctcaccgaaatggccgtcacgctgcaaatcgccgtctggggcaccgcgctggcggtggttctctccatccccttcggcctgatgagcgctgaaaacctggtaccgtggtgggtctaccaacctgtacgccgcctgatggacgcctgccgcgccattaacgaaatggtcttcgccatgctgttcgtggtcgccgtcggcctcggcccgttcgctggcgtgctggcgctgtttatccacaccaccggcgtactttccaaactgctttccgaagcggtagaagcgattgaacccggcccggtggagggcattcgcgctaccggagccaacaagctggaagagatcctctacggcgtactaccgcaggtcatgccgctgctgatttcctactccctctatcgcttcgaatccaacgtccgctcggcgaccgtcgtcggtatggttggcgcgggcgggatcggcgtcacgctgtgggaagcgattcgcggtttccagttccagcaaacctgcgccctgatggtgctcatcatcgtcacggtcagcctgctggatttcctctctcaacggttgcgtaagcactttatctga

SEQ ID NO: 2168 - DNA, 1017 bp, Escherichia coli
atgaacgctaagataattgcctcgctggccttcaccagcatgttcagcctcagcaccctgttaaatccggcatacgccgaagagcaggaaaaggcgctgaatttcggcattatttcaacggaatcacagcaaaacctgaaaccgcaatggacgccgttcttacaggatatggagaagaagctgggcgtaaaggtcaacgccttctttgccccggactacgcgggcattatccaggggatgcgcttcaataaagtggatatcgcctggtacggcaacctgtcggcgatggaagcggtggatcgcgccaacggtcaggtcttcgcccagacggtcgcggcggatggatcgccgggttactggagcgtgttgatcgtcaacaaagatagcccgatcaacaacctgaacgatctgctggcgaagcggaaagatctcaccttcggcaatggcgatcctaactctacctccggcttcctcgtccccggttactacgtcttcgctaaaaacaatatctccgccagcgactttaagcgcaccgtcaacgccgggcatgaaaccaacgccctcgccgtcgctaacaagcaagtggatgtcgccaccaacaacaccgaaaacctcgacaagctgaaaacctccgcgccggagaagctgaaagaactgaaggtgatctggaaatcaccgctgatccctggcgatccgatcgtctggcgcaaaaatctttccgaaaccactaaagacaagatctacgacttctttatgaattacggcaaaacgccggaagagaaagcggtgctgaagcgcctgggctgggcgccgttccgcgcctccagcgacttgcaactggtgccgattcgccagctcgcactgtttaaagagatgcaaagcgtgaaggacaacaaagggctgaacgaacaggacaagctggcaaaaaccaccgccattcaggcgcaactggatgatttggaccgcctgaacaacgcgttaagcgcaatgagttcggtgagtaaagcggtgcagtaa

SEQ ID NO: 2169 - DNA, 789 bp, Escherichia coli
atgcaaacgattatccgtgtcgagaagctcgccaaaaccttcaatcagcatcaggcgctgcacgcggttgatctgaacattcatcatggtgaaatggtggctctgcttgggccgtcgggttccggaaaatccacccttttacgtcacttaagcggtttgattaccggcgataaatctgtcggtagccatatcgagctgctgggccgcactgtccagcgcgaaggccgtctggcccgcgatatccgcaaaagccgcgcccataccggctacatctttcaacaattcaacctggtgaatcgcctgagcgtactggagaacgtgctgattggcgcgctcggcagcacgccattctggcgaacctgttttagctacttcacccacgagcagaaacagcgcgcgttacaggcgctgacccgcgttggcatggtgcactttgcccatcaacgcgtttccacactctccggcggccagcaacagcgtgtggcgattgcccgcgcgctgatgcagcaggcgaaggtcattctcgctgacgaacccatcgcctcgctggacccggaatcggcacgcatcgtgatggacaccctgcgcgacatcaaccagaacgacggcattaccgtggtcgtcacgctgcatcaggtggattacgccctgcgctactgcgaacgcatcgtcgccctgcgccaggggcacgtcttctacgacggctgcagccaacagtttgataacgaacgttttgaccatctctaccgcagcattaaccgcgtcgaagagaacgcgaaagctgcctga

SEQ ID NO: 2170 - DNA, 444 bp, Escherichia coli
atgccgttaagtccctacctctcttttgccggtaactgttccgacgcgattgcctattatcaacgtacgttgggcgcggaactgctctataaaatcagcttcggcgaaatgccgaaatcagcgcaggacagcgccgaaaactgcccttccggaatgcaatttcccgataccgccatcgcgcatgccaacgtgcgcattgccggaagcgacatcatgatgagcgatgccatgccgtcaggaaaagccagctactccggctttacgctggtgctcgattcgcaacaggtggaagaaggaaaacgctggtttgataaccttgccgccaacggaaaaatcgaaatggcctggcaggaaacgttctgggcgcatggctttggcaaagtcaccgataaatttggcgtaccgtggatgattaatgtcatcaaacaacagccaacgcaataa

SEQ ID NO: 2171 - DNA, 336 bp, Escherichia coli
atgtcattaccacactgcccaaaatgcaactccgaatacacctacgaagataacggcatgtacatctgcccggaatgtgcctacgaatggaacgacgcagaacctgcacaggaaagcgacgagctgatcgttaaagatgctaacggcaatctgctggctgacggcgacagcgtgaccatcattaaagatctgaaagtgaaaggtagctcttcgatgctgaaaattggcaccaaagtgaaaaacatccgcctggttgaaggcgaccataacatcgattgcaaaatcgacggttttggtccgatgaaactgaagtctgagtttgtgaaaaagaactga

SEQ ID NO: 2172 - DNA, 2229 bp, Escherichia coli
atgtacacacagaccctgtatgagttaagtcaggaggctgaacgcctgttacagctttctcgccaacagttgcagttactggaaaaaatgcctctctctgtacccggagacgatgcgccacaactggctttaccctggagtcagcctaatatcgccgaacgtcacgcgatgctgaataatgagttgcgtaaaatttcccgactggaaatggtgctggcgattgtcggtactatgaaagcagggaaatcaaccaccattaatgccattgttggtacggaggttctgcctaatcgcaatcgcccaatgactgcgctgccgacgcttattcgccatacgcccgggcaaaaagaaccggtactgcatttttcacatgtcgcgccaatcgattgtttaattcaaaaattacaacagcgcctgcgtgattgcgatattaagcatctgaccgatgtgctggaaatagataaagatatgcgtgcgcttatgcagcggatcgaaaatggcgtcgctttcgaaaaatattatctgggtgcccagcctatttttcattgtctgaaaagtttgaatgatttggtgcgactggcgaaggcgctggacgtcgattttcctttttctgcttacgccgccattgagcatattcccgtgattgaagtggagtttgtccatctggcggggctggagagttatcccggtcaattgacgttactggatacccccgggccaaatgaagccgggcaaccgcatcttcaaaaaatgcttaaccagcagctggcacgcgcctcggcggtactggcggtgctggattatacgcaactgaaatcgatctccgatgaagaggtccgtgaggcgattttggcggtggggcaatcggtgccgctgtatgtgctggtcaataagttcgatcaacaggatcgtaacagtgacgacgctgaccaggtgcgggcactgatttccggaacgctgatgaaaggctgtattacgccacagcagatatttccggtgtcgtcgatgtggggctacctggcgaatcgggcgcgccatgagttagccaacaacggtaagttacccgcgccagagcaacaacgctgggtggaagattttgcccatgccgcgctcggcaggcgctggcgtcatgccgatctggcggacctcgaacatattcgccatgctgccgatcagttgtgggaagattcgctgttcgcccagccaattcaggcgttgctttatgccgcttacgctaacgcctcgttgtatgctctgcgatctgccgcgcataaactgttgaattacgcgcagcaggcgcgggaatacctggattttcgtgcgcacgggttaaacgtcgcttgtgaacaattgcagcaaaatatccatcaggtcgaagaaagtttgcagctattgcaactcaatcaggcgcaggtgagcggcgagattaaacatgaaatcgagttggccctgacctccaccaaccactttctgcgtcaacagcaagatgcggtgaatgcgcagttagccgcgttgtttcaggataattcggagtcgttaagtgagatgcgtacccgctgtgagacactgttacagacggcgcagaacaccatcagtcgcgactttacgctgcgctttgccgagcttgagtccaccctttgccgggtgttaaccgatgttattcgccccattgagcaacaagtcaaaatggaattgagtgagtctgggtttcgtcctgggtttcattttcctgtttttcacggcgtagttccccacttcaacacccgccagctgttcagtgaagtcatttcgcgccaggcagcaacggacgagcagagcacgcgtttaggcgttgtgcgtgagattttttcgcgctggttgaatcagcccgactggggacggggaaatgagaaattcccgacagagacggttgattacagtgtgttgcaacgagcattaagcgcagaagtcgatctttattgccaacaaatggctaaagttatggcagagcaggtcgatgaatctgttacggcaggcatgaatacttttttcgctgagttcgcttcatgtttgacggaattacagacgcgtttacgcgaaagtatggctctgcgtcaacaaaatgaatcggtggtcaggctgatgcaacagcaattgcagcagactgtgatgactcacggctggatttacaccgacgctcagctgttacgcgatgatattcaaacacttttcacggcagaacgatattga

SEQ ID NO: 2173 - DNA, 879 bp, Escherichia coli
ttgaccaagacgttactggacggccccggtcgcgtgctggagtcggttcatccgcgctttttagtggatctggcgcagggcgatgatgcccgccttccacaagcccatcagcagcagtttcgtgaacgactgatgcaggaacttcttgcgcgcgtgcagcttcagacatggacgaacggcggcatgttaaatgcgccgcttagtctgcgtctgacattggtggagaaactggcgtcgatgctggatcccggtcatctggcgctgacgcagatcgcgcagcatctggtgctgctgcaaaaaatggatcaccgccagcactctgctttcccggagctcccccagcaaattgtcgccttgtatgagtggttttcagcccgttgtcgctggaaggaaaaggcgttaacgcaacgaggcctattggtgcaggcgggtgaacagagcgagcaaatttttacccgctggcgtgctggggcgtataacgcctggtcgttgcctgggcgctgctttatcgttctggaggagttgcgctggggtgcatttggcgatgcctgccgtatgggaagcccgcaagcggtggcgttgttgctgggtgatttgcgcgtgaaagcgacacaacatttggcagagagtatcaatgcggccccgaccacgcgtcactattaccatcagtggtttgcctcttcgaccgtttcgacgggcggggatcatgctgattttttaagttggctgggaaagtggtctacggcagataaacaacccgtttgctggtcagtgacccaacgctggcgaactgtcgcactggggatgccacgactctgttcagcgcagcgtctggcgggggcaatggtcgaggaaatcttctctgtaaatttggtgtaa

SEQ ID NO: 2174 - DNA, 1503 bp, Escherichia coli
atgctgaaaaggaaaaaagtaaaaccgattacccttcgtgatgtcaccattattgatgacggtaaactgcgtaaagccattaccgcagcatcactgggtaatgcaatggaatggttcgattttggtgtttatggttttgttgcttacgcattaggtaaagtttttttcccgggggctgaccccagcgtgcagatggttgctgcactcgccactttctccgttccctttctgattcgaccgcttggcgggctcttctttggtatgttgggcgataaatatggtcgccagaagatcctcgctatcactattgtgattatgtcgatcagtacgttctgtattggcttaataccgtcctacgacacgattggtatttgggcaccgattctgctgttgatctgtaagatggcacaaggtttctcggtcggcggtgaatataccgggacgtcaatatttgttgcggaatactcccctgaccgtaaacgtggctttatgggcagctggctggactttggttctattgccgggtttgtgctgggtgctggcgtagtggtgttaatttcgaccattgtcggcgaagagaacttcctcgattggggctggcgtattccgttctttatcgctctgccgttagggattatcgggctttacctgcgccatgcgctggaagagactccggcgttccagcagcatgtcgataaactggaacagggcgaccgcgaaggtttgcaggatggcccgaaagtctcgtttaaagagattgccaccaaacactggcgcagcctgttgacatgtattggtctggtaattgccaccaacgtgacttactacatgttgctgacctatatgccgagttatttgtcgcataacctgcattactccgaagaccacggggtgctgattattatcgccattatgatcggtatgctgtttgttcaaccggtgatgggcttgctgagtgaccgttttggccgtcgtccgtttgtgcttcttggtagtgttgcactgtttgtgttggcgatcccggcgtttattctgattaacagtaacgtcatcggcctgatttttgccggcttattgatgctggcggtgatccttaactgctttacgggcgttatggcttctaccttgcctgcgatgttcccgacgcatatccgttacagcgcgctggcggcggcatttaatatttcggtgctggttgccggtctgacgccaacgctggcggcctggctggtcgaaagctcgcagaatctgatgatgcctgcctattacctgatggtagtggcggtggttggtttaatcaccggcgtaaccatgaaagagacggcgaatcgaccgttgaaaggtgcgacaccagcggcgtcagatatacaggaagcgaaggaaattctcgtcgagcattacgataatatcgagcagaaaatcgatgatattgaccacgagattgccgatttgcaggcgaaacgtacccgcctggtgcagcaacatccgcgaattgatgaataa

SEQ ID NO: 2175 - DNA, 1101 bp, Escherichia coli
ttgaatctgatgcgttttctgcgccgaccaatatcgctgcgccaacggctgatattgaccatcggggccattttgttggtgtttgagctgatcagcgtcttctggctgtggcatgaaagtaccgagcagattcagctgtttgagcaggcgctacgcgacaatcgcaacaacgatcgccacatcatgcgtgagatccgcgaggcggtcgccagcctgattgtccccggcgtatttatggttagcctgacgctatttatctgctatcaggcggtacgccgcatcacccgaccgctggcggagctgcaaaaagagctggaagcgcgcaccgccgacaacttaacgcccattgccattcatagcgccaccctcgaaatcgatgcggtggtttcggcgttaaacgatctggtcagtcgcctgaccagcacgctcgataatgaaaggttgtttaccgctgacgtcgcgcacgaactgcgaacgccactggcgggggtgcgtttgcatttggaactgctggcgaaaacgcatcacattgatgtagcaccgttagtggcacgacttgatcagatgatggagagcgtctcccagctgctgcaactggcgcgtgccggacagtcattttcttccggtaattatcaacatgtaaaactgctggaagatgtcattctcccctcgtatgacgaactcagtaccatgctcgaccagcgccagcaaaccctgctattgccagagagcgccgccgacatcaccgttcagggtgatgcaaccctgctgcggatgttattgcgaaacctggtagaaaacgcccatcgttatagcccacaaggcagcaacattatgattaagctgcaagaagatggcggagcggtcatggccgttgaagatgaaggaccgggtattgatgagagtaaatgcggggagttgagtaaagcgtttgtacgaatggacagccgttatggcgggattggtctggggttaagtattgtcagccgcattacacagttgcatcacgggcagtttttcctgcaaaaccggcaagagacttccggcacgcgggcctggatacggctgaaaaaagatcagtacgtggcaaaccagatataa

SEQ ID NO: 2176 - DNA, 669 bp, Escherichia coli
atgaaaattctgattgttgaagacgatacgctgttattgcagggattgattctggcggcgcaaaccgaaggctacgcgtgcgatggcgtgagcaccgcgcggatggcggaacaaagccttgaggccggtcattacagcctggtggtactggatttaggcttacccgatgaagatgggctgcattttcttgcccgtatccggcagaaaaaatacactctgccggtattaattctcaccgcccgcgatacccttaccgacaaaatcgccgggctggatgtcggggccgacgattatctggtgaagccttttgcgctggaagagttgcacgcccgtatccgcgccctgctacgacgccataataatcagggcgaaagtgagctgattgttggcaatctgacgctgaatatgggtcgccgtcaggtctggatgggcggtgaagagttgattctgacgcccaaagaatatgctctgctgtcgcgcctgatgcttaaagcaggcagcccggtgcatcgggaaattctctacaacgatatctacaactgggacaacgagccctcgaccaacaccctggaagtgcatatccataacctgcgcgacaaagtgggcaaagcccgtatccgcaccgtgcgcggatttggctatatgctggtcgcaaatgaggaaaactaa

SEQ ID NO: 2177 - DNA, 1644 bp, Escherichia coli
atgttgaagcgcctactaaaaagaccctctttaaatttattctcctggttattacttgctactttttatatctcagtctgcctgaatatcgccttttttaaacaggtgctacaggtgttaccgctggattcactgcataacgtgctggttttcttgtcgatgccggtcgtcgcattcagcgtgattaatattgtcctgacactaggctctttcttatggcttaatcgtccactcgcctgcctgtttattctggtcggtgcggctgcacaatatttcatcatgacctatggcatcgtcatcgaccgttcaatgatcaccaatatcattgatactacgccggcggaaagttatgcgttgatgacgccacgaatgttattaacgctggggttaagtggcgtgttggccgcgattattgcctgctggatcaaaatcaaacccaccacctcacgcctgcgcagcgttcttttccgcggggccaacatcctgatttctgtactgctgattctgctggttgccgcactgttctacaaagactatgcctcgctgtttcgcaacaacaaagaactggtgaaatccttaagcccgtccaacagcattgttgctagctggtcgtggtactctcaccagcggtcagccaacctgccactgatacgcattggtgaagatgctcaccgcaacccattaatgcaaaatgggaaacgcaaaaacctgaccattttgatcgtcggagaaacgtcgcgcgcagagaatttctcgctgaatggttatccacgcgaaaccaatcctcgcctggcaaaagataacgtggtctatttccctaataccgcatcttgtggcacagcaacagccgtctcagtgccgtgcatgttctcggatatgccgcgtgagcactacaaagaagagctggcacagcaccaggaaggcgtgctggatatcattcagcgagcgggcatcaacgtgctgtggaatgacaacgatggcggctgtaaaggcgtttgcgatcgcgtacctcaccagaacgtcaccgcgctgaacctgcctggtcagtgcatcaacggcgaatgctatgatgaagtgctgttccacgggctggaagattacatcaataacctgcagggtgatggcgtgattgtcttacacaccatcggcagccacggcccgacctattacaaccgctatccgccgcagttcaggaaatttaccccaacctgcgacactaacgagatccagacctgtacccaagagcaactggtgaacacttacgacaacacgctggtttacgtcgactatattgttgataaagcgattaatctgctgaaagaacatcaggataaatttaccaccagcctggtttatctttctgaccacggtgaatcgttaggtgaaaatggcatctatctgcacggtctgccttatgccatcgccccggatagccaaaaacaggtgccgatgctgctgtggctatcggaggattatcaaaaacggtatcaggttgaccagaactgcctgcaaaaacaggcgcaaacgcaacactattcacaagacaatttattctcaaccttattgggcctgactggcgttgagacgaagtattaccaggctgcggatgatattctgcaaacttgcaggagagtgagtgaatga

SEQ ID NO: 2178 - DNA, 1338 bp, Escherichia coli
atgtcttcggatgctgatgctcacaaagtgggcttaatccccgtcaccctgatggtgtcggggaatattatgggatcaggtgtttttctgttacctgcaaacctggcctccactggcgggattgccatttatggatggttggtgacgattatcggtgcgctggggctctcgatggtatacgccaaaatgtcgttcctcgacccaagtcctggtggttcttacgcttacgcccgccgctgctttggcccgtttctcggttatcaaaccaacgtcctctactggctggcctgctggatcggcaatatcgccatggtggtcattggcgtaggatatttaagttacttcttcccgattctgaaagacccattggtattaaccatcacctgcgtcgtggtgctgtggatcttcgtcctgctgaacattgtcggtccgaaaatgatcacccgcgtacaggccgttgctaccgtgctggcgctgatccccatcgtcgggattgccgtatttggctggttctggttccgtggtgaaacctatatggcggcatggaacgtcagcggtctgggcaccttcggtgcgattcaaagtacccttaacgttacgctgtggtcgttcatcggtgtggaaagtgcctccgttgccgcaggtgtggtgaaaaacccgaaacgcaacgtccctatcgccaccattggcggggtattgattgctgccgtttgctatgtactttctaccaccgcgattatggggatgatccctaatgccgcactgcgcgtttctgcttcgccattcggtgatgccgcacggatggcgttgggtgacaccgccggggccattgtttccttctgcgcagctgcgggttgcttaggttcactgggcggctggacgttgctggcgggtcaaacggcgaaagccgctgccgatgacggactgttcccaccgatttttgcccgtgtaaataaagcgggcacgccagtggcggggctgattatcgtcggtattttgatgaccatcttccagctcagtagcatttcgccaaacgcgaccaaagaattcggtctggtttcttccgtgtcggtcatctttacactggtgccatatctttacacctgtgcggcgttactgctgctcggccacggtcactttggtaaagcacgcccggcatacctggcagtgactaccattgccttcctctactgcatctgggccgtagtagggtccggcgcgaaagaggttatgtggtcatttgtcactctgatggtcatcaccgccatgtatgcgctgaattacaaccggctgcataaaaacccgtatcccttagatgcaccaataagcaaagattaa

SEQ ID NO: 2179 - DNA, 762 bp, Escherichia coli
atgaggatttgcagcgaccaaccttgtattgttttattgactgaaaaagatgtctggataagggtgaatgggaaagaacctattagccttaaagctaaccacatggcgttattaaattgtgaaaataatattatcgacgtctcctctcttaataacactttggttgctcatattagtcacgacatcatcaaagattacctccggtttctgaataaagatctctcgcaaataccagtatggcaacgtagcgctacgcccatcctcaccctgccatgcctgacgccagacgtctttcgcgttgccgcgcagcatagcatgatgcccgctgaaactgagtcagaaaaggaacgaacacgtgcattattattcactgtgctatcccgttttctcgacagtaaaaaattcctttcactaatgatgtatatgttacgtaattgtgtaagtgacagcgtttatcaaattattgaaagcgatatccacaaagactggaatcttagtatggtagccagttgtttatgtcttagcccaagtctgttaaagaaaaagctgaaaagcgaaaacaccagttatagccaaataatcaccacctgccgcatgcgctatgccgtaaatgaattaatgatggacggtaaaaatatctctcaggtatcacagtcctgcggctacaacagtacgtcgtactttatttctgtctttaaagacttctacggtatgacgccgctgcattatgttagtcagcacagagaacgcactgtcgcctga

SEQ ID NO: 2180 - DNA, 2271 bp, Escherichia coli
atgatgaaagtattaattgttgaaagcgagtttctccatcaagacacctgggtcggtaacgccgttgagcgtctggcagatgctttaagccagcaaaatgttaccgtgattaaatccacctcctttgatgatggttttgccattctctcttcaaacgaagccattgactgcctgatgttcagctatcaaatggaacatccggacgaacatcaaaacgtcagacaattgatcggtaagcttcatgagcgccaacaaaacgtgccggtcttcctgttgggcgatcgggaaaaagccctcgccgcaatggatcgcgacctgctggagcttgtcgatgaattcgcctggattctggaagatactgccgactttatcgccggacgcgccgttgccgcgatgacccgctaccgccagcagctattgccgccactgttcagcgcgctgatgaaatatagcgacatccatgaatattcctgggcagcgccaggccaccagggcggcgttggttttaccaaaacacccgccggacgtttctaccatgactactatggtgaaaatctgttccgcaccgacatgggcatcgaacgcacttccctcggttctttgcttgaccatactggcgcatttggcgaaagcgaaagatatgccgcacgcgtatttggtgccgatcgctcctggtcggtagtcgtcggtacttccggctctaaccgcaccatcatgcaggcttgcatgaccgataacgatgtcgtggtcgttgaccgtaactgccataaatccatcgaacaaggcttgatgctgacaggcgcgaaaccagtctacatggtgccaagccgcaaccgctacggcattatcgggccaatctatccgcaggaaatgcaacctgaaaccttgcagaagaaaatcagtgaaagcccgctgaccaaagacaaagtcgggcaaaaaccgtcttactgcgtggtgaccaactgtacctatgacggcgtgtgttataacgctaaagaagcgcaggatctgctggaaaaaacctccgatcgtctgcactttgacgaagcctggtacggctatgcacgtttcaacccgatctatgccgatcactatgccatgcgcggcgaacctggcgatcacaacggtcctaccgttttcgccacccactccacccacaaactgctgaatgcgctgtcccaggcctcttatattcatgtacgtgaaggtcgtggggcgattaacttctcccgcttcaaccaggcctacatgatgcatgccaccacctccccgctgtatgccatctgcgcatccaacgacgtggcggtgtcgatgatggacggcaacagcggcctgtcactgacccaggaagtgatcgacgaagcggttgatttccgtcaggcgatggcgcggctgtataaagagttcaccgctgacggtagctggttcttcaaaccgtggaacaaagaagtcgtcaccgacccacaaaccggcaaaacctatgactttgctgacgcaccaaccaaactgctgaccaccgttcaggactgctgggtcatgcatccgggcgaaagctggcacggcttcaaagatattccggataactggagtatgctcgacccgattaaagtcagcatccttgctccgggaatgggtgaagatggtgaactggaagaaaccggtgttccggcggcgctggtcacagcctggcttggtcgccacggcattgtgcctacccgtaccactgacttccagattatgttcctgttctctatgggcgtgacccgtgggaaatgggggactctggttaacaccctttgctccttcaaacgccactatgatgccaacacaccgctggcgcaggtgatgccggaacttgttgaacaatatcctgacacttacgcgaacatggggattcacgatctgggtgacaccatgtttgcctggctgaaagaaaacaaccctggcgcacggttgaatgaagcctattctggcctaccggtggcggaaatcaccccgcgtgaagcgtacaacgcgattgtcgacaacaatgtcgaactggtatccattgaaaatctgccaggacgtatcgcggcaaactcagttatcccgtatccgccaggaatcccgatgctgctgtctggtgaaaacttcggcgataaaaacagtccgcaagtaagttatttacgctcactgcaatcctgggaccatcatttccctggatttgaacacgaaacagaagggacagaaattattgacggtatttaccacgttatgtgtgtgaaagcgtaa

SEQ ID NO: 2181 - DNA, 909 bp, Escherichia coli
atgaatacagatacgtttatgtgcagcagcgacgaaaaacagacccgcagcccgctgtcgctgtattcggaataccagcggatggagattgagtttcgcgcaccgcatatcatgcccaccagccactggcatggtcaggtcgaagtgaatgtgcctttcgatggcgatgtggaatacctgatcaacaatgaaaaagtgaatatcaatcagggtcatatcacgctgttctgggcctgtacaccgcaccaactaacagataccggaacctgtcagagcatggcgatttttaatctgccgatgcatctgtttctctcctggccgctggataaagacctgattaaccacgtcactcacggcatggtgatcaaatcactggcgacacagcaacttagcccgtttgaagtgcgccgctggcagcaggaattaaacagtccgaacgagcaaattcgccagctcgccattgatgaaattggcctgatgctcaagcgatttagcctctctggctgggaaccgattctggtcaataaaacctcgcgcacacacaaaaacagcgtctcgcgccatgcgcaattttatgtcagccagatgctgggctttattgccgaaaactatgatcaggcgctgaccatcaacgatgtggctgagcacgtcaaacttaacgccaactatgcaatggggatattccagcgggtcatgcaattgacgatgaaacagtacattaccgcgatgcgcatcaaccacgttcgcgcgttactgagcgataccgataaaagtattctcgatattgccctgacggcaggctttcgttcgagtagccgtttttacagcacgttcggcaaatatgtcggcatgtcgccgcaacaataccgcaaacttagccaacagcgccgccagacgtttcccggctaa

SEQ ID NO: 2182 - DNA, 1356 bp, Escherichia coli
atgatgtctgcacccaaaattacatttatcggcgctggttcgacgattttcgttaaaaatattcttggtgatgtgttccatcgtgaggcgctgaaaacggcgcatattgccctgatggatatcgatcccacccgcctggaagagtcgcacattgtggtgcgtaagctgatggattcagcaggggccagcggcaaaatcacctgccacacccaacagaaagaagccttacaggatgctgattttgtcgtggtggcatttcagattggcggttatgaaccttgcacggtgactgatttcgaggtctgtaagcggcatggtctggaacaaaccattgccgatacgctggggccgggcggcattatgcgtgcgctacgtaccattccgcacctgtggcagatttgcgaggacatgacggaagcctgccccgatgccaccatgctcaactacgttaacccaatggcgatgaatacctgggcgatgtatgcccgctatccgcatatcaagcaggtagggctgtgccattcggtgcagggaacggcggaagagctggcgcgtgacctcaatatcgatccggctacgctgcgttaccgttgcgcaggtatcaaccatatggcgttttacctggaactggagcgtaaaaccgcagacggtagctacgtgaatctctatcctgaattgctggcggcttatgaagcagggcaggcaccgaagccaaatattcatggtaatactcgctgccagaatattgtgcgttacgaaatgttcaaaaagctgggctacttcgtcacagaatcgtcagaacattttgctgagtacacaccgtggtttattaagccaggtcgtgaggatttgattgagcgttataaagtaccgctggatgagtacccgaaacgctgcgtcgagcagctggcgaactggcataaagagctggaggagtataaaaacgcctcccggattgatattaaaccgtcacgggaatatgccagcacaatcatgaacgctatctggactggcgagccgagtgtgatttatggcaatgtccgtaacgatggtttgattgataacctgccacaaggatgttgcgtggaagtggcctgtctggttgatgctaatggcattcagccgaccaaagccggtacgctaccttcgcatctggccgccctgatgcaaaccaacatcaacgtacagacgctgctgacagaagctattcttacggaaaatcgcgaccgtgtttaccacgccgcgatgatggacccgcatactgccgccgtgctgggcattgacgaaatatatgctcttgttgacgacttgattgccgcccacggcgactggctgcctggctggttgcaccgttaa

SEQ ID NO: 2183 - DNA, 651 bp, Escherichia coli
atgacccgcacactcaagccgttaattcttaacaccggcgcactggcgctaacgttaatcctgatttataccggcatttcggcccatgacaaactcacctggctgatggaagtgacaccggtgattattgtcgtgccgctactgcttgccaccgctaaacgttatccgttaacgccgctgctctatacgctcattttctttcacgccatcatcctgatggtcggcgggcaatacacctacgcgaaagtccccgttggttttgaggtgcaggaatggctggggttgagccgtaatccgtatgacaaactggggcattttttccaggggctggtgcctgcactggtggcacgagagatccttgtacgcgggatgtacgttcgcggacgtaagatggtggcgtttctggtctgctgcgtggcgctggcgataagcgcgatgtatgaattaatcgagtggtgggcggcgctggcaatgggccagggagcggatgattttctcggcacccagggcgaccagtgggacacgcaatccgatatgttctgcgcgctgcttggcgcattaacgacggtgatattcctcgctcgctttcattgccgccagctacggcgctttggcttaatcaccagagcgccggaagcgattaccccttaa

SEQ ID NO: 2184 - DNA, 1647 bp, Escherichia coli
atgtcaaacaaaccctttatctaccaggcacctttcccgatggggaaagacaataccgaatactatctactcacttccgattacgttagcgttgccgacttcgacggcgaaaccatcctgaaagtggaaccagaagccctgaccctgctggcgcagcaagcctttcacgacgcttctttcatgctccgcccggcacaccagaaacaggttgcggctattcttcacgatccagaagccagcgaaaacgacaagtacgtggcactgcaattcttaagaaactccgaaatcgccgctaaaggcgtgctgccgacctgccaggataccggcaccgcgatcatcgtcggtaaaaaaggtcagcgcgtgtggaccggtggcggtgatgaagaagcgctgtcgaaaggcgtctataacacctatatcgaagataacctgcgctattcacagaacgcgccgctggacatgtataaagaggtcaacaccggcacgaacctgcctgcgcaaatcgacctgtacgcggtagatggcgatgagtacaaattcctctgtgtcgctaaaggcggcggctctgccaacaaaacgtatctctaccaggaaaccaaagccctgctgacgcccggcaaactgaaaaacttcctcgtcgagaaaatgcgtaccctcggtactgcagcctgcccgccgtaccatatcgcgtttgtgattggcggtacgtctgcggaaaccaacctgaaaaccgtcaagttagcaagcgctcactattacgatgaactgccgacggaagggaacgaacatggtcaggcgttccgcgatatccagctggaacaggaactgctggaagaggcccagaaactcggtcttggcgcgcagtttggcggtaaatacttcgcgcacgacatccgcgttatccgtctgccacgtcacggcgcatcctgcccggtaggcatgggagtctcctgctccgctgaccgtaacattaaagcgaaaatcaaccgcgaaggtatctggatcgaaaaactggaacacaatccaggccagtacattccagaagaactgcgtcaggcaggtgaaggcgaagcagtgaaagtcgaccttaaccgcccgatgaaagagatccttgcccagctttcgcaatacccggtatccacccgcttgtcgctcaccggcaccattatcgtgggtcgcgatattgcacacgccaagctgaaagagctgattgacgccggtaaagaactgccgcagtacatcaaagatcacccgatctactacgcgggtccggcgaaaacgcctgccggttatccatcaggttcacttggcccaaccaccgcaggtcgtatggactcctacgtggatctgctgcaatcccacggcggcagcatgatcatgctggcgaaaggtaatcgcagtcagcaggttaccgacgcgtgccataaacacggcggcttctacctcggtagcatcggcggtccggcggcggtactggcgcagcagagcatcaagcatctggaatgcgtcgcttatccggagctgggtatggaagctatctggaaaatcgaagtagaagatttcccggcgtttatcctggtcgatgacaaaggtaacgacttcttccagcagatcgtcaacaaacagtgcgcgaactgcactaagtaa

SEQ ID NO: 2185 - DNA, 1341 bp, Escherichia coli
atgttatttactatccaacttatcataatactgatatgtctgttttatggtgccagaaaggggggtatcgcgctgggtttattaggcggtatcggtctggtcattctggtcttcgtcttccaccttcagccaggtaaaccaccggttgatgtcatgctggttatcattgcggtggtggcggcatcggcgaccttgcaagcttcgggcggtcttgatgtcatgctgcaaattgccgagaagctgctgcgtcgcaacccgaaatatgtctcaattgtcgcgccgtttgtgacctgtacgctgaccattctttgcggtacgggtcatgtggtttacaccattctgccgatcatctacgacgttgctattaagaacaacatccgtccggaacgtccgatggcggcaagttctatcggtgcacagatggggattatcgccagtccggtgtcggttgcggtcgtatctttggttgcgatgctgggtaatgtcacctttgatggtcgccatcttgagttcctcgacctgctggcaatcaccattccatcgacgttaatcggtatcctggcgatcggtatcttcagctggttccgcggtaaagatctggataaagacgaagagttccagaaattcatctccgtaccggaaaaccgtgagtatgtttacggtgataccgcgacgctgctggataaaaaactgccgaaaagcaactggctggcaatgtggatcttcctcggggcaatcgctgtagtcgcccttcttggtgctgattcggacctgcgtccatccttcggcggcaaaccgctgtcgatggtactggttattcagatgtttatgctgctgaccggggcgctgattattatcctgaccaaaaccaatcccgcgtctatctcaaaaaacgaagtcttccgttccggtatgatcgccatcgtggcggtgtacggtatcgcatggatggctgaaaccatgttcggtgcgcatatgtctgaaattcaaggcgtactgggtgaaatggtgaaagagtatccgtgggcctatgccattgttctgctgctggtttccaagtttgtaaactctcaggctgcagcgctggcggcgattgttccggtcgcgctggcgatcggcgttgatccggcatacatcgtggcttcagcaccggcttgctacggttattacatcctgccgacttatccgagcgatctggcagcgattcagtttgaccgttccggcaccacccacatcggtcgcttcgtcatcaaccacagctttattctgccggggttgattggtgtgagcgtatcgtgcgtcttcggctggatcttcgccgcgatgtacgggttcttataa

SEQ ID NO: 2186 - DNA, 720 bp, Escherichia coli
atgatcaatgtattaattatcgatgatgacgcaatggtcgcggagctgaatcgccgatacgtggcacaaatcccgggctttcaatgctgtggaacggcttcgacgctggagaaagccaaagagattatcttcaatagcgatacgcctatcgacctgatattgctagatatctatatgcaaaaagagaacgggctcgatttactgcctgtcctgcataacgcgcgttgcaaaagtgatgtgattgtcatctcctccgctgccgatgcagtaaccattaaagattcgctgcattacggtgttgtggattacctgatcaaacccttccaggcttcccgctttgaagaggcgctcaccggctggcggcaaaagaaaatggcgctggaaaaacatcagtattatgaccaggccgagcttgatcagctaatccacggcagcagctccaacgagcaggatcctcgtcgcttgccaaaaggcttaacgccgcagacgttacgcacgctgtgccagtggattgacgcgcatcaggactatgagttttcaaccgacgagctggctaacgaggttaacatctcgcgtgtttcctgccgtaaataccttatctggctggtcaactgccacatattgttcaccagtatccattatggcgtcacggggcgtccggtttaccgttaccgtattcaggcagaacactactcactactgaaacaatattgccaataa

SEQ ID NO: 2187 - DNA, 1632 bp, Escherichia coli
atgagacattcattgccctaccgtatgttacgcaaacgtccgatgaaattgagtaccactgtgatcttaatggtcagcgcggtactgttctcggtgctattggtggtgcatctgatttacttctcgcaaatcagtgatatgacgcgagacgggctagctaacaaggcactggcagtagcgcgtaccctcgccgactcgccggaaatccgtcagggcttgcagaaaaaaccgcaggagagtggaatccaggccatcgcggaagccgtgcgcaaacgcaacgatctgctgtttattgtcgttaccgatatgcaaagccttcgctactcgcatcctgaagcccagcgtattggtcagccatttaaaggtgatgacatccttaaagcgctgaatggcgaagaaaatgtcgctatcaatcgcggttttctggcgcaggctttacgcgtatttacccccatctacgatgaaaatcataaacaaattggcgtggtggcgatcggccttgagttaagccgcgtgacccaacagatcaatgacagtcgctggagcattatctggtcggtactatttggcatgctggtcggactgatcggcacatgcattctggttaacgtactgaaaaaaatccttttcggcctggaaccctacgaaatctccacactgtttgagcaacgccaggccatgttgcagtccatcaaagaaggcgtcgttgccgtggacgatcgcggcgaggtcacgctgatcaacgatgccgcacaagaattgctgaattaccgtaagtcgcaggacgatgagaaactgtcgacgctaagccactcgtggtcacaggtggtagatgtctcggaagtgttacgcgacggaaccccacgccgcgacgaagagattacgattaaggaccgactattactgatcaacaccgttccggtgcgcagtaatggcgttatcatcggtgccatttcaaccttcagggacaaaactgaagtacgtaaactgatgcagcgactcgacggtctggtcaactatgctgacgcacttcgtgaacgatcccacgaatttatgaataaattgcatgtgattctcggattattgcatctgaagagttataagcagttggaagattacattctcaaaacagccaataactatcaggaagagattggctctctgctgggtaagatcaaatctccggttatcgctggttttttaatcagcaagattaaccgcgcgaccgatttaggccatacgctgattttaaacagtgaaagccagctgccagacagcggtagtgaggatcaggtcgcgacgctgattaccacgttgggaaatctgatagaaaacgcgctggaggcattaggaccggaacccggtggcgaaattagcgtaacattgcactaccgtcacggctggctgcactgcgaagttaacgatgatggaccggggatcgcacccgacaaaatcgatcacatttttgacaaaggtgtctcgacaaaaggaagcgagcgaggcgtcggtttagcacttgtcaaacaacaggtagaaaatctcggcggcagcatcgccgtggaatcggaacccgggattttcacacaattttttgtccagataccctgggacggggagaggtcgaacagatga

SEQ ID NO: 2188 - DNA, 231 bp, Escherichia coli
atggatcgggcgctactggacgggggttatcgctgttataccggcgaaaatatcgatgtctattttaacactgcgatatgtcagcattctggcaattgcgtacgtggcaacggcaagttatttaatctcaaacgaaagccgtggatcatgccggatgaagtcgacgttgccactgtggttaaagtgattgatacgtgcccaagcggcgcgctgaaataccgtcataaataa

SEQ ID NO: 2189 - DNA, 273 bp, Escherichia coli
atggaaatacgcgaaggccacaataaattttacattaatgacgaacaaggcaagcaaatcgctgaaattgtctttgtgccgaccggagagaatttagcgattatcgaacataccgatgtcgatgaaagcctgaaagggcaagggattggtaaacagctggttgcgaaagtcgtggaaaaaatgcgtcgggaaaaacgaaaaattatcccactatgcccatttgcgaaacacgaatttgataaaacacgggagtatgatgatattcgcagttga

SEQ ID NO: 2190 - DNA, 297 bp, Escherichia coli
atggaaggtaaaaacaagttcaatacttatgttgtttcttttgattatccatcatcttattcctcagtgttcttaaggttaagatcattgatgtatgatatgaatttctcctctatcgtggctgatgaatatgggataccacgacaactgaatgaaaactccttcgcaataacgacatcgttagccgcaagtgaaatcgaagatttaatcaggctcaaatgcttagacttaccggatattgattttgacctcagcattatgacagttgatgactatttccgtcagttttacaagtag

SEQ ID NO: 2191 - DNA, 174 bp, Escherichia coli
atggcactattctctaaaatattaattttttatgtgattggtgtgaacatatcctttgtcattatctggtttatctcacatgagaaaacacatattcgtttacttagtgcatttctggtcggaataacctggccaatgagtcttcctgtggcattacttttttctctcttttag

SEQ ID NO: 2192 - DNA, 1518 bp, Escherichia coli
atgtctgaacgagaaacacggggagccaatgaggctattgattttaacgatgaactgagaaatcgccgcgaaaaactggcggcactacgtcagcaaggtgtggcgtttcccaatgattttcgccgcgaccatacctctgaccagttgcacgaagagtttgatgcgaaggataaccaggaactggaatccttaaacattgaagtctcggttgctggccgaatgatgacccgtcgtattatggggaaagcctcctttgtaacgttgcaggatgtcggtggccgtattcaactgtacgttgcaagagatagcctgccagaaggtgtttataacgatcagtttaaaaaatgggatctgggtgacattatcggtgcccgcggtacgctgtttaagacgcaaacgggtgagctttccattcactgtactgagctgcgcctgctgactaaagcactacgtcctttaccagataaattccatggtctgcaggatcaggaagtccgttatcgtcaacgttatctggacctcatcgctaacgataaatcccgtcaaacgtttgttgtccgttcaaaaattctggccgctatccgtcagttcatggtcgcgcgcggctttatggaagtagaaaccccgatgatgcaggtaattccaggtggggcatctgctcgcccgtttattacccatcataacgctctggatttagatatgtacctgcgtatcgcgccggagctgtatctgaaacgtctggttgtaggcggttttgaacgggtattcgaaatcaaccgtaacttccgtaatgaaggtatttctgttcgccataatcctgagttcacaatgatggaactctacatggcatatgcggattaccacgatttgattgaactgacggagtcactgttccgcaccctggcacaagaggtactgggtaccactaaagtcacttatggcgagcatgtgtttgatttcggcaaaccgtttgaaaaactcaccatgcgcgaagcaatcaaaaaatatcgtccagaaaccgatatggcggatctggataattttgatgctgctaaagcattagctgaatctatcggtattacggtagagaaaagctgggggctgggacgtattgttacggagatctttgatgaagtggcagaagcacatctgattcagccaacctttattacggaatatccggcagaagtgtccccgctggcgcgccgtaatgatgttaacccggaaatcaccgaccgttttgaattcttcatcggtggtcgtgaaattggtaatggttttagcgaattaaacgacgcagaagatcaggctgaacgtttccaggaacaggttaacgctaaagctgcaggtgacgacgaagccatgttctatgacgaagattacgtgactgcgctggaatatggtctgccgccaaccgctggtctgggtattggtatcgaccgaatgattatgctgtttacaaacagtcatactattcgcgacgttattctcttcccggcgatgcgcccacagaaataa

SEQ ID NO: 2193 - DNA, 1458 bp, Escherichia coli
atgaaaacaccctcacagccgcgcgcgatatactatatcgtggcgatccaaatctgggagtacttcagtttttacggcatgcgtgccttactcattctctatctcacccatcagcttggttttgatgataaccatgccatcagcctgttcagcgcatatgcttctctggtttacgttacccctattctcggcggctggcttgccgaccgcctgctcggcaaccgcactgcagtgattgccggcgcgctgttaatgacccttggccatgtggtgctgggcattgatacaaattcaacctttagcctgtatctggcgctggcaatcattatttgtggctacggtttattcaaatcaaacatcagctgtttgcttggcgagctctacgacgagaacgatcatcgacgtgatggcggtttttcgctgctgtatgctgcgggcaatatcggttctatcgcagcccccatcgcctgcggcctggctgctcagtggtatggatggcatgttggctttgcccttgcgggtggcggcatgtttatcggtttgttgattttcttaagtggtcatcgtcatttccagtccacgcgtagtatggataagaaagcgctcactagcgtgaaatttgccttaccagtatggagctggttagtggtgatgctctgtttagccccagtattttttaccctgctgctggagaacgactggtccggatatttgctggcgatcgtttgcctcattgccgcacaaatcattgcccgcatgatgatcaaattccccgaacaccgccgtgctctttggcaaattgtattgttgatgtttgtcgggacgttgttctgggtactggcacaacagggcggcagtaccatcagcttgtttatcgatcgctttgtgaatcgtcaggcattcaatattgaagtacctacagcactattccagtcggtgaatgctattgcggtgatgctcgctggggttgttctggcctggctggcgtcgccagaaagccgcggcaattcagcattgcgcgtctggctgaagtttgcctttggcttactgctgatggcttgtggctttatgttgctggcatttgatgcccgacatgcagcggctggcggtcaagcgtcaatgggcgtgatgatatccgggctggcgctaatgggctttgctgaactctttattgacccggtggcgattgcgcaaatcacgcgtctgaaaatgtctggcgtattaaccggtatttatatgctggcaacaggcgcggtcgccaactggctggcaggcgtcgtggcacagcagacgacagagtcgcaaattagcggtatggcaattgccgcttaccagcgattcttttctcagatgggagagtggacgttggcttgtgtcgcgatcatcgtggtattggcctttgctacccgttttctgtttagcacgccgacgaatatgatacaggagagcaacgattaa

SEQ ID NO: 2194 - DNA, 2148 bp, Escherichia coli
atgaacgttattgcaatattgaatcacatgggggtttattttaaagaagaacccatccgtgaacttcatcgcgcgcttgaacgtctgaacttccagattgtttacccgaacgaccgtgacgacttattaaaactgatcgaaaacaatgcgcgtctgtgcggcgttatttttgactgggataaatataatctcgagctgtgcgaagaaattagcaaaatgaacgagaacctgccgttgtacgcgttcgctaatacgtattccactctcgatgtaagcctgaatgacctgcgtttacagattagcttctttgaatatgcgctgggtgctgctgatgatattgctaacaagatcaagcagaccactgacgaatatatcaacactattctgcctccgctgaccaaagcactgtttaaatatgttcgtgaaggtaaatatactttctgtactcctggtcacatgggtggtactgcattccagaaaagcccggtaggtagcctgttctatgatttctttggtccgaacaccatgaaatctgatatttccatttcagtatctgaattgggttctctgctggatcacagtggtccacacaaagaagcagaacagtatatcgctcgcgtctttaacgcagaccgcagctacatggtgaccaacggtacttccactgcgaacaaaattgttggtatgtactctgctccggcaggcagcaccattctgattgaccgtaactgccacaaatcgctgacccacctgatgatgatgagcgatgttacgccaatctatttccgcccgacccgtaacgcttacggtattcttggtggtatcccacagagtgaattccagcacgctaccattgctaagcgcgtgaaagaaacaccaaacgcaacctggccggtacatgctgtaattaccaactctacctatgatggtctgctgtacaacaccgacttcatcaagaaaacactggatgtgaaatccatccactttgactccgcgtgggtgccttacaccaacttctcaccgatttacgaaggtaaatgcggtatgagcggtggccgtgtagaagggaaagtgatttacgaaacccagtctactcacaaactgctggcggcgttctctcaggcttccatgatccacgttaaaggtgacgtaaacgaagaaacctttaacgaagcctacatgatgcacaccaccacctctccgcactacggtatcgtggcgtccactgaaaccgctgcggcgatgatgaaaggcaatgcaggtaaacgtctgatcaatggttccattgaacgtgcgatcaaattccgtaaagagatcaaacgtctgagaacggaatctgatggctggttctttgatgtatggcagccggatcatatcgatacgactgaatgctggccgctgcgttctgacagcacatggcacggcttcaaaaacatcgataacgagcacatgtatcttgacccgatcaaagtcaccctgctgactccggggatggaaaaagacggcaccatgagcgactttggtattccggccagcatcgtggcgaaatacctcgacgaacatggcatcgttgttgagaaaaccggtccgtataacctgctgttcctgttcagcatcggtatcgataagaccaaagcactgagcctgctgcgtgctctgactgacttcaaacgtgcgttcgacctgaacctgcgtgtgaaaaacatgctgccgtctctgtatcgtgaagatcctgaattctatgaaaacatgcgtattcaggaactggctcagaatatccacaaactgattgttcaccacaatctgccggatctgatgtatcgcgcatttgaagttctgccgactatggtaatgactccgtatgctgcgttccagaaagagctgcacggtatgaccgaagaagtttacctcgacgaaatggtcggtcgtattaacgccaatatgatccttccgtatccgccgggagttcctctggtaatgccgggtgaaatgatcaccgaagaaagccgtccggttctggagttcctgcagatgctgtgtgaaatcggcgctcactatccgggctttgaaaccgatattcacggtgcataccgtcaggctgatggccgctataccgttaaagtattgaaagaagaaagcaaaaaataa

SEQ ID NO: 2195 - DNA, 1335 bp, Escherichia coli
atgagttctgccaagaagatcgggctatttgcctgtaccggtgttgttgccggtaatatgatggggagcggtattgcattattacctgcgaacctagcaagtatcggtggtattgctatctggggttggattatctctattattggtgcaatgtcgctggcatatgtatatgcccgactggcaacaaaaaacccgcaacaaggtggcccaattgcgtatgccggagaaatttcccctgcatttggttttcagacaggtgttctttattaccatgctaactggattggtaacctggcaattggtattaccgctgtatcttatctttccaccttcttcccagtattaaatgatcctgttccggcgggtatcgcctgtattgctatcgtctgggtatttacctttgtaaatatgctcggcggtacctgggtaagccgtttaaccactattggtctggtgctggttcttattcctgtggtgatgactgctattgttggctggcattggtttgatgcagcaacttatgcagctaactggaatactgcggataccactgatggtcatgcgatcattaaaagtattctgctctgcctgtgggccttcgtgggtgttgaatccgcagcagtaagtactggtatggttaaaaacccgaaacgtaccgttccgctggcaaccatgctgggtactggtttagcaggtattgtttacatcgctgcgactcaggtgctttccggtatgtatccgtcttctgtaatggcggcttccggtgctccgtttgcaatcagtgcttcaactatcctcggtaactgggctgcgccactggtttctgcattcaccgcctttgcgtgtctgacttctctgggctcctggatgatgttggtaggccaggcaggtgtacgtgccgctaacgacggtaacttcccgaaagtttatggtgaagtcgacagcaacggtattccgaaaaaaggtctgctgctggctgcagtgaaaatgactgccctgatgatcctcatcactctgatgaactctgccggtggtaaagcctctgacctgttcggtgaactgaccggtatcgcagtactgctgactatgctgccgtacttctactcttgcgttgacctgattcgttttgaaggcgttaacatccgcaactttgtcagcctgatctgctctgtactgggttgcgtgttctgcttcatcgcgctgatgggcgcaagctccttcgagctggcaggtaccttcatcgtcagcctgattatcctgatgttctacgctcgcaaaatgcacgagcgccagagccactcaatggataaccacacagcgtctaacgcacattaa

SEQ ID NO: 2196 - DNA, 1539 bp, Escherichia coli
atgcaacaacctgtagttcgcgttggcgaatggcttgttactccgtccataaaccaaattagccgcaatgggcgtcaacttacccttgagccgagattaatcgatcttctggttttctttgctcaacacagtggcgaagtacttagcagggatgaacttatcgataatgtctggaagagaagtattgtcaccaatcacgttgtgacgcagagtatctcagaactacgtaagtcattaaaagataatgatgaagatagtcctgtctatatcgctactgtaccaaagcgcggctataaattaatggtgccggttatctggtacagcgaagaagagggagaggaattaatgctatcttcgcctccccctataccagaggcggttcctgccacagattctccctcccacagtcttaacattcaaaacaccacaacgccacctgaacaatccccagttaaaagcaaacgattcactaccttttgggtatggttttttttcctgttgtcgttaggtatctgtgtagcactggtagcgttttcaagtcttgaaacacgtcttcctatgagtaaatcgcgcattttgctcaatccacgcgatattgacattaatatggttaataagagttgtaacagctggagttctccgtatcagctctcttacgcgataggcgtgggtgatttggtggcgacatcacttaacaccttctccacctttatggtgcatgacaaaatcaactacaacattgatgaaccgagcagttccggtaaaacattatctattgcgtttgttaatcagcgccaataccgtgctcaacaatgctttatgtcggtaaaattggtagacaatgcagatggttcaaccatgctggataaacgttatgtcatcactaacggtaatcagctggcgattcaaaatgatttactccagagtttatcaaaagcgttaaaccaaccgtggccacaacgaatgcaggagatgctccagcaaattttgccgcatcgtggtgcgttattaactaatttttatcaggcacatgattatttactgcatggtgatgataaatcattggatcgtgccagtgaattattaggtgagattgttcaatcatccccagaatttacctacgcgagagcagaaaaagcattagttgatatcgtgcgccattctcaacatcctttagacgaaaaacaattagcagcactgaacacagaaatagataacattgttacactgccggaattgaacaacctgtccattatatatcaaataaaagcggtcagtgccctggtaaaaggtaaaacagatgagtcttatcaggcgataaataccggcattgatcttgaaatgtcctggctaaattatgtgttgcttggcaaggtttatgaaatgaaggggatgaaccgggaagcagctgatgcatatctcaccgcctttaatttacgcccaggggcaaacaccctttactggattgaaaatggtatattccagacttctgttccttatgttgtaccttatctagacaaatttctcgcttcagaataa

SEQ ID NO: 2197 - DNA, 576 bp, Escherichia coli
gtgcaacgtgaagatgtactgggagaagccctgaaattattagaattacaagggattgccaacaccacgctggagatggttgctgaacgtgtggattacccactggacgagctacgccgcttctggccagacaaagaggcaatcctctacgatgcgctgcgttatcttagccaacagatagatgtctggcgtcgtcagctgatgctggacgaaacacaaaccgccgaacaaaagttgctggcacgttatcaggcgttatcggagtgcgttaaaaacaaccgctatccgggctgtctgtttatcgctgcctgtacgttttatcccgatcctggccaccctattcatcaactggccgatcagcaaaaaagcgcggcctacgatttcacccacgaactgttaaccacgctggaagttgacgatccggcgatggtagcaaagcagatggaactggtgctggaaggctgtttaagccgaatgctggtgaatcgtagccaggcggatgtcgacaccgcacatcggctggcggaagatatcctgcgcttcgcccgctgccgccagggtggtgctttgacctga

SEQ ID NO: 2198 - DNA, 1698 bp, Escherichia coli
atggctcaacgcatctttacgctgatcctgctactttgcagcacttccgtttttgccggattattcgacgcgccgggacgttcacaatttgtccccgcggatcaagcctttgcttttgattttcagcaaaaccaacatgacctgaatctgacctggcagatcaaagacggttactacctctaccgtaaacagatccgcattacgccggaacacgcgaaaattgccgacgtgcagctgccgcaaggcgtctggcatgaagatgagttttacggcaaaagcgagatttaccgcgatcggctgacgcttcccgtaaccatcaaccaggcgagtgcgggagcaacgttaactgtcacctaccagggctgtgctgatgccggtttctgttatccgccagaaaccaaaaccgttccgttaagcgaagtggtcgccaacaacgaagcgtcacagcctgtgtctgttccgcagcaagagcagcccaccgcgcaattgcccttttccgcgctctgggcgttgttgatcggtattggtatcgcctttacgccatgcgtgctgccaatgtacccactgatttctggcatcgtgctgggcggtaaacagcggctttccactgccagagcattgttgctgacctttatttatgtgcaggggatggcgctgacttacacggcgctgggtctggtggttgccgccgcagggttacagttccaggcggcgctacagcacccatacgtgctcattggactcgccatcgtctttaccttgctggcgatgtcaatgtttggcttgtttactctgcaactcccctcttcgctgcaaacacgtctcacgctgatgagcaatcgccaacagggcggctcacctggcggtgtgtttattatgggggcgattgccggactgatctgttcaccatgcaccaccgcaccgcttagcgcgattctgctgtatatcgcccaaagcgggaacatgtggctgggcagcggcacgctttatctttatgcgctgggcatgggcctgccgctgatgctaattaccgtctttggtaaccgcttgctgccgaaaagcggcccgtggatggaacaagtcaaaaccgcgtttggttttgtgatcctcgcactgccggtcttcctgctggagcgagtgattggtgatatatggggattacgcttgtggtcggcgcttggtgtcgcattctttggctgggcctttatcaccagcctacaggccaaacgcggctggatgcgcgtggtgcaaataatcctgctggcagcggcattggttagcgtgcgcccacttcaggattgggcatttggtgcgacgcataccgtgcaaactcagacgcatctcaactttacacaaatcaaaacggtagatgagttaaatcaggcgctcgttgaagccaaaggcaaaccagtgatgttagatctctatgccgactggtgcgtcgcctgtaaagagtttgagaaatacaccttcagcgacccgcaggtgcaaaaagcgttagcagacacggtcttacttcaggctaacgtcactgccaacgacgcacaagatgtggcgctgttaaagcatcttaatgtccttggcctaccgacaattctcttttttgacggacaaggccaggagcatccacaagcacgcgtcacgggctttatggatgctgaaaccttcagcgcacatttgcgcgatcgccaaccgtga

SEQ ID NO: 2199 - DNA, 339 bp, Escherichia coli
atgcttgatgaaaaaagttcgaataccacgtctgtcgtggtgctatgtacggcaccggatgaagcgacagcccagaatttagccgccaaagtgctggcggaaaaactggcggcctgcgcgaccttgatccccggcgctacctctctctattactgggaaggtaagctggagcaagaatacgaagtgcagatgattttaaaaactaccgtatctcaccagcaggcactgctggaatgcctgaagtctcatcatccatatcaaaccccggaacttctggttttacctgttacacacggagacacagattacctctcatggctcaacgcatctttacgctga

SEQ ID NO: 2200 - DNA, 1302 bp, Escherichia coli
atgctagttgtagaactcatcatagttttgctggcgatcttcttgggcgccagattggggggaataggtattggttttgcaggcggattgggggtgctggttcttgccgctattggcgttaaacccggtaacatcccgttcgatgtcatttccattatcatggcggttatcgccgctatttctgccatgcaggttgctggcggtctggactatctggttcatcagacagaaaagctgctgcgccgtaacccgaaatacatcacgatcctcgcaccgatcgtgacctatttcctgactatctttgctggtactggcaacatctctctggcgacactgccagttatcgctgaagttgcgaaggaacaaggcgttaaaccttgccgtccgctgtctactgcagtggtatccgcgcagattgcgatcaccgcatcgccaatctcagcggcagtggtttacatgtcttccgtgatggaaggtcatggcatcagctacctccatctgctctccgtggtcatcccgtccaccctgctggcggttctggtgatgtccttcctggtcactatgctgttcaactccaaactctctgacgatccgatttatcgcaagcgtctggaagagggcctggttgaactgcgcggtgaaaagcagattgaaatcaaatccggtgcaaaaacgtccgtctggctgttcctgctgggcgtagttggcgtggttatctatgcaatcatcaacagcccaagcatgggtctggttgaaaaaccactgatgaacaccaccaacgcaatcctgatcatcatgctcagcgttgcaactctgaccaccgttatctgtaaagtcgataccgacaacattctcaactccagcaccttcaaagcaggtatgagcgcctgtatttgtatcctgggtgttgcgtggctgggcgatactttcgtttccaacaacatcgactggatcaaagataccgctggtgaagtgattcagggtcatccgtggctgctggccgtcatcttcttctttgcttctgctctgctgtactctcaggctgcaaccgcaaaagcactgatgccgatggctctggcactgaacgtttctccgctgaccgctgttgcttcttttgctgcggtgtctggtctgttcattctgccgacctacccgacactggttgctgcggtacagatggatgacacgggtactacccgtatcggtaaattcgtcttcaaccatccgttcttcatcccgggtactctgggtgttgccctggccgtttgcttcggcttcgtgctgggtagcttcatgctgtaa

SEQ ID NO: 2201 - DNA, 1437 bp, Escherichia coli
atgtcaaacaacattcgtatcgaagaagatctgttgggtaccagggaagttccagctgatgcctactatggtgttcacactctgagagcgattgaaaacttctatatcagcaacaacaaaatcagtgatattcctgaatttgttcgcggtatggtaatggttaaaaaagccgcagctatggcaaacaaagagctgcaaaccattcctaaaagtgtagcgaatgccatcattgccgcatgtgatgaagtcctgaacaacggaaaatgcatggatcagttcccggtagacgtctaccagggcggcgcaggtacttccgtaaacatgaacaccaacgaagtgctggccaatatcggtctggaactgatgggtcaccagaaaggtgaatatcagtacctgaacccgaacgaccatgttaacaaatgtcagtccactaacgacgcctacccgaccggtttccgtatcgcagtttactcttccctgattaaactggtagatgcgattaaccaactgcgtgaaggctttgaacgtaaagctgtcgaattccaggacatcctgaaaatgggtcgtacccagctgcaggacgcagtaccgatgaccctcggtcaggaattccgcgccttcagcatcctgctgaaagaagaagtgaaaaatatccaacgtaccgctgaactgctgctggaagttaaccttggcgcaacagcaatcggtactggtctgaacacgccgaaagagtactctccgctggcagtgaaaaaactggctgaagtcactggcttcccatgcgtaccggctgaagacctgatcgaagcgacctccgactgcggcgcttatgttatggttcacggcgcgctgaaacgcctggctgtgaagatgtccaaaatctgtaacgacctgcgcttgctctcttctggtccacgtgccggcctgaacgagatcaacctgccggaactgcaggcaggctcttccatcatgccagctaaagtaaacccggttgttccggaagtggttaaccaggtctgcttcaaagtcatcggtaacgacaccactgttaccatggcagctgaagcaggtcagctgcagttgaacgttatggagccagtcattggccaggccatgttcgaatccgttcacattctgaccaacgcttgctacaacctgctggaaaaatgcattaacggcatcactgctaacaaagaagtgtgcgaaggttacgtttacaactctatcggtatcgttacttacctgaacccgttcatcggtcaccacaacggtgacatcgtgggtaaaatctgtgccgaaaccggtaagagtgtacgtgaagtcgttctggaacgcggtctgttgactgaagcggaacttgacgatattttctccgtacagaatctgatgcacccggcttacaaagcaaaacgctatactgatgaaagcgaacagtaa

SEQ ID NO: 2202 - DNA, 477 bp, Escherichia coli
ttgcgctggttaccttttattgccattttcctttatgtctatattgagatttcaatctttattcaggttgctcatgtattgggggtattgctgaccctcgtgctggttatattcacgtcagttatcggtatgtcactggtacgcaaccagggctttaagaatttcgtgctgatgcagcaaaaaatggcggcgggtgaaaacccagcggcggagatgattaaaagtgtttcgctgatcattgccggtttgctgcttttattaccgggctttttcaccgacttcctcggtcttctgcttttattgccgccggtgcaaaagcatctgacagtgaagttgatgcctcatctgcgtttttcccgtatgccaggcggcggttttagcgccgggaccggtagcggtaatacttttgatggtgagtaccagcgaaaggatgatgaccgcgaccgccttgatcataaagacgatcgccaggattaa

SEQ ID NO: 2203 - DNA, 1257 bp, Escherichia coli
atgagtggactcaaacaagaactggggctggcccagggcatcggcctgctatcgacgtcattattaggcactggcgtgtttgccgttcctgcgttagctgcgctagtagcaggcaataacagcctgtgggcgtggcccgttttgattatcttagtgttcccgattgcgattgtgtttgcgattctgggtcgccactatcccagcgcaggcggcgtcgcacacttcgtcggtatggcgtttggttcgcggcttgagcgagtcaccggctggttgtttttatcggtcattcccgtgggtttgcctgccgcgctacaaattgctgccggattcggccaggcaatgtttggctggcatagcgagcaactgttgttggcagaactcggtacgctggcgctggtgtggtatatcggtactcgcggtgccagttccagtgctaatctacaaacagttattgccggacttatcgtcgcactgattgtcgctatctggtgggcgggcgatatcaaacctgcgaatatccccttccctgcgccaggaaatatcgaacttaccgggttattcgctgcgttatcagtgatgttctggtgttttgtcggtctggaagcatttgcccatcttgcctcggaatttaaaaatccagagcgtgattttcctcgtgctttgatgattggcctgctgctggcaggattagtctattggggctgtacggtagtcgtcttacacttcgacgcctatggtgaacaaatggcggcggcagcatcgcttcccaaaattgtagtgcagttgttcggtgtaggagcgttatggattgcctgcgtaattggctatctggcctgctttgccagtctcaacatttatatacagagcttcgcccgcctggtctggtcgcaggcgcaacataatcctgaccactacctggcacgcctctcttctcgccatattccgaataatgccctcaatgcggtgctcggctgctgcgtggtgagcacgttggtgattcatgctttagagatcaatctggacgctcttattatttatgccaatggcatctttattatgatttatctgttatgcatgctggcaggctgtaaattattgcaaggacgttatcgactactggcagtggttggcgggctattatgcgttctgttactggcaatggtcggctggaaaagtctctacgcgctgatcatgctggcggggttatggctgtttctgccaaaacgaaaaacgccgggaaatggcataaccacataa

SEQ ID NO: 2204 - DNA, 294 bp, Escherichia coli
atgaatattcgtccattgcatgatcgcgtgatcgtcaagcgtaaagaagttgaaactaaatctgctggcggcatcgttctgaccggctctgcagcggctaaatccacccgcggcgaagtgctggctgtcggcaatggccgtatccttgaaaatggcgaagtgaagccgctggatgtgaaagttggcgacatcgttattttcaacgatggctacggtgtgaaatctgagaagatcgacaatgaagaagtgttgatcatgtccgaaagcgacattctggcaattgttgaagcgtaa

SEQ ID NO: 2205 - DNA, 1647 bp, Escherichia coli
atggcagctaaagacgtaaaattcggtaacgacgctcgtgtgaaaatgctgcgcggcgtaaacgtactggcagatgcagtgaaagttaccctcggtccgaaaggccgtaacgtagttctggataaatctttcggtgcaccgaccatcaccaaagatggtgtttccgttgctcgtgaaatcgaactggaagacaagttcgaaaacatgggtgcgcagatggtgaaagaagttgcctctaaagcgaacgacgctgcaggcgacggtaccaccactgcaaccgtactggctcaggctatcatcactgagggtctgaaagctgttgctgcgggcatgaacccgatggacctgaaacgtggtatcgacaaagcagttaccgctgcagttgaagaactgaaagcgctgtccgtaccgtgctctgactctaaagcgattgctcaggttggtaccatctctgctaactccgacgaaaccgtaggtaaactgatcgctgaagcgatggacaaagtcggtaaagaaggcgttatcaccgttgaagacggtaccggtctgcaggacgaactggacgtggttgaaggtatgcagttcgaccgtggctacctgtctccttacttcatcaacaagccggaaactggcgcagtagaactggaaagcccgttcatcctgttggctgacaagaaaatctccaacatccgcgaaatgctgccggttctggaagctgttgccaaagcaggtaaaccgctgctgatcatcgctgaagatgttgaaggcgaagcactggcaactctggttgttaacaccatgcgtggcatcgtgaaagttgctgcggttaaagctccgggcttcggcgatcgtcgtaaagctatgctgcaggatatcgcaaccctgactggcggtaccgtaatctctgaagagatcggtatggagctggaaaaagcaaccctggaagacctgggtcaggctaaacgtgttgtgatcaacaaagacaccaccaccatcatcgatggcgtgggtgaagaagctgcaatccagggccgtgttgctcagatccgtcagcagattgaagaagcaacttctgactacgaccgtgaaaaactgcaggagcgcgtagcgaaactggcaggcggcgttgcagttatcaaagttggtgctgctaccgaagttgaaatgaaagagaaaaaagcacgcgttgaagacgccctgcacgcgacccgtgctgcggtagaagaaggcgtggttgctggtggtggtgttgcgctgatccgcgtagcgtctaaactggctgacctgcgtggtcagaacgaagaccagaacgtgggtatcaaagttgcactgcgtgcaatggaagctccgctgcgtcagatcgtcctgaactgcggcgaagaaccgtctgttgttgctaacaccgttaaaggcggcgacggcaactacggttacaacgcagcaactgaagaatacggcaacatgatcgatatgggtatcctggatccaaccaaagtaacccgttctgctctgcagtacgcggcttctgtggctggcctgatgatcaccaccgagtgcatggttaccgacctgccgaaaaacgatgcagctgacttaggcgctgctggcggtatgggcggcatgggtggcatgggcggcatgatgtaa

SEQ ID NO: 2206 - DNA, 354 bp, Escherichia coli
atgcacgtaaaatacttagcagggattgtcggtgccgcgctactgatggcgggttgtagctccagcaacgaattgagtgctgccggtcagagtgtacgcattgtggacgagcaaccaggtgcagagtgccagctgattggtactgcgacaggtaagcaaagcaactggctttccgggcaacacggagaagaaggcggttctatgcgcggcgcagcaaacgatctgcgcaaccaggcggctgcaatgggcggtaacgtgatttatggcatcagcagcccgtcgcagggaatgttgtccagttttgtcccgacggatagccagattatcggtcaggtttataagtgcccgaactga

SEQ ID NO: 2207 - DNA, 870 bp, Escherichia coli
atggccataagcatcaagggtgttaataccggtgttattcgcaagagtaataatttcattgcactggcgctgaaaattaaagagcctcgcaataaagaatcgttgttctttctgtctgtcatggaactgcgcgaccttctgattgcgctggaaagtcgtctgcatcaaaagcataaactggatgctgctgcacgccttcagtatgaacaagctcgcgataaagtcattaagaaaatggcagaaaatatcccagaaattctggttgatgagcttaaaaatgccgatattaatcgtcgggttaacacgctggaacttaccgatgatcagggcgaaaatcttaccttcgtattaacgctacatgacggtagcaaatgcgagttagtcgtcaatgagttgcagattgaaatgctggcgcgagcaatcattcatacaattaataatgcggaaatgcgtgaactggcattacgtattacctcactgttagatttcctgccgttatatgatgtcgactgccaggatgatggtaatctggaatatgacacctattcccaaccggaatggaaacataacttgttcaaccattatctggcggtgctttaccgctttaaagatgaaagtggcaatgaacaatttagcggcgcagtggtgaaaacgcgtgaagcaacgccgggtaaagaagtggaggcgatcactcgccgaatgcttgatttcagcccccgactgaaaaaactcgcgggtgtgccatgtcaggtctatgttcgcaccgtagcggcaaataacgcccaaccgctaacccaggatcaatgcttacgcgcgctgcatcacttacgtgttcaatccaccagcaaaactgcaccacaggcgaaataa

SEQ ID NO: 2208 - DNA, 1029 bp, Escherichia coli
atggcgcatattgtaaccctaaataccccatccagagaagattggttaacgcaacttgccgatgttgtgaccgatcctgatgaacttctgcgtcttttaaatatagacgcggacgaaaaactgttggccggacgcagcgccaaaaagctttttgccctgcgtgtgccccgctcatttatcgatcgcatggagaaaggcaatccggacgatcctcttttgcgtcaggtacttacctcgcaagatgagtttgtcgtcgcgcccggattctccaccgacccactggaagaacagcacagcatagtgcctggtttgttgcataaatatcacaaccgggcgcttttgctggtcaaaggcggctgcgcggtaaattgccgctattgcttccgtcgccacttcccctatgccgaaaatcagggcaacaagcgtaactggcaaactgcacttgagtatgttgctgcgcatccggaactggatgagatgattttctccggcggcgatccgctgatggcgaaagatcacgagctggactggttgctcacacaactggaagccatcccgcatatcaaacgtctgcggattcacagccgtctgccgattgtgatcccggcacgcatcacagatgcgctggttgaacgcttttcacattctacgctgcaaatcttgctggtgaatcacatcaaccatgccaatgagatagatgaaacattccgtcaggcgatggctaagttgcgccgggtaggcgttactttgctcaaccagagcgttctgttacgtgatgtgaacgataacgcacaaacgctggcaaacctgagtaatgcgttgttcgatgcgggcgtgatgccgtattacctgcatgtgctcgataaagtacagggcgcggcgcattttatggtgagtgatgacgaagcacggcagattatgcgtgagttgctgacactggtgtcgggatatctggtgcctaaactggcgcgagaaattggcggcgaacccagcaaaacgccgctggatctccagctacgccagcagtaa

SEQ ID NO: 2209 - DNA, 567 bp, Escherichia coli
atggcaacgtactatagcaacgattttcgtgctggtcttaaaatcatgttagacggcgaaccttacgcggttgaagcgagtgaattcgtaaaaccgggtaaaggccaggcatttgctcgcgttaaactgcgtcgtctgctgaccggtactcgcgtagaaaaaaccttcaaatctactgattccgctgaaggcgctgatgttgtcgatatgaacctgacttacctgtacaacgacggtgagttctggcacttcatgaacaacgaaactttcgagcagctgtctgctgacgcaaaagcaattggcgacaacgcgaaatggctgcttgatcaggcagagtgtatcgtaactctgtggaatggtcagccgatctccgttactccgccgaacttcgttgaactggaaatcgttgataccgatccgggcctgaaaggtgataccgcaggtactggcggcaaaccagctaccctgtctactggcgctgtggttaaagttccgctgttcgtgcagatcggcgaagtcatcaaagtggatacccgctctggtgaatacgtctctcgcgtgaagtaa

SEQ ID NO: 2210 - DNA, 126 bp, Escherichia coli
atgatgaaacgccttatcgttcttgttttgcttgccagcgcgctgctcacgggctgtaacaccgctcgcggtttcggcgaagatatcaaacatctcggcaactccatctcccgcgctgccagctaa

SEQ ID NO: 2211 - DNA, 147 bp, Escherichia coli
atggtgaagaagacaattgcagcgatcttttctgttctggtgctttcaacagtattaactgcctgcaacaccacgcgtggcgttggtgaagacatttctgatggcggtaacgcgatttctggcgcagcaacgaaagcgcagcaataa

SEQ ID NO: 2212 - DNA, 318 bp, Escherichia coli
atgtcctggattatcttagttattgctggtctgctggaagtggtatgggccgttggcctgaaatatactcacggctttagtcgtttgacgccaagtgttattaccgtgacggcgatgattgtcagtctggcgctacttgcctgggcgatgaaatcgttaccagtagggacggcttatgccgtgtggacgggtattggcgcagtcggcgcggccatcaccggcattgtgctgctcggtgagtccgctaacccgatgcgcctggcgagtctggcgttaatcgtattggggattattggtctgaaactcagcactcattaa

SEQ ID NO: 2213 - DNA, 534 bp, Escherichia coli
atgcgcctgctccctctcgttgccgcagcgacagctgcatttctggtcgttgcctgcagttctcctacgccgccgcgtggcgtgaccgtagtgaataatttcgacgctaaacgctatctcggcacctggtatgagattgcccgttttgatcaccgctttgaacgtggactggaaaaagtcaccgcaacatacagcctgcgtgatgacggcggcctgaatgtcattaataaaggctataaccctgacagagaaatgtggcagcagagtgaagggaaagcgtactttaccggcgcaccaactcgtgctgcgctgaaagtgtcattctttggtcctttctatggcggttataacgttattgcactcgatcgggaataccgccatgcgctggtttgcggcccggaccgcgactacctgtggatactctcccgcacgccaaccatttctgacgaagtgaaacaggagatgctggcagtcgcgacccgggaagggtttgatgtcagtaagtttatttgggtacagcagcccggtagttaa

SEQ ID NO: 2214 - DNA, 1134 bp, Escherichia coli
atgctcaaaacgacgctctgcaccttattaattaccgcctcttgctccacatttgccgcccctcaacaaatcaacgatattgtgcatcgcacaattaccccgcttatagagcaacaaaagatccccggtatggcggtggcggtaatttatcagggtaaaccttattactttacctggggctatgcggacatcgccaaaaagcagcccgtcacacagcaaacgttgtttgagttaggttcggtcagcaaaacatttacgggcgtgcttggtggcgacgctattgctcgaggggaaatcaagttaagcgatcccacaacaaaatactggcctgaacttaccgctaaacagtggaatgggatcacactattacatctcgcaacctacaccgctggcggcctgccattgcaggtgccggatgaggtgaaatcctcaagcgacttgctgcgcttctatcaaaactggcagcctgcatgggctccaggaacacaacgtctgtatgccaactccagtatcggtttgttcggcgcactggctgtgaagccgtctggtttgagttttgagcaggcgatgaaaactcgtgtcttccagccactcaaactcaatcatacgtggattaatgtaccgtccgcagaagaaaagaactacgcctggggatatcgcgaaggtaaggcagtacatgtttcgccaggggcgttagatgctgaagcttatggtgtgaagtcgaccattgaagatatggcccgctgggtgcaaagcaatttaaaaccccttgatatcaatgagaaaacacttcaacaagggatacaactggcacaatctcgctactggcaaaccggcgatatgtatcagggtctgggctgggaaatgctggactggccggtaaatcctgacatcatcattaacggcagtgacaataaaattgcactggcagcacgccccgtaaaaccgattacgcccccaactcctgcagtacgcgcatcatgggtacataaaacgggggcgaccggcggatttggtagctatgtcgcgtttattccagaaaaagagctgggtatcgtgatgctggctaacaaaaactaccccaatccagcgagagtcgccgccgcctggcagattctcaacgctctacagtaa

SEQ ID NO: 2215 - DNA, 360 bp, Escherichia coli
atgattaatccaaatccaaagcgttctgatgaaccggtattctggggcctcttcggggccggtggtatgtggagcgccatcattgcgccggtgatgatcctgctggttggtattctgctgccgctagggctgtttccgggtgatgcgctgagctacgagcgcgttctggcgttcgcgcagagcttcattggtcgcgtattcctgttcctgatgatcgttctgccgctgtggtgtggtttacaccgtatgcaccacgcgatgcacgatctgaaaatccacgtacctgcgggtaaatgggttttctacggtctggctgctatcctgacagttgtcacgctgattggtgtcgttacaatctaa

SEQ ID NO: 2216 - DNA, 396 bp, Escherichia coli
atgacgactaaacgtaaaccgtatgtacggccaatgacgtccacctggtggaaaaaattgccgttttatcgcttttacatgctgcgcgaaggcacggcggttccggctgtgtggttcagcattgaactgattttcgggctgtttgccctgaaaaatggcccggaagcctgggcgggattcgtcgactttttacaaaacccggttatcgtgatcattaacctgatcactctggcggcagccctgctgcacaccaaaacctggtttgagctggcaccaaaagcggccaatatcattgtaaaagacgaaaaaatgggaccagagccaattatcaaaagtctctgggcggtaactgtggttgccaccatcgtaatcctgtttgttgccctgtactggtaa

SEQ ID NO: 2217 - DNA, 735 bp, Escherichia coli
atggctgagatgaaaaacctgaaaattgaggtggtgcgctataacccggaagtcgataccgcaccgcatagcgcattctatgaagtgccttatgacgcaactacctcattactggatgcgctgggctacatcaaagacaacctggcaccggacctgagctaccgctggtcctgccgtatggcgatttgtggctcctgcggcatgatggttaacaacgtgccaaaactggcatgtaaaaccttcctgcgtgattacaccgacggtatgaaggttgaagcgttagctaacttcccgattgaacgcgatctggtggtcgatatgactcacttcatcgaaagtctggaagcgatcaaaccgtacatcatcggcaactcccgcaccgcggatcagggtactaacatccagaccccggcgcagatggcgaagtatcaccagttctccggttgcatcaactgtggtctgtgctacgccgcgtgcccgcagtttggcctgaacccagagttcatcggtccggctgccattacgctggcgcatcgttataacgaagatagccgcgaccacggtaagaaggagcgtatggcgcagttgaacagccagaacggcgtatggagctgtactttcgtgggctactgctccgaagtctgcccgaaacacgtcgatccggctgcggccattcagcagggcaaagtagaaagttcgaaagactttcttatcgcgaccctgaaaccacgctaa

SEQ ID NO: 2218 - DNA, 1809 bp, Escherichia coli
gtgcaaacctttcaagccgatcttgccattgtaggcgccggtggcgcgggattacgtgctgcaattgctgccgcgcaggcaaatccaaatgcaaaaatcgcactaatctcaaaagtatacccgatgcgtagccataccgttgctgcagaagggggctccgccgctgtcgcgcaggatcatgacagcttcgaatatcactttcacgatacagtagcgggtggcgactggttgtgtgagcaggatgtcgtggattatttcgtccaccactgcccaaccgaaatgacccaactggaactgtgggggtgcccatggagccgtcgcccggatggtagcgtcaacgtacgtcgcttcggcggcatgaaaatcgagcgcacctggttcgccgccgataagaccggcttccatatgctgcacacgctgttccagacctctctgcaattcccgcagatccagcgttttgacgaacatttcgtgctggatattctggttgatgatggtcatgttcgcggcctggtagcaatgaacatgatggaaggcacgctggtgcagatccgtgctaacgcggtcgttatggctaccggcggtgcgggtcgcgtttatcgttacaacaccaacggcggcatcgttaccggtgacggtatgggtatggcgctaagccacggcgttccgctgcgtgacatggaattcgttcagtatcacccaaccggtctaccaggttccggtatcctgatgaccgaaggctgccgcggtgaaggtggtattctggtcaacaaaaatggctaccgttatctgcaagattacggcatgggcccggaaactccgctgggcgagccgaaaaacaaatatatggaactgggtccacgcgacaaagtttctcaggccttctggcacgaatggcgtaaaggcaacaccatctccacgccacgtggcgatgtggtttacctcgacctgcgtcacctcggcgagaaaaaactgcatgaacgtctgccgttcatctgcgaactggcgaaagcgtacgttggcgtcgatccggttaaagaaccgattccggtacgtccgaccgcacactacaccatgggcggtatcgaaaccgatcagaactgtgaaacccgcattaaaggtctgttcgccgtgggtgaatgttcctctgttggtctgcacggtgcgaaccgtctgggctccaactcgctggcggaactggtggtcttcggtcgtctggccggtgaacaagcgacagagcgtgcagcaactgccggtaatggcaacgaagcggcaattgaagcgcaggcagctggcgttgaacaacgtctgaaagatctggttaaccaggatggcggcgaaaactgggctaagatccgcgacgaaatgggcatggcaatggaagaaggttgcggtatctaccgtacgccggaactgatgcagaaaaccatcgacaagctggcagagctgcaggaacgcttcaagcgcgtgcgcatcaccgacacttccagcgtgttcaacaccgacctgctctacaccattgagctgggccacggtctgaacgttgctgaatgtatggcgcactccgcaatggcacgtaaagagtcccgcggcgcgcaccagcgtctggacgaaggttgcaccgagcgtgacgacgtcaacttcctcaaacacaccctcgccttccgcgatgctgatggcacgactcgcctggagtacagcgacgtgaagattactacgctgccgccagctaaacgtgtttacggtggcgaagcggatgcagccgataaggcggaagcagccaataagaaggagaaggcgaatggctga

SEQ ID NO: 2219 - DNA, 978 bp, Escherichia coli
atgagcgaaacggcatcctggcagccgagcgcatccattcctaacttattaaaacgcgcggcgattatggcggagatccgtcgtttctttgccgatcgtggagtgctggaggtggagacgccttgtatgagccaggcgacggtaaccgatattcatttggtcccgtttgagacacgtttcgttggccccgggcattcgcaggggatgaatctctggttaatgaccagcccggaataccatatgaagcgcctgctggttgccggttgtgggccggtattccagctgtgccgcagcttccgtaatgaagagatggggcgttatcacaaccctgagttcactatgcttgagtggtatcgaccgcactatgatatgtaccggttgatgaacgaggtggacgatctcttgcaacaggtgctggactgtccggcagcagaaagcctttcttatcaacaagctttcttacgttatctggaaattgacccactctctgccgacaaaacgcaactgcgggaagtggcagcgaaactggatttgagcaacgttgccgatactgaagaagaccgcgacacgcttctacaattgctgtttacctttggcgtagagccaaatattggcaaagaaaaaccgacctttgtgtaccactttccagccagccaggcatcactggcgcaaatcagtaccgaagatcatcgggtcgctgaacgctttgaggtttattataaaggtattgagctggcgaatggtttccatgaattgacggatgcccgtgagcagcaacaacgctttgaacaagataaccgtaagcgcgcggcgcgcggtttgccgcagcaccccattgaccagaatctgattgaagccttgaaagtcggtatgcctgactgttccggcgtggcattaggtgttgatcgtctggtgatgttggcgctgggcgcggagacactggctgaagtcatcgcctttagcgttgaccgggcataa

SEQ ID NO: 2220 - DNA, 1458 bp, Escherichia coli
atgatctttacttctgtatttggatttgccaatagcccatcggcttattacttaatgggttatagtgcgattcccttttatatattttctgcattgttattctttattccattcgccttaatgatggctgaaatgggagctgcttatcgcaaagaagaaggcggtatctattcctggatgaataatagtgtcggaccacgttttgccttcattggtacgtttatgtggttttcctcttatatcatctggatggtgagtacctccgcgaaagtttgggtaccgttctcaacattcctctacggtagcgacatgacccagcactggcatattgccggactggagcctacgcaggtggttggtctgctggcagtggcatggatgattctggtcaccgtcgttgcttcaaaagggattaataaaattgcccgcattactgcggtgggcggtattgcagtaatgtgtctgaatttagtattgctgttagtaagcattactattttgttattaaatggtgggcatttcgcgcaggatattaatttccttgcatcaccgaacccaggttatcagtccggtctggcaatgctatcgtttgtggtatttgccatttttgcctatggcggaattgaagcggttggtggtctggttgataaaacggaaaatccagaaaagaactttgccaaaggtattgtttttgccgctattgttatttcaatcggttattcgctggcaatatttttatggggcgtcagcacaaactggcagcaggtattaagtaatggttccgttaacctcggcaatattacctatgtgctgatgaagagcctcggggtgacgctgggtaacgcactgcatttttcacctgaagcgtcattgtcgctgggcgtatggtttgcgcgtattaccggactttcgatgttcctcgcttataccggggcgttctttacgctttgctattcaccgctgaaagccatcatccaggggacgccgaaagcattgtggccggaaccgatgacgcgcctgaatgcgatggggatgccgtctatcgccatgtggatgcagtgtgggttggttactgtcttcatcctgctggtttcgtttggtggcggtaccgcatcggcgttctttaacaagctgacgctgatggcgaacgtgtctatgacgcttccttacctgttcctcgcgctggctttcccgttctttaaagcacgtcaggatctcgacagaccgtttgtgattttcaaaacgcatttgtcggcaatgattgcgacggtggttgtcgtactggtggtgacatttgcgaacgtcttcaccatcattcaacctgtggttgaagctggagactgggacagctcattgtggatgattggcggccctgtcttcttctcgctgttagcgatggcgatttaccagaactattgcagtcgcatggcgaacaaacctgagttagctctcgactga

SEQ ID NO: 2221 - DNA, 3324 bp, Escherichia coli
gtgcgcctgattatcacttttctgatggcctggtgcctcagttggggggcgtacgccgcgacggcccccgatagcaaacaaatcacccaggaactggagcaggcaaaagcggcgaaacccgcgcagccggaagtcgtagaggcgctccagtctgccttaaatgcgcttgaggaacgaaaaggttcccttgagcgcatcaagcaatatcaagaagtcattgataattatccgaaaatttccgccactctgcgcgcgcagttaaacaacatgcgtgacgagccacgcagcgtgtcgccgggaatgtctaacgatgcgctgaatcaggaaattctccagatcagcagtcagttgctggataaaagccgtcaggcccagcaagagcaggagcgcgcccgcgagattgccgattcgctgaatcaactgccgcaacagcaaaccgatgcccgccgtcagttgaatgaaatcgagcgccgcctggggacgcttaccggcaataccccgctcaatcaggcacaaaatttcgcgttgcagtctgactccgcacgtctgaaagcgctcgttgatgaactggagctggcgcagctatctgccaataaccgccaggaattagcgcgcttgcgctctgagctggcggaaaaagagagccagcagctggatgcatatttgcaagcactacgcaaccagttgaatagtcaacgccaactggaagcggaacgggcgctggaaagtaccgagcaactggcggaaagtagcgccgatttgccaaaagatatcgtcgcccagtttaaaattaaccgcgaactatcggcggcgctgaatcaacaggcgcagcggatggatctcgttgcctcgcaacagcgtcaggctgccagccagacgttacaggtccggcaggcgttgaatacgctgcgtgaacagtcgcaatggctgggatcatctaacctgctcggcgaagcgttgcgggcgcaggtggcacggctaccggaaatgccaaaaccacaacagcttgataccgaaatggcgcagttacgtgtgcaacggttacgttatgaggatctgcttaataaacagccgctgctacggcaaatccatcaggccgacggtcagccactgaccgctgagcaaaaccgtattctggaagcacagctacgcactcagcgtgagttgctgaactcattgttgcagggtggcgacacgctactgctggagctgaccaagctgaaagtctccaacgggcaactggaggatgcgctgaaagaggtgaacgaagcgacgcaccgctatctgttctggacctctgacgtgcgcccgatgaccatcgcctggccgctggaaatcgcccaggatctgcgtcgtctcatttcgctggacaccttcagtcagttgggcaaagccagtgtgatgatgctgaccagtaaagagacgattttgccgctgtttggcgcgttgattctggtcggttgcagtatttactcgcgccgctatttcacccgttttcttgaacgttcggcggcgaaagtcggcaaagtgactcaggatcacttctggctgacgttacgcactcttttctggtcgattctcgtcgcgtcaccgctgcctgtgctgtggatgacgctgggttacggcttgcgcgaggcgtggccttatccgctggcggtcgcgattggtgatggcgtaacagccaccgtgccgctgctgtgggtagtgatgatttgcgccacctttgctcgcccgaacggcttgtttatcgctcattttggctggccgcgcgaacgagtttcccgtgggatgcgttactacctgatgagcatcgggctcattgtgccgctgattatggcgctgatgatgttcgataacctcgacgaccgcgaattttccggttcgctgggacggctttgctttatcctcatttgcggtgcgctggcggtggtcaccctcagcctgaaaaaggccgggatcccgctgtatctcaacaaagaaggcagcggcgacaacattaccaaccatatgctgtggaacatgatgattggcgcaccgctggttgccattctggcgtcggcggtgggttatctggcaacggcgcaggcactgttagcgaggcttgaaacctcggttgccatctggttcctgctactggtggtttatcacgttatccgccgctggatgctgatccagcgccgcaggctggcgtttgaccgggcgaagcatcgccgggcagagatgttagcgcagcgtgcgcgtggcgaagaggaagcgcatcatcacagtagcccggaaggagcaattgaagtcgatgaaagcgaagtcgatctcgatgccatcagtgcgcaatccttgcggctggtgcgctcaattttgatgttgatcgccctgctttcggtcattgtgctgtggtcagaaatccattccgctttcggcttcctcgaaaatatttcgctgtgggatgtcacttccacggtacagggcgtagaaagcctggagccgattaccctcggtgcggtactgattgccattctggtgtttatcatcaccacgcagctggtgcgcaacctgcccgcgctgctggaactggcgattctgcagcacctggatttaacgccgggtacgggctacgccatcaccaccatcaccaaatatctgctgatgctgattggcgggctggtcggcttctcgatgattggtattgagtggtcgaaattgcagtggctggtcgccgcgctcggtgttggtctgggctttggtttacaggagattttcgccaactttatctctggcctgattatcctgttcgaaaaaccgattcgtattggcgatacggtaacgatccgcgatctcaccggtagcgtgacaaaaattaacacccgcgccaccaccatcagcgactgggaccgtaaagagataatcgtgccgaacaaggcgtttattaccgagcagtttatcaactggtcgctctctgactcggtcacgcgcgtggtattgacgattccggcccctgccgatgctaacagtgaagaagtgacggaaatcctgctcaccgcagcgcgtcgctgctcgctggtgatcgacaacccggcgccggaagtcttcctggtggatctgcaacaggggattcaaattttcgagctgcgtatttacgccgctgagatgggtcaccgtatgccgctacgccatgagatccaccaactaattctggcgggcttccacgcccacggtatcgatatgccattcccgcccttccagatgcgtctggaaagcctgaatggtaaacaaacggggagaacattaacttctgcgggcaaaggtcgtcaggcgggaagtttgtaa

SEQ ID NO: 2222 - DNA, 969 bp, Escherichia coli
ttgttaaattcatttaaactttcgctacagtacattctgccgaaactatggcttactcgcctggcgggttggggcgcaagcaagcgggcaggatggctgacaaaactggttatcgatctgttcgttaaatactacaaggtcgacatgaaagaggcgcaaaagccggacaccgccagctaccgcacctttaacgaattctttgtccgtccgctgcgtgacgaagtacgcccaatcgataccgatccgaatgtactggttatgcctgccgatggcgttatcagccagttgggtaaaatcgaagaagataaaatcctgcaagccaaaggccacaactacagcctcgaagccctgctggcaggcaactatctgatggcggatctcttccgtaacggtacgtttgtgaccacttacctctccccacgtgactaccaccgcgtacacatgccgtgcaacggtattctgcgtgaaatgatctacgtgccgggcgatctcttctccgttaaccatctcacggctcagaacgtgccgaatctgtttgcccgtaacgaacgcgtgatctgcctgttcgataccgaatttggcccgatggcgcagattctggtcggtgcgacgattgtaggcagcattgagacggtctgggcgggcaccattacgccgccgcgcgaaggcatcatcaagcgctggacctggcctgccggggaaaacgacggttctgtggcattgctgaaaggccaggaaatgggtcgctttaaacttggctctaccgttatcaacctgtttgcaccaggtaaagtgaacctggttgagcaactggaaagcctgtctgtcacgaaaattggccagccgctggcagtatctaccgaaacctttgttacgccagacgctgaaccagccccgcttcctgctgaagagatcgaagcagaacacgacgccagcccattggttgacgacaaaaaagaccaggtctaa

SEQ ID NO: 2223 - DNA, 1053 bp, Escherichia coli
ttgagtaaaaataaactctccaaaggccagcagcgccgcgtgaacgccaatcaccagcgtcgtcttaaaacgtctaaggagaagcccgactacgacgacaatctgtttggcgagcctgatgaaggtatcgtcatcagccgctttggtatgcacgctgatgtggaatccgccgatggcgacgttcaccgctgcaatattcgccgtaccatccgttcgttggtgaccggcgaccgcgtagtctggcgtccgggtaaaccagcggcggaaggcgtaaatgtcaaagggatcgtcgaagcggtgcatgagcgcacctcagtgttgacgcgcccggatttttacgacggtgtgaaacctattgctgccaacatcgaccagattgtcattgtctccgccattttgccggagctgtcgctcaatattatcgaccgttacctggtggcctgcgaaaccttgcagattgagccgattattgtgctcaacaagatagacctgctggacgacgaaggcatggagttcgtcaacgagcagatggatatctaccgcaatatcggttatcgcgtattgatggtttccagtcatactcaggatgggctgaaaccgctggaagaggcgttgaccgggcgcatcagcatttttgccgggcagtctggcgttggcaaatccagcctgctgaacgcgttgctggggctgcaaaaagagatcctgaccaacgatgtctctgacaactcggggcttggtcagcacaccacgaccgccgcacgactgtatcacttcccgcacggcggtgatgtgattgattccccaggtgtgcgtgagtttggtctctggcacctggagccggaacaaatcactcagggctttgtcgaattccatgactatttaggtctgtgtaaatatcgcgattgcaaacacgataccgatccgggctgcgctatccgggaagcggttgaggaagggaaaatcgcggaaacccgtttcgaaaactatcaccgtattctggaaagcatggcgcaggtaaaaacgcgtaaaaacttttctgatacggatgactga

SEQ ID NO: 2224 - DNA, 546 bp, Escherichia coli
atgagtgccaatgaaaacaacctgatttggatcgatcttgagatgaccggtctggatcccgagcgcgatcgcattattgagattgccacgctggtgaccgatgccaacctgaatattctggcagaagggccgaccattgcagtacatcagtccaatgaacagctggcgctgatggatgactggaacgtgcgcacccataccgccagcgggctggtagagcgtgtgaaagcgagcacgatgggcgatcgtgaagctgaactggcaacgctcgaattcttaaaacagtgggtgcctgcgggaaaatcgccgatttgtggtaacagcatcggtcaggaccgtcgcttcctgtttaaatacatgccggagctggaagcctacttccactaccgctatctcgatgttagcaccctgaaagagctggcgcgccgctggaagccggaaattcttgacggctttaccaagcaggggacgcatcaggcgatggatgatatccgtgaatcggtggcggagttggcttactaccgcgagcattttatcaagctgtaa

SEQ ID NO: 2225 - DNA, 165 bp, Escherichia coli
atgctaagttcctttttactgatgatgatggtctaccttatgccaacacaaaatatattgcatgtttttctgatggcactcaaaaagaaggtattactgatgagaatgggtatacagaaaattttaatactgattccaaacaaacaattgatgtcagattattga

SEQ ID NO: 2226 - DNA, 789 bp, Escherichia coli
atgagtaatgatagaggtagttcaagtggtgaaaatcagaaaactgaacaatgcatacaggaatttcaagttacgaatcaattcaagaaaatgatgaaggagtctctagaggaacaaaaaaaggtaattgataaaagggtaaaaacattaacgcactggagtgatgaagcagaagatgaattcaggagaatatttggcgtgccatctgaaaaaataataaccataaaatttaaactgaacggagaagtaacaaaagaaacaaaaagtgcgcgagcagttattcaagaagccgtggacagaatgaaatttatatgtgataaattatctgctgataaaggggagtgcaaagaagttacttttatagataaatatcttgatagtaatgataattactatgataaagatgttactaagtggaagtgtggcaattttgtaaattctacggacaatgatgcttatactgctaacgtcacccctgatcatattataggtgtttctccagacaaatatgtagatgtagtgacaataagaataggccagcggtttgtatgtaaaccaatgacaggaaaggattctaaagtttcatcactttgccatgaattaacacatttagtcagatatggccccaacggtatgtatggcggtatgcaatcagaggatatgcctgttgataaagagctccagaatgcgaaagagtatgacatctttgctgataaattaataaaaaataaggatatgatactctttgaaaatgcatataatattgaacgttattttgaaatagattaa

SEQ ID NO: 2227 - DNA, 933 bp, Escherichia coli
atgttcttaacaaatacatcgcgttttttatttttatttttatttttatttttatttcttatgcacaagaataaattatatgcatatgataatttctcattcaatgcggatgtacattatggttatggtaagctattatggcatgataaaaaaccagtcatatacccattggcatccttatctgattatacttattataacgaattcgacccatttgaaacgatttattatgtggggcaatactataaaattagcttaaatgagagtaagcgaattcaagaacaaaaggacatttacgcacatcttcaattaaaacataataaatcattaattacagcaaatgtaacgttacataataaaagtaatagttcgtattatgttcatcggatgaatttaccagcaagcatccatgaatcaccttactctcctttgtgcagtggttcttttttaatcgtaacaaataacatacggttagattatataagaaaaattacatgccgatttgatttgtggatgaaaaaatctgactggatagaaatatcacccggagaaaaactctcatacacagtaaatttgaatgactattatgcttttctccctgcaaagcatcaatatgatataggaactgtagagttcacattggtaaatagtaattggttcttagaacagcatatttatgatcttttttttgctattgtggatgaaagacactataagcagtgtaaaaacacttctggcattgttaggaagtatatctataagtcgtggcagttatgtgagacttatcgtgggaggtggagccctttacaggaactcatgaatcgatttcattatgaaggagggagtgaaaatatatttcaaataagaacaaatcaagaaaatataaacattaatggagataaaattaaatctctttattcatcgatgcagtga

SEQ ID NO: 2228 - DNA, 1215 bp, Escherichia coli
atgcctgtcagacttaacactattcctgatgctgaaccctatcccgcaccgccagcccacattaaatggttgtcagccttattactgatgctgtctgtgggcgtggccctgacttcattattcgccagcgatgaactggcaaaaaacggcccgcatttctgggggctggcctgcggtgtgcctgcctttatctggtcactggttgcttcagttcgctggctgttctttatcacgcagtacattcgggctgatgcctggaataagcgccgggaagaggtgattttgcaggaaacgcgacggggacgacgggcgttacagatacttagtttttccgtacaaaccgcgctgaatggtgattccgttgcagaaactacaacagcatttctggcgcgtcagcaggtgttgaatacttacgctgatttgcgcggagaagataccgtgcgtcgcagtgtcattcccgtattaaccaataaaccggttaccgggcgtttatccgaaattatttcccgccttttttttgatatcagaccgcaattgtttctgctgccccctgattttcatatcaacgtactactggaaattgatgcgccgctttcaggggcctccgtgagaactatctggcaggacgaatggcaaaaagccggactcccggaagcccgtctgttttctgccccggagccggggctggccgccgtggacgactggctggacaactttattcaggaaaaggccgtactgctggtgatttccgtgcgtctggaaccgaagaacccggaacggacggcagaatccgccaccgcgctgttgctggcaaaccggttgacgcaaaccgcgctgacgccgctggccctgctgcatcgtcctgaacgtatcacagatacagagatgatggcgtcaggcattgcacaggcgctggactggatgccggtgcagccagatgccatatccggtatgtggactgccgaactggacagggaacagcgtgccgcgttgttaagcctgaaccagccgtttgctcaggaagccctgatgtacgagctggatgcctttctggggcgctccggaccggctgcgccgtggctgtccgtcgctgcggcaacgctggcggcaatacaatcacaacacccccaactgacgctcagcggcgttcagggcgggcattattcatgggcgaccgtggtgtcgccattcgtttccccacaggaggcatcatag

SEQ ID NO: 2229 - DNA, 3384 bp, Escherichia coli
gtggttccgggattaaaccgtctccggccccgttcggtttcagggcctgccatcgtcatgaccgtggctgttgtggttgcgctttgcacgtttattcaccgtaaaccggcattgctgggcgttgaaccgggtagctcacagcaaatgtactggatggctggcgtgattgccgctggcgtggtctttctgattatcatgggggtttatcatctgctgaaccgccacgctgccgtacagagctttgaactccgcagacagcttgccgccggggatgactatcgggcggtgacgacaaagaaagccgacagacgtcatccggcaatggtggaactcgccgccttcctgcgcgaccgctacggcccgttctggcggcgtaaaatccgcctgctgctggtgaccggcgagcctgaacaggcagaggccatcgcgccggggctgaccgggcaacactggctggagggcgaccacacggtgctgatatatggcggcaggccatcagcggagcctgatgtcacactgctggccgccttaaaaaaactgcgccgcagccgtccgctggacggcatcatctggccactgacagaagaacagagccgtcagacagcgcaactcgacaaaggctggcgcgagctggtcaacggcagtaagcgactcggttttcaggccccactctatttgtggcaggtctgtgacaacggtgattatcagaccggacgccctctgcaaagcgtcggctgcctgctgccggaacgctgtaccccggaacaactggctgcaatgctggaagcacaaaccctgccactgacggaacagggcatgtcgcagctgctggccgataaccgccatgattttctgctgcgtctggcccatacccttgcagagcggggtatcgctcactggcaaagcgttctgaaaccgctgctggcaggcggcgcattttcctccctgcgtctgcgtggcctgatgttcagcccgccgcttgccgccgtaccggaggccgcacctcatgcgtggctgccgtcgccggtctgggcaggcatcaccggcgataacgcgcggggccgcgcggtgggctttccgtggctgcgtaccgcactgatgtccgctgtctgcgtgctggtgatatggggggccggaatgacgacctcgttcttcgccaaccgcgcgcttgttcaggaaaccggtatccagacggcacgtgcgcttgatacccgcctgccgctggcagaacaactggtggcgctgcataccctgcagggcgaactggagcgcctgcaatatcgtatccgcgaaggtgcgccgtggtatcagcgttttggtcttgaacgtaaccaacaactgctcgccgccgcctttcccggctatgcacaggcggcaaaccggctggtgcgcgacgtggccgttgaccatctgcaacagcaacttaatgcctttgtcgcgctgccgcccaacagtcctcagcgtaccgccaccggtgaacaacgctataagcagcttaaggcattgctgatgacttcccgcccggaaaaggccgacgctgcctttttcagtaccacgctgatggcggacggtctgcgctacgagaatatcccggaaggtgtgcggcagagcgtgttgccgtcactgctgaccttctggacggcgaacctgccggaacacccgcagtggaaaacatcgccgccaccggaactgaccggcgcagtgcgtaaaatcctgctgcgccagattggtgtgcgtaatgccgaaaacaccctctaccagaacgtgctgcaacaggtgtcccgcaactacgccgatatgacgctggcggacatgaccggggataccctcaccgaatctcttttcagtacggaacagacggtgccggggatgttcacccgtcaggcgtgggaaggacaggtcagggaagccatcgagcaggtggtgacggcgcggcgcgaggaaatcgactgggtactcagcgaccgccagcaggatacctctgcggatatctcgccggatacgctgcgtaaccgtctcacctcacgctactttaccgactttgccggaagctggctggcgtttctcaacagcattcactggaaaaaggaagactcgctctccggcattctcgaccagttgacactgatggccgatgcccgtcagtcgccactgattgcgctgacggacaccctcgcgtggcaggcggcggcaggcagggaaaaccgtggtctgtcagactcgctggcgaaatcggcacaggaactgtttaacggcaaggagaaaacgccgcagcaatcccgtgaaggtgacgtgcctgtcgggccgctggataaaaccttcgctccgctgctgcggttgctgggcgataaggccggaggcggcgacagccaactgagcctgcagacctacctcacccgcgtcacccgcgtacgcctcaaactgcaacaggtgaccaacgcccccgacccgcaggagatgacccagcaactggcgcagacggttttacagggcaaaaccgttgacctcaccgacacccgcgactacggacggttaatcgccgccagtctgggcgaggaatggagtggcttcggtcaggcgctgttcgtccgcccggtggaacagtcgtggcggcaggtgctgacgcctgcggcggacagcctgaaccgccagtggcagcgggcgattgtcagccactggaatcaggacttcgccggtcgctatccgttcaaagcctcacaaaacgatgcctctcttcccctgctggcgcagtatctgcgcgatgacgggcgcatcaaccagtttattgccgccaacctttccggcgtactgaaacgtgaaggccgctactgggtggctgacgccatgaacacgcagggactgacggtcaatccggactttatccgcgccctgaaccgcctgcgcgatgtggccgataccgcctttgccagcggcgatgccgggatacatttcgaactgcgggcaaaaccggcccgtgacgtgatgaaaacgcatctggtgattgacgggcaggaactggaatatttcaaccagaaagaacgctggcagcgttttaactggccggatgaacagtggcagcccggcgcatcgctgagctggaccagtacgcaggcgatggagcgcatactggcggattaccggagaagctggagccttattcgtctgctggaacaggcgcaggtgacaccggtggacagcagcacctttaaagtggtgtggaaagcgcaggacggcctgccgctgaattacctgctgcgggttgaacagggtaaagggccgctggcgctgctggaactgaaaaacttccgcctgccgggacaggtgtttctgacaggaaaaagtatgaaggatgtggaagagtatggggaagacgccgatgagtga

SEQ ID NO: 2230 - DNA, 1626 bp, Escherichia coli
atggggaagacgccgatgagtgagctgttgcaaaagctgacccgtagctgttttgccgaccgggatgcactggatgtggcgcgaacacaggcggcgctgtggcagacatggctgctgccggtgacagcagatacgccggtcggggaagaccccggctaccacgacgattttctgcgtatccgcgacgagatgaacaaactttccggcgcggataccgacctcatctgccagcttgcagaatccctgctgctgacgcaggcaaaagacgtgcgcatcgccacttactacatctgggcgcggctgcaccgcaatggcgaacgcggactggcggaaggactggcgctgctgaccggactggtggaacgctttggtacgcaactgctgccctcgcgcccggcaagccgaaaaatggcgctggagtggctggcgggggaaaagatgctcgacagccttgcccgctacccggaagtggcaaaagaggattttgcgaacattgttgccgctcttaatcaactgacggtttccttcgccgcatggcccgaggagcaacagtctccctccctgatgccgctgatcaacgcgctggaatcgcgtctggcgcagtcgggtgggatgaacgcggtggtgccgcaaaacagcagtagcgttcctgcaccgtcatccccggtggatgcgccacaggtacagaccatcacctccgggcgtgacctgctcgaccaggcgaaagtgctggcccgttatctgaacgaacagcctcaaggctggctttcggcgcaccggctaatgaaaaccctgcgctgggacacggtgcatgaattgccgccggacgtggacggcaaaacccggctggccccgccgcgcaccgaatcacgcaaccagcttaagcggctgtatgcccagcagaactggacggaactactggagcaggccgacctgatgttcagctccggcgtcagccatttctggctggatatccagtggtatctgcatcaggcgctggccaaggcgggcgcaccgtgggacagatggacagcggttatccgtcaggacctggcgctgctgctggagcgcctgccggggctggaaaatctggcatggaacgacggcacgccgttcgccgacgaggtgacgcgcaactggatagcgcagcaggtcatgatgcgggaagacggcgcatggcttgcggggaaagccgctgtaccgacagacgacgccacaaacgacgtactggcgctggagccggaagcactggagatggcggacggtcagggcgtggaagcggcactgggctggatacagacccgtccgggcatcaccacggcacgacagcgcctgttattgcggctgctgatggcacgggtggcggaacagtacggtaaaaacgagatggcgctcctgctgctggaagaactggatactgccgcacagggaataacgctgacgcagtgggagccggacctgctgttcgaggtaaaagcccgacagctgaaactgctgcgactgcgggcgcaccgctatgcggacaaggcaacgcttgcccggaaaatggacgctctgctgggttcgctggtggcaatcgatccggcgcgggcagcggtactgtgtgatacgcagcataaggactga

SEQ ID NO: 2231 - DNA, 1431 bp, Escherichia coli
atgagaagaggttattttctggtcaggggcgataagaccacctgcggcggcaaaattattgaaggggcggacgaccatacgatcatgggtattccgcaggcacgggatatggaccgggtcacctgcggcagatatccgggaatgtttattattgtgggtggcgttcctgaaacagatattcacggcaggctgatggcggggacgctggacagtcagagcagttgcccgtgtaaagcacggtttattgcgtcaatgatggatgatacctatgagacggatgacggggggaacgagccggaacaacatgcgcagtcggcgaaaaaggatctgacttctggttctgattcatcctctgatgatgtaaaactggattacagaattaaattatcaggtaataagatactgacgccactgaatatacctgattataaagaaatgattagcggtggtagtacgaagaatacagaaaaaatagattttaccatcacaaataaaggcgatgagactgaagcgctttctctggaagtgcttgatggtaatgaagtgatttatagtgaacggcagaccggtaaatattgtgataagggagagcatgcctggcaatgggatggttacagtaatcaaggcatactggatacaactaagataaaaagcaaatcactacttgtaagactgattgctttatgtggtgatatgatgataaaagttgattatccattgaaaacttctgcgaatgaggaagattggattgatgtaaaagtagacaagaatcaaaaaatagttgatgtcagttggcgagtagaatttgaagatgatggtgtgagtcataaagatgatcgtattgcacctgtagggtttgaaaaattaaagcaacttgccaaagatggaatggagtattattgggcacgaaatggaatgaggaatcccggaattggcaataatattactactccgcacggtaaatataatgtaaatatctctgtatcaataaatattgacccagccatggattcttttgatttaattgaggagcaagatctagaaagcgtcaggtctagtgcttttatgggacgtatgaacatttatttcaatagagggtattatgaatatggccgtgggtataagaaaggcgcagatcctgtttttaaggctggattagaatttaaacttgatgtagcccatgagactggtcatatgatattaaaaagttacggtgggaatacgtattcatgggagcataaagggacctctaatcttgtaccacctcaatatgcactgcctcattcagtttatccagggactggcgagatagatttaatgaaatattatgatgggcatatatacaccagtgatctatatgcaaggtcggttgctgtcgaaaacgatgtatgtgcaatgatatggttatctcgagtgaaatttcatgattag

SEQ ID NO: 2232 - DNA, 1761 bp, Escherichia coli
atggacgacctgacccaacgctactatgaagccgaaatgcgctacctgcgtgaagcgggtaaagaatttgcgcaggcttaccccgaccgtgctgcgatgcttaatcttgataaacccggcgcacgcgatccctatgtggagcgcctgttcgagggcttcgcttttttaatgggccgcctgcgcgaaaagctggacgacgacctgcccgaactgaccgaggggctggtcagcctgctgtggccgcactacctgcgaaccatcccgtcgctttccgtggtcgaactgaccacggatcaccaacaaatgaagcaaagtgatacgctgaaagagtttcaggtgctatcccgtcccatcggcgaacgcagaacccgctgcgtctacagtgccacgcgtgatatcacgctgcatccgctggcgttgccggacgtgtcattgcaatatgaaccggacggacgctcggttatccgtctgcgctttgcgtgcggcccgctggttggtgactggtcgcagatcgatttatcccgcctgccgctctatctcaatgccgacagcccggtagcctgtgcgttgcaccgggctttaacgcttggcacgcagcagttctggctgcgtctgccggggcaggaacgccgtgtgctggacgcgcacttttccccgatgggttttgatgacgatgaccgactgtggccgaaaggtgagtcagcgttcagcggctaccagttgttgctggaatatttcaccttccgtgagaagtttatgtttgtggcgctgaacgggctggagaacgtcatctggccggaaaggataaccggctttgagattgacgtggtgctggcggaaaactggcctcatgatttgccgtttaataccgacaatctccgcctgcactgcgtgccggtcatcaacctgttcccgctcgaagccgatccgttacacctttcgccgctggaaaacgaatttctgctgcgcccgatgcgcattcaggacgggcataccgagatttattccgtcgacaacattatttcttcgcgccataccggcagtcaggcgtatgtccccttctccagctttcgtcaccggggcgggatgctgcgccacgatgcgccggaacgctattaccacacgcgggtaaagcgcggcccttccggcctgcatgacacctggctgattctgggcggcgatgcgtttgatactgaccggatgctggaggatgaaacgctctctttaaacctgaccggtactaacgggcagcttccccgtaaggctttacagagcacgctgctcgatacgccagttcatgcctcacagaacgtcctgcgggtgcgcaacctgtgcgctccgacgcagccctgctatccccctgcgcgtgaccgcttccactggcgggtgctcagtcaccttggttctaactttttatcgatgatggataacgccgaaattctgcgcggcacgctggcactgtacgactggaccgaaagcgagatgaaccgccgtcgtctggaggcgattgtcgacgttcagcacagcctgatacagcgttttgaaagaggctttctgctgcgtggcgtggatattcaggtgacgctggacagtaacggctttgccggagaaggtgatatcacgctgtttggtgaactgctgcaccgctttttcgcactgtatgccgatatccacttattcactcaactgaccttaattctgcaacccacaggaaagtgcctgcaatggacagagcatcacagccagcgcgtaccgggctga

SEQ ID NO: 2233 - DNA, 1080 bp, Escherichia coli
atggacagagcatcacagccagcgcgtaccgggctgaccgaccggctggccccggatattgcgcgaatcaatttttaccgtttttgccagttgctggaacagagccagcagaacgcgccgctgggcagtaccgacagccccgccaccgatgcggtgcgctttcgtcctcatccaggtatgggccttccggtcagcgagttaaaaaacgttgaacgtgacgtgggcaatcccgacgcgccccccacggtgcgcaccacttttctcggcctgtacggcgtggattcgccgctgccaaccgcctatctggactacattacccagcgtcatgacggacatgacgcggtgatggcgtttctcgatatttttaaccatcgctttatcacccagtattaccgcatctggcgcaaatataactacccggcgtcgtttgaagcaggtgccgtggatgacatttcccgttgtctgctgggactcatcgggctgggtattcccggcagcgagaaccatatcgccacgccggtatcccgttttctggccctgctcagcgtgatgcgcctgccgacgcgcacggcggaaggcgtcacggcactggtagggctgcttgccccgctgaccaaagcgacggtggtgcctcacgatccgcagcctgtaattctcccggcccctgcgggtctgtcaaaaaattcacgcatcagcctgaaaacgcgaacgctgctggggcgtaccggtaccgacgtcaacagccagttgctgctgaaactgtataccgaagatgccgcagaagcacgtggctggctgcccggcgggcaactgcacagcgatttgctggtgctgctgcgcgtttatctgggctggcgctgtcaggcccgtctgcaactgacgctgcccgtcagcctgttgcctgctgccagactgggaaaacagcgtgtacagattagccgtaccggcatccttcgcgcctcctttgccgcgcccgcgaccggaacagtgacggtcagtctggggcgttatcagggattaatacccgctttttccattcgtaacagggagagtatgactcatgtttcctattcgttttaa

SEQ ID NO: 2234 - DNA, 537 bp, Escherichia coli
atgtttcctattcgttttaaacgtccggcgctgctctgtatggcgatgctgacggttgttctgagcggctgcgggctgattcagaaagtggtggatgaatcgaaaagcgtggcctcagccgttttctacaaacaaatcaaaatactgcatctcgatttcttctcccgcagcgccctgaatacggatgcggaagatacgccgctttccacgatggtgcatgtctggcaactgaaaacccgcgaagattttgacaaggcggattacgacaccctgtttatgcaggaagagaagacgctggagaaggacgtactggcaaaacacaccgtctgggtaaaaccggaaggcacggcatccctgaatgtgccgctggataaagagacgcagtttgtcgccattattgggcagttttatcaccctgatgaaaaaagcgacagctggcgtctggtgatcaaaagggacgaactggaggccgacaagccgcgctcgattgaactgatgagaagcgacctgcgactgctgcctctcaaggataaataa

SEQ ID NO: 2235 - DNA, 429 bp, Escherichia coli
atggcgacaccttccttatatgaaatgctgacgttcagtttcagcggcgagttaccgctggaacaggtcagtgagcgggatcagcttatcctttccgtgatggacaatatgcaacgcattatcaactgtcgggcaggcacactggcgcatttgccggattacggtctgccggatctcagcctgatccatcagggtatggctgcgggtattcatagcctgatgcgccagattgaagaaacgctgctgcgttatgaaccacgcctgaatcagatacaggtggagttactgccccagccccgtccggggcatcttaattacctgatccacgcgcagcttcccgataccggctggatacgctttgatggcgtattttctccggaaggacgaattgttctgcgtcatctcaaacagcaggagcgggcgtactga

SEQ ID NO: 2236 - DNA, 1377 bp, Escherichia coli
atggcaagtaacgcgaattttatcagccagttcgtcatgggcggcgatccctgtacgtataaggaatccggtgaactgcaggctgaaatgagtaaactgactcacccggcccggccagacgtggactggcgccaggtggaaaaactcagcctcgcgctgttccggcaaaatggcgtggaactacagacgctggtctgttacgtactggcgataaccagacggcaggggctggcagggatggcagacggactcgattcactggatatactgctccagcgctgggctgacttctggccggtacaggtacattccagaatatcactgctcagctgggtcacagaaaaaatgcagcaggcactgagaacgctggatattcagtatcaggatctgccgcagatctaccgttgtgtacagcatctttctaccatagaaaccacgctgcaacagtgtgaactgtggcatatgacgaagctggacgtattgtccgggcagtttcgcaataccgcattgcgtctggaacggctggcgcctcagggagcggaaaccactatcactccccctgaattaccccgccgggaaatgaatcaaccgaaaaagtcagaggaaagtccacagccggtttttgcaaccagatccgttcagcaaaacgataaggatgccagtccacccgttccatcccctgaaatctcccggcagcggacatggccgatatttatggccggaatggttgtgatggccggtctcggcggaacaggattatggggctggtcgcagcttaatcagccggacgcgctaatccagcgaatacaactgtctgtcatgccgttgccgcagtcgctggagagcggcgaactggcaaagctggatgtaaaggataaggcgctgctggctcaggacagaacaattgcggcaagtcagatgcaactggagcagttaaacaaattgcctgcccgctggccactggagcagggatatcgccagctacgccagcttgatgccctgtggccggataatcctcaggtcagggcgctgaacgcgcagtggcgcaaacagcgggagctgagcgccctgtctgctgaggcactgaatggctatgctcaggcgcagagccagctacagcgcctgtcggcgcagctggatgcactggatgaacgtaaggggagatatctgaccggttcggaactaaaaacggcggtgtacggcatccggcagtcgttaaaggagccgccgctggaagaactgcttcggcaactggaagagcaaaaacagaccggagaggtttcgccaacgctgttgacgcaaattgatacccggttaaatcagttgttgaatcgctatgtcattttactggatacgaaggtggaacaaagtcagtaa

SEQ ID NO: 2237 - DNA, 948 bp, Escherichia coli
atgaaaaatgttctggtcaccgtccccagcttttcagcacgctgtgtttccgccagcaagttgctaagagagaataattttaatcttattattaagaataatgtggagcatctgcttaaatcagaatccactgcattacgagaatctatttgcgcggtcatcgccggaaaagatggttatcaggcggacacgctatcattgctgcctggtgtgagaataatatcgagattcgggacggggatagacaatattgatcttcgtgcggcacagcaatccggtattgttgtcaataatgcggttgggattaattcaaatgcggttgcggaatttatcattggacttatcttcgcgagcatgagaaatatccctggcagctatcatgcgatgcaaaatggctactggggtgagtcgcatggctgtgaattacaagggaaacggattggcctggttggctacggtaatataggtaaaactctggcgaaaaggttatccggttttgatgttgagcttttagcttttgacaaacaacccgactatcaggttgctgacaaagctggagttcagtttgtatcaattgaagatatctttatgcagtcgcatgtcatcattgttcttttgcctttttcttctgagctggagaacttcattagtcataaatatttgtcgatgatgcgcaatggtgctctgatcatcaatgccgcaaggggaaagttgctggatgagggcgctttacttcaggtgattgaagaacgaaatgtgtttgcggcgctggatgtgtttagctctgaaccgttggcgcaatttagcccactgctacatgccaaaaatatcattacaacgccgcatatcgcggccgccaccgttgagtcataccagcaaaccgggatacacgttgcccagtcgataattgattacttcgcaggaagggagataaaaaacgtgttgtga

SEQ ID NO: 2238 - DNA, 597 bp, Escherichia coli
atgaataacacggatcttatccatctcattaaacattttatgcgtaacgaacataaagcagttgaagaagttattgattcccctctttcggaggtcgcaaatttaattaaagtattacaatcttgtcaggggaaagttgtttttattggtgttggtaagtctggtattattgccaggaaactcgccgcaacatttgccagcaccggaactccctcgttttttgttcacggtacggaagcggtacacggcgaccttggaatggtagcgaaagacgatgttgttattcttatttcaaacagtggtgagacggcggaaatcctggcgacactgcctagtctgaaaaaaatgggtaattatttgatctcttttacccgcagtcatcactcatcgcttgcgataagttgtgatttatctgttgaaatccccgtcaaaagtgaggcggataatttaggtttagcaccgtcatgctcgtcgactgttgttctggttgttggtgatgcggtggcgcttgcactctctgaattgaaaaaatttactcgtgctgatttcggcttatatcatccaggaggtgcactcggcattaaagcaaattcataa

SEQ ID NO: 2239 - DNA, 1176 bp, Escherichia coli
atggatgtttttaatactcctgtttcccgcaaaggaacatattgtacccaatgggacttttgcgaggacagatttggtgtaaaagatgtactaccattctctatttcagatatggatcttccgataccagacgctatcaccagagcattaaaaaaacgcctggaacacccgattttagggtacagtcgttggcaacatggtgaatatctgaatgcgatagtaaactggtattatcaacaatatcaaacagatattaaacctgaatggataacctatagccccagtgtgatgtactctattgcaaaagcaatagagttattgacatcgcatggtgataatattctcgtttttacacctgtctataatgcattttttgatgtaattaaacatagcgagcgaaatattctgacagcctctttgattataaaaaatgaggggggctacgctatcaactggcaagattttgatcttaagattaaaagcgcaaagatggtgttattatgtaatcctcataacccgacaggaacagtctggtcggaagaagaactgcataaaatcgctgcaagctgtacaaggcataatgtttggttatgttcagatgaaatccatagtgattttgtttttaatcgtagctttacatccgcgcttaaaataaaaaaagaaaaagtagtagtatttaactcgatatcgaaaacatttaatgttcctgcactaacaggatcgtatatgatttcaactgacgataattttaatcataagttcagaacgatatcgaggtatcgcgattttgtaaactccccatcagtactgaatataattgcaactattattgcctacaacgaatgtgagggatggttaaagtcattaaaggcacatatagcctctaacattcaattcacccagcagtatctgaatgaaaatattccagaattgatcgtaaggccagctgatggttgctatttttcctggatagattgttctgctattggttatccttttgatgaattctacagtcgattaattcatgaaggcaaagtgggcattatggcggggcatgtctatggaacggagggggagggctaccttcgtctgaacctggcctgcggtcgagaaaaattatatatggggcttacgcgtcttgtaagtgtaattaaaaatattaatcagggagaataa

SEQ ID NO: 2240 - DNA, 1581 bp, Escherichia coli
atgaaacaaaagaaagcctggagtttttttcagagcctggggaaggcatttatgtatcccattgctctgctaagtgtatgtggcatgatgctagggctgggaagtggtttagccagtgatgatatggcaaaattaattccatttctggctattccaataattaaaaccatacttgatttcattgttagtcttggtttgtttgcctttgttaatttacctgtattgtttgcgatagcgattcccttaggattattaaaagagaaagaggataaagcctatggcgctttttctggcttaattggttttatggcgatgcatctgggaacgaacttttatcttaaacagcacgacttattggtcgttgctgaccaaatgtcgacacatgggcaaaccatcattctggggatccagtcctacaataccagcgtgttggggggaattgttgctgggttattagtcgccagcatgtataaaaagatcgttaatttacgcattccagaatcattaggtttttatagcggcccacgtctggtgcctatcattacactgattgtgatgagtggatttggtctgatcattccttttatctggccgccatttttcaatctcttcatgctcattggccactggatatcaacttccggtcctgttggttatttcttctatgcagttgccgaacgtgtgacgattccttttggcttaaaccatctggtgacgtcagtgttccgctttacgccaatcggcggttcggctgtgattggcggtgaagaatattacggcaccctgaacatgtttatggcatacgtcaaagagaatgcggtcattccgctggatttggcggggaaaatggagcagggcaaactgatgattcagtatggtctggctggtgccgcgctggcgatgtatcgcactgctcatgctcaaaacagaaaggctatcaaagcattgcttatttccggggtgcttacggtgattattggcggcgtcagtgaaccgattgagtttctgttcttatttgtcagtccactgctgtttgtcttccatgcctttatgaatggattcgctaacatggttctgccatatatgggtgtgaagatgggatttactggcgatctgattcaatttattagctttggcgtattgcgtggcacaagaacaggttggccgatcgcggtgtgtgtcgaagtggcctatttcttcatttattactttgtgttccgttggaccattcttaaatttaacctgatgaccgtaggccgtgaagagtccagtcctgtcacgctgaacgttcacgaagatacggctatagcggatatcccaactcctgataaatcagagctgcaagcggcggagcagatggttaaggcacttggtggtaaagagaatattaagtcactggataattgcgtaactcgtttacgtttaacaatcgcagatatgggattgattgacgaagttgcaataaaaagagccggcggaattgcggttgttaaacttgatcaaaataccctacaagtcattatcggcactaaagtcatcgccctgcgtcgggatatggataactatatggggatatactga

SEQ ID NO: 2241 - DNA, 825 bp, Escherichia coli
atgatcatcgaaaaagtcatgaacaataattgtgtacaggcatcgatgaatggacaggaggttatcatttctgggcctggcgtcggttacaacaaaaaatatggcatggctgtacctgagcatcctgctaacagagttttttatgtcagaaatgaacaaaaaaacaaactctataaattgattgaacatgtggatattgagtatgtgtttgttgccgaaaagatagtgtactacgcagagtgtaatcttgaaagaaagttaaatccatcgctattgcttattcttgccgatcacatttcgaatgcaatatcccgagtctcctccggaatacaaatcaataatttttttcttgaggaaatcaaagcgttgtacaaagcagaatatgcaataagccgggatgcattaaccatcatcaatgagcaatttagctttcaactaccggatgatgagattggttttattgcattgcatattttaaataactatgaaaattcatctgattatgaatcggtacggattattgaattatctcaaaaaatcacggagattatcgaaggtatttataaccgaaaggtggacaaaagttcatttaactattcaagatttatgatgcaccttaagtatttttctaatcgagttttatgcaatgaaaagataaaacagaaagatattggtgatatctatgaacagtttcttgaaaaagacatcctgttacagcgcgcaattcatgaaattgaacggtatctgtatgccacttttaaatatgaattaattttagaagaaaaactatatctctctattcgtaccaaagtattaatggactaa

SEQ ID NO: 2242 - DNA, 1254 bp, Escherichia coli
atgtcaggatccaacactgcaatcagccgtcgtcgtttactgcaaggcgcgggtgccatgtggctattgagcgtaagtcaggtcagcctggctgcggtcagccaggtcgtggcggtgcgcgtctggcctgcgtccagctacacccgcgtgacggtagaatcaaatcgtcagctgaaatataagcagttcgcgttgagtaatcctgaacgcgtggtggtggatatcgaagatgtaaacctgaactcggtgctcaaggggatggctgcgcaaatccgcgctgacgacccgttcatcaagtcggcgcgcgtcgggcaatttgacccgcaaaccgtacgtatggtttttgaattaaagcaaaacgtaaaaccgcagctgtttgcccttgcgccggtcgccgggtttaaagagcgtctggtgatggacctctatccggccaatgcacaggatatgcaggacccgttgctggcgctgctggaggattacaacaaaggcgacctcgaaaagcaggtgccgccagcacaaagtggtccacaaccgggtaaagctgggcgggatcgtccgattgtcattatgcttgaccctggccacggcggcgaagactccggcgcggtagggaaatacaaaacgcgcgaaaaagacgtggtattgcaaatagcgcgccgtctgcgctctctgatcgagaaagagggcaatatgaaggtttacatgacgcgtaatgaagacatcttcattccgttgcaagtgcgcgtagcaaaagcacagaaacagcgtgctgacttgtttgtctctattcatgccgacgcctttaccagtcgccagccgagcggttcctcggtgtttgcgctctctaccaaaggcgcaaccagtaccgcggcaaaatatctggcgcaaacccagaacgcctcggacttgattggtggcgtgagcaaaagcggcgaccgctatgtcgaccacaccatgttcgatatggtgcagtcattgaccattgccgacagcctgaagtttggtaaggccgtgctaaataagctggggaaaatcaacaaactgcataagaatcaggttgagcaggccggatttgccgtgctgaaagcgccagatattccctccattctggtcgaaacggcgtttatcagtaacgttgaggaagagcgcaaattgaaaacggcgactttccagcaggaagttgcggagtctattcttgcgggaattaaagcctattttgccgatggggcgacgctggcgagaagaggataa

SEQ ID NO: 2243 - DNA, 1332 bp, Escherichia coli
gtggtaaaggaacgtaaaaccgagctggtcgagggattccgccattcggttccctatatcaatacccaccggggaaaaacgtttgtcatcatgctcggcggtgaagccattgagcatgagaatttctccagtatcgttaatgatatcgggttgttgcacagcctcggcatccgtctggtggtggtctatggcgcacgtccgcagatcgacgcaaatctggctgcacatcaccacgaaccgctgtatcacaagaatatacgtgtgaccgacgccaaaacactggaactggtgaagcaggctgcgggaacattgcaactggatattactgctcgcctgtcgatgagtctcaataacacaccgctgcagggcgcgcatatcaacgtcgtcagtggtaattttattattgcccagccgctgggcgtcgatgacggcgtggattactgtcatagcgggcgtatccggcggattgatgaagacgcgatccatcgtcaactggacagcggtgcaatagtgctaatggggccggtcgctgtttcggtcactggcgagagctttaatctgacctcggaagagattgccactcaactggccatcaaactgaaagctgaaaaaatgattggtttttgctcttcccagggcgtcactaatgacgacggtgatattgtctccgaacttttccctaacgaagcgcaagcgcgggtagaagcccaggaagagaaaggcgattacaactccggtacggtgcgctttttgcgtggcgcagtgaaagcctgccgcagcggcgtgcgtcgctgtcatttaatcagttatcaggaagatggcgcgctgttgcaagagttgttctcacgcgacggtatcggtacgcagattgtgatggaaagcgccgagcagattcgtcgcgcaacaatcaacgatattggcggtattctggagttgattcgcccgctggagcaacaaggtattctggtacgccgttctcgcgagcagctggagatggaaatcgacaaattcaccattattcagcgcgataacacgactattgcctgcgccgcgctctatccgttcccggaagagaagattggggaaatggcctgtgtggcagttcacccggattaccgcagttcatcacggggcgaggttctgctggaacgcattgccgctcaggcgaagcagagcggcttaagcaaattgtttgtgctgaccacgcgcagtattcactggttccaggaacgtggatttaccccagtggatattgatttactgcccgagagcaaaaagcagttgtacaactaccagcgtaaatccaaagtgttgatggcggatttgggttaa

SEQ ID NO: 2244 - DNA, 1827 bp, Escherichia coli
atgaaattgcaaaagcaattactggaagctgtggagcacaaacagctacgcccactggacgtgcagtttgccctgaccgtggcgggagatgaacatcctgccgtcaccctcgcggcggcactattaagtcatgatgccggagagggacacgtttgtttgccgctttcacgactggaaaataacgaggcatcgcatccgctgttggcgacctgtgtcagtgaaatcggtgagctacaaaattgggaagaatgcttgctggcttcacaagcggtcagccggggagatgaaccaacgccgatgatcctctgtggcgatcgtctttatttgaatcgcatgtggtgtaacgagcgcacagtggcacgctttttcaacgaagtgaatcatgccattgaggttgatgaagctctactggcgcaaaccctggacaaactttttccagtaagcgatgaaattaactggcaaaaagttgcggcggcagtggcgctgacacggcggatctcggtgatttccggtggtcctggcaccggtaaaacgaccaccgtagcgaagttactggcagcgttaattcaaatggccgacggcgaacgctgccgtatccgtctggctgcaccaacgggtaaagctgccgcgcgcttaaccgaatctctcggcaaggctttgcgacaattaccgctgaccgatgaacaaaagaaacgcattccggaagatgccagcactttgcaccgattgctgggtgcgcagccgggtagccagcgtttacgtcatcatgccggtaacccgctgcatcttgatgtgctggtggtagatgaagcgtcaatgatcgatcttcctatgatgtcgagactgatcgacgccttgcccgatcatgcgcgagtgatctttctcggcgatcgtgatcaactggcctcggttgaggctggggctgtgctgggcgatatctgcgcttatgccaacgcgggctttacccccgagcgtgccgggcagttgagccgcctgacgggaagccacgttccagcaggaactggcacagaagcggcatctttgcgcgacagcctctgcctgctgcaaaaaagctatcgtttcggcagcgattctggcattggtcagttagctgcggcgattaaccgtggtgataaaacggcagtgaaaaccgtttttcagcaggattttactgatatcgaaaaacgacttttacagagcggcgaagattatattgcgatgcttgaggaagctcttgcgggttacgggcgttatctggatctgctgcaagcgcgtgccgagccgaatttaatcattcaggcgttcaatgagtaccagcttttgtgcgccctgcgggaagggccgtttggcgtggctggactgaatgagcgaattgagcagtttatgcaacagaagcgcaaaattcatcgtcatccgcactctcgttggtacgaaggccgaccggtgatgattgcccgtaatgacagcgcgcttgggttgtttaatggcgatattggtattgcgctggatcgcgggcaggggacgcgcgtctggtttgcgatgccggacggcaatattaagtctgtgcaaccgagtcgcctgccagagcacgaaacgacgtgggcgatgacggtacataaatcgcagggatcggagttcgaccatgcggcgttgattttaccgagccaacgcacgccggtagtaacacgggagctggtttacaccgcggtgacccgcgcgcgtcgccgtctgtcgctgtatgccgatgagcgcattttaagtgcggcaattgccacgcgcaccgagcggcgcagtggtctggcggcgttgtttagttcgcgggaataa

SEQ ID NO: 2245 - DNA, 3543 bp, Escherichia coli
atgagtgatgtcgtcgagacactagatcctttgcgcttgcccttacagggcgagcgcctgattgaagcctctgccggcacaggcaaaacctttacgattgcggcgctctatttgcgcctgttacttggactaggcggttctgccgcctttccccgcccgctgaccgttgaagaactgctggtggtgacctttaccgaggctgccacggcagaattgcgtggtcgtatccgtagcaatatccacgagttgcgcatcgcctgtctgcgtgaaaccaccgacaatccactgtacaaacgcctgctggaagagatcgacgataaagcgcaagccgcgcagtggttgttgttagccgagcggcagatggatgaagcggcagtctttactattcacggcttttgccagcgcatgctcaacctgaatgcctttgaatccggcatgctgtttgagcagcagctgattgaagatgagtctctgctacgctaccaggcctgcgccgatttctggcgtcgccactgctacccgctgccgcgtgaaattgcccaggtcgtctttgaaacctggaaagggccgcaggcgttgctgcgcgatattaatcgttatctgcaaggcgaagcgccggttatcaaagcaccgccccccgatgatgaaacgctggcttcccgccacgcgcaaattgtggcgcgtattgatgccgtaaaacagcagtggcgcgacgcagtgggtgaactggatgcgctgatcgaatcttctggtattgatcgacgcaagtttaaccgtagcaatcaggctaaatggatcgagaagatcagcgcctgggcagaagaagagaccaacagctatcagttgccggagtcgctggaaaaattctctcagcgtttcttagaagatcgcacgaaagccgggggggaaaccccgcgacatccactgtttgaggcgatcgaacaactgcttgcagaaccattgtcgatccgcgatctggtgatcactcgcgcattggctgagatccgcgaaacagtagcgcgtgaaaaacgccgccgtggcgaattgggttttgatgacatgttaagtcggctcgattccgcgctgcgtagtgaaagcggcgaggtattggcagcggcgatccgtacgcgattcccggtggcaatgatcgatgaatttcaggataccgacccccagcagtaccgaatttttcgccgtatctggcaccatcagccggaaaccgcattgttgctgattggcgacccgaaacaggctatttatgcattccggggtgcggatatcttcacttatatgaaggcgcgtagcgaagttcatgctcactacaccttagataccaactggcgttccgcaccgggaatggtgaacagcgttaacaaacttttcagccagactgatgacgcgttcatgtttcgtgaaataccgtttattcctgtgaaatctgccggcaaaaatcaggcgttacgttttgtatttaaaggtgaaacgcagcctgcgatgaaaatgtggctgatggaaggcgaaagctgcggcgttggcgactatcaaagtaccatggcgcaggtatgtgctgcgcaaatccgcgactggctacaagccgggcaacgcggcgaagcgttgctgatgaacggcgacgatgcgcgtccggtgcgtgcttcggacatcagtgtgctggtgcgcagccgccaggaggccgctcaggtgcgcgatgccttaacgctgctggaaatcccttccgtttacctttcgaaccgcgacagtgtttttgaaactctggaagcacaggagatgctttggctgttgcaggcggtgatgacgcccgaacgtgagaacaccctgcgcagtgcgctggcaacgtcaatgatggggctgaatgcgctggatattgaaacgctgaataatgacgaacatgcgtgggatgcggtcgtcgaagagttcgatggttatcggcaaatctggcgcaaacgtggcgttatgccgatgctgcgggcgctgatgtcggcgcgtaacattgcagaaaacttgctggcaacggcaggcggtgagcggcgtcttaccgatatcttgcatatcagcgaactgctacaagaagccggaacgcagctggaaagtgaacatgcgctggtacgctggttatcgcaacatatcctcgagccagacagtaatgcctccagccaacaaatgcgcctcgaaagtgataaacatctggtgcagattgtcacgatacacaaatcaaaagggctggaatatccgctggtctggttgccatttattaccaatttccgcgtccaggatcaggcgttttatcacgatcgccactcgtttgaggccgttctggatcttaatgctgcgccagaaagcgtcgacctcgcggaggccgaacgtctggcggaagatctgcgtttgctttacgtggcgctgacgcgttcggtttggcattgcagtctcggcgttgcaccgctggtgcgccgtcgtggcgataaaaaaagtgacaccgacgtccaccaaagtgcgcttgggcgtttgctgcaaaaaggggaaccacaagatgcggcagggcttcgcacctgtattgaagcgttatgcgatgatgatattgcctggcaaacggcacaaactggtgataaccagccctggcaggttaatgatgttttaactgcagaactgaatgcgaggacgctacaacgattgcccggcgataactggcgtgtcaccagctactccggtttgcagcagcgtggtcacggtatcgctcaggatctgatgccacggctggatgttgatgccgcaggcgtggtcagcgtcgttgaagaaccgacgctaacaccgcatcagttcccgcgcggtgcgtcaccagggacattcttgcacagtttgtttgaagacctcgattttacccagccggttgacccgaactgggtacaggaaaaactggaactcggcggctttgaatcgcagtgggaaccagtgttgaccgagtggatcacggctgtcctccaggcacctctcaatgaaacgggtgttagcctgaatcagctttccgatcgcgataaacaggtggaggtggagttttacctgccgattagtgaaccgcttatcgccagccagcttgatgcactaattcgccagtttgacccgctatccgctggctgcccgccgctggagttcatgcaggtacgcggcatgttaaaaggctttatcgacctggtattccgccacgaagggcgttattacctgctcgactataaatccaactggctgggtgaagacagttcggcttacacccaacaggctatggcagcggcaatgcaggcgcaccgctatgatctgcaatatcagctttataccctggcgctgcaccgttatctgcgccatcgcattgctgattacgactatgagcgccactttggcggcgttatttatctgttcctgcgtggtgttgataaagaacatccgcaacaggggatttacacaacccgacccaatgccgggttgattgccctgatggatgagatgtttgccggtatgaccctggaggaggcgtaa

SEQ ID NO: 2246 - DNA, 2889 bp, Escherichia coli
atgccccgcagcatctggttcaaagcattattgttgtttgttgccctctgggcacccttaagtcaggcagaaacgggatggcagccgattcaggaaaccatccgtaaaagtgataaagataaccgccagtatcaggctatacgtctggataacggtatggtggtcttactggtttctgatccgcaggcagttaaatcgctctcggcgctggtggtgcccgttgggtcgctggaagatcctgaggcgtaccaggggctggcacattaccttgaacatatgagtctgatggggtcgaaaaagtacccgcaggctgacagtctggccgaatatctcaaaatgcacggcggcagtcacaatgccagcacggcaccgtatcgcacggctttctatctggaagttgagaacgacgccttgcccggtgcggtagaccgcctggcggacgctattgcagaacccttgctcgacaagaaatacgccgaacgtgaacgtaatgcagtgaatgccgaattaaccatggcgcgtacgcgtgacgggatgcgcatggcacaggtcagcgcagaaaccattaacccggcacaccccggttcaaagttttctggtggtaacctcgaaactttaagcgacaaaccaggtaatccggtacagcaggcgctgaaaaatttccacgagaagtactattccgccaatctgatgaaggcggttatttacagcaataaaccgttgccggagttggcgaaaatggcggcggacacctttggtcgcgtgccgaacaaagagagcaaaaaaccggaaatcaccgtgccggtagtcaccgacgcgcaaaagggcattatcattcattacgtcccggcgttgccgcgtaaagttctgcgcgttgagtttcgcatcgataacaattcagcgaagttccgtagtaaaacggatgaattgattacctatctgattggtaatcgcagccctggtacactttctgactggctgcaaaagcagggattagttgagggtattagcgccaattccgatcctatcgtcaacggcaacagcggcgtattagcgatctctgcgtctttaaccgataaaggtctggcgaatcgcgatcaggttgtggcggccatttttagctatctcaatctgttacgtgaaaaagggatcgataaacaatacttcgatgaactggcgaatgtgctggatatcgacttccgttatccgtcaatcacccgtgatatggattacgtcgaatggctggctgataccatgattcgcgttcctgttgagcatacactggatgcagtcaatattgccgatcggtacgatgctaaagcagtaaaagaacgtctggcgatgatgacgccgcagaatgcgcgtatctggtatatcagcccgaaagagccgcacaataaaacggcttattttgtcgatgcgccgtatcaagtcgataaaatcagcgaacaaactttcgcggactggcagaaaaaagccgccaatattgcgctctccttaccggagcttaacccctatattcctgacgatttctcgctgattaagtcagagaagaaatacgaccatccagagttgattgttgatgagtcgaatctgcgcgtggtgtatgcgccaagccgttattttgccagtgagcccaaagctgatgtcagcctgattttgcgtaatccgaaagccatggacagcgcccgcaatcaggtgatgtttgcgctcaatgattatctcgcagggctggcgcttgatcagttaagcaaccaagcgtcggttggtggcataagtttttccaccaatgctaacaacggccttatggttaatgccaatggttacactcagcgcctgccgcagctgttccaggctctgctggagggctactttagctataccgctacggaagatcagcttgagcaggcgaagtcctggtataaccagatgatggattccgcagaaaagggcaaagcgtttgagcaggcgattatgcccgcgcagatgctctcgcaagtgccgtacttctcgcgagatgaacggcgcaaaattttgccctccattacgttgaaagaggtgctggcctatcgcgacgccttaaaatcaggggctagaccagagtttatggttatcggcaacatgactgaagcccaggcaacaacgctggcacgccatgtgcaaaaacagttgggcgctgatggttcagagtggtgtcgtaacaaagatgtcgtggtcgataaaaaacaatccgtcatctttgaaaaagctggtaacagcaccgactccgcactggcagcgatatttgtaccgactggctacgatgaatacaccagctcagcgtatagttctctgttggggcagatcgtacagccgtggttctacaatcagttgcgtaccgaagaacagttgggctatgccgtgtttgcgtttccaatgagcgtggggcgtcagtggggcatgggcttccttttgcaaagcaatgataaacagccttcattcttgtgggagcgttacaaggcgtttttcccaaccgcagaggcaaaattgcgggcgatgaagccagaggagtttgcgcaaatccagcaggcggtaattactcagatgctgcaggcaccgcaaacgctcggcgaagaagcatcgaagttaagtaaagatttcgatcgcggcaatatgcgcttcgattcgcgtgataaaatcgtggcccagataaaactgctgacgccgcaaaaacttgctgatttcttccatcaggcggtggtcgagccgcaaggtatggctattctgtcgcagatttccggcagccagaacgggaaagccgaatatgtgcatcctgaaggctggaaagtgtgggagaacgtcagcgcgttgcagcaaacaatgcccctgatgagtgaaaagaatgagtga

SEQ ID NO: 2247 - DNA, 3369 bp, Escherichia coli
atgttaagggtctaccattccaatcgtctggacgtgctggaagcgttgatggagtttattgtcgaacgcgaacggctggacgatcctttcgaaccagagatgattctggtgcaaagtaccggtatggcacagtggctgcaaatgaccctgtcgcaaaagtttggtattgcggcaaacattgattttccgctgccagcgagctttatctgggatatgttcgtccgggtgttaccggagatccccaaagagagcgcctttaacaaacagagcatgagctggaaactgatgactctgctgccgcaactgttggagcgcgaagactttaccctgttgcggcattatctgactgacgatagtgacaagcgaaaactgttccagctttcttcaaaagcggcggacctgtttgaccagtatctggtctatcgtccggactggctggcacagtgggaaacaggacatctggtagaagggttgggagaagcacaggcctggcaagcgccgttgtggaaggcgttggtggaatataccgacgaacttgggcaaccgcgctggcaccgcgccaatctctatcagcgctttatcgaaacgctggagtccgcgacgacctgcccgccggggttaccttcgcgcgtctttatatgcggtatttccgcgttaccgcctgtttatctccaggcactccaggcgctgggtaaacatattgaaatccatctcctgtttaccaacccctgccgttattactggggcgacattaaagatcctgcttatctggcgaaactactgactcgccagcgccgacacagttttgaagatcgagaattaccgctatttcgcgacagcgaaaatgccgggcagctctttaacagcgatggtgaacaggatgtcggcaacccgctgctggcctcatggggcaagcttgggcgcgactacatttatctcctttctgacctggagagcagccaggagctggacgcttttgtcgatgtgacgccagataacctgctgcataatattcagtctgacattctggaactggaaaaccgcgccgttgctggtgtgaacatcgaagagttttcccgtagcgataacaaacgcccgcttgatccactggatagcagtatcaccttccacgtttgccatagcccgcagcgtgaagttgaagttttacacgatcgcctgctggcgatgctggaggaagacccgacacttactccgcgcgacatcatcgtgatggtggctgatatcgacagctacagtccgtttattcaggctgtgtttggtagcgcacctgcggatcgttacctgccttacgccatttccgaccgtcgggcgcggcagtcgcatcctgtacttgaagcgtttatcagcctgttatcgctgccagacagccgctttgtgtcggaagacgtgctggcattactggatgtgccggtgctggcagcgcggtttgacatcaccgaagaagggctgcgttatttacgtcagtgggtcaacgaatccggaattcgttgggggatagatgacgacaacgttcgcgagctggaacttcccgctaccggtcaacacacctggcggtttggcctgacgcgcatgttgctgggctacgcgatggagagcgcgcagggcgagtggcaatcggttctaccttatgatgaatcgagcggcttaattgcagaactggtggggcatctggcttcactgctaatgcagctaaatatctggcgtcgcgggctggcgcaggagcgtccgctggaagagtggttgccggtttgtcgcgatatgctcaacgcctttttcctgccggatgcggaaaccgaagcggcgatgacgctgatcgaacaacaatggcaggcgattatcgccgaaggtttaggtgcgcagtatggcgacgcggtgccgctgtcactattgcgtgatgaactggcactgcgcttggatcaagaacgtatcagccagcgttttctcgccggaccggttaacatttgtactctgatgccaatgcgttcaattccgttcaaagtggtttgcctgctgggaatgaacgacggcgtttatccacgtcagcttgcgccattgggctttgatctgatgagccagaaaccgaagcgtggcgaccgtagccgtcgcgatgacgaccgctatctgttcctggaagcgttaatttccgcgcagcaaaaactctatatcagctatatcgggcgttccattcaggataacagtgaacgtttcccgtcggtactggtgcaggaactgattgactacatcgggcaaagccattatctaccgggcgatgaagcgctcaactgtgatgaaagcgaggcaagggtaaaagcgcatcttacttgcctccatacccgaatgccgtttgatccacaaaactaccagccaggcgaacgacaaagctatgctcgtgaatggctacctgcggccagccaggctggtaaagcacattctgaatttgttcagccgctgccatttaccttaccggaaaccgtgccgctggaaacgctacaacgattctgggcacatccggtgcgggcatttttccagatgcgtttgcaggtgaacttccgtaccgaagacagcgaaatccccgacaccgaaccttttattcttgaagggcttagtcgttatcaaatcaaccagcagttattaaatgtactggttgagcaggatgatgccgaacgcttgttccgccgattccgggcggcaggtgatttgccgtatggtgcctttggtgaaattttctgggaaacgcagtgtcaggagatgcagcaacttgccgacagagtcattgcctgtcgccagccagggcagagtatggagattgatctcgcctgcaacggtgtgcagataactggctggttgccgcaggtgcagccggatggcctgttgcgctggcgtccctctttattaagtgtggcgcagggaatgcaactttggctggaacaccttgtctactgtgccagcggtggtaatggtgaaagtcgcctttttctacgcaaagacggcgagtggcgttttccgccgcttgcagccgaacaggctttacattacctctcacagctgattgaagggtatcgtgaaggaatgtccgcgccattgctggtgttacctgaaagtggcggcgcgtggctaaaaacctgttatgacgcgcaaaacgatgccatgctggatgacgattccacgttgcaaaaagcccgtacgaaattccttcaggcttacgaaggcaacatgatggtgcgtggcgaaggtgatgatatctggtatcaacggctctggcggcaattaacaccagagacaatggaggctatcgttgaacagtcgcaacgtttcctgttaccgctgtttcgctttaatcagtcatga

SEQ ID NO: 2248 - DNA, 324 bp, Escherichia coli
atgtcagcttccctgaggaatcaacaaggctttagtctgccggaggtaatgttggcgatggtgttgatggtgatgattgtcactgcgttatcgggtttccagcgaacattaatgaacagtcttgccagcagaaaccagtaccaacagctctggcggcatggctggcagcaaacgcaactgcacgcgatttcgccacctgctaactggcaggtcaaccgaatgcagacatcgcaggcgggatgtgtcagcatcagcgttacgctagtttcacccgggggcagagaaggcgagatgacccgcctgcattgcccgaatcgtcagtag

SEQ ID NO: 2249 - DNA, 408 bp, Escherichia coli
gtgaaccgcgaaaagggtgtttcgtcactggctctggtcctgatgctgctgattttgggtagcttgctattgcaaggaatgagtcagcaggatcgcagttttgcttctcgcgtgagcatggaaagtcagtcattgcgccgccaggccatcgttcagtcggcgctggagtggggaaaaatgcactcctggcagacgctgcccgcagttcagtgcttactgtatgctgccaccggtgcccgggtttgtctgcgtttactggcagataatgaagccttattgattgctggttatgaaggcgtttcgttgtggcgaacaggcgaagtcatcgatggaaacatttttttttcgccacgcggctggagcgatttttgtccgctgaaagagagggcgttatgtcagcttccctga

SEQ ID NO: 2250 - DNA, 564 bp, Escherichia coli
atgcctgtaaaagagcaaggtttttctctgctggaagtgttgattgctatggcgatcagtagcgtattgttgctgggggctgcacgctttctgcctgcgttacagcgtgaaagtttaacgaacacccgtaagctggcgctggaagatgaaatctggctgcgggtatttaccgtcgcgaagcatcttcagagggcgggttattgccatggcagctgtacgggcgaagggctggaaattgtcggacagggtgactgtgtcattgtgcagtgggatgcgaacagtaatggtatctgggatcgcgaaccggtaaaagagtccgaccagattggatttcgtctgaaggagcatgtgctggaaacgctacgcggtgcgacatcctgtgaaggtaagggctgggataaagtcactaatccggatgccatcattatcgacacttttcaggtcgtacgtcaggatgtcagcggcttctcgccggtgttgacggttaatatgcacgctgccagcaaggctgatccgcaaaccgtggtggatgccagctatagcgtgacaggatccaacctgtga

SEQ ID NO: 2251 - DNA, 471 bp, Escherichia coli
atgaaaacacaacgtggttatacgctgattgaaacgctggtcgcgatgctgattctggtcatgctaagcgcaagtgggctctatggctggcaatactggcagcagtcgcaacggctttggcaaaccgccagccaggcgcgggactatttgctctatttacgtgaagatgccaactggcataaccgcgaccacagtatcagtcttatcagggaggggacgttatggtgccttgtgagttccgttgctggggcgaatacctgtcatggcagttcaccattggtctttatgccacgctggcccgaagtcgaaatgagcgacctgacaccttcgcttgctttctttggcctgcgcaataccgcatgggccgggcatattcgcttcaaaaactcaacgggcgagtggtggctagtggtttcgccgtggggaagactccggctttgtcagcaaggagaaacagaaggatgcctgtaa

SEQ ID NO: 2252 - DNA, 795 bp, Escherichia coli
atgaaacagtatttagaactgatgcaaaaagtgctcgacgaaggcacacagaaaaacgaccgtaccggaaccggaacgctttccatttttggtcatcagatgcgttttaacctgcaggatggattcccgctggtgacaactaaacgttgccacctgcgttccatcatccacgaactgctgtggttcctgcagggcgacactaacattgcttatctacacgaaaacaatgtcaccatctgggacgaatgggccgatgaaaacggcgacctcgggccagtgtatggtaaacagtggcgcgcctggccaacgccggatggtcgtcatattgaccagatcactacggtactgaaccagctgaaaaacgacccggattcccgtcgcattattgtttcagcgtggaacgtaggcgaactggataaaatggcgctggcaccgtgccatgcattcttccagttctatgtggcagacggcaaactctcttgccagctttatcagcgctcctgtgacgtcttcctcggcctgccgttcaacattgccagctacgcgttactggtgcatatgatggcgcagcagtgcgatctggaagtgggtgattttgtctggaccggtggcgacacgcatctctacagcaaccatatggatcaaactcatctgcaattaagccgcgaaccgcgtccgctgccgaagttgattatcaaacgtaaacccgaatccatcttcgactaccgtttcgaagactttgagattgaaggatacgatccacatccgggcattaaagcgccggtggctatctaa

SEQ ID NO: 2253 - DNA, 876 bp, Escherichia coli
atgaccagtagctatctgcattttccggagtttgatccggtcattttctcaataggacccgtggcgcttcactggtacggcctgatgtatctggtgggtttcatttttgcaatgtggctggcaacacgtcgggcgaatcgtccgggcagcggctggaccaaaaatgaagttgaaaacttactctatgcgggcttcctcggcgtcttcctcggtggacgtattggttatgttctgttctacaattttccgcagtttatggccgatccgcggtatctgttccgtgtctgggacggcggcatgtctttccacggcggcctgattggcgttatcgtggtgatgattatcttcgcccgccgtactaaacgttccttcttccaggtttctgattttatcgccccactcattccgtttggtcttggtgccgggcgtctgggcaactttattaacggtgaattgtggggccgcgttgacccaaacttcccgtttgccatgctgttccctggctcccgtacagaagatattttgctgctgcaaaccaacccgcagtggcaatccattttcgacacttacggtgtgctgccgcgccacccatcacagctttacgagctgctgctggaaggtgtggtgctgtttattatcctcaacctgtatattcgtaaaccgcgcccaatgggagctgtctcaggcttgttcctgattggttacggcgcgtttcgcatcattgttgagtttttccgccagcccgacgcgcagtttactggtgcctgggtgcagtacatcagcatggggcaaattctttccatcccgatgattgtcgcgggtgtgatcatgatggtctgggcatatcgtcgcagcccacagcaacacgtttcctga

SEQ ID NO: 2254 - DNA, 2247 bp, Escherichia coli
atgctcactcgcctgcgcgaaatagtcgaaaaggtagccagcgcaccacgcctgaatgaggcgttaaatattctggttaccgacatctgtcttgcgatggataccgaggtctgttcggtctacctggccgatcatgatcgacgttgttactacctgatggcgacccggggactgaaaaaaccacgcggtcgcactgtaacgctcgcgtttgatgaagggatcgtcggcctggttggcaggctggcggaaccgataaaccttgcagatgcgcaaaagcaccccagcttcaaatacatcccctccgtaaaagaagaacgtttccgcgcgtttttaggcgtaccaattattcaacgtcgccagttgcttggtgtactggtggtacagcaacgagagttgcgccagtatgacgaaagtgaagaatccttcctggtgacgcttgccacccagatggcagctattctttctcagtcgcagttgactgccttgtttgggcaatatcgccagacgcgaatccgtgcattaccggcagcacctggtgtggcgattgccgaaggctggcaggatgccacgttacctttaatggaacaggtgtatcaggcatcaacgctggatccggctctggaacgcgaacgactgaccggggcgttggaagaggcggctaacgagtttcgccgctatagcaaacgctttgcggccggtgcacaaaaagaaacggcggctattttcgatctttactcacacctgctttcggatacccggctgcgtcgcgaattgtttgccgaggttgataaaggctcggtggcagagtgggcggtaaaaacggtcattgaaaaatttgccgaacagtttgccgcgctaagcgataactatctcaaagagcgggctggcgatttacgtgcgctgggtcagcgattgctgtttcatcttgatgacgctaatcaagggccgaacgcctggccggaacgtttcattctggtggcagatgaactgtcagcgacaacgcttgctgagctgccccaggatcgcttagtcggtgttgtcgtgcgcgatggcgctgccaactcccatgctgcgatcatggtacgtgcgctggggatacctaccgtgatgggcgcggatattcagccttcggtactgcatcgtcggacgctgatcgtcgatggttatcgcggtgaattgctggtcgatccggagccggtactgctgcaagaatatcagcggctaattagtgaagagatcgagcttagccgtctggcggaagatgacgtcaatttacccgcccagttaaaaagcggcgaacgcattaaagtcatgctcaatgccggtttaagtccggaacatgaagaaaaactgggcagccgtattgatggcataggactttatcgcactgaaatcccattcatgctgcaaagtggttttccgtcggaagaagaacaggtggcgcagtatcaggggatgctgcaaatgtttaatgataaacccgtcaccttgcgtacgctggatgtcggagcagataagcagctgccttacatgccgatcagcgaagagaatccatgcctgggttggcgtgggattcgcattacgctcgatcagccggagatcttcttgatccaggtgcgggcgatgctgcgtgctaatgccgctacgggcaacctgaatattctgttgccgatggtcacaagcctcgatgaagttgacgaagcacgccgcctgattgaacgtgccggacgtgaagtcgaggagatgatcggttacgaaattcccaaaccacgtatcggcatcatgctggaagtgccgtcaatggtatttatgctgccgcatctggcaaagcgggtcgatttcatctctgttggcaccaacgatctgacgcaatacatcctggccgttgatcgcaacaatacccgggtggcgaacatttatgacagtcttcatcctgcaatgttacgagctctggcgatgatcgcccgggaagcggaaatacatggaatcgatctccgtttgtgcggtgaaatggcgggcgatcccatgtgcgtggcaatcctcattgggcttgggtatcgccatctgtctatgaacggacgttctgtagcgcgcgtaaaatacctgctgcggcgcattgattttgctgaagcagaaaatcttgcgcagcgtagtctggaagcgcaactggcgaccgaagttcgccatcaggttgcagcctttatggagcgtcgcggcatgggcgggttgattcgcggggggttatag

SEQ ID NO: 2255 - DNA, 531 bp, Escherichia coli
gtgattgatgacgatggctaccgcccaaacgtaggtatcgtgatttgtaatcgccaggggcaggtaatgtgggcccggcgatttggtcagcactcctggcaatttccgcaaggcggaatcaaccccggagaatccgcagagcaggcgatgtaccgtgaattgtttgaagaagtaggattaagccgcaaagacgttcgaatccttgcttcaacgcgtaactggttgcgctacaaattaccgaaacgtttggtgcgttgggacacgaagccggtttgtatcggccaaaaacaaaaatggtttctcttgcagctggtgagcggcgatgcagaaatcaatatgcaaaccagcagtacaccagagtttgacggctggcgatgggtaagttactggtatccagtcagacaggtggtgtcatttaaacgtgatgtctaccgtagggtaatgaaagagttcgcgagtgtggtgatgtcattgcaggaaaatacgccaaaaccacaaaacgcatctgcttatcgacgtaaaagaggttaa

SEQ ID NO: 2256 - DNA, 147 bp, Escherichia coli
atgttatccacagaaagctgggataactgtgaaaaacctccactactgtttccatttacagccttgacgtgcgacgaaactccagtttttagtggttcagtgcttaacttagtggcacattctgtggataaatacggcattggttga

SEQ ID NO: 2257 - DNA, 690 bp, Escherichia coli
atgtcccaacctcgcccactgctctctcctcccgaaactgaagaacaattgttagcgcaagcacaacaactttctggttatacattgggagaactggcggcacttgccgggctggttacgccggagaatttaaaacgcgataagggctggattggcgtgttactggagatctggctaggtgccagcgcagggagtaaacctgagcaagattttgctgctctgggcgtggaacttaaaactatccctgtggatagtcttggtcgtccgctggaaacaacattcgtttgtgttgccccgttaacgggcaatagcggggtgacctgggaaaccagccacgtgcgccacaagctcaaacgcgtgctgtggataccggttgaaggcgagcgcagcatcccgctggcaaagcgtcgcgtaggatcaccgttgctgtggagcccgaatgaagaggaagaccggcagttacgcgaagactgggaagaattaatggatatgattgttctcggtcaggttgagcggatcaccgctcggcacggggaatatttgcagatacgaccgaaagcagcgaatgcgaaagcgctgaccgaagctattggtgcccggggcgaacggattctgacgctgccgcgcggattttatttgaagaagaatttcaccagtgcgctactggcccgtcattttctgatccagtag

SEQ ID NO: 2258 - DNA, 714 bp, Escherichia coli
atgttatttgcatggataaccgatcctaacgcctggcttgcgctcggtacactgacgctgctggagatcgttcttgggatcgacaatattattttcctttctctggtggtggcaaagcttcccacagcacaacgtgctcatgcgcgccgtctggggttggcgggagccatggtcatgcgtctggcgctgctggcatccatcgcctgggttacgcgcctgacgaatccgctttttacaatattcagtcaggaaatttccgcccgtgatttgatcctgcttctgggtggcttgttccttatctggaaagccagcaaggaaatccacgaatccatcgaaggtgaagaagaagggctgaaaacacgcgtttcatcattcctcggcgctatcgtgcagattatgctgctggatattatcttcagcctcgactcggtgattaccgctgtgggtctgtcagatcacctgtttattatgatggctgccgtggtgattgccgtaggcgtgatgatgttcgccgcgcgctcgattggtgattttgtcgagcgccatccttcggtaaaaatgctggcgctctctttcctgattctggtgggctttaccctgattctggaaagtttcgacatccacgtaccgaaaggttacatctacttcgcgatgttcttctctattgcggttgaaagcctcaacctgattcgcaacaaaaagaatccgctctga

SEQ ID NO: 2259 - DNA, 219 bp, Escherichia coli
atgaaaaaatgggcagtaataatttctgcagtcggactggcgtttgctgtttccgggtgttccagtgattacgtcatggcgaccaaagatggccgtatgattttgaccgatggaaaacctgaaattgatgatgataccgggctggtgagttatcacgatcagcaaggtaacgcgatgcaaattaaccgtgatgatgtttcgcaaattattgaacgttaa

SEQ ID NO: 2260 - DNA, 1041 bp, Escherichia coli
atgcaatatcaccgtataccccacagttcgctggaagtcagcacgctggggcttggcacgatgacgtttggtgaacagaacagcgaagccgacgcccacgcacaactcgactatgccgtcgctcagggcattaaccttatcgacgttgccgaaatgtacccagtacctccgcgccccgaaactcaagggctaaccgaaacctacgtcggcaactggctggcgaaacatggcagccgcgaaaagttaattatcgcctccaaagtgagcggaccgtcgcgcaataatgacaaaggcatccgcccggatcaggcgctggatcggaagaatatccgcgaagcgctgcatgacagcctcaagcgtctgcagactgattacctcgatctctatcaggtgcactggccgcagcgcccaaccaactgcttcggcaaactcggttatagctggacagattctgcgcctgcggtttcgctgctggatacgctggacgcactggcagagtaccaacgcgcgggaaaaattcgttatatcggcgtgtcgaacgaaactgcatttggcgtaatgcgctacctgcatctggcggacaaacacgatctgccgcgtattgtcaccattcagaacccctacagcctgttaaaccgcagttttgaagtaggtctggcagaagtcagccagtatgaaggggtcgaactgctggcctattcgtgcctgggtttcggcacactgaccgggaaatatctcaatggtgcaaaacccgctggcgcacgtaatacgctctttagtcggttcacccgctatagcggtgagcaaacgcaaaaagccgtcgcggcgtatgttgatatcgccagacgtcatggcctggaccctgctcagatggcgctcgcatttgtacgccgtcaaccgtttgttgccagcactctgctgggcgcaaccacgatggagcagctgaaaactaacgtcgaaagtttgcatctggagttgagcgaagacgtattagctgaaattgaagcggtgcatcaggtttatacgtatcctgcaccataa

SEQ ID NO: 2261 - DNA, 1194 bp, Escherichia coli
atgagtgagtcagtgcacactaacacttcgttgtggtcgaaggggatgaaagcggttatcgtggcgcagtttctctctgcgtttggcgataatgcgctgctgtttgccactctggcgttactgaaagcgcagttctatccggagtggagccagcccatcctgcaaatggtgtttgtaggtgcttacattctttttgcgccgtttgtcggacaggtggcggatagcttcgccaaaggccgggtgatgatgtttgccaacggcctgaagctgctgggcgcagccagtatctgctttggtatcaatccgtttctcggctatacgctggtgggtgttggtgctgcagcctattcaccggcgaaatacggtattctcggcgaattaaccacgggtagtaagttagtgaaagctaacggtttaatggaagcttctaccatagcggcgattttgctcggttccgtagccggtggtgtactggctgactggcatgtcctggtcgccctggccgcatgcgcactggcctacggtggtgcggtcgttgccaatatctacattcccaaactggcggcggcgcgtccggggcagtcctggaatctcatcagcatgacccgcagtttcctgaatgcctgcacctcgctatggcgcaatggtgaaacgcgtttttcgctggtgggcaccagtttattctggggagcgggtgtcacgctgcgtttcctgttggtgctgtgggtaccggtggcgctgggtattaccgataacgctacgccgacctatctcaacgcgatggtagcgattggtatcgtggttggtgcaggtgcggcagcgaagttagttacgctggaaaccgtgtcacgctgtatgccagccgggattttgattggcgtggtggtactgattttctccctgcaacacgagctgctgccagcctatgctttgttgatgctgattggcgtgctggggggcttttttgtcgttccgctcaatgcgttgctacaggagcggggtaaaaaaagcgtcggggcggggaatgcgattgcagtacaaaaccttggcgaaaacagcgccatgttgttgatgctgggcatttactcgctggcggtaatggtaggcatcccggtcgtgcccattggcattggcttcggtgcgctgtttgcgctggcaataacggcgctgtggatctggcagcgccgtcattaa

SEQ ID NO: 2262 - DNA, 2160 bp, Escherichia coli
atgctttttagcttttttcgaaatttgtgccgtgttttgtatcgcgttcgcgttacgggtgacaccaaggcactgaagggcgagcgcgttctaattacgcctaatcacgtctcttttattgatggcatactgctggcattgtttttacccgtacgtccggtatttgccgtttacacctcaataagccaacagtggtatatgcgttggctgaaatcatttatcgactttgttcctctcgacccgacgcaacctatggcgattaaacatctggtacgtctggtggaacagggccgaccagtggtgattttccctgaaggacgcatcaccaccactggctcgctgatgaaaatctacgatggcgcgggatttgtcgcggcgaagtctggtgcaacggttattcctgtgcgtattgaaggggcggaacttacgcacttcagccgcctgaaaggtctggttaaacgtcgcttgttcccgcaaattactctgcatattttgccaccaacgcaggtggagatgccggatgcgccgcgtgcccgtgaccgtcgcaaaatcgctggcgaaatgctgcatcaaataatgatggaagcgcgtatggcggtgcgcccgcgtgaaacgctgtacgaatctttactgagcgcaatgtaccgcttcggagccgggaagaaatgtgtcgaagacgttaactttaccccggactcctatcgcaaattgcttacgaaaacgctgtttgttggacgcatccttgaaaaatacagtgttgaaggcgaacgcatcggcttaatgctgcccaatgcaggcatcagtgctgcagtgatttttggggccatcgcccgtcgccgcattcccgcaatgatgaactacaccgccggggtaaaagggttgaccagtgctattacggcggctgaaatcaaaaccattttcacttcccgtcagtttctcgataaaggcaaactctggcatctgccggagcaacttactcaggtacgctgggtctatctggaagatttaaaagcagatgtcaccactgccgacaaagtgtggattttcgctcatttgctgatgccgcgtctggcacagttaaaacagcagccggaagaagaggcgctgatcctctttacctccggttctgaaggccatccgaaaggcgtcgtccatagccataaaagcattctggcgaacgtcgagcagattaaaacgattgccgacttcaccaccaacgatcgctttatgtcggcgttaccgctgtttcactcctttgggctgacggtaggcctgtttacgccactgctcacaggtgcagaagtgttcctttatccaagcccgctgcattaccgcattgtgccggagttggtgtatgaccgcagttgcaccgtgttgttcggtacctcgactttcctcggtcactacgcgcgctttgccaacccgtatgacttctatcgtctacgctatgtggtggcaggcgcagaaaaactacaagaaagtactaaacagctttggcaggataaatttggcctgcgcatccttgaaggctacggtgtgaccgaatgcgcgcctgtcgtttctatcaacgtaccgatggcggcgaaacccggtacggtagggcgtattctacctggaatggatgcgcgcctgttgtcagttcctggtatcgaagagggcggacgcctgcaactgaaagggccgaacataatgaacggctatctgcgggtggagaagccaggtgtactggaagtgcccgccgccgagaatgttcgcggcgaaatggagcgcggctggtatgacactggcgatattgtgcgttttgacgagcagggctttgtgcagattcagggccgcgcaaaacgctttgccaaaattgcaggcgaaatggtgtcgctggaaatggtggaacaactggcacttggtgtttcgccagataaagtccatgccactgcgattaagagcgatgccagcaaaggcgaggcactggtgcttttcaccacagataacgaactgacgcgcgataagttacaacagtatgcccgcgagcacggcgtgccggagcttgctgtaccgcgcgatattcgctatctgaaacagatgccattacttggcagcggcaaacctgactttgtcacgttgaaaagctgggtagacgaagcggaacaacacgatgagtga

SEQ ID NO: 2263 - DNA, 1032 bp, Escherichia coli
atggcgaccataaaggatgtagcccgactggcaggcgtttcagtcgccaccgtttcccgcgtcattaataattcacccaaagccagcgaagcttcccggcttgctgtgcatagtgcaatggagtctcttagctatcacccgaacgccaacgcccgtgcgctggcgcagcagaccactgaaacgatcggtctggtcgttggtgatgtttccgatccgtttttcggtgcaatggtgaaagcggtcgaacaggtggcttatcacactggtaattttttattgattggcaacggttaccacaacgaacaaaaagagcgtcaggccattgagcaactgatccgccatcgctgtgctgcgctggttgtccatgccaaaatgatcccggatgccgatttagcctcattaatgaaacaaatgcccggtatggtgctgatcaaccgtatcctgcctggctttgaaaaccgttgtattgctctggacgatcgttacggtgcctggctggcaacgcgtcatttaattcagcaaggtcatacccgcattggttatctgtgctctaaccactctatttctgacgccgaagatcgtctgcaagggtattacgatgcccttgctgaaagtggtattccggccaatgaccggctggtgacatttggcgaaccagacgaaagcggcggcgaacaggcaatgaccgagcttttgggacgaggcagaaatttcactgcggtagcctgttataacgattcaatggcggcgggcgcgatgggcgtgctcaatgataatggtattgatgtaccgggtgagatttcgttaattggctttgatgatgtgctggtgtcacgctatgtgcgtccgcgtctgaccaccgtgcgttacccaatcgtgacgatggcgacccaggctgccgaactggctttggcgctggcggataatcgccctctcccggaaatcactaatgtctttagtccgacgctggtacgtcgccattcagtgtcaactccgtcgctggaggcaagtcatcatgcaaccagcgactaa

SEQ ID NO: 2264 - DNA, 1263 bp, Escherichia coli
atgccacattcactgttcagcactgataccgatctcaccgccgaaaatctgctgcgtttgcccgcagaatttggctgcccggtgtgggtctacgatgcgcaaattattcgtcggcagattgcagcgctgaaacagtttgatgtggtgcgctttgcacagaaagcctgttccaatattcatattttgcgcttaatgcgtgagcagggcgtaaaagtggattccgtctcgttaggcgaaatagagcgtgcactggcggcgggttacaatccgcaaacgcaccccgatgatattgtttttacggcagatgttatcgatcaggcgacgcttgaacgcgtcagtgaattgcaaattccggtgaatgcgggttctgttgatatgctcgaccaactgggtcaggtttcgccagggcatcgggtatggctgcgtgttaatccggggtttggtcacgggcatagccaaaaaaccaataccggtggcgaaaacagcaagcacggtatctggtacaccgatctgcccgccgcactggacgtgatacaacgtcatcatctacagctggtcggcattcacatgcacattggttctggcgtcgattatgcccatctggaacaggtatgtggtgctatggtgcgtcaggtcctcgaattcggtcaggatttacaggctatttctgcgggcggtgggctttctattccttatcaacagggtgaagaggcggttgataccgaacattattatggtctgtggaatgccgcgcgtgagcaaatcgcccgccatttgggccatcctgtgaaactggaaattgaaccgggtcgctttctggtagcgcaggctggcgtattaattactcaagtgcggagcgtcaaacaaatgggtagccgccactttgtgctggttgatgccgggttcaacgatctgatgcgcccggcaatgtacggtagttaccaccatatcagtgccctggcagctgatggtcgttctctggaacacgcaccaacggtggaaaccgtcgtcgccggaccgttatgtgaatcgggcgatgtctttacccagcaggaagggggaaatgtcgaaacccgcgccttgccggaagtgaaggcaggtgattatctggtactgcatgatacgggggcatatggcgcgtcaatgtcatccaactacaacagccgtccgctgttaccagaagttctgtttgataatggtcaggcgcggttgattcgccgtcgccagaccattgaagaattactggcgctggaattgctttaa

SEQ ID NO: 2265 - DNA, 936 bp, Escherichia coli
atggccgccgttaacttacgtcatattgaaatttttcatgcggtaatgaccgccggaagcctgactgaggcggcacacctgctacacacctcacagccaaccgtcagccgcgaactggcgcgctttgagaaggtgatcgggctgaaattgtttgagcgcatacgtggacgattacatcctaccgtgcaaggactgcgtctgtttgaagaagtgcaacgatcctggtacggactggatcgcattgtcagtgccgcagaaagtctgcgcgagtttcgccagggagaactgtctattgcctgcctgccggtcttttcgcaatcttttttaccgcagctcctgcaaccctttctggcacgttatcccgatgtcagcttaaacatcgtgccccaggaatcaccgctacttgaagagtggctctcggcccagcgtcatgatttaggactcactgaaacgctccatacgcctgcgggaacagaacgtaccgaattactctctttagatgaagtgtgtgtgttacctccgggccatccgctggcggtaaaaaaggtattaacgccggatgattttcacggtgagaactacatcagcctttcccgtactgacagctatcgccagttgctggatcaattgtttactgagaatcaggttaaacgacgcatgatcgtagaaacccacagcgccgcgtcagtctgcgcaatggtacgggcgggggtaggcgtttcggtggttaacccgctcaccgcactggattatgcggcaagcggtttagtggtgcggcggttcagcattgcggttccattcaccgtcagcctgatccgccccctgcaccgcccgtcatcagcgctggtgcaggcgtttagtgagcatttacaagcgggattaccgaaactggtcacttctcttgacgctattttgtcgtcagctacgacagcataa

SEQ ID NO: 2266 - DNA, 693 bp, Escherichia coli
atgaaaacaattggtttgctgggaggaatgagctgggaatccactattccttactatcgtctgataaatgaaggcattaaacagcggcttggtgggcttcactctgcgcaagtgctgctacatagcgtcgattttcatgaaatagaagagtgccagcgtctcggtgagtgggacaaaaccggggatattctggctgaggcggcgcttggcttacagcgggcgggcgcagaaggtattgtgttatgcaccaatacgatgcacaaagtggcggatgccattgagtctcgttgctctctgcctttcttacacatagcggatgccactggacgtgcaattaccggggcaggaatgactcgtgtggcgctgctgggtacacgttacaccatggaacaggatttttatcgcgggcggctgacggaacaattttccatcaactgtcttattcctgaagcggatgaacgggcaaaaattaatcagattatttttgaagaactgtgtctggggcaatttaccgaagcgtcacgcgcttattatgcgcaagtgattgctcgccttgcagaacagggcgcacagggcgtcatttttggctgcacagaaattggtttactggtgccagaagagcgcagtgttctgcctgtgtttgataccgcggcgatccatgccgaggatgctgtcgcttttatgctgtcgtag

SEQ ID NO: 2267 - DNA, 1419 bp, Escherichia coli
atggttactatcaatacggaatctgctttaacgccacgtcctctgcgggatacgcggcgtatgaatatgtttgtttcggtagctgctgcggtcgcaggattgttatttggtcttgatatcggcgtaatcgccggagcgttgccgttcattaccgatcactttgtgctgaccagtcgtttgcaggaatgggtggtcagtagcatgatgctcggcgcagcaattggtgcgctgtttaatggttggctgtcgttccgcctggggcgtaaatacagcctgatggcgggggccatcctgtttgtactcggttcgatagggtccgcttttgcgaccagcgtagagatgttaatcgccgctcgtgtggtgttgggcattgctgtcgggatcgcgtcttacaccgctcctctatatctttctgaaatggcaagtgaaaacgttcgcggtaagatgatcagcatgtaccagttgatggtcactctcggcatcgtgctggcgtttttatccgatacagcgttcagttatagcggtaactggcgcgcaatgttgggggttcttgctttaccagcagttctgctgattattctggtggtcttcctgccaaatagcccgcgctggctggcggaaaaggggcgtcatattgaggcggaagaagtattgcgtatgctgcgcgatacgtcggaaaaagcgcgagaagaactcaacgaaattcgtgaaagcctgaagttaaaacagggcggttgggcattgtttaagatcaaccgtaacgtccgtcgtgctgtatttctcggtatgttgttgcaggcgatgcagcagtttaccggtatgaacatcatcatgtactacgcgccacgtatcttcaaaatggcgggctttacgaccacagaacaacagatgattgcgactctggtcgtggggctgacctttatgttcgctaccttcattgcggtctttacggtagataaagcagggcgtaagccggctctgaaaatgggtttcagcgtgatggcgttaggcactctggtgctgggttactgcctgatgcagtttgataacggtacggcttccagtggcttgtcctggctctctgttggcatgacgatgatgtgtattgccggttatgcgatgagcgccgcgccagtggtgtggatcttgtgctctgaaattcagccgctgaaatgccgcgattttggcatcacctgctcaacgacgacaaactgggtgtcgaatatgattatcggcgcgaccttcctgacactgcttgatagcattggcgctgccggtacgttctggctctacactgcgctgaacattgcgtttgtgggcatcactttctggctcattccggaaaccaaaaatgtcacgctggaacatatcgagcgcaaactgatggcaggcgaaaagttgagaaatatcggcgtctga

SEQ ID NO: 2268 - DNA, 762 bp, Escherichia coli
atgattttaagtgcattttctctcgaaggtaaagttgcggtcgtcactggttgtgatactgggctgggccaggggatggcgttggggctggcgcaagcgggctgtgacattgttggcattaacatcgttgaaccgactgaaaccatcaagcaggtcacggcgctggggcgtcgttttttaagcctgaccgccgatctgcgaaagattgatggcattccagcactgctggatcgcgcggtagctgagtttggtcatattgatatcctggtgaataacgccggattgattcgccgcgaagacgctctcgaattcagcgaaaaagactgggacgatgtcatgaacctgaatatcaagagcgtattcttcatgtctcaggcagcggcgaaacactttatcgcgcaaggcaatggcggcaagattatcaatatcgcgtcaatgctctccttccagggcgggatccgtgtgccttcttataccgcatcaaaaagcggtgtgatgggcgtgacgcgattgatggcgaacgaatgggctaaacacaatattaatgttaatgcgatagctccgggttacatggcgaccaacaatactcaacaactgcgggcagatgaacaacgtagcgcggaaattctcgaccgcattccagctggccgttggggactgccgagtgacctgatggggccggtagtgtttcttgcctccagcgcttcagattatgtaaatggttataccattgctgtggatggcggttggctggcgcgttaa

SEQ ID NO: 2269 - DNA, 837 bp, Escherichia coli
gtggacgtaagacagagcatccacagtgcgcacgcaaaaacgctggatacccaggggctgcgcaatgaatttttggttgaaaaggtatttgtcgccgatgagtacaccatggtttacagccacattgaccgtattattgttggcggcattatgccggtaactaaaacggtttccgttggcggggaagttggtaaacaactcggcgtaagctatttccttgaacgtcgcgagttaggtgttatcaatattggcggtgccggtacgattactgtcgatggtcaatgctatgaaatcggtcaccgcgacgccctgtatgttggtaaaggtgcaaaagaagttgtctttgccagtattgataccgccactccggcgaagttttattacaattgcgcacccgcgcatacgacgtatcccaccaaaaaagtcacaccggacgaagtatctccagtcacgttaggcgataacctcaccagtaaccgtcgcacgattaacaaatattttgtcccggatgtgctggaaacctgccaattgagtatggggctgacggagctggctccaggtaacttgtggaacaccatgccgtgtcacacccacgagcgccggatggaagtttatttctatttcaatatggatgatgacgcctgcgttttccacatgatggggcaaccgcaagaaacgcgtcacattgtgatgcataacgagcaagcggtgatctccccgagctggtcgatccattccggcgtcggaaccaaagcttatacctttatctggggcatggtcggtgaaaaccaggtttttgatgatatggaccatgtggccgttaaagatttgcgctag

SEQ ID NO: 2270 - DNA, 1182 bp, Escherichia coli
atgaaagacgttgtgattgtcggggcgttacggacacctatcggctgctttcgtggtgcgttagcgggtcattccgccgtggaacttggcagcctggtcgtcaaagcgttaatagaacgtaccggcgttcctgcatatgcggtggatgaagtgattcttggtcaggtgttgactgcaggggcagggcagaatccggcaaggcaatcggctattaaaggtggtcttcctaatagcgtttctgcaatcactattaatgacgtttgtggttccgggcttaaagcactgcatctggctactcaggcgatacagtgtggcgaggctgatattgtcatcgccggtggccaggaaaacatgagccgcgcaccacatgttctgactgatagccgcaccggcgcacagcttggcaatagccagttggttgatagtcttgtgcatgatgggttgtgggatgccttcaatgattatcatattggtgtcaccgccgaaaatctggctcgcgaatatggcatcagccgtcagttgcaggatgcttacgcacttagctcgcaacaaaaagcgcgagcggcgattgacgccggacgatttaaagatgagatcgtcccggtaataacccaaagtaacggtcagacgttggttgttgataccgatgaacagccacgcactgacaccagcgcagaaggcttagcccgtttaaatccttcatttgatagtctcggttctgtgacagcgggtaatgcatcatccataaacgatggggcagctgcagtaatgatgatgagcgaagccaaagcacgagcgttgaatttacccgtgctggcccgcatccgcgcatttgccagcgttggtgtggatccggcattgatgggaattgcgccggtgtatgcgacccgccgttgcctggagcgtgttggctggcagttggctgatgtcgatcttatcgaggctaatgaagcgtttgctgcacaggcgctttcggttggcaagatgcttgaatgggatgagcgtcgggtcaatgttaatggtggtgcgatcgcactcggtcacccgataggcgcttccggttgccgaatcctggtttctcttgttcatgaaatggtgaaacgtaatgcccgcaaaggactggcaacgctttgtatcggcggaggccagggtgtggcattgaccattgaacgtgacgagtag

SEQ ID NO: 2271 - DNA, 1230 bp, Escherichia coli
atgtctaatatttggtcaaaagaagaaactctgtggagtttcgcgctctacggcacagccgttggtgcaggcacgctcttccttcctattcagttaggttcggcgggggctgtggtcctgtttattactgctctggtcgcctggcctttaacatattggccacataaagccttatgccagttcatcctctcatcgaaaacatcagcaggtgaagggataacgggcgcggtaacacactactatggcaagaagattggtaatctgattaccacgctgtacttcatcgccttttttgtcgtcgtgttgatatatgcagtggcaattaccaactcacttacggaacagctggcaaagcatatggttattgatcttcgcatccgtatgttggtgagtctgggggttgtattaatcctgaatctcatttttctgatgggacgccatgcaaccattcgggtaatgggatttttggtattcccattgattgcctatttcttatttctttctatttacctggtcggtagttggcaacctgatctattaacaacccaggtagagttcaatcagaatacccttcaccagatatggatatcgattcccgtgatggttttcgcttttagccatacgcccattatttctacgtttgccatagacagacgtgaaaaatatggcgaacatgctatggataaatgcaaaaaaattatgaaagtcgcttatctcatcatctgcataagtgtattgttctttgtctttagctgcctgctttctattccaccttcgtatattgaagcggctaaagaagaaggggttaccattttatcggcgctttctatgctgccgaacgccccagcatggttatcaatttccgggattattgtcgcagtagttgcgatgtcgaaatcattcctgggtacgtactttggcgttattgaaggtgccacagaggtcgtcaaaacaacattacagcaggttggtgtaaagaaaagtcgtgcatttaaccgcgcactatcaattatgttggtatcgctgattaccttcattgtttgttgcattaacccgaacgcgatttcgatgatttacgcgatcagcggcccgctcattgccatgatacttttcatcatgcctacgctgtcaacgtatctcatcccggcgcttaaaccctggcgttccatcggaaatctgattacgctgatcgtgggtatcctgtgcgtatcggtaatgttctttagctaa

SEQ ID NO: 2272 - DNA, 756 bp, Escherichia coli
ttgagtgcgggacgcctgaataaaaaatctctgggtatcgtgatgttgttatcggttggactgcttttggcgggctgttcgggtagcaaatcatccgatacaggaacgtattccggctccgtttacaccgtgaaacggggggatacgctatatcgtatttcgcgcaccacgggaaccagcgtaaaagaactggcgcgactgaacggcatttcccccccttacaccattgaagtaggtcagaaactaaaactgggtggggcgaaaagtagcagtagtacacgtaaatcaaccgccaaatcaacgaccaaaaccgcatcggttacaccgtcatcagcggtaccgaaatcttcctggccgccagtagggcaacgttgttggttatggccaacgacagggaaagttatcatgccgtattcgacagcagatggcggcaataaagggattgatatctcagctccacgaggtacacctatttacgccgcgggtgcaggaaaggtggtgtatgtgggcaaccagctgcgtggctacggtaatctcatcatgattaaacacagtgaagattacattacggcttacgctcataatgacacgatgctggtaaataatgggcaaagcgtgaaagctgggcaaaaaatcgccactatggggagcactgatgcggcatctgttcgcctgcatttccagattcgttaccgtgcaacggcaattgatccgctacgttacttgccgcctcagggcagcaagccaaaatgctga

SEQ ID NO: 2273 - DNA, 2298 bp, Escherichia coli
atggaagcgcgggaagcaaccgctacgggtgaatcatgcatgcgcgtcgatgccattgctaaggtcaccgggcgagcacgatatactgacgattatgttatggcgggcatgtgttacgcgaaatatgtacgtagccctatcgcacatggttatgctgtaagtattaatgatgaacaagccaggagtttgccgggcgtcctggcgatttttacctgggaagatgtgccagaaatcccattcgccacggcagggcatgcctggacacttgacgaaaacaagcgcgataccgccgatcgcgcactgctaactcgccatgttcgtcatcatggcgacgccgttgccatcgtcgtggcccgcgatgaactcacggcagaaaaagcggcgcaattggtcagcattgagtggcaagaattacccgttatcacctcgccagaagcggcgctggcagaagacgctgcaccaatccataacggtggcaatttactgaaacaaagcacgatgtcgacgggtaatgtccaacaaacaatcgatgccgccgactaccaggtacaggggcactatcagactcccgttattcaacattgtcatatggaaagcgtgacatcgctggcatggatggaggatgactcgcgaattaccatcgtttccagcacccagatcccgcacattgttcgccgcgtggttggtcaggcgctggatattccctggtcatgcgtacgagtcatcaaaccgtttatcggtggcggttttggtaataaacaggatgtactggaagagccaatggcggcattcctgaccagcaaacttggcggcattccggtgaaagtttcccttagccgtgaagagtgtttcctcgcaacccgtacccgccacgcttttactattgacgggcaaatgggcgtgaaccgcgacggaacattgaaaggttatagtctggatgttctgtctaacaccggcgcttatgcatctcacgggcactccattgcttctgctggggggaataaagtcgcttacctttatcctcgttgtgcctacgcttacagttcaaagacctgctataccaacctcccctcggctggtgcgatgcgtggttatggcgcgccacaagtcgtatttgccgttgagtctatgcttgatgatgccgcgacagcgttaggtattgatcctgttgaaattcgtttacgcaacgccgcccgcgaaggagatgctaatccgctcacgggaaaacgtatttacagcgcagggttgccggagtgtcttgaaaaaggccggaaaatctttgaatgggaaaaacgccgtgcagagtgccagaaccagcaaggcaatttacgtcgtggcgttggcgtcgcctgttttagctacacctctaacacctggcctgtcggcgtagaaatagcaggcgcgcgcctgttgatgaatcaggatggaaccatcaacgtgcaaagcggcgcgacggaaatcggccagggtgccgacaccgtgttctcgcaaatggtggcagaaaccgtgggagttccggtcagcgatgtccgcgtaatttcgacacaagacaccgacgttacaccattcgaccccggcgcatttgcctcacgtcagagctatgttgccgcgcctgcgctgcgcagtgcggcactgttattaaaagagaaaatcatcgctcacgccgcagtcatgctacatcagtcagcgatgaatctgaccctgataaaaggccatatcgtgctggttgaacgaccggaagagccgttaatgtcgttaaaagatttggcgatggacgctttctaccaccctgaacgcggcgggcagctctctgccgaaagctccatcaaaaccaccactaacccaccggcgtttggctgtacctttgttgatctgacggtcgatattgcgctgtgtaaagtcaccatcaaccgcatcctcaacgttcatgattcgggccatattcttaatccgctactggcagaaggtcaggtacacggcggaatgggaatgggcattggctgggcgctatttgaagagatgatcatcgatgcgaaaagcggcgtggtccgtaaccccaatctgctggattacaaaatgccgaccatgccggatctgccacaactggaaagcgcgttcgtcgaaatcaatgagccgcaatccgcatacggacataagtcactgggtgagccaccaataattcctgttgccgctgctattcgtaacgcggtgaagatggctaccggtgttgcaatcaatacactgccgctgacgccaaaacggttatatgaagagttccatctggcaggattgatttga

SEQ ID NO: 2274 - DNA, 879 bp, Escherichia coli
atgtttgattttgcttcttaccatcgcgcagcaacccttgccgatgccatcaacctgctggctgacaacccgcaggccaaactgctcgccggtggcactgacgtactgattcagctccaccatcacaatgaccgttatcgccatattgttgatattcataatctggcggagctgcggggaattacgctggcggaagatggctcactacgtatcggctctgcaacgacatttacccagctcattgaagatcctgtaactcaacgtcatctcccggcgttatgtgctgcggcctcatccattgccggaccgcagatccgtaacgtcgctacctacggtggaaatatttgcaacggtgccaccagcgcagattctgccacgccaacgctaatttatgacgcgaaactggagctccactccccacgcggtgttcgtttcgtcccgattaatggctttcacaccgggccgggcaaagtgtctcttgagcatgacgaaatccttgtcgcctttcattttccgccacagccgaaagaacacgcgggcagcgcgcattttaaatatgccatgcgcgacgcaatggatatttcaacaattggctgcgccgcacattgccgactggataacggcaatttcagcgaattacgcctggcatttggtgttgccgcgccaacgccgattcgctgccaacatgccgaacagactgcacaaaatgcgccattaaacctgcaaacgctggaagccatcagcgaatcagtcctgcaagatgtcgccccgcgttcttcatggcgggccagtaaagagtttcgtctgcatctcatccagacgatgaccaaaaaagtgattagcgaagccgtcgccgcggcggggggaaaattgcaatga

SEQ ID NO: 2275 - DNA, 480 bp, Escherichia coli
atgaatcacagcgaaacaattaccatcgaatgcgtcattaacgggatgccttttcagcttcacgccgcgccaggaatgccgctttcggaactactccgagaacaagggcttcttagtgtcaaacaaggttgctgcgtaggcgaatgcggtgcctgtacggtgctggtcgacggcactgcgatagacagttgcttattccttgcggcctgggctgaaggaaaagagatccgcacgctggaaggtgaagcgaaaggcggtaaactttctcatgtccaactggcttatgcgaaatccggcgcagtgcaatgcgggttttgtacgccgggcctgattatggctaccacggcgatgctggcaaaaccacgcgaaaaaccattaaccattacggaaattcgtcgtggactggcgggaaatctttgtcgctgcacggggtatcagatgattgtaaatacagttctggattgcgagaaaacgaagtaa

SEQ ID NO: 2276 - DNA, 1779 bp, Escherichia coli
atggagcttgctactacgcagtcagtattgatgcaaattcaaccgacaattcagcgttttgccagaatgcttgccagcgttttgcagcttgaggttgagatcgttgatgaaaacttgtgtcgcgtcgccggaacgggcgcgtatgggaagtttcttggccgccagttgagcggcaactcacgcctgctccgccacgtcctggaaacgaaaactgaaaaagttgtgacacagtctcgcttcgatcccctttgtgaaggttgcgatagtaaagaaaattgccgcgaaaaagcatttctgggtacgcctgtcattttacaggatcgttgtgttggggtgataagtttgattgccgttacccacgagcaacaagaacatatcagtgataatttacgcgaattttccgattacgttcgccatatatccaccatttttgtttctaaacttctggaggatcagggaccaggagataacatcagtaaaatattcgcgaccatgatcgataatatggatcagggcgtgttagtggttgatgctgataatcgggttcagtttgttaatcagacagctttaaaaacactcggtgttgtacaaaataatattattggaaaacctgttcgtttcagaccattaacatttgagagtaattttacccatggtcatatgcaacatattgtttcgtgggatgataaaagtgaattaatcattggtcagttgcataacatccagggccgacaactatttttaatggcgtttcaccaatcgcataccagtttttctgtagcaaatgcacctgatgaaccgcatattgaacaattggttggcgagtgccgtgttatgcggcaattaaaacgactcattagccgtattgcacccagcccatccagcgttatggtggttggtgaaagcggcacgggtaaagaagtcgtcgctcgtgcaatccataagttgagcggaagacggaataaaccctttattgctatcaactgtgccgcgattccggaacagcttctggagagcgaactgttcggttatgttaaaggcgcatttactggcgcttctgccaacggtaaaacagggttgattcaggcggcgaatacgggcacgctgtttctcgatgaaattggtgatatgccattaatgttgcaggctaaattactgcgcgctattgaggcgcgtgaaattctgccgattggtgccagtagcccaatacaagtcgacatccgcatcatttctgcaactaatcagaatttggcccagttcattgccgaaggtaaattccgcgaagatctcttctaccgacttaatgttatcccgataactcttccaccgctgcgtgaacgtcaggaagatattgaattactggtgcattactttttacatctgcatacccgtcgtctgggatcggtttatcctggcattgctcctgatgtcgtcgaaatattgcgtaagcatcgttggcccggaaacctgcgcgagttaagcaatttgatggaatatctggttaacgttgttccttcaggtgaagttatcgatagcacgctattgccgccaaatctgctgaataatggcacaacggagcaaagtgatgtaacagaggtcagtgaggcgcacctgtcactcgatgatgcgggcggcacggcgctggaggagatggaaaagcaaatgatccgcgaggcgctttcacgtcataacagcaagaaggaagttgctgatgaactgggcatcggcattgctacgctctatcgcaagattaagaaatatgagttgttaaacacataa

SEQ ID NO: 2277 - DNA, 1188 bp, Escherichia coli
atgaaaactgttaatgagctgattaaggatatcaattcgctgacctctcaccttcacgagaaagattttttgttaacgtgggaacagacgccagatgaactgaaacaagtactggacgttgccgccgcgttaaaagcactgcgtgctgaaaacatctcaaccaaagtctttaatagtggattaggtatttccgtattccgcgacaattccacccgtacccgcttctcttatgcttccgcgcttaacctgctcggccttgcacaacaagatcttgacgaaggtaaatcacaaatcgctcacggcgaaaccgtgcgtgaaaccgccaatatgatctccttctgcgctgacgctatcggtattcgcgacgatatgtatctgggcgcaggcaacgcctatatgcgtgaagttggcgcggcacttgatgacggctacaaacaaggggttctgccacagcgtccggctttagtgaacctgcaatgcgatattgaccacccgactcagtctatggctgatctggcatggttacgtgaacactttggttcactggaaaacctgaaaggtaaaaaaatcgccatgacctgggcctactccccaagctatggcaaaccgctctctgtaccacaaggcatcatcggtctgatgacccgcttcggtatggatgtcaccctggcccatccggaaggctacgacctgatcccggatgtcgttgaagttgctaaaaacaatgctaaagcctccggtggtagcttccgtcaggtcaccagcatggaagaagccttcaaagacgcagacatcgtttatccgaagtcatgggcaccttacaaagtgatggaagagcgtactgaattgctgcgtgcgaacgatcacgaaggcttaaaagcactggaaaaacagtgtctggcacagaacgcgcaacacaaagactggcattgtactgaagagatgatggaactgacccgtgatggcgaagccctgtacatgcactgcctgccagctgatatcagcggcgtatcctgcaaagaaggtgaagtgactgaaggcgtattcgaaaaataccgtatcgctacctacaaagaagccagctggaagccttatatcatcgccgcgatgatcctgtcccgtaaatacgccaaaccaggtgcactgctcgagcaactgctgaaagaagcgcaagaacgcgtgaaataa

SEQ ID NO: 2278 - DNA, 1197 bp, Escherichia coli
atgtccgttttctcattgaagattgatatcgccgataacaaatttttcaacggcgaaacatcaccgcttttttcgcaaagccaggcaaaactggcacgccagttccaccagaaaattgctggttatcacccaacaccgctttgtgcgctggacgatctcgcaaacctgtttggtgtaaagaaaattctcgtcaaagacgaatcaaaacgattcggtctgaacgccttcaaaatgctcggcggtgcgtacgccatcgctcaattattgtgtgaaaaatatcatcttgatatcgaaacgctgtcatttgagcacttgaaaaatgccatcggcgaaaaaatgactttcgcgactaccaccgacggcaaccacgggcgcggtgtggcatgggcagcacagcaactcggacagaatgcggtgatttacatgccgaaaggttctgctcaggaacgcgttgacgccattctaaacctcggtgccgagtgcatcgtcacggatatgaactatgacgataccgttcgcctgaccatgcaacacgcgcagcagcacggctgggaagtggtacaggacacggcatgggaaggttacaccaaaatcccaacctggatcatgcaaggctacgcaacactggcggatgaagccgtcgagcaaatgcgtgaaatgggcgtcaccccgacacacgttctgctgcaagccggtgtcggtgcaatggccggtggtgtgctgggttatctggtcgacgtctatagcccgcacaatctgcacagcattattgttgaacctgacaaagctgactgtatttatcgctccggcgtcaaaggcgacatcgtcaacgttggcggtgatatggccaccatcatggcgggcctggcctgcggcgaacctaacccactgggctgggaaatcctacgtaactgcgccacccaattcatctcctgccaggacagcgttgccgcattaggtatgcgcgtgctgggtaatccgtatggcaacgacccgcgcatcatctccggtgaatccggcgctgtcggtttgggcgttctcgcagcggttcattatcacccgcaacgtcaaagcctgatggaaaaactggcgctgaacaaagatgccgtggtgctggttatcagcactgaaggcgacaccgacgtgaagcactaccgcgaagttgtctgggaaggcaaacacgctgtagcaccttaa

SEQ ID NO: 2279 - DNA, 1212 bp, Escherichia coli
atggctaagaatattccattcaaactgattcttgaaaaagcaaaagattaccaggcagacatgactcgcttcctgcgcgatatggttgctattcccagtgaaagctgcgacgagaaacgcgtagtacatcgtattaaagaagagatggaaaaagtcggcttcgataaagttgaaatcgacccaatgggcaatgttctcggttatatcggccacggcccgcgtctggtggcaatggacgctcatatcgatacagtcggcattggcaacatcaaaaactgggacttcgatccgtatgaaggcatggaaaccgacgagctgatcggtggtcgtggtacttccgaccaggaaggcggcatggcgtctatggtatatgccggaaaaatcattaaagatctcggtctggaagatgaatataccctgctggtcaccggtactgtgcaggaagaagactgcgacggtctgtgctggcaatacattattgaacaatccggcattcgcccggaatttgtggtcagtaccgaaccaaccgactgccaggtataccgtggtcaacgcggtcgtatggaaattcgcattgatgttcagggtgttagctgccacggttcggcaccagaacgtggtgataacgccattttcaaaatgggtccaattcttggcgaattacaggaactgtctcaacgtctgggctatgacgaattcctcggcaaaggtacgctgactgtttctgaaatcttcttcacctccccaagtcgttgcgctgtagcagacagctgcgcagtttcaatcgaccgtcgtctgacctggggcgaaacctgggaaggcgcgctggacgagatccgcgctctacctgcagtacagaaagctaacgcggttgtttctatgtacaactacgaccgcccgtcctggactggcctggtttacccaaccgaatgctacttcccgacctggaaagtggaagaagatcacttcaccgttaaagcactggtgaatgcttatgaagggctgtttggtaaagcgcctgtcgttgataagtggaccttctcgactaatggcgtatccatcatgggtcgccacggcattccggtcatcggttttggccctggtaaagaaccggaagcgcacgcgccaaacgaaaaaacctggaaatctcacctggtaacttgtgccgctatgtacgctgcaatcccattaagctggctggcaaccgaataa

SEQ ID NO: 2280 - DNA, 1386 bp, Escherichia coli
atgcgcgtattgataaaaaacggcattgttgttaatgcagatggacaggcgaagcaggatttgctgattgaaagcgggattgttcgccagttgggtaccgatatttcgccgcaactcccttgcgaagaaattgatgcctctggctgttacgttttccctggcggcgtggatgtccatacgcatttcaatattgatgtcggcatcgcgcgcagttgtgatgatttttttaccggtacccgcgctgctgcgtgtggcggtacaacaaccattattgaccatatgggatttggcccaaatggctgccggttacgccatcaactggaagtttatcgcggttatgccgcccacaaagcagtcatcgactacagctttcacggtgtcattcaacatattaatcacgctatcctcgacgaaattccgatgatggttgaggaaggactgagcagttttaaactctatttaacctatcaatataaactcaacgatgatgaagtgttgcaggcattacgccgcttgcatgagtccggcgcactgaccaccgtacacccggaaaatgacgcagctatcgccagcaagcgggcggagtttatcgccgcagggttaaccgcgccgcgttatcatgccttgagtcgacctctggaatgcgaagcggaagccatcgcccgcatgattaacctggcacaaattgccggtaacgccccgctctatatcgtgcacctgtctaacggcttaggtctggattatctgcgtcttgcccgtgcgaatcaccagccagtctgggttgaaacctgcccacaatatctcctgttggacgaacgcagttacgatacagaagatggtatgaagttcattcttagcccaccgctgcgtaacgtacgcgagcaggacaaactgtggtgtggcatcagcgatggtgcgattgacgtggtggcaaccgatcactgcaccttctcgatggctcaacgcctgcaaatttctaaaggcgatttcagccgctgcccaaatggcttacccggtgtggagaaccgcatgcaactgctgttctccagtggcgtgatgacgggacgtatctcaccggagcgttttgttgagttaaccagtgcaatgcccgccaggctgtttggcctgtggccacaaaaaggattattagcgcccggttccgatggcgacgtggtgattatagacccacgtcagagccaacaaattcagcatcgccatctccacgacaacgctgactactcgccatgggagggttttacctgtcagggcgcgattgtcagaaccttatctcgtggtgaaacgattttctgcgacggcacctttacaggcaaagccgggcgaggtcgtttcctgcgacgcaaaccgtttgtccctcccgtgctctaa

SEQ ID NO: 2281 - DNA, 933 bp, Escherichia coli
atgagtaagaaaattgttctcgccctgggcgggaatgcgctgggcgatgacctggctgggcaaatgaaagcggtaaaaattacttctcaggcaattgttgatttaattgcccagggacatgaggtcatcgtcactcatggcaacgggccacaggtgggcatgattaaccaggcctttgaagctgcagcaaaaactgaagcgcactcgccaatgctgccgatgtctgtctgtgttgccttaagccagggttatattggttacgatctacaaaacgccttaagagaagaactgctttctcgtggcattaataaacctgtagcaacgctggttacccaggtcgaagtcgatgctaacgatccggcattcctcaccccgaccaagccgatcggttcgttctttaccgagcaagaagcagagctactgacaaaacagggttacactctgaaagaagatgcgggtcgcggctatcgccgtgtcgttgcttcgccaaaaccggttgatatcattgaaaaagaaacggttaaagctctggtagatgccggacaggtggtgatcaccgttggcggtggtggtatccctgttattcgtgaaggtaaccatctgcgtggtgccagcgcggttatcgataaagactgggccagcgcccgtttagcagaaatgattgatgccgatatgctgatcattctgactgcggtagaaaaagtggccattaacttcggaaaagagaatgaacagtggctcgatcgcctgtcgttaagtgatgctgaacgctttatcgaagaaggtcattttgcgaaaggttctatgctgcctaaagtggaagctgccgcctcgtttgctcgctctcgcgcaggtcgtgaagcactgattaccgtattgagcaaagcgaaagaagggattgaaggcaaaaccggaacggtgatttgtcagtaa

SEQ ID NO: 2282 - DNA, 1626 bp, Escherichia coli
atgaatattttcacagaggctgcaaaactcgaagagcaaaattgtccgtttgcgatggcgcaaattgttgatagccgaggctcaaccccccgccattctgcacaaatgttagtgcgcgccgatggttctatcgtcggtacaattggtggcggaatggttgaacggaaggtgattgaagagtcgcttcaggcattgcaggaacgtaagccgcgattattccatggacgtatggctcgtaacggtgcggatgctgtcgggtcagattgtggaggtgcaatgtcagtatttatcagcgtccatggtatgcgtccacgtctggtgttgattggtgcggggcatgtcaaccgggcgatagcccagagtgcggcgctattaggatttgatatcgccgttgctgatatttatcgcgaaagcctcaatcctgaactattcccaccatcaaccacgcttctccatgctgagtcgtttggtgcggcagtggaagcactggatattcgccctgataattttgtcctgattgccacgaataatcaggatcgtgaagccctcgacaaactcattgaacaacccattgcatggctggggttgctggcaagtcgccgcaaggttcagcttttcctgcgccaattgcgtgagaaaggcgtggctgaagaacatattgcccgtttacatgcgcccgttggttacaacataggtgcggaaacgccgcaggagatcgccatcagcgtgctggcagaaatattacaggtgaaaaataacgcgccgggtgggttgatgatgaagccttctcatccttccggacaccagctggtggtgattcgcggtgcgggggatatcgccagtggtgtagcgctacgtctgtatcatgcgggttttaaagtgatcatgttggaagtggaaaaaccgacagtgattcgttgtaccgtggcgtttgcccaggccgtgttcgatggcgaaatgacggtcgaaggcgtcaccgcccgcctggcaaccagctctgcggaagcgatgaaacttaccgaacgcggatttatccctgtgatggtagatcccacctgttcattgcttgatgaactgaaaccgctttgcgtggtggacgctattctggcgaaacagaatttgggaacgcgggcagatatggcaccagtaacaatcgcgcttgggccgggctttactgcagggaaggattgtcatgcggtaattgaaacaaatcgcgggcactggctcggtcaggtgatttactcaggttgtgcgcaggagaataccggtgttcccggcaatattatggggcataccacccgacgagtgatccgcgctcctgctgcaggcattatgcgatccaacgtgaaattaggcgatctggtgaaagagggcgatgtcattgcctggattggtgagcatgaaattaaagcaccgttgacggggatggtgcgtggcttgttgaacgacggactggccgtggtcggtggttttaaaattggtgatatcgatcctcgtggtgaaacggctgatttcaccagcgtttctgataaagcccgggcgattggcggcggcgtacttgaggcgttaatgatgttgatgcatcagggcgttaaagcgacaaaagaagtgctggaagtggcttaa

SEQ ID NO: 2283 - DNA, 771 bp, Escherichia coli
gtgaaaagtataattgacctatcggcattattcattgatttaggcgcgcagaaacgtcccactgtgatttctattgttggtgctggggggaaaaccagcttgcttttttggctggcagaactgttccaggcgagcggcaggcgtgtattaatcactacgacgacacatatgtttatgccaacatctcactggcccgtggttttctgtcgtgatcccgccatgcttcctcatgcgtcttttatatcccccatttcattttgttttcacagctggaaagcgaaccagggaaaagtgcagggatttacgccagaagcgattgatgcactggtacaacgaccagagtgtgacgtaattctcattgaggcagatggctcgcgtggaatgccgttaaaagcgcctgatgagcacgaaccttgcatacctgaaagcagttgctgcgtgattgctgtgatgggaggacatattttgggtgcgaaagtgagcacagaaaatgtccatcgctggtcgcagtttgctgatattactgggttaacacctgctgcacccttgcaactgagcgatctcgttgcgctggttcgccaccctcagggggcgtttaaaaacgtaccgcaaggttgtcggcgagtctggttcattaaccgtttttctcaatgtgagaatgcgattgcgcaaagcgagctccttcaaccgctgcaacaacacaacgtagaggcaatctggctgggcgatatacaagaacatcctgcaatcgcgcgcagatttgtgaattag

SEQ ID NO: 2284 - DNA, 579 bp, Escherichia coli
atgtcagccatcgactgtataattaccgccgcaggattatcatcaagaatggggcattggaaaatgatgttaccctggcaacagggaacaattcttgatacaagtatcaaaaatgcgttgcagttttgtagccgaattattttagtcaccggctatcgtggtaatgaactgcacgaacgttatgcgaaccagagcaatatcactattatccacaacccagattatgcgcagggtttactgacatcagtaaaggccgcagtacccgcggtgcaaacagaacattgttttctcacccacggagatatgccaaccctcaccatcgatatttttagaaaaatctggtcgttacgaaatgatggcgcaatactgccactccataatggcatccccggccatccgattttagtgtcaaaaccatgcctgatgcaggcaatccagcgacccaatgtcaccaatatgcgtcaggcactccttatgggagaacattattccgtcgaaatagaaaatgcagaaataattttagatattgatactccggacgactttattacagcgaagaaaaggtatactgaaatttag

SEQ ID NO: 2285 - DNA, 3099 bp, Escherichia coli
atgggggatattatgcgtcccattccgtttgaggaacttttgacgcgcatatttgatgaataccaacaacaacgctcaatctttggtattcccgagcaacagttttactcacccgtaaaaggtaaaactgttagcgtcttcggtgaaacctgtgccactcccgtcggccctgccgctggcccgcacacgcaacttgcgcaaaacatcgtcacctcctggctgactggcggacgcttcatcgaactaaaaaccgtccaaattcttgaccgcctggagctggaaaagccctgtatcgatgccgaagacgagtgctttaacaccgaatggtctaccgaatttaccctgcttaaagcctgggatgaatacctcaaagcctggtttgccctgcaccttctcgaagcgatgttccagccttctgattccggtaaatcgttcatctttaatatgagcgtcggttacaacctcgaaggtattaagcaaccgccgatgcagcagttcatcgacaatatgatggacgcatctgaccatccgaaattcgctcaataccgcgatgcacttaataagctactccaggatgaggcatttttagcccgccacggattgcaggaaaaacgcgaaagcttgcaagccttacccgctcgcatccccaccagcatggtacaaggggttaccctctccaccatgcacggctgtcctccgcatgaaatcgaagccatttgccgctacatgctggaagaaaaagggctcaacacctttgtgaaactcaacccgaccttactggggtacgcgcgtgttcgtgagatcctcgatgtctgcggtttcggttacatcggcttaaaagaagagtcatttgatcacgacctcaagctgacgcaagcactggaaatgctggaacgcctgatggcactggcaaaagaaaaatcactcggctttggcgtaaaactgactaacactctcggcaccattaataacaaaggcgcactgcccggtgaagagatgtatatgtcaggccgtgcgctgttcccgctctccatcaacgttgcagcagttctctctcgcgcctttgacggcaaactgcccatttcttattccggtggtgccagtcagctgactatccgcgatatttttgatactggtattcgccctattactatggcaaccgacctgctgaaacctggcggctatctgcgcttaagtgcctgcatgcgcgagctggaaggctcagatgcctgggagcttaaccacgttgacgtcgaacgactgaacagactggcagcagacgcgttaaccatggaatacacccagaaacactggaagccagaagagcgtattgaagtggctgaagacctgccgctgaccgattgctacgttgccccctgtgttactgcctgcgctatcaagcaagatattccggaatacatccgtctgcttggcgaacaccgctatgccgacgcgctggaactcatctatcaacgcaacgccctgcccgccattaccggtcatatttgcgatcaccagtgccaatacaactgtacccgcctggattacgacagtgcgctgaatatccgcgaactgaaaaaagtcgcgctggaaaaaggttgggatgaatataagcaacgctggcacaaaccagccggttctggttcacgccatccggttgccgtgattggtgcaggtccggcgggtctggcagcaggttacttccttgccagagcgggccatccggttacgctgtttgaacgcgaagccaatgcgggcggcgtggtgaaaaatatcattcctcagttccgtattcctgcagagttaattcagcacgatatcgattttgttgccgctcacggcgtaaaatttgagtatggctgctcacccgatttgaccgttgaacagttaaaaaatcagggcttccactatgttctgattgccaccggcactgataaaaatagcggtgtgaaactggcgggcgacaaccaaaatgtctggaaatcactccccttcctgcgtgaatacaacaagggcaccgcgctcaagctgggcaaacatgtggtcgttgtcggggcgggtaacaccgcaatggactgcgctcgtgcggcgttacgcgttccaggcgtagaaaaagcaacggtcgtttaccgtcgttcactgcaagagatgccagcatggcgcgaagagtatgaagaagcgttgcacgacggcgtggagttccgttttctgaataatccggaacgtttcgatgctgatggcaccttaaccttgcgcgttatgtcgcttggcgaacctgatgagaaaggtcgtcgccgtccggttgaaaccaacgaaacagtaacgctgcatgtagacagcctgatcaccgccattggtgaacagcaggatactgaagccctgaatgcaatgggcgtgccgctggacaaaaacggctggccagacgtcgaccataatggcgaaacacgtctgactgacgtctttatgatcggcgacgtacagcgcggaccatcctccattgtcgctgctgtcggaaccgcgcgtcgggcgaccgatgccatcctgagtcgggaaaatatccgttcccaccagaacgataaatactggaataacgtcaatccggcggaaatctatcaacgtaaaggcgatatctctgtcactctggtgaacagtgacgatcgtgacgcgtttgtcgcgcaggaagccgctcgctgccttgaatgtaactacgtttgcagcaagtgtgtggatgtctgcccgaaccgcgccaacgtatccattgcggtcccaggcttccagaaccgtttccagacgctgcatctcgacgcctactgcaacgaatgcggcaactgcgcccaattctgcccgtggaacggtaaaccgtacaaagacaaaatcaccgtcttcagcctgtcgcaagactttgataacagcagcaacccaggcttccttgtggaagattgccgggtacgcgtacgtctgaataaccaaagctgggtgttaaacatcgacagcgaaggtcagttcaacaacgtaccaccggagctgaacgatatgtgccgcatcattagccatgtccaccagcatcatcattatctgctgggccgcgtggaggtgtaa

SEQ ID NO: 2286 - DNA, 1329 bp, Escherichia coli
atgttgattctgaagaatgtcaccgcagtgcagttacacccggcgaaagtgcaggaaggcgttgatatcgccatcgaaaatgatgtgattgtcgctatcgacgatgccctgacgcaatgctatcccgatgccagctacaaagagatgcatggtcggattgtgatgccgggaattgtctgctcgcataaccatttttactcggggctttcccgcggaattatggcaaacatcgccccctgcccggatttcatctcaacgctgaaaaatctctggtggcggctcgatcgcgcccttgatgaagagtcgctctattacagcggactgatttgttccctggaagcgattaagagcggatgtacatcggttatcgatcaccatgcctctccagcctatatcggcgggtcgctctccacattgcgcgacgcatttttaaaagttggcctgcgcgcgatgacctgttttgaaactactgaccgtaacagcggcatcaaagagttgcaggaaggtgtagaagaaaacatccgcttcgcccgtcagattgatgaggcgaagaaagcagcaaccgagccgtatctggtggaagcacatatcggcgctcacgcgccgtttaccgtaccggatgccggtctggagatgctgcgtgaagccgtgaaaagcacaggtcgtggtttgcatattcacgctgcggaagacctttacgacgtttcctacagtcaccattggtacggcaaagacctgctggcacgactggcgcaattcgatctcatcgacagcaaaacgctggtcgctcatgggctgtacttgtcgaaagatgacatcgccctactcaatcagcgcgatgcgttcctggtgcataacgcccgttcaaacatgaacaaccatgtcggctacaaccatcaccttagcgacatccgcaatctggcgttgggaacggacggcattggttcggacatgtttgaagagatgaaatttgccttctttaaacatcgcgatgcgggtggcccgctgtggcctgacagttttgccaaagcactggctaacggcaacgaactgatgagccgcaactttggcgcgaaatttgggcttctggaagccggttacaaagccgatttaaccatttgcgattacaactcgccgacgccgctgctggcagacaatatcgccgggcatatcgctttcggtatgggctcaggcagcgttcacagcgtgatggtcaatggtgtgatggtctatgaagaccgtcagtttaacttcgattgcgattccatttatgcgcaagccagaaaagccgctgccagtatgtggcgtcggatggatgcgctggcataa

SEQ ID NO: 2287 - DNA, 780 bp, Escherichia coli
atgattgaacaatttttcagacccgactctgtcgaacaggcgctggaactgaagcgccgctaccaggatgaagccgtctggttcgccgggggcagcaaactcaacgctacaccaacccgtaccgataaaaagattgccatttccttgcaggatctggagctggactggattgactgggataacggtgcactacgaattggcgcaatgtctcgcttgcagccactgcgtgatgcacgatttattcctgcagcactgcgtgaagccctcggttttgtttactcacgccatgttcgtaatcagtcgaccattggtggtgaaatcgccacccggcaggaagagtcggtgctgcttcccgtcctgctggcactggatgctgaactggtttttggcaacggcgaaacgctgtcaatcgaggactacctggcctgcccatgcgatcgcctgttaaccgaaattatcattaaagatccgtatcgcacctgtgcgactcgcaaaattagccgttctcaggcaggtttaaccgtcgtgacggcagccgttgcaataacagaccacgacggaatgcgaattgcgctggatagcgtcgccagtaaagcactgcgtctgcatgatgttgaaactcaaaatctggaaggcaatgcacttgaacaggctgtcgccaacgccattttcccgcaggaagatttgcggggcagcgtggcctataaacgctatatcacgggagttctggtagccgatctgtatgccgactgccaacaggctggggaggaagccgtatga

SEQ ID NO: 2288 - DNA, 2871 bp, Escherichia coli
atgatcatccactttactttaaatggcgcgcctcaggagctaaccgttaatccaggcaaaaacgtgcaaaagctgttgtttaacatgggaatgcactctgtacgcaacagtgatgatggttttgggtttgccggttctgacgcaattatctttaacggtaatatcgttaacgcgtccttgcttatcgccgcacagttagagaaggcagatattcgtaccgcagaatctctgggcaaatggaatgagttaagtccggttcaacaggccatggttgatgttggcgtggtgcagtctggttataacgatccagctgcggctctgattatcaccgatcttctcgatcgcatcgacgcacctacccgcgaagagatcgacgacgcactctcaggtctgtttagccgcgatgctggctggcagcaatactatcaggtcattgaactggcggttgcacgtaaaaataatccgcaggccaccattgatatcgctccgactttccgtgacgaccttgaagtcattggcaagcattatcctaaaactgatgccgcgaaaatggtgcaggcgaaaccctgctatgttgaagatcgcgtaacggctgacgcctgcgtcattaaaatgttacgtagcccacacgctcacgcactgattactcatctggatgtcagcaaagctgaagccttaccgggcgtcgttcacgttattactcacctgaattgcccggatatttactataccccgggtggtcagagcgcaccggaaccgtcaccgcttgaccgccgaatgttcggcaagaaaatgcgtcacgtcggcgatcgcgttgctgcggtagtagccgaaagtgaagacattgcgctcgaagcactgaagctcatcgacgttgaatatgaagtgcttaagccggtaatgtcgattgacgaggcaatggctgaagatgcgcctgtcgtgcacgatgaaccggtggtgtatgttgctggtgcgccagatactctagaagatgataacagccatgcagcccagcgcggcgagcatatgatcatcaacttcccgatcggttctcgcccacgcaaaaatatcgctgccagtattcatggtcatattggcgatatggacaaaggctttgccgatgccgatgtgatcattgagcgaacctataactcaacgcaggcgcagcagtgcccgactgaaacacatatctgctttacccgtatggacggcgatcgtctggtgatccacgcctccacccaggtaccatggcacttacgccgccaggtcgcgcgcctcgtgggcatgaaacaacataaagttcatgtcattaaagaacgtgtaggcggcggttttggctctaaacaggacatcctgctggaagaagtgtgcgcctgggcaacttgcgtgaccgggcgtccggtacttttccgctacacccgtgaagaagagtttattgctaacacctctcgtcacgtagcgaaagtcaccgtcaaactgggcgcgaaaaaagatggtcgcctgacggcagtgaagatggatttccgcgccaacacgggtccttacggtaaccactcactcaccgtaccgtgtaacggaccggcgctgtcgctgccgttatatccatgcgataacgtcgattttcaggtcaccacctactacagcaacatttgcccaaatggtgcttatcagggttatggcgcgccgaaaggtaacttcgctatcaccatggcgttagcggaactggcggaacaattgcagatcgaccaactggaaattattgaacgtaatcgtgtacacgaagggcaggagttgaaaattctcggtgcgattggtgaaggtaaagcgccgacatccgttccttccgccgccagctgcgcactggaagagatcctgcgtcagggtcgcgagatgatccaatggtcttcaccaaaaccgcaaaatggtgactggcacatcggtcgcggcgtcgccattatcatgcagaaatcgggtatcccggatatcgatcaggctaactgcatgatcaaactggaatcggatggcacctttatcgttcattccggtggtgcggatattggtactggtctggatactgtggtgaccaaactggcagcagaagtgctgcactgcccaccgcaggacgtgcatgttatctctggtgataccgatcatgcactgtttgataaaggcgcatatgcctcgtccggtacttgcttctcgggtaacgctgcgcgtttggcagcggaaaatctgcgggagaaaatcctgttccacggcgcgcaaatattgggtgagccagtggcagatgttcaactagcaacgccgggcgtcgttcgcggcaagaaaggcgaagttagtttcggagagatagcccataaaggcgaaaccggcaccggctttggttcactggtgggaactggcagttatatcacacctgatttcgccttcccgtatggcgcaaacttcgctgaagttgccgtcaacacgcgtacgggtgaaatccgcctggataaattctacgccttgctggactgcggtacaccggtcaatccagagttagcgttgggacaaatctacggtgccactctgcgagctatcggccacagtatgagcgaagagatcatttatgacgccgaaggtcacccgttaacgcgtgatttacgcagttacggcgcaccgaaaattggtgacattccgcgtgatttccgcgctgtgctggtgccgagcgacgataaagtcggcccattcggggcgaaatcgatctcggaaatcggtgtaaatggcgcagctccggcgattgctaccgcaattcacgatgcctgcggcatctggttacgcgaatggcatttcacaccggagaaaatactcaccgcgctggaaaaaatataa

SEQ ID NO: 2289 - DNA, 1401 bp, Escherichia coli
atgtctgatataaaccatgcaggttctgaccttatatttgaactggaggatcgccctccctttcatcaggctctcgtaggtgccattacccatctgttggcaattttcgttccgatggtaacccccgcgttaatcgtgggtgcggccttacagctttccgctgaaacaactgcctatcttgtttctatggcgatgatcgcctctggtattggtacctggttacaagtaaaccgctacggcatcgtcggttctggtttactttcaattcagtcagtcaatttttcatttgttacggtcatgattgcgctgggcagcagcatgaaaagcgacggttttcacgaagagttaatcatgtcgtcgctcctcggcgtctccttcgttggcgcatttctggttgtcggctcttcttttatcctgccctatttacgtcgggttattacgcctaccgtcagcggcattgtggtgctgatgatcggcttaagcctgattaaagtcggcattattgattttggtggaggatttgcagccaaaagcagcggtacgttcggcaattacgaacatctcggcgttggtttattggttttgattgtggtgatcggctttaactgctgtcgcagtccgttgctacgcatgggagggatcgccattgggctatgtgtcggctatatcgcatcgttatgcctgggcatggtggatttcagcagtatgcacaatttgccgttaatcaccatcccgcatccgttcaaatacggctttagttttagcttccatcagttcctggtggttggcacgatttatctgcttagcgtgctggaagctgtcggcgatatcaccgccacagcaatggtttcccgccgccccattcagggggaagagtatcagtcccgactgaaaggcggcgtgctggcagatggtctggtttctgttatcgcctccgctgtcggttcattaccattaaccacgtttgcgcaaaataatggggttattcagatgactggcgtcgcttcacgttatgtcgggcgaaccatcgcggtaatgctggttatcctcggcttatttccgatgattggcggcttcttcacgaccattccctcagcagttctgggaggcgcaatgacgttgatgttttccatgattgccatcgcagggattcgcatcatcatcaccaacggtttaaagcgccgtgaaacgcttattgttgccacttctttaggtttagggcttggtgtctcctacgatcccgaaatttttaaaatattgccagcctctatttatgtattagttgaaaaccctatttgtgctggcgggttaactgcgattttattaaatattatcctccctggtggctaccgacaggaaaacgttctgcctggtattacctcagcggaagagatggattaa

SEQ ID NO: 2290 - DNA, 1317 bp, Escherichia coli
atgtcaggagaacacacgttaaaagcggtacgaggcagttttattgatgtcacccgtacggtcgataacccggaagaaattgcctctgcgctgcggtttattgaggatggtttattgctcattaaacagggaaaagtggaatggtttggcgaatgggaagacggaaagcatcaaattcctgacaccattcgcgtgcgcgactatcgcggcaaactgatagtaccgggctttgtcgatacacatatccattatccgcaaagtgaaatggtgggggcctatggtgaacaattgctggagtggttgaataaacacaccttccctactgaacgtcgttatgaggatttagagtacgcccgcgagatgtcggcgttcttcatcaagcagcttttacgtaacggaaccaccacggcgctggtgtttggcactgttcatccacaatccgttgatgcgctgtttgaagccgccagtcatatcaatatgcgtatgattgccggtaaagttatgatggaccgaaacgcaccggattatctgctcgacactgccgaaagcagctatcaccaaagcaaagaactgattgaacgctggcacaaaaatggtcgtctgttgtatgcgattacgccacgcttcgcccctacctcatctcctgaacagatggcgatggcgcaacgcctgaaagaagaatatccggatacatgggtacatacccatctctgtgaaaacaaagatgaaattgcctgggtgaaatcgctttatcctgaccatgatggttatcttgatgtttaccatcagtacggcctgaccggtaaaaattgtgtctttgctcactgcgtccatctcgaagaaaaagagtgggatcgtctcagcgaaaccaaatccagcattgctttctgtccgacctccaacctttacctcggcagcggcttattcaacttgaaaaaagcatggcagaagaaagtcaaagtgggcatgggaacagatatcggtgccggaacaacttttaacatgctgcaaacgctgaacgaagcctacaaggtattgcaattacaaggctatcgcctctcggcatatgaagcgttttacctggccacgctcggcggagcgaaatctctgggccttgacgatttgattggcaactttttacctggcaaagaggctgatttcgtggtgatggaacccactgccactccgctacagcagctgcgctatgacaactctgtttctttagtcgacaaattgttcgtgatgatgacgttgggcgatgaccgttcgatctaccgcacctacgttgatggtcgtctggtgtacgaacgcaactaa

SEQ ID NO: 2291 - DNA, 1368 bp, Escherichia coli
atgtctggagacatcctacaaacaccggacgcaccaaagccacagggcgcgctggataattattttaaaatcaccgctcgtggcagtaccgttcgtcaggaagtactggctggcttaacgacctttctggccatggtttattccgttatcgtcgttccgggaatgctgggcaaagcaggttttcctcccgcagctgtgtttgttgccacctgtctggtcgcgggcttcggctcgttgctgatggggttatgggccaatttgccaatggcgattggttgcgctatttccttgacggcgtttaccgcattcagtctggtactcgggcaacaaattagcgttcctgtcgcactgggcgcagtctttctgatgggcgtcatcttcaccgctatttccgtaaccggtgtgcgtacctggatcttacgtaatttgccgatggggatcgctcacggtacaggtatcggtatcggcctgtttctgctgctgattgctgctaacggtgtgggaatggttatcaaaaacccgattgaaggcttgccagtggcgctcggtgcctttacctccttcccggtgatgatgagcttactggggctggcggtcatcttcggtctggaaaagtgccgcgtacccggcgggatcttgttggtgattattgcaatttcgatcatcggcttaatctttgacccagcggtgaagtaccacggtctggtggcgatgccaagcctgactggcgaagatggtaagtctctgattttcagcctcgatattatgggcgcactccagccaactgtacttccgagtgtactggcattggtgatgaccgcagtgttcgacgccactggcaccatccgtgccgtcgccggtcaggcgaatttgttggataaagacaaccagatcatcaacggcggcaaagccctgaccagtgactcagtaagttcaatattctccggcctggtgggcgcagcgcccgcggcggtttatatcgaatcagcggcaggaaccgccgccggggggaaaaccggtttaaccgcaaccgtggttggtgcgttgttcctgatgattctgtttttatcaccgttatcgtttctgatccccggttatgccacagctcccgcactgatgtacgtgggtttgctgatgttaagcaacgtctcgaagctggatttcaacgattttattgacgcaatggctggcctggtgtgtgccgtgttcatcgttctgacttgtaatatcgttaccggtattatgctgggttttgtaacactggtagtgggccgcgtctttgcacgcgaatggcaaaagctgaatattggtacggtgatcattactgccgcactggtcgcgttttacgcgggtggttgggctatctaa

SEQ ID NO: 2292 - DNA, 489 bp, Escherichia coli
atgaaatcgttaattatcgttaatccggctgactgtattggctgccgtacttgtgaagtggcctgtgtggtcgctcacccttcagaacaggagttgaatgccgatatctttttaccccggctgaaggtacaacggctggatagcatcagtgcgccggtgatgtgccatcagtgtgaaaacgccccttgtgttggcgcttgtcccgtgggggcgctgacgatgggagagcaggtggtgcaggcaaattctgcccgttgtattggctgtcagagttgcgtcagtgcgtgcccgtttggaatgatcaccattcagtcattgccgggggatacccggcaacaaatcgtgaaatgcgatctctgtgaacagcgggaagaggggccagcctgcgttgaatcttgcccgacacaggcgctgcagttgctgactgaaagagaactcaggcgagtccgccagcagcgtattgttgccagcagtgagaatcctctctga

SEQ ID NO: 2293 - DNA, 1920 bp, Escherichia coli
atgaataagtttatcgctgctgaagctgcggaatgtataggctgccatgcttgtgaaattgcctgtgcggtggcacataatcaagaaaactggccgctgagtcacagtgactttcgaccgcgtatccacgttgtagggaaaggccaggctgcgaatccggtggcctgccatcactgcaacaatgccccttgcgttacggcttgtccggttaatgctctgactttccagtccgatagcgtacaactggacgagcaaaaatgtattggttgtaaaagatgcgcaatcgcttgcccctttggcgtcgttgagatggtcgatacgattgcacagaaatgcgacctttgtaaccagcgcagttccggcacgcaagcctgtattgacgtctgcccaacacaggcgttacggctgatggacgataaagggttgcagcagataaaggtggcccgccagcgcaaaacggcagcaggaaaagcgtcatcagacgctcagccatctcgcagtgcagcgttgctccccgttaactcgcgtaaaggcgcagataaaatttcagcgagtgaacggaaaacccactttggcgaaatctattgcgggctggatccacaacaagcgacttatgagagtgaccgctgtgtttattgtgccgaaaaagctaactgcaactggcattgtccgctgcataacgctattccggattacatccgtctggtacaggaaggaaagattattgaagcggcagaactttgccaccagaccagttccttacccgaaatctgcggcagggtatgtccacaggaccgtctttgtgaaggtgcatgtactttgaaagatcactctggcgcagtctctatcggtaatctggaacgctacatcaccgatactgcgctggcgatgggctggcgtcccgatgtcagcaaagttgttccccgtagcgaaaaagtggcggtgattggcgctggacctgcaggattagggtgtgctgatattctggcgcgcgcgggagttcaggttgatgtctttgatcgccatccagaaattggcggtatgctgacttttggcattcctcctttcaaactcgataaaacggtattaagccagcggcgagagatattcatcgcaatgggaatcgatttccatctcaactgtgaaattggccgcgatatctctttcaacgaattaacggcggaatatgatgctgttttcctcggcgtggggacttacgggatgatgcgagcagatctgccgcatgaagatgcgcctggtgtcattcaggcgttaccgttcctgaccgcccatacccgccagctcatgggattgccggagtctgcagagtatccgctgacggatgtggaaggtaagcgagttgtggtattgggcggtggcgatacgacaatggattgtttgcggacttccatccgccttaatgccgccagcgtgacctgtgcgtatcgtcgtgatgaagtcagtatgccgggctcgcgcaaagaggtggtcaatgcccgcgaggaaggtgttgagtttcagttcaatgttcagccgcaatatatcgcttgtgatgaagatggacgcttaactgcggtgggcctgattcgtaccgctatgggtgagccggggccggatggtcgccgtcgtcctcgtccggttgcgggttcagagtttgaattgcccgccgatgttctcattatggcctttggtttccaggcacataccatgccgtggttgcagggcagcggaattaaactcgataaatggggcctgattcaaaccggcgacgtcgggtatttacctacccagacgcatctgaaaaaagtctttgctggtggtgatgcagttcatggcgcggatctggttgtcactgcaatggccgcaggaaggcaggcggcgcgcgatatgttaactctgtttgatacgaaggcatcgtga

SEQ ID NO: 2294 - DNA, 1449 bp, Escherichia coli
atgagcgccatagattcccaacttccctcatcttctgggcaagaccgcccaactgatgaggttgaccgcatattatcaccaggaaagctgatcatactcggtctgcaacacgtccttgtcatgtacgcaggtgcagtcgctgttcctcttatgattggtgaccgactcggcctatcaaaagaagctattgcgatgctcattagctcggatctcttttgctgcgggatcgtcacattattgcaatgtatcggtatcggccgctttatggggatccgcctgccggtgattatgtcggtgaccttcgccgctgtaacaccaatgatagccattggtatgaacccggatatcggcctgctggggatattcggtgccactatcgccgcgggttttatcaccacattattagcgccacttatcggtcgcttgatgcctttattcccgccactggttaccggtgtggttattacttctatcgggcttagcatcattcaggtgggtattgactgggccgccggaggtaaagggaatccgcaatatggtaatcccgtttatttaggtatctcctttgccgtcttaatttttatcttgctcattactcgctatgcgaaaggatttatgtccaacgtcgccgtattactggggattgtatttggttttttactttcgtggatgatgaatgaagtcaatttatccgggctacatgatgcttcatggtttgcgattgtcacgccgatgtcatttggtatgccgattttcgatcccgtttccattctgaccatgactgccgtgttaatcatcgtgtttatcgagtcgatggggatgttcctggcactgggtgaaatagtcggtcgtaaactctcttcacacgatattattcgcgggctgcgtgtcgatggtgtagggacaatgataggcggaacgtttaacagcttcccccacacgtcattttctcaaaacgttggcctggttagcgtgacgcgcgttcatagccgctgggtgtgcattgcttccggtatcattttgatcctgttcggcatggtgcccaaaatggcggtgctggtggcctcgattccgcaatttgtgctgggcggcgcggggctggtgatgttcggcatggtactggcgacagggattcgaattctgtcgcgctgtaactacaccactaaccgttacaacctctatattgtggcgatcagtctcggtgttggcatgacgccaacgctctctcacgatttcttttctaagttaccggccgtactgcaaccgttgctgcatagcggcattatgctcgcaacccttagcgccgttgtgctgaacgtcttctttaatggctaccagcatcatgctgacctggtgaaggaatccgtctctgataaagatttaaaagtcaggacagtacgtatgtggcttctgatgcgcaagctgaagaaaaatgagcatggagaataa

SEQ ID NO: 2295 - DNA, 126 bp, Escherichia coli
atgaatcttttaatgcgcgctatattcagtctgctgttgctttttactctctctattcctgtcatttctgattgtgttgcaatggccattgaaagtcgcttcaaatatatgatgctgcttttttaa

SEQ ID NO: 2296 - DNA, 549 bp, Escherichia coli
atgcaaacggaacacgtcattttattgaatgcacagggagttcccacgggtacgctggaaaagtatgccgcacacacggcagacaccctcttacatctcgcgttttccagttggctgtttaatgccaaagggcaattattagttacccgccgcgcccttagcaaaaaagcatggcctggcgtgtggactaactcggtttgtgggcacccacaactgggagaaagcaacgaagaggcggtgatccgccgttgccattatgagcttggcgtagaaattacgcctcctgaatctatctatcctgactttcgctaccgcgccaccgatccgaatggcattgtggaaaatgaagtgtgtccggtatttgccgcacgcacgaccagtgcgttacagatcaacgatgatgaagtgatggattatcaatggtgtgatttagcagcggttttacgcggtattgatgctacgccgtgggcgttcagtccgtggatggtgatgcaggcgacaaatcgcgaagccagaaaacgattatctgcatttacccagcttaaataa

SEQ ID NO: 2297 - DNA, 1518 bp, Escherichia coli
atgtctgaacaacacgcacagggcgctgacgcggtagtcgatcttaacaatgaactgaaaacgcgtcgtgagaagctggcgaacctgcgcgagcaggggattgccttcccgaacgatttccgtcgcgatcatacctctgaccaattgcacgcagaattcgacggtaaagagaacgaagaactggaagcgctgaacatcgaagtcgccgttgccggccgcatgatgacccgtcgtattatgggtaaagcgtctttcgttaccctgcaggacgtggggggccgcattcagctgtacgttgcccgtgacgatctgccggaaggcgtttacaacgagcagttcaaaaaatgggacctcggcgacatcctcggcgcgaaaggtaaactgttcaaaaccaaaaccggcgaactgtctatccactgtaccgagctgcgtctactgaccaaagcactgcgtccgctgccggataaattccacggcttgcaggatcaggaagcgcgctatcgtcagcgttatttggatctcatctctaacgatgaatcccgtaacacctttaaagtgcgctcgcagatcctctctggtattcgccagttcatggtgaaccgcggctttatggaagttgaaacgccgatgatgcaggtgatccctggcggtgccgctgcgcgtccgttcatcacccaccataacgcgctggatctcgacatgtacctgcgtatcgcgccggaactgtacctcaagcgtctggtggtcggtggcttcgagcgtgtattcgaaatcaaccgtaacttccgtaacgaaggtatttccgtacgtcataacccagagttcaccatgatggaactctatatggcttacgcagattacaaagatctgatcgagctgaccgaatcgctgttccgtactctggcacaggatattctcggtaagacggaagtgacctacggcgacgtaacgctggacttcggtaaaccgttcgaaaaactgaccatgcgtgaagcgatcaagaaatatcgcccggaaactgacatggcggatctggacaacttcgactctgcgaaagcgattgctgaatctatcggcatccacgttgagaaaagctggggtctgggccgtatcgttaccgagatcttcgaagaagtggcagaagcacatctgatccagccgaccttcattactgaatatccggcagaagtttctcctctggcgcgtcgtaacgacgttaacccggaaatcacagaccgctttgagttcttcattggtgggcgtgaaatcggtaacggctttagcgagctgaatgacgcggaagatcaggcgcagcgcttcctggatcaggttgccgcgaaagatgcaggtgacgacgaagcgatgttctacgacgaagattatgtcaccgcactggaacatggcttaccgccgacagcaggtctgggaattggtatcgaccgtatggtaatgctgttcaccaacagccataccatccgcgacgttattctgttcccggcgatgcgtccggtaaaataa

SEQ ID NO: 2298 - DNA, 882 bp, Escherichia coli
atgaaacaggggctggaagatgtttctggtctgctggaactggctgtagaagctgacgacgaagaaacctttaacgaagccgttgctgaactcgacgccctggaagaaaaactggcgcagcttgagttccgccgtatgttctctggcgaatatgacagcgccgactgctacctcgatattcaggcggggtctggcggtacggaagcacaggactgggcgagcatgcttgagcgtatgtatctgcgctgggctgaatcgcgtggtttcaaaactgaaatcatcgaagagtcggaaggtgaagtggcgggtattaaatccgtgacgatcaaaatctccggcgattacgcttatggctggctgcgtacagaaaccggcgttcaccgcctggtgcgtaagagcccgtttgactccggcggtcgtcgccacacgtcgttcagctccgcgtttgtttacccggaagttgatgatgatatcgatatcgaaatcaatccggcggatctgcgcatcgacgtttatcgcgcatctggcgcgggcggtcagcacgttaaccgtaccgaatctgcggtgcgtattactcacatcccaaccgggatcgtgacccaatgccagaacgaccgttcccagcacaagaacaaagaccaggccatgaagcagatgaaagcgaagctttatgaactggagatgcagaagaaaaatgccgagaaacaggcgatggaagacaataaatccgacatcggctggggtagccagattcgttcttatgtccttgatgactcccgcattaaagatctgcgtaccggggtagaaacccgcaacacgcaggccgtgctggacggcagcctggatcaatttatcgaagcaagtttgaaagcagggttatga

SEQ ID NO: 2299 - DNA, 1734 bp, Escherichia coli
gtgaaacaacagatacaacttcgtcgccgagaagtcgatgaaacggccgacttgcccgctgaattgcctcccttgctgcgccgtttatatgccagccggggtgtgcgtagcgcgcaggaactggaacgcagtgttaaaggcatgctgccctggcagcaactgagcggcgtcgaaaaggccgttgagatcctttacaacgcttttcgcgaaggaacgcggattattgtggtcggtgatttcgacgccgacggtgcgaccagcacggctctaagcgtgctggcgatgcgctcgcttggttgcagcaatatcgactacctggttccaaaccgtttcgaagacggttacggcttaagtccggaagtagtcgatcaggctcatgcccgtggcgcgcagttaattgtcacggtggataacggtatttcctcccatgcgggggttgaacacgctcgttcgttgggcattccggttattgttaccgatcaccatttgccaggcgacacattacccgcagcggaagcgatcattaaccctaacttgcgcgactgtaatttcccgtcgaaatcactggcgggcgttggcgtggcgttttatctgatgctggcgttacgcacttttttgcgcgatcagggctggtttgatgaacgcggcatcgcaattcctaatctggcagaactgctggatctggtagcgttggggacagtggcggacgtcgtgccgctggacgctaataatcgcattctgacctggcaggggatgagtcgcatccgtgccggaaagtgccgtccggggattaaagcgctgctggaagtggccaatcgcgatccacaaaaactcgccgccagcgatttaggttttgcgctggggccacgtctcaatgctgccgggcgactggacgatatgtccgttggcgtggcgctgttgttgtgtgacaacattggcgaagcgcgtgtgctggcgaatgaactcgatgcactaaaccaaacacgtaaagagatcgaacagggaatgcaggttgaagcgctcactctgtgcgagaaactggagcgcagccgcgacacgctacccggcgggctggcaatgtatcaccccgaatggcatcagggcgttgttggcattctggcatcgcgtatcaaagagcgttttcaccgtccggttatcgcctttgcgccagctggtgatggtacgctgaaaggttccggtcgctccattcaggggctgcatatgcgtgatgcgctggagcggctagacacgctttaccccggcatgatgctcaagtttggcggccatgcgatggcggcaggattgtcgctggaagaggataaattcgaactctttcagcaacgctttggcgaactggttacggagtggttggacccttcgctattgcaaggcgaagtggtgtcggacggtccgttaagtccggccgaaatgaccatggaagtggcgcagctgttgcgcgatgctggcccgtgggggcagatgttcccggagccgctgtttgacggtcattttcgtctgctgcaacagcggctggtgggcgaacgtcatttgaaggtgatggtcgaaccggtcggcggcggtccactgctggacgggattgcttttaatgtcgataccgccctctggccggataacggtgtgcgcgaagtgcaactggcttacaagctcgatatcaacgagtttcgcggcaaccgcagcctgcaaattatcatcgacaatatctggccaatttag

SEQ ID NO: 2300 - DNA, 711 bp, Escherichia coli
atgaagaaaggttttatgttatttaccttgttggcagcgttttcaggctttgttcaggctgatgacgcggcaattcaacaaacgttagccaaaatgggcatcaaaagcagcgatattcagcccgcgcccgtagctggcatgaagacagttctgactaacagcggtgtgttgtacatcaccgatgatggtaaacatatcattcaggggccaatgtatgacgttagtggcacggctccggtcaatgtcaccaataagatgctgttaaagcagttgaatgcgcttgaaaaagagatgatcgtttataaagcgccgcaggaaaaacacgtcatcaccgtgtttactgatattacctgtggttactgccacaaactgcatgagcaaatggcagactataacgcgctggggatcaccgtgcgttatcttgctttcccgcgccaggggctggacagcgatgcagagaaagaaatgaaagctatctggtgtgcgaaagataaaaacaaagcgtttgatgatgtgatggcaggtaaaagcgtcgcaccagccagctgcgacgtggatattgccgaccattacgcacttggcgtccagcttggcgttagcggtactccggcagttgtgctgagcaatggcacacttgttccgggttaccagccgccgaaagacatgaaagaattcctcgacgaacaccaaaaaatgaccagcggtaaataa

SEQ ID NO: 2301 - DNA, 897 bp, Escherichia coli
gtgaaacaggatctggcacgcatcgagcagtttcttgatgctctgtggctggaaaaaaatctggctgaaaatacgttgaacgcttaccgtcgcgatctgtcaatgatggtggagtggttgcatcaccgcgggttgacgctggcgacggcgcaaagtgacgatttgcaggcattactggcagaacggctggagggcgggtataaagccaccagctcagcgcgtttgctgagtgcagtgcgccgattgttccagtatctttatcgcgaaaagtttcgtgaagatgatcccagtgcgcatctcgcttcaccgaaattgccccagcgtttgccaaaagatttaagcgaagcgcaggtcgaacgtttattacaggcaccattaattgatcagccactggagctacgcgataaagccatgcttgaagtgttgtatgctaccggactgcgtgtctctgaactggtcgggctgacaatgagtgatatcagcctgcgtcagggcgtggtgcgggtcattggtaaaggcaacaaagagcgcctggtgccgttaggtgaagaggcggtttactggctggaaacctatctggaacatgggcgtccgtggctgttgaatggtgtgtcaattgacgtgttgtttcccagccagcgtgcgcagcagatgacgcgacagaccttctggcaccgcattaaacattatgccgtgctggcgggtatcgacagcgaaaagctgtcaccgcatgtgttgcgtcacgcttttgccactcacttattaaatcatggtgcggatttacgcgtggtgcagatgctactgggccacagcgatctctccaccacgcaaatttatacgcatgtcgctaccgagcgtctgcgacaacttcatcaacagcatcacccgcgggcgtga

SEQ ID NO: 2302 - DNA, 522 bp, Escherichia coli
atgaatatgggtcttttttacggttccagcacctgttacaccgaaatggcggcagaaaaaatccgcgatattatcggcccagaactggtgaccttacataacctcaaggacgactccccgaaattaatggagcagtacgatgtgctcattctgggtatcccgacctgggattttggcgaaatccaggaagactgggaagccgtctgggatcagctcgacgacctgaacctcgaaggtaaaattgttgcgctgtatgggcttggcgatcaactgggatacggcgagtggttcctcgatgcgctcggtatgctgcatgacaaactctcgaccaaaggcgtgaagttcgtcggctactggccaacggaaggatatgaatttaccagcccgaaaccggtgattgctgacgggcaactgttcgtgggtctggcgctggatgaaactaaccagtatgaccttagcgacgagcgtattcagagctggtgcgagcaaatcctcaacgaaatggcagagcattacgcctga

SEQ ID NO: 2303 - DNA, 408 bp, Escherichia coli
gtggtcctgtggcaatctgatttgcgcgtctcctggcgcgcacagtggctttccttgctgattcatgggctggttgccgctgttattttactcatgccctggccgctcagttacaccccgttatggatggtgttactttcgctggtggtgtttgattgcgttcgcagccagcggcgcattaatgctcgccagggggaaattcgcttgttgatggacgggcgtttgcgttggcaagggcaggagtggagcatcgtcaaagcgccgtggatgattaagagcggcatgatgctgcgtttacgttctgacagcggaaaacggcaacatttatggctggcagctgacagcatggacgaagccgaatggcgggatttacggcggatattgttacaacaagagacgcaaagataa

SEQ ID NO: 2304 - DNA, 267 bp, Escherichia coli
atggacattaacaacaaagcccgcattcattgggcatgccgccgtggtatgcgcgaactcgatatttcaatcatgccgtttttcgaacatgagtacgacagcttaagcgatgacgaaaaacgcatctttattcgtctgctggaatgtgacgatccggacctgtttaactggctgatgaatcacggtaaaccggccgatgcagaactggaaatgatggtccgactcattcagacacggaaccgggaacgtggtcctgtggcaatctga

SEQ ID NO: 2305 - DNA, 981 bp, Escherichia coli
atggcttttacaccttttcctccccgtcagcctacggcttctgcccgtttgccactgacgctgatgacgcttgatgactgggcgcttgccactattactggcgcggacagcgaaaaatatatgcaaggccaggtgacagcagatgtcagcctgatgactgaagatcagcacctgctcgccgcccattgcgacgccaaaggtaaaatgtggagcaatttacgtctgttccgcgacggcgatggctttgcatggattgaacggcgcagcgtgcgtgaaccgcagctgactgaactgaaaaaatatgcggtgttctctaaagtgaccatcgcgccagacgacgagcgtgtgctgcttggtgttgccggttttcaggcgcgcgccgcgttggcaaatctctttagtgaactaccttcgagagaaaaacaggtagtcaaagaaggcgcgaccacgttgctatggtttgaacacccggcagaacgtttcctgatcgtaaccgatgaagctactgccaatatgctgaccgataaactgcgcggtgaagcggaactgaacaatagccaacagtggctggcattaaacattgaagcgggttttccggtgattgatgccgccaacagcgggcagtttatcccccaggcgaccaacctccaggcgctgggcggtatcagctttaagaaaggctgctataccggacaagagatggtggcgcgagcaaaattccgtggtgccaacaaacgcgcgctctggttgctgaagggtagcgccagccgactgccggaagctggtgaagacttagagctgaaaatgggcgagaactggcgtcgtaccggtacggtgctggctgcggtcaaactggaagatggtcaggttgtggtgcaggttgtcatgaataacgatatggaaccggacagcatcttccgcgtgcgtgacgatgcgaatacattgcgtatcgagccactgccatattcgctggaagagtaa

SEQ ID NO: 2306 - DNA, 660 bp, Escherichia coli
atggttcagaagcccctcattaagcagggatattcgctggcagaggaaattgccaacagcgtcagtcacggcattgggctggtgtttggtatcgttgggctggtgttgctactggttcaggcggtggatctcaatgccagcgccacggcgataaccagttacagcctctatggcggcagtatgatcctgctgttcctcgcttcgacgctctatcacgccattccccatcaacgggcaaaaatgtggctgaagaaatttgaccactgtgccatttatctgttgattgccggaacctacacgccgtttttgctggtggggctggattctccgttagcgcgcgggttgatgattgttatctggagcctggcattgctgggtattctgtttaaactgaccatcgcgcaccgattcaaaattttatctctggtgacctatctggcgatgggctggctgtcgctggtggtaatttatgaaatggcagttaagctcgcggcgggcagcgttaccttactggcggtaggcggtgtggtttattcgctcggggtgattttctacgtctgcaagcgcattccatacaatcatgccatctggcacggctttgtgctcggcggtagtgtgtgccactttctggcgatctatttgtatattgggcaggcgtaa

SEQ ID NO: 2307 - DNA, 312 bp, Escherichia coli
atgcagccaaacgacatcactttttttcaacgtttccaggatgacattctggctgggcgtaaaaccatcaccatccgcgacgagtctgaatcgcacttcaaaacgggtgatgtgcttcgtgtcggacggtttgaagatgacggttatttttgcacgattgaagtcaccgcaacctcaaccgtaacgctggatacgctgacggaaaaacatgcaaagcaggaaaatatgaccctgactgaactgaaaaaggtcattgccgacatctatcccgaccagacacagttttatgtgattgaatttaaatgcctttaa

SEQ ID NO: 2308 - DNA, 1434 bp, Escherichia coli
gtgaaaaaactcaccttaccgaaagatttcttatggggcggcgcagttgccgctcatcaggtcgaaggcggctggaacaaaggcggcaaagggccgagcatttgtgacgttttgaccggtggcgcacacggcgtgccgcgcgaaatcaccaaagaagttgtgcctggcaaatactatccaaaccatgaagccgttgatttttatggtcactacaaggaggacatcaagctatttgccgaaatgggcttcaaatgttttcgtacttccatcgcctggacgcgcatttttccaaaaggcgatgaagctcagccaaacgaagaagggctgaagttctacgatgatatgatcgatgaactgctgaaatacaacatcgaaccggtgatcaccctctcccactttgaaatgccgctgcatctggtgcagcaatatggtagctggaccaaccgtaaagtggttgatttctttgtccgtttcgcggaagtggtatttgaacgctataagcataaagtcaaatactggatgaccttcaacgaaattaacaaccagcgtaactggcgtgcaccgctgttcggttactgctgctccggcgtggtgtataccgagcatgaaaacccggaagagacgatgtatcaggtgctgcatcaccagtttgtcgccagcgccctggcggtgaaagccgcgcatcgcatcaacccggagatgaaagtcggttgtatgctggcgatggtgccgctctatccttactcctgtaacccggacgatgtgatgtttgtccaggagtcgatgcgcgaacgttacgtctttaccgatgtgcagttgcgtggctattacccgtcctatgtgttgaacgagtgggaacgccgcggatttaacatcaaaatggaagacggcgatctggatgtactgcgcgaaggcacctgcgattatctcggcttcagctattacatgaccaacgcggtgaaggccgaaggcggcaccggcgatgcgatctctggttttgaaggcagcgtaccgaacccgtatgttaaagcgtctgactggggctggcagattgatccggttggtctgcgttacgcgctttgcgagctgtatgagcgttaccagaagccgctgtttattgtcgaaaacggttttggcgcttacgacaaagtggaagatgatggcagcatcaatgacgattaccgcattgactacctgcgcgcccatattgaagagatgaaaaaagcggtgacttacgatggcgtggacctgatgggctacacgccgtggggctgcatcgactgtgtgtcgttcaccaccgggcagtacagcaaacgctacggctttatctatgtgaataaacatgacgacggtactggcgatatgtcgcgttcacgtaagaagagctttgactggtacaaagaggtgattgccagcaacggcgagaatctgtaa

SEQ ID NO: 2309 - DNA, 2874 bp, Escherichia coli
atgacacagacgttaagccagcttgaaaacagcggcgcttttattgaacgccatatcggaccggacgccgcgcaacagcaagaaatgctgaatgccgttggcgcacaatcgttaaacgcgctgaccggccagattgtgccgaaagatattcagcttgcgactccgccgcaggttggcgcaccggcgaccgaatacgccgcactggcagaactcaaggctattgccagtcgcaataaacgcttcacgtcttacatcggcatgggttacaccgccgtgcagctaccgccggttatcctgcgtaacatgctggaaaatccgggctggtataccgcgtatactccgtatcaacctgaagtctcccagggccgccttgaagcactgctcaacttccagcaggtaacgctggatttaaccgggctggatatggcctctgcttctcttcttgacgaagccaccgctgccgccgaagcaatggcgatggcgaaacgcgtcagcaaactgaaaaatgccaaccgcttctttgttgcttctgacgttcatccgcaaacgctggatgtggtccgtactcgtgccgaaacctttggttttgaagtgattgtcgatgacgcgcaaaaagtgctcgaccatcaggacgttttcggcgtgctgttacagcaggtcggcactactggtgaaattcacgactacaccgcgcttattagcgaactgaaatcacgcaaaattgtggtcagcgttgccgccgatattatggcgctggtgctgttaactgcgccaggtaaacagggcgcggatattgtttttggttcggcgcaacgctttggcgtaccgatgggctacggtggcccacacgcggcattctttgcggcgaaagacgaatacaaacgctcaatgccgggccgtattatcggtgtatcgaaagatgcagctggcaacaccgctctgcgcatggcgatgcagactcgcgagcaacatattcgtcgtgagaaagcgaactccaacatttgtacttcccaggtactgctggcaaacatcgccagcctgtatgccgtttatcacggcccggttggcctgaaacgtatcgctaaccgcatccaccgtctgaccgatatcctggcggcgggcctgcaacaaaaaggtctgaagctgcgccatgcgcactatttcgatactttgtgtgtggaagtggtcgacaaagcgggcgtgctggcgcgtgccgaagcagctgaaatcaacctgcgtagcgatattctgaacgcggttgggatcacccttgatgaaacaaccacgcgcgaaaacgtgatgcagcttttcagcgtgctgttgggcgataaccacgggctggacatcgacacactggacaaagacgtggctcacgacagtcgctctattcaggctgcgatgctgcgcgacgacgaaatcctcacccatccggtgtttaatcgctaccacagcgaaaccgaaatgatgcgctatatgcactcgctggagcgtaaagatctggcgctgaatcaggcgatgatcccgctgggttcctgcaccatgaaactgaacgccgccgccgagatgatcccgatcacctggccggaatttgccgaactgcacccgttctgcccgccagaacaggctgaaggttatcagcagatgatcgcgcagctggctgactggctggtgaaactgaccggttacgacgccgtttgtatgcagccgaactctggcgcacagggcgaatacgcgggcctgctggcgattcgtcattatcatgaaagccgcaacgaagggcatcgcgatatctgcctgatcccggcttctgcgcacggcactaacccggcttccgcgcatatggcaggaatgcaggtggtggttgtggcgtgtgataaaaacggcaacatcgatctgactgatctgcgcgcgaaagcggaacaggcgggcgataacctctcctgtatcatggtgacctatccttctacccacggcgtgtatgaagaaacgatccgtgaagtgtgtgaagtcgtgcatcagttcggcggtcaggtttaccttgatggcgcgaacatgaacgctcaggttggcatcacctcgccgggctttattggtgcggacgtttcccaccttaacctgcataaaactttctgcattccgcatggcggtggtggtccgggtatgggaccgatcggtgtgaaagcgcatctggctccgtttgtaccgggtcatagcgtggtgcaaatcgaaggcatgttaacccgtcagggcgcggtttctgcggcaccgttcggtagtgcctctatcctgccaatcagctggatgtacatccgcatgatgggcgcagaagggctgaaaaaagcaagccaggtggcaattcttaacgccaactatattgccagccgtctgcaggatgccttcccggtgctgtataccggtcgcgacggtcgcgtggcgcacgaatgtattctcgatattcgcccgctgaaagaagaaaccggcatcagcgagctggatattgccaagcgcctgatcgactacggtttccacgcgccgaccatgtcgttcccggtggcgggtacgctgatggttgaaccgactgaatctgaaagcaaagtggaactggatcgctttatcgatgcgatgctggctatacgcgcagaaattgatcaggtgaaagccggtgtctggccgctggaagataacccgctggtgaacgcgccgcacattcagagcgaactggtcgccgagtgggcgcatccgtacagccgtgaagttgcagtattcccggcaggtgtggcagacaaatactggccgaccgtgaaacgtctggatgatgtttacggcgaccgtaacctgttctgctcctgcgtaccgattagcgaataccagtaa

SEQ ID NO: 2310 - DNA, 390 bp, Escherichia coli
atgagcaacataccagcagaactgaaatacagcaaagaacacgaatggttgcgtaaagaagccgacggcacttacaccgttggcatcaccgaacacgctcaggagctgttaggcgatatggtgtttgttgacctaccggaagtgggcgcaacggttagcgcgggcgatgactgcgcggttgccgaatcggtaaaagcggcgtcagacatttatgcgccagtaagcggtgaaatcgtggcggtaaacgatgcactgagcgattccccggaactggtgaacagcgaaccgtatgcaggcggctggattttcaaaatcaaagccagcgatgaaagcgaactggaatcactgctggatgcaaccgcatacgaagcattgttagaagacgagtaa

SEQ ID NO: 2311 - DNA, 1095 bp, Escherichia coli
atggcacaacagactcctttgtacgaacaacacacgctttgcggcgctcgcatggtggatttccacggctggatgatgccgctgcattacggttcgcaaatcgacgaacatcatgcggtacgtaccgatgccggaatgtttgatgtgtcacatatgaccatcgtcgatcttcgcggcagccgcacccgggagtttctacgttatctgctggcgaacgatgtggcgaagctcaccaaaagcggcaaagccctttactcggggatgttgaatgcctctggcggtgtgatagatgatctcatcgtctactactttactgaagatttcttccgcctcgttgttaactccgccacccgcgaaaaagacctctcctggattacccaacacgctgaacctttcggcatcgaaattactgttcgtgatgacctttccatgatcgccgtacaagggccgaatgcgcaggcaaaagctgccacactgtttaatgacgcccagcgtcaggcggtggaagggatgaaaccgttctttggcgtgcaggcgggcgatctgtttattgccaccaccggttacaccggtgaagcgggctacgaaattgcgctgcccaatgaaaaagcggccgatttctggcgcgcgctggtggaagctggcgttaagccatgtggcctgggcgcgcgtgacacgctgcgtctggaagcgggcatgaatttgtatagccaggagatggacgaaactatttctcctttagccgccaatatgggctggactatcgcctgggaaccggcagatcgtgactttatcggtcgtgaagctctggaagcgcagcgtgaacatggcacagaaaaactggttggtctggtgatgaccgaaaaaggcgtgctgcgtaatgaactgccggtacgttttactgatgcgcagggcaaccagcatgaaggcattatcaccagcggtactttctccccaacgctgggttatagcattgcgctggcgcgcgtgccggaaggtattggtgaaacggcgattgtgcaaattcgcaaccgtgaaatgccggttaaagtgacgaaacctgtttttgtgcgtaacggcaaagccgtcgcgtga

SEQ ID NO: 2312 - DNA, 1203 bp, Escherichia coli
atgcaaagtgttgatgtagccattgttggcggcggcatggtcgggctggcggttgcctgcggcttacagggtagcggcttacgcgttgccgtactggagcagcgcgtaccggaacctctggcggcggatgcaccaccacaactgcgcgtttcggctatcaatgccgccagcgaaaaattactgactcgtcttggcgtctggcaggagattctctcccgcagagccagttgctatcacggtatggaagtgtgggacaaagacagttttggtcacatctcgtttgacgatcaaagcatgggctataaccatcttgggcatatcgttgaaaactcagtgattcactacgcgctgtggaacaaagcgcagcagtcgtcagatatcactctgttggcccccgcagaattacagcaggtcgcctggggagaaaatgaaaccttcctgacgttgaaagatggcagcatgttaacggcgcgtctggtgattggcgcggacggcgctaattcctggttgcgcaacaaagccgatattccgctgactttctgggattatcagcatcacgcgctggtggcgaccattcgcacggaagaaccgcatgatgcggtggcgcggcaggtttttcatggcgaaggcattctggcctttttgccgcttagcgatccgcatctttgctcgattgtctggtcactgtcgccagaggaagcgcagtggatgcagcaggcaggcgaagacgaatttaatcgcgcgttaaatatcgcttttgataatcgcctgggcttatgcaaggtcgaaagtgagcgcctggtgttctcgctaacggggcgttatgcgcgccagtttgccgcacaccgtctggcgctggtgggcgacgccgcgcatactattcacccgctggcggggcagggggtaaatctcggctttatggatgctgcagagctgattgctgaactgaaacggttgcatcgtcagggtaaagacatcgggcagtacatttacctgcgtcgctatgagcgtagccgtaagcacagtgcggcgctgatgctggctggtatgcagggattccgcgatctgttttccggtaccaatccggcgaaaaaattgctgcgtgatattggtctgaaactggctgatacgcttcctggcgttaagccacaacttattcgtcaggcaatgggattaaacgatttgcctgaatggctgcgttaa

SEQ ID NO: 2313 - DNA, 1179 bp, Escherichia coli
atgagcgtaatcatcgtcggtggcggcatggcgggcgcgacgctggcgctggctatttcccggttaagtcacggggcgctgccagtacatttgattgaagcgaccgcgccagagtcacatgcgcatccgggctttgatggacgagctattgcgctggcggcgggtacctgtcagcaactggcgcgcatcggcgtctggcaatctctggctgattgcgcaactgccatcaccacagtgcatgtcagcgatcgtggtcacgctggatttgtcaccctcgccgcagaagattaccaactggcggcgctggggcaggttgtcgaattgcacaatgtcgggcaacggctgtttgcattgctgcgcaaagcacctggcgtaacgctgcattgccctgatcgcgtggctaacgttgcccgtactcagagcctcgttgaagtgacgctggagagtggcgagacgctgacgggccgcgtgctggtagccgctgatggcacccattcagcgttagccaccgtgtgcggcgttgactggcagcaggagccttacgaacaactggctgtgattgccaacgttgcgacttccgttgcgcatgaagggcgcgcttttgaacgctttacacaatatggcccgctggcgatgttgccgatgtctgacggacgctgttcgctggtctggtgtcatccactggaacggcgcgaagaggtgctgtcgtggaatgacgagaagttttgccgtgaactccagtcggcctttggctggcgacttgggaaaattactcacgccggtaagcgcagtgcttatccgctggcgttaacccgcgccgccagacctattacccatcgtaccgtgctggtgggcaatgcggcgcaaactctgcaccccatcgccgggcaaggatttaacctcggtatgcgtgatgtcatgagccttgcagaaaccctgactcaggcgcaggagcgcggagaagacatgggtgattacggcgtattgtgccgttatcagcagcgtcgacagagcgatcgcgaagcaaccatcggcgtcacggacagccttgtacatctttttgccaaccgttggacgccgctggttgtcgggcgcaacatcgggctgatgacgatggaattatttaccccggcacgcgatgtgctggcgcagcgcactcttggttgggtggcgcgttga

SEQ ID NO: 2314 - DNA, 1326 bp, Escherichia coli
atgagtgatatatcccggcaagaatttcagcgtcgccgtcaggccctggtagagcaaatgcaacccggcagcgccgcgctgatttttgctgcaccagaagtaacacgtagcgccgacagcgaatacccctatcgtcagaacagtgacttctggtacttcaccggctttaacgaaccggaagcggtgctggtgctgattaaaagcgatgacactcataaccacagcgttttgtttaaccgcgttcgcgacctgacggcagagatctggtttggtcgtcgcttaggccaggatgccgcgccagagaaactgggcgttgaccgcgcactggcattcagcgaaatcaatcagcaactttatcaactacttaatggtctggatgtggtttaccacgcccagggcgaacatgcatatgctgatgaaatcgtgaacagcgcgcttgagaaactgcgtaaaggttcgcggcaaaatctcaccgcaccggcaacgatgatcgactggcgtcctgttgttcatgaaatgcgcctgttcaaatcaccagaagagattgccgtacttcgccgcgcgggtgaaatcaccgcactggcgcatacacgggcgatggaaaaatgccgtccggggatgttcgagtaccatctggaaggcgaaattcaccacgaatttaaccgccacggtgcgcgttacccttcctataacaccattgttggcagcggtgaaaacggctgcattttgcactacaccgaaaacgagtgtgaactgcgtgacggtgacctggtgttgattgacgcgggttgtgaatacaaaggttacgctggcgacattacccgcaccttcccggtcaacggcaaattcactcaggctcagcgtgaaatctatgacattgtgctggagtctcttgaaaccagcctgcgcctgtatcgtccgggaacttccattcaggaagtcactggtgaagtggtgcgcatcatggttagcggtctggtaaaactcggcatcctgaaaggtgatgttgatgaactgatcgctcagaacgcccatcgtcctttctttatgcatggccttagccactggttaggactggatgttcatgacgttggtgtttatggtcaggatcgctcgcgtattctggaaccgggtatggtactgaccgtagaaccagggctgtatattgcgccggatgcagaagtgccagaacagtatcgcggtatcggcattcgtattgaagacgatattgtgattaccgaaaccggtaatgaaaacctcaccgccagcgtggtgaaaaagccggaagaaatcgaagcgttgatggcagctgcgagaaagcaatga

SEQ ID NO: 2315 - DNA, 579 bp, Escherichia coli
atgtctatacagaacgaaatgcctggttacaacgaaatgaaccagtatctgaaccaacaagggacgggtctgacccctgctgagatgcatggtttaatcagtgggatgatatgtggcggtaacgatgacagctcatggctgccgctacttcacgacctgacgaacgaaggcatggctttcggtcatgagctggcacaggcactgcgcaaaatgcactctgccaccagcgatgccctgcaggatgacggcttcctttttcagctttatctgcctgatggcgatgatgtcagcgttttcgatcgggctgatgcgctggctggttgggtcaatcacttcctgcttggtcttggcgttacgcaaccgaagctggacaaagtgaccggcgaaaccggtgaagccatcgacgatctgcgtaacatcgcgcagttgggttacgacgaagacgaagatcaggaagagcttgaaatgtcgcttgaagagatcatcgagtacgtccgtgttgccgcgctgttatgccacgacacctttactcatccgcaaccgaccgcgccagaagtacaaaaaacgactctacactaa

SEQ ID NO: 2316 - DNA, 330 bp, Escherichia coli
atgtctgcacaacccgtcgatatccaaatttttggccgttcactgcgtgtgaactgcccgcctgaccaaagggatgcgttgaatcaggcagcggacgatctgaaccaacggttgcaagatctgaaagaacgcactagagtcacaaatactgaacagttggtcttcattgccgcattgaatatcagctatgagttagcgcaagaaaaagcgaagactcgtgactacgcagcaagtatggaacagcgtattcggatgctgcagcagaccatagaacaagcgttacttgaacaaggtcgcatcaccgaaaaaactaaccaaaactttgaatga

SEQ ID NO: 2317 - DNA, 603 bp, Escherichia coli
atgacgcaactaccagaactcccactgacattatcccgacaagaaatccgcaaaatgattcggcaacgtcgtcgtacgttaacgccggaacaacagcaggaaatgggtcaacaagccgctacccggatgatgacgtatcccccagtggtgatggcgcatacggtcgctgtattcctctcttttgatggcgaactcgacacccagccactcatagaacaactctggcgcgccggtaagcgcgtatatcttccagttttgcatccctttagtgccggtaacttgctgttcctgaattaccatccgcaaagcgaactggtgatgaacaggttgaagatccacgagccaaaactggacgtgcgcgatgtgcttcccctttcccggttagatgtattgatcacgccgctggtggcttttgatgaatacggtcaacgcttgggaatgggcggtggtttttatgatcggaccttacaaaactggcagcactataaaatgcaaccggtgggttatgcgcatgattgccagttagtagaaaaactcccagtggagaaatgggatattccactgcctgcggtggttacaccgtcgaaagtctgggaatggtaa

SEQ ID NO: 2318 - DNA, 1233 bp, Escherichia coli
atggcaaaggtatcgctggagaaagacaagattaagtttctgctggtagaaggcgtgcaccaaaaggcgctggaaagccttcgtgcagctggttacaccaacatcgaatttcacaaaggcgcgctggatgatgaacaattaaaagaatccatccgcgatgcccacttcatcggcctgcgatcccgtacccatctgactgaagacgtgatcaacgccgcagaaaaactggtcgctattggctgtttctgtatcggaacaaaccaggttgatctggatgcggcggcaaagcgcgggatcccggtatttaacgcaccgttctcaaatacgcgctctgttgcggagctggtgattggcgaactgctgctgctattgcgcggcgtgccggaagccaatgctaaagcgcatcgtggcgtgtggaacaaactggcggcgggttcttttgaagcgcgcggcaaaaagctgggtatcatcggctacggtcatattggtacgcaattgggcattctggctgaatcgctgggaatgtatgtttacttttatgatattgaaaacaaactgccgctgggcaacgccactcaggtacagcatctttctgacctgctgaatatgagcgatgtggtgagtctgcatgtaccagagaatccgtccaccaaaaatatgatgggcgcgaaagagatttcgctaatgaaacccggctcgctgctgattaatgcttcgcgcggtactgtggtggatattccagcgctgtgtgacgcgctggcgagcaaacatctggcgggggcggcaatcgacgtattcccgactgaaccggcgaccaatagcgatccatttacctctccgctgtgtgaatttgacaacgtccttctgacgccacacattggcggttcgactcaggaagcgcaggagaatatcggcttggaagttgcgggtaaattgatcaagtattctgacaatggctcaacgctctctgcggtgaacttcccggaagtctcgctgccactgcacggtgggcgtcgtctgatgcacatccacgaaaaccgtccgggcgtgctaactgcgctcaacaaaatttttgccgagcagggcgtcaacatcgccgcgcaatatctacaaacttccgcccagatgggttatgtagttattgatattgaagccgacgaagacgttgccgaaaaagcgctgcaggcaatgaaagctattccgggtaccattcgcgcccgtctgctgtactaa

SEQ ID NO: 2319 - DNA, 660 bp, Escherichia coli
atgacgcaggatgaattgaaaaaagcagtaggatgggcggcacttcagtatgttcagcccggcaccattgttggtgtaggtacaggttccaccgccgcacactttattgacgcactcggtacaatgaaaggccagattgaaggggccgtttccagttcagatgcttccactgaaaaactgaaaagcctcggcattcacgtttttgatctcaacgaagtcgacagccttggcatctacgttgatggcgcagatgaaatcaacggccacatgcaaatgatcaaaggcggcggcgcggcgctgacccgtgaaaaaatcattgcttcggttgcggaaaaatttatctgtattgcagacgtttccaagcaggttgatattctgggcaaattcccgctgccagtagaagttatcccgatggcacgtagtgcagtggcgcgccagctggtgaaactgggcggtcgtccggaataccgtcagggcgtagtgaccgataacggcaacgtgatcctcgacgtccacggcatggaaatccttgacccgatagcgatggaaaacgccataaatgcgattcctggtgtggtgactgttggtttgtttgctaaccgtggcgcggacgttgcgctgattggcacacctgacggtgtcaaaactattgtgaaatga

SEQ ID NO: 2320 - DNA, 231 bp, Escherichia coli
atgcatttcgctcagcgagttcgcgccctggttgtgttgaatggcgtggcgttattgcctcagtttgcctgtaaacaggggcttgcgaacggggaactggtgcgcctgtttgcaccgtggagcggcatccccagaccgttgtatgctttatttgcggggcgaaaggggatgcccgccattgcgcgatattttatggatgagttaaccacgcggcttgccaacggggtctga

SEQ ID NO: 2321 - DNA, 894 bp, Escherichia coli
atgaaacgcccggactacagaacattacaggcactggatgcggtgatacgtgaacgaggatttgagcgcgcggcacaaaagctgtgcattacacaatcagccgtctcacagcgcattaagcaactggaaaatatgttcgggcagccgttgttagtgcgtaccgtaccgccgcgcccgacggaacaagggcaaaaactgttggcgctactacgccaggtggagctgctggaagaagagtggctgggcgatgaacaaaccggttcgactccgctgctgctttcactggcggtcaacgccgacagtctggcgacgtggttgcttccggcactggctcctgtgttggctgattcgcccatccgcctcaacttgcaggtagaagatgaaacccgcactcaggaacgtttgcgtcgcggcgaagtggtcggcgcagtgagtattcaacatcaggcgctgccgagttgtcttgtcgataaactcggtgcgctcgactatctgttcgtcagctcaaaaccgtttgccgaaaaatatttccctaacggcgtaacgcgttcggcattactgaaagcgccagtggtcgcgtttgaccatcttgacgatatgcaccaggcctttttgcagcaaaatttcgatctgcctcctggcagcgtaccctgccatatcgttaattcttcggaagcgttcgtgcaacttgctcgtcagggcaccacctgctgtatgatcccgcacctgcaaatcgagaaagagctggccagcggcgaactgattgacttaacgccagggctatttcaacgccggatgctctactggcaccgctttgctcctgaaagccgcatgatgcgtaaagtcactgatgcgttgctcgattatggtcacaaagttcttcgtcaggattaa

SEQ ID NO: 2322 - DNA, 1095 bp, Escherichia coli
atgtctaacgtgcaggagtggcaacagcttgccaacaaggaattgagccgtcgggagaaaactgtcgactcgctggttcagcaaaccgcggaagggatcgctatcaagccgctgtataccgaagccgatctcgataatctggaggtgacgggtactcttcctggtttgccaccctacgttcgtggcccgcgtgccactatgtataccgcccaaccgtggaccatccgtcagtatgctggtttctcgacagcaaaagagtccaacgctttttatcgccgtaacctggccgccgggcaaaaaggtctttccgttgcgtttgaccttgccgcccaccgaggctacgactccgataacccacgcgtggcgggcgacgtcggcaaagcgggcgtcgctatcgacaccgtggaagatatgaaagtcctgttcgaccagatcccgctggataaaatgtcggtttctatgaccatgaatggcgcagtgctaccagtactggcgttttatatcgtcgccgcagaagagcaaggtgttacatccgataaactgaccggcaccattcagaacgctatcctcaaagagtacctctgccgcaatacctatatttacccgccaaaaccgtcaatgcgtattatcgcagacatcatcgcctggtgttccggcaacatgccgcgatttaataccatcagtatcagcagttaccacatgggtgaagcgggtgccaactgcgtgcagcaggtagcatttacgctcgccgataggattgagtacatcaaagcagcaatctccgccgggctgaaaattgatggcttcgtccctcgcctgtcgtttttcttcggcattggcatggatctgtttatgaacgccgccatgttgcgtgcggcacgttatttatggagcgaagcggtcagtggatttggcgcacaggatccgtataacaacgttatccgcaccaccattgatcattgtgcacatcctatgtgtcgggattatctgcatcgctatctggaaaatgcgtccggcggacatattcaccacgatcttagccacgtcttcgacttacaccgtaatttaattgcaaccggatcgatgctgggttaa

SEQ ID NO: 2323 - DNA, 612 bp, Escherichia coli
gtgataggcatagataatacttatccgacaattatttttgatcagttgattagtctcggagataagtacgaaggcgtgaccgcccagccagttgagttcagcgaaaatggcgttatcgataatctttttgaccgtcagttagattttattatctccccacagcatgtatctgcacgagttcaggaactggaaaacctgactatcagtgaactaccgccgctgcgattgggctttctcgtttctcgccgttatgaagagcgacaagagcaagaactgcttcaggagctgccctggctacaaatgcgctttcagaatcgggccaatttcgaagcaatgattgatgcgaatatgcgtccttgtgggatcaatcccaccattatttatcgtccctacagttttatggctaaaatcagcgccgtggagcggggacattttctgacggtgatcccgcattttgcctggcgactggtgaatccggcaacgctgaaatattttgatgcgccgcacaggccgatgtatatgcaggaatatctttattcaatcagaaatcatcgttataccgccacgatgcttcagcatattgctgaagatcgtgacgggacaaaccattaa

SEQ ID NO: 2324 - DNA, 276 bp, Escherichia coli
atggacatttttatttcgaaaaagatgcgcaatttcattttattagcgcaaaccaataatattgcccgggcggcagaaaaaatccatatgacggcttcgcgatttggcaaaagcattgccgcgctggaagaacaaattggctatacgctatttacccgcaaagataataatatcagcctcaataaagccggacaggaactgtatcaaaaactgttcccggtttatcaacgactttctgcgattgataatgaaatccataactcaggacgtcgttaa

SEQ ID NO: 2325 - DNA, 741 bp, Escherichia coli
gtgaagttcaaagttatcgccctggcggcattaatgggtattagcgggatggcagcgcaggctaacgaattgccggatggaccgcatattgtcacctccggtacggcaagcgtggatgcggtgccagacattgccactcttgcgattgaagttaacgtggccgcgaaggatgccgctactgccaagaaacaggcagatgagcgcgtcgcacaatacatttccttccttgagctcaatcagatcgcgaaaaaagatatcagctcagcgaacttacgcactcagccagattatgattatcaggatggtaaaagtatcctgaaaggctaccgcgcagtgagaacggtggaagtcacgctccgtcagttagacaaactgaattccttgctggacggcgcgctaaaggcgggtcttaacgaaattcgttctgtgtcgctgggcgtggcgcagccggatgcctataaagacaaagcgcgtaaggcagcgattgataacgcgattcatcaggcgcaggaactggcgaatggctttaatcgcaaactcgggccggtatatagcgtgcgttatcatgtttccaactatcagcccagcccaatggtgcggatgatgaaagctgatgctgcaccggtgtccgcacaggaaacttacgagcaggccgctattcagtttgatgatcaggtcgatgtagtcttccagttagaacctgtggatcaaccccccgctaaaacacctgctgcacattaa

SEQ ID NO: 2326 - DNA, 636 bp, Escherichia coli
gtgttttcttattactttcaaggtcttgcacttggcgcagctatgatcctaccgctcggtccacaaaatgcttttgtgatgaatcagggcattcgtcgtcagtaccacattatgattgccttactttgtgctatcagcgatttggtcctgatttgtgcggggatttttggtggcagcgcgttattgatgcagtcgccgtggttgctggcgctggtcacctggggcggcgtagccttcttgctgtggtatggttttggcgcttttaaaacagcaatgagcagtaacattgagttagccagtgccgaagtcctgaaacaaggcagatggaaaattatcgccaccatgttggcagtgacctggctgaatccgcatgtttacctggatacttttgttgtgctgggcagccttggcgggcaacttgatgtggaaccaaaacgttggtttgcgctcggaacaattagcgcctctttcctgtggttctttggtctggctattctcgcagcctggctggcaccgcgcctgcgcacggcaaaatcacagcgcattatcaatctggtagtgggatgtgttatgtggtttattgccttgcagctggcgagagacggtattgctcatgcacaagccttgttcagttag

SEQ ID NO: 2327 - DNA, 861 bp, Escherichia coli
atggaagatttgaatgttgtcgatagcataaacggcgcgggaagctggctggtggctaaccaggcgctgctgctaagttatgcagtaaacatcgtggcggcactcgcgatcatcatcgttggtttgattatcgcgcggatgatttccaacgcggtgaatcgcctgatgatctcccgtaaaatcgatgccactgttgctgattttctttctgcattagtccgttacggaattatcgcctttacgctaatcgcagcactgggacgcgtgggcgtacaaacagcgtcagtcattgctgtactcggtgccgcaggtttagctgttggtctggctttgcaggggtcactgtctaacctggccgctggcgtgttacttgtcatgttccgcccgttccgtgccggagaatatgttgacctcggcggcgtagccggtactgtgctgagtgtgcagattttctccaccaccatgcgtactgcagacggtaaaattatcgttattccgaacggtaaaattattgccgggaatattattaatttctcccgcgagccagctcgccgtaacgaatttattattggcgtggcgtatgattccgatatcgatcaggttaagcagatcctgaccgatattatccagtctgaagatcgcattttgaaagatcgcgaaatgactgtgcgtctgaacgaacttggcgcatcgtcgattaatttcgtggtccgcgtctggagcaacagcggcgatctgcaaaacgtgtactgggatgtgctggagcgtattaaacgtgaatttgatgccgccggtatcagcttcccgtacccgcaaatggatgtgaactttaagcgggtgaaagaagacaaagctgcgtaa

SEQ ID NO: 2328 - DNA, 1080 bp, Escherichia coli
atgtctaagatttttgatttcgtaaaacctggcgtaattactggtgatgacgtacagaaagttttccaggtagcaaaagaaaacaacttcgcactgccagcagtaaactgcgtcggtactgactccatcaacgccgtactggaaaccgcagctaaagttaaagcgccggttatcgttcagttctccaacggtggtgcttcttttatcgctggtaaaggcgtgaaatctgacgttccgcagggcgctgctatcctgggtgcgatctctggtgcgcatcacgttcaccagatggctgaacattatggtgttccggttatcctgcacaccgaccactgcgcgaagaaactgctgccgtggatcgacggtctgctggacgcgggtgaaaaacacttcgctgctaccggtaagccgctgttctcttctcacatgattgacctgtctgaagaatctctgcaagagaacattgaaatctgctctaaatacctggagcgcatgtccaaaatcggcatgactctggaaatcgaactgggttgcaccggtggtgaagaagacggcgtggacaacagccacatggacgcttctgcactgtacacccagccggaagacgttgattacgcatacaccgagctgagcaaaatcagcccgcgtttcaccatcgctgcgtccttcggtaacgtacacggtgtttacaagccgggtaacgttgttctgactccgaccatcctgcgcgactctcaggaatatgtttctaagaaacacaacctgccgcacaacagcctgaacttcgtattccacggtggttccggttctactgctcaggaaatcaaagactccgtaagctacggcgtagtgaaaatgaacatcgataccgatacccaatgggcaacctgggaaggtgttctgaactactacaaagaaaacgaagcttacctgcaaggccagctgggcaacccgaaaggcgaagatcagccgaacaagaaatactacgatccgcgcgtatggctgcgtgccggtcagacttcgatgatcgctcgtctggaaaaagcattccaggaactgaacgcgatcgacgttctgtaa

SEQ ID NO: 2329 - DNA, 1164 bp, Escherichia coli
atgtctgtaattaagatgaccgatctggatcttgctgggaaacgtgtatttatccgtgcggatctgaacgtaccagtaaaagacgggaaagtaaccagcgacgcgcgtatccgtgcttctctgccgaccatcgaactggccctgaaacaaggcgcaaaagtgatggtaacttcccacctgggtcgtcctaccgaaggcgagtacaacgaagaattctctctgctgccggttgttaactacctgaaagacaaactgtctaactcggttcgtctggttaaagattacctcgacggcgttgacgttgctgaaggtgaactggttgttctggaaaacgttcgcttcaacaaaggcgagaagaaagatgacgaaactctgtccaaaaaatacgctgcactgtgtgacgtgttcgtaatggacgcattcggtactgctcaccgcgcgcaggcttctactcacggtatcggtaaattcgctgacgttgcgtgcgcaggcccgctgctggcagctgaactggacgcgctgggtaaagcactgaaagaacctgctcgcccgatggtggctatcgttggtggttctaaagtatctaccaaactgaccgttctggactccctgtctaaaatcgctgaccagctgatcgttggcggtggtatcgctaacacctttatcgcggcacaaggccacgatgtgggtaaatccctgtacgaagctgacctggttgacgaagctaaacgtctgctgaccacctgcaacatcccggttccgtctgatgttcgcgtagcaaccgagttctctgaaactgcaccggctaccctgaaatctgttaacgatgtgaaagctgacgagcagatcctggatatcggtgatgcttccgctcaggaactggctgaaatcctgaagaatgcgaaaaccattctgtggaacggtccggttggcgtgttcgaattcccgaacttccgcaaaggtactgaaatcgtggctaacgctatcgcagacagcgaagcgttctccatcgctggcggcggcgacactctggcagcaatcgacctgttcggcattgctgacaaaatctcctacatctccactggcggcggcgcattcctcgaattcgtggaaggtaaagtactgcctgcagtagcgatgctcgaagagcgcgctaagaagtaa

SEQ ID NO: 2330 - DNA, 1020 bp, Escherichia coli
atgaccgtacgcgtagcgataaatggcttcggtcgcatcgggcgtaatgtggttcgtgctttgtatgaatccggacgccgtgcggaaattaccgtggtggcaatcaacgaactggcggatgctgcgggtatggcgcatttgttgaaatatgacaccagccatggccgttttgcatgggaagtacgacaggaacgcgatcaactttttgttggtgatgacgccatccgtgtattgcatgaacgttcactgcaatcgctcccctggcgtgaacttggcgttgatgtagtcctcgactgcaccggcgtatatggctcccgcgagcatggtgaagcacacattgccgccggggctaaaaaagtgctcttttcacatcctggcagtaacgatctcgacgcgaccgttgtttatggcgtcaatcaggatcaacttcgtgcggaacaccgcatcgtttctaacgcttcctgtaccacgaattgcataattcccgtcatcaaattgttagatgatgcgtacggtattgagtccggcactgtgaccacaattcactccgccatgcacgatcaacaggttattgatgcataccatcctgacctgcgtcgcactcgggcagccagtcagtcgatcattccggtcgatactaaactggccgccggtatcacacgattttttccgcaatttaacgatcgctttgaggcgattgcggtacgtgtgccaaccataaatgtgacggcaatcgatttaagcgtgacggtgaagaaacctgtaaaagccaatgaagtcaacctgttgctgcaaaaagcagcacaaggtgcatttcatggtatagttgactatacggaattgccgttggtctctgtagattttaaccacgatccgcacagtgccattgtcgatggcactcaaacccgggtcagtggcgcacacctgatcaaaacgttggtctggtgcgataacgaatggggctttgctaaccgaatgctcgacacgacgttagctatggctactgttgctttcaggtaa

SEQ ID NO: 2331 - DNA, 426 bp, Escherichia coli
atgatgacattgccctacccatattcttcctccgcacgtttttacgcgctgcgcctgctccccgggcaggaagttctctcccaattacgcgccttcgcgcaacaacaactccacgccgcgtggattgcaggttgtaccggcagtctgactgacgtcgccttacgctatgccgggcaagaaaacactgccctgctaagcggtaagttcgaagtcatcgcattgaacggcacgctggaacagagtggtgaacatcttcatctctgcgtttccgatccacacggcacgatgcttggcggtcatatgatgcccggctgtaccgtgcggaccacgcttgaactggtgatcggctgccttgaggaactggcgtttagccgccagtcttgcgcgctttctggttacgacgagttgcatatttccccccgttaa

SEQ ID NO: 2332 - DNA, 579 bp, Escherichia coli
atggcgcgtcgccacttttccagtcaggcattggtgttgatcgttatctctatcgccatcaatatgatcggcgggcaactggccagcatggtcaaattacctatttttctcgactccatcggcacacttattagcgcggtactgcttggtccggtgatcgggatgctaaccggtttactgaccaatttactctggggattgctgaccgacccgatcgccgccgcatttgcgcccgtcgcgatggtcatcggcctggtcgccggttggctggcgcgagcgggttggtttcgcaccctgccaaaagtcgttgttagcggcgtgattattacgcttgcggtaacggtcgtcgctgtaccgctgcgtactgcgctgttcggcggcgtgacaggaagcggagccgatttgttcgttgcctggatgcactcgatggggcaaaacctggtggagtcggtggcgattacggtgataggcgcgaacctggtcgataaaattctcacagcggtgattgtctggcttttactgcgtcagctgccgattcgcaccacgcgccattttccggcaatggctgccgtgcgctaa

SEQ ID NO: 2333 - DNA, 708 bp, Escherichia coli
atgcatccgtttacatccttaacgctgtgggcgctggcggcctgcaccacgcttatcctgcccacacagacaatattgccagtctatagcgcggcgacctttttctgccttattgcgctaaaggccacgcggcggcgggcaaaatatgtcgtctggctgatgttctcgctgggggctggattgtggctggtgcacggtggctggctgacagaatggctaagcggcacgccacgctctccagaacggtgggcgcatgctattacgctctggttgcggattctggcgattgtttcaacctcacagttgtggatgcagtacgtccccgtgcaacgttttatccgcgctttgtttgcttctcgcctgccgccgggcgtcgcttatctgtttgccgggccgttattggtcgttgagcagttaaaacggcaattggcgattattcatgaagcgcagcgcgcccgcggcgtgccgctggatgagggctggtatcagcgtttacgtgcgatgcccgcgttaattattccgctaacacacaatgcgctaaacgatcttgctgtccgtggtgcggcgctggatatgcgggcatttcgaatcaacaataggcgcactacgttatgggcaccagccgatagcaccctacaacgcgtagcacgttacaccatgatattgctaatgctggctgaattcggagcgtggatatggttacgttag

SEQ ID NO: 2334 - DNA, 678 bp, Escherichia coli
atggttacgttagaacagtttcgctattgcccgacacactcaacgcatcctccgttctgttatgactttcactatgtcaaaccggggatggtcgccatctttggtgacaacggcagtggcaaaagtacgctggcgcagctgatggcgggctggtatccggactttctaccaggagagataaccggcacggggacgcttctcggtacgcccattgggcgtctcccgcttaatgaacaatccgccaccatccagctcgtccagcaatcgccctatttgcagctctccggctgtacctttagcgtggaagaagaagttgcctttgggccagaaaatctgtgtcttgctgaaaaagagattatggcgcggattgacgccgccctggccctgaccgagtgccagccgttgcgccatcgtcacccggcaacactctccggtggagagacacagcgtgtggtcatcgcctgcgccatcgcgatgcagccaaagctcttaattcttgatgaagcctttagccgcctgacgccgcaggcccgcgaaatgctgttgcagcgcttacaacactgggcgcttgaacgtggttcgctgattattctttttgaacgtcatcacacacctttcctgaaccactgccagcaagcgtggcaattgcaaaacggagcgctccagccactatgttaa

SEQ ID NO: 2335 - DNA, 678 bp, Escherichia coli
atgttaacgttaaatcagatatcttatcgctggcctggcgcggcaacggattgtctttgcgacatttctctgcaactcaaacaaggtgaatggttggcgctgaccggcgacaatggcgcgggaaaatcgacgctgttacgagtaatggcaggtcttcttacgcccacagccggtacggttatgctgcaacaacaagcgatgaaaaacctgaaaaaccgccagcgcgcggcaaagattggcgtactgtttcaggacgcggaaaaccagctttttcacagcactgttgctgacgagatcgcatttggtttgaaactgcaaaaatgcccggcggatgaaatcactcaacgtaccaatgctgccctgcaatgctgccagttagcagacactgccagcgcgcatccgttagatctgcatagtgcgcagcgacggatggtcgccgtcgccagcctggaagcactctctccccccctattgctactggacgagccgagtcgggattttgacgaaaattggttgagcgtgtttgaaagctggctggaaaagtgccgccagcgaggcacgagcgtcgtagcaatcagtcatgacgccgcatttacccggcgtcatttctctcgtgtggtgcgactggaagatggtgtaatcaggaacgttaatccatcagacgatattcacccgtag

SEQ ID NO: 2336 - DNA, 714 bp, Escherichia coli
gtgaaaattgaattaacggtgaatgggctgaagatacaggcacagtaccagaacgaagagattgaaaatgtacataaaccgttgctgcgtatgctggcggccttacagacagtaaatccgcagcggcgtacggtggtttttctttgcgctccgccggggacgggtaaatctaccctaaccaccttctgggaatatctcgcacaacaagacccggaactgcccgctattcagacactgccgatggatggttttcaccattacaatagctggctggatgcgcatcaattgcgccccttcaaaggcgcaccagagacattcaacgttgcgaaactggcggaaaatctgtgccgggttgtggaaggggattgtacgtggccgcagtacgatcgacaaaagcatgatcctgttgaagatgcgctgcacgttaccgcaccactcgtcatcgtcgaaggaaactggttgttgctggacgacgagaagtggtgccagcttgcgcaattttgtgatttctcgatctttatcaaagctcccgcatctgcgttgcgggagcgtctggtggggcgcaagctggcgggagggttatcgctggcagacgcagaagccttttatgaccgtaccgacgggccgaatgttcgccgggtgctggaagagagtctgcctgcaaatttgaccttaatgatgaccgctacgggtgaatatcgtctgatggattaa

SEQ ID NO: 2337 - DNA, 510 bp, Escherichia coli
atggcgacgctgacagaagatgatgtgcttgagcaactgaatgcacaggacaatttattttcatttatgaaaactgcgcattctattttgctccaggggatacgccagtttctgccgtcgctgtttgtcgataacgatgaagagatcgtcgaatatgcagtgaagccgttactcgcccaaagcggcccgcttgacgatattgatgttgcgctgcgtttgatttatgcgctggggaaaatggataaatggctgtacgccgatatcacgcatttttcccagttttggcattacctgaacgaacagaatgaaatgcccggatttgccgatgacatggcctgggattttatcagcaacgtcaatagcataacccgcaatgcgacgctctatgacgcgttgaaagcgatgaagttcgccgatttcgccgtctggtcagaggcgcgttttagcgggatggtcaaaacggcgctgacgctggcagtaacgacaaccttaaaggaattaacgccgtga

SEQ ID NO: 2338 - DNA, 189 bp, Escherichia coli
atgatgtccctggcgtggccattatttcgcgttacggaacaggcagcgttggctgcctggccgcaaaccggctgcggcgacaaaaataaaattgatggccttgcggtcaccgcgatgcgccaggcattaaacgacgttgcttttcgtgggcgagtggttatcggcgagggggaacgatatcctctttag

SEQ ID NO: 2339 - DNA, 1278 bp, Escherichia coli
atgaaaaccaaagttgctgctatttatggcaagcgggatgtccgtctgcgcgaatttgagctgccagaaattaccgataatgaactgttagtgaatgtaatttctgacagcgtttgtttatccacctggaaagcggcgttactcggtagtgaacataaacgcgtccccgacgatttagaaaatcatccggtcattaccgggcatgaatgtgccggggttattgtcgaagtgggtaaaaatctcactggcaaatataaaaaaggccagcgttttgtattgcaaccggcgatggggttaccaggcggatattcagcgggctacagctacgaatattttggcggtaacgccacctatatgattattcccgaaatcgccattaacctgggctgcgtattaccgtatcacggctcttattttgctgcggcctcgctggcggaaccgatgtgctgcattattggcgcttatcatgccaattatcacaccacgcaatatgtttatgagcatcgcatgggcgtcaaacctggtggcaatattgcgctactggcgtgtgcaggcccgatgggaattggcgctattgattacgccattaacggcggcatacaaccggcgcgggtggtggtagtcgatatcgacgacaaacgcctgacgcaggtacaaaagctgctgccggtggaactggcggccagtaaaggcattgagctggtgtatatgaataccaaagggatgagcgatccggtccagacgctgcgggcgctgacggatgatgccggatttgatgacgtatttgtctatgcagcggtgccttcagtcgtcgagatggctgatgaattactggcggaagatggctgcctgaacttctttgccgggccgacggataaaaacttcaaagtgccgtttaatttctacaacgtccattacaacagtacgcacattgtcggcacgtccggcggttccacggacgacatgaaagaggcgattgcccttagcgccacggggcagttacagccgtcgtttatggtgacccatatcggtggcctggatgcggtgccagaaaccgtgctcaatctgccggatatccctggcggtaaaaaactcatttataacggcgtgaccatgccgctgaccgccattgccgattttgccgaaaaaggcaaaaccgatccgctgtttaaagagctggcgtggctggttgagaaaacgcacggtatctggaatgaacaggccgagaaatatctgctggcacaatttggcgtttatattggggaggccgcgcaatga

SEQ ID NO: 2340 - DNA, 1389 bp, Escherichia coli
atggaaaacaagtctgctcgtgcaaaggtccaggcttttgggggctttttgactgcaatggtcatccccaatatcggcgcttttatagcctggggttttataacggcgttatttattcctactggttggctgccgaatgaacatttcgccaaaattgttggtccgatgattacctatttattgcccgtgatgattggttctaccggtggtcatctggtcggcggtaaacgcggcgcggtcatgggcggaattggtacgattggtgtgatcgtcggcgctgaaatcccgatgttccttggctcaatgattatggggccgctcggtggtctggtgattaaatatatcgacaagtcgctggaaaaacgcatacctgctggttttgagatggttatcaataacttctcattaggtatcgcggggatgctcctttgtctgctgggttttgaagttatcggcccggcggtgttaattgctaatactttcgtcaaagagtgtattgaggcgctggtacatgcgggttatctacctttgctgtcagtcatcaatgaaccggcgaaagtgcttttccttaataatgcgatcgatcagggcgtctattatccgctgggaatgcaacaggcttcggttaacggtaaatccatcttctttatggtggcatccaatccaggtcctggtctggggctgctgctggcgtttaccttgtttggtaaagggatgagtaaacgttctgcgcccggggcgatgattattcacttcctcggtgggatccacgaactgtatttcccgtatgtgctgatgaagccgctgaccattattgccatgattgcgggcggtatgtctggcacctggatgtttaacttactggacggtggtctggtggctggcccaagtccggggtctatctttgcttacctggcactgacgccgaaaggctcgttcctggcgacaattgccggtgttacggtaggtaccctggtgtcctttgctattacttcgctgatactgaagatggaaaaaacggtggaaacgaagagcgaagatgagtttgctcagtcagccaatgcggttaaggcgatgaaacaagaaggtgcattctcgttaagccgtgttaagcgtattgcctttgtttgcgatgcagggatgggctccagtgcgatgggcgcaaccaccttccgtaaacgcctggaaaaagcggggctggcaatagaagtaaaacattacgccatagaaaacgtgcctgcggatgcggatatcgtcgttactcacgccagtctggaagggcgcgtgaaacgtgtgacggataaaccactgatattgattaataactatattggcgatccaaaactcgacactttatttaatcaattaaccgctgaacataaacactga

SEQ ID NO: 2341 - DNA, 444 bp, Escherichia coli
atgcggcttattgattattttccagagtcatcaatctcagttatacattcagcaaaagattggcaggaagctatcgatttctcgatggtatcattgctggataaaaactatatcagcgagaattacattcaggcaattaaaggttccaccattaacaatggcccttattatattctcgcaccaggcgtggcaatgcctcatgcacgaccggaatgtggggcgcttaaaaccgggatgtctttgacattacttaaacaaggtgtttattttccggggaatgacgaaccaattaaattactcatcggactttctgctgccgatgccgattcgcacattggcgctattcaggcgttaagtgaattactgtgcgaagaagaaatactcaaccaattattaaccgcagcatcagaaaaacaattagcggacataatcagccgcggataa

SEQ ID NO: 2342 - DNA, 909 bp, Escherichia coli
atgaaagcacctgtttcattaacctcatttcgcccacaaaaatctcttgctatcgccattggcgtgcttgccgtggttgtgctgccatttctctcgtattacaccgttaatgaaggtgaacgcggcattttgctgcgctacggaaaaatcgtaaaagttgccgagccggggctgggttttaagatcccttttatggaaagcgtagagaaaatttccacgcgtaatcaggctgtggtctatcagggattacaggcctacagccgcgaccagcaaccggcacaaatgacagtatcagtcagcttccacattaaaccttcagaagcaggcgcggtttataccacctacaataccattgaagcattaaaagatcgtctgattgtccgtcagttgccaactcaactggagaacgttttcggacaatataccgccatcagcgccgtacaggatcgcacaaaactggttcaggatctgcaaaatgccatgcgcaaagccgttgttgggccagtggtaattgacggggtccagattgaaaatattgatttttctgacgcttatgaaaagtcgattgaagaccgaatgaaagcagaagtcgccattgccacgcgtaagcaaaatctggaaacggagaaaatccaggcgcaaatagcggtaactcaggcccaggcggaagcagacagtaaactagcggcagccaaagcagaagcggaaactattcgcgtaagaggcgcggcagaggctgaaactattcgtttaaaaagtgcggctgaagcagaagctatccgcctgcgcggtgaagctctgcgggagaatcccggacttgttgccctcaccactgctgagcgttgggacggtaaactgcccgataccatgatccccggcagcacagttccgtttatctctactaagtaa

SEQ ID NO: 2343 - DNA, 1992 bp, Escherichia coli
atgtcctcacgtaaagagcttgccaatgctattcgtgcgctgagcatggacgcagtacagaaagccaaatccggtcacccgggtgcccctatgggtatggctgacattgccgaagtcctgtggcgtgatttcctgaaacacaacccgcagaatccgtcctgggctgaccgtgaccgcttcgtgctgtccaacggccacggctccatgctgatctacagcctgctgcacctcaccggttacgatctgccgatggaagaactgaaaaacttccgtcagctgcactctaaaactccgggtcacccggaagtgggttacaccgcaggtgtagaaaccaccaccggtccgctgggtcagggtattgccaacgcagtcggtatggcgattgcagaaaaaacgctggcggcgcagtttaaccgtccgggccacgacatcgtcgaccactacacctacgccttcatgggcgacggctgcatgatggaaggcatctcccacgaagtttgctctctggcgggtacgctgaagctgggtaaactgattgcgttctacgatgacaacggtatttctatcgatggtcacgttgaaggctggtttaccgacgacaccgcaatgcgtttcgaagcttacggctggcacgttattcgcgatatcgacggtcatgacgcggcatccatcaaacgcgcagtagaagaagcgcgcgcagtgactgacaaaccgtccctgctgatgtgcaaaaccatcatcggtttcggttccccgaacaaagccggtacccacgactcccacggtgcgccgctgggcgacgctgaaattgccctgacccgcgaacagctgggctggaaatacgcgccgttcgaaatcccgtctgaaatctatgctcagtgggatgcgaaagaagcaggccaggcgaaagagtccgcatggaacgagaaattcgctgcttacgcgaaagcttatccgcaggaagccgctgaatttacccgccgtatgaaaggcgaaatgccgtctgacttcgacgcgaaagcgaaagagttcattgctaaacttcaggctaatccggcgaaaatcgccagccgtaaagcgtctcagaatgctatcgaagcgttcggtccgctgttgccggaattcctcggcggctccgctgaccttgctccgtctaacctgaccctgtggtctggttctaaagcaatcaacgaagatgctgcaggtaactacatccactacggtgttcgcgagttcggtatgaccgcgattgctaacggtatctccctgcacggtggtttcctgccgtatacctcaaccttcctgatgttcgtggaatacgcacgtaatgccgtacgtatggctgcgctgatgaaacagcgtcaggtgatggtttacacccacgactccatcggtctgggcgaagatggcccgactcaccagccggtagaacagatcgcttctctgcgcgtgaccccgaacatgtctacatggcgtccgtgtgaccaggttgaatccgcagtagcgtggaaatacggcgttgagcgtcaggacggcccgactgcgcttatcctctcccgtcagaacctggcgcagcaggaacgtactgaagagcagctggcaaacatcgcgcgcggtggttatgtgctgaaagactgtgctggtcagccggaactgatcttcatcgcgaccggttctgaagttgaactggctgttgccgcctacgaaaaactgactgccgaaggcgtgaaagcgcgcgtggtttccatgccgtctaccgacgcattcgacaagcaggacgcggcttaccgtgaatccgtactgccgaaagcggttaccgctcgtgttgcggtggaagctggcattgctgactactggtacaagtatgttggcctgaacggtgctatcgtcggcatgaccaccttcggtgaatctgctccggcagagcagctgtttgaagagttcggcttcaccgttgacaacgttgttgcgaaagcaaaagcgctgctgtaa

SEQ ID NO: 2344 - DNA, 759 bp, Escherichia coli
atgaaaattcgcgccttattggtagcaatgagcatggctacggtgctgaccggttgccagaatatggactccagtggactgctctcatcaggagcggaagcttttcaggcttacagtttgagtgatgcgcaggtgaaaaaactgagcgatcaggcatgccaggagatggacagcaaagcgacgattgcgccagccaatagcgaatacgctaaacgtctgacaactattgccaatgcgctaggcaacaatatcaacggtcagccggtgaattacaaagtgtatatggcgaaggatgtgaacgcctttgcaatggctaacggctgtatccgcgtctatagcgggctgatggatatgatgacggataacgaagtcgaagcggtgctcggtcacgaaatggggcacgtggcattaggccatgtgaagaaaggaatgcaggtagcacttggtacaaacgcaattcgcgttgcggcggcctctgcaggcggaattgtcggcagtttgtcacaatcacaactgggagacctgggcgaaaagctagtcaattcgcaatttacccaacgtcaggaatcagaggccgatgattactcctacgacttgctgcgccaacgcggtatcagcccggcaggtcttgccaccagctttgaaaaactggcgaaactggaagaaggccgccaaagctcaatgtttgacgaccatcctgcatccgccgaacgcgcccagcatattcacgatcgtatgagcgcggatggagttaagtaa

SEQ ID NO: 2345 - DNA, 921 bp, Escherichia coli
atgagcaccttaggtcatcaatacgataactcactggtttccaacgcctttggttttttacgcctgccgatgaacttccagccatatgacagcgatgctgactgggtgattactggcgtgccgttcgatatggccacttctggtcgtgcgggtggtcgccacggtccggcagcgatccgtcaggtttcgacgaatctggcctgggaacacaaccgcttcccgtggaatttcgacatgcgtgagcgcctgaacgtcgtggactgcggtgatctggtatatgccttcggcgatgcccgtgagatgagcgagaagctgcaggcgcacgccgagaagctgctggctgccggtaagcgtatgctctccttcggtggtgaccactttgttacgctgccgctgctgcgcgctcatgcgaagcatttcggcaaaatggcgttggtacactttgatgcccacaccgatacctacgctaacggttgtgaatttgaccacggcaccatgttctataccgcgccgaaagaaggtctgatcgacccgaatcattccgtgcagattggtattcgtaccgagtttgataaagacaacggctttaccgtgctggacgcctgccaggtgaacgatcgcagcgtggatgacattatcgcccaggtgaaacagattgtgggtgatatgccggtttacctgacctttgatatcgactgcctggatcctgcttttgcaccaggcaccggtacgccggtaattggcggcctgacctccgatcgcgccattaaactggtacgcggcttgaaagatctcaacatcgttgggatggacgtagtggaagtggctccggcatacgatcagtcggaaatcaccgctctggctgcggcgacgctggcgctggagatgctgtatattcaggcggcgaaaaagggcgagtaa

SEQ ID NO: 2346 - DNA, 732 bp, Escherichia coli
atgaaaaaatggaaagtacgtagcgcgttggtggcattaatcgtgctgctggccggttgttccagtaatgcgcagtataatagcagtgcatcgggtaatgtcggccccgcctggggtggggatgtgcactcaacggttcagggcgtatctgctgaacgagcctggcgcgatccggcagagatgatcgttattagttattcgactaatgttccttccggctacgaccgcgtttatagcattcgtattaacgaactggaatatgctattcgcgatggtaattttaattctctacctattacgcgggtttatgattcatccaataatgaaccacgctatattgtccatgccagagtcggaatgaattatcaattatatgtccgtaattacagtcgtaacaccaactacgagatcgttgctacggttgatggcctggatgtgctgaacggcaagcaaggttcgctgaataacaacggttatattgtgaatgccggagattcgttagcgattaaaggattccgcaaagataaacataccgaagcggcttttcagttcgccaacgttgctgattcctacgcagccaattcggcgcaaggcgatgtgcgtaataccggtgtaatcggctttgccgcctttgaattacaaggcccggcgaaaaacgcgctgccgccgtgctctggacaagcctttccggcagataacaatggctatgcgccgccaccgtgtcggaaatag

SEQ ID NO: 2347 - DNA, 1977 bp, Escherichia coli
atgtctgacgacatgtctatgggtttgccttcgtcagcgggcgaacacggtgtactacgctccatgcaggaggttgcaatgagctcccaggaagccagcaagatgctgcgtacttacaatattgcctggtggggcaataactactatgacgttaacgagctgggccacatcagcgtgtgcccggacccggacgtcccggaagctcgcgtcgatctcgcgcagttagtgaaaactcgcgaagcacagggtcagcgtctgcctgcactgttctgtttcccacagatcctgcagcaccgtttgcgttccattaacgccgcgttcaaacgagcgcgggaatcctacggctataacggcgattacttcctcgtttatccgatcaaagttaaccagcaccgccgcgtgattgagtccctgattcattcgggcgaaccgctgggcctggaagccggttccaaagccgagttgatggcggtgctggcacatgctggcatgacccgtagcgtcatcgtctgcaacggttataaggaccgcgaatatatccgcctggcattaattggcgagaagatgggccacaaggtctatctggtcattgagaagatgtcagaaattgccattgtgctggatgaagcagaacgtctgaatgtcgttcctcgtctgggcgtgcgtgcacgtctggcgtcgcaaggctcgggtaaatggcagtcctccggcggggaaaaatcgaagtttggcctggcggcgactcaagtactgcaactggttgaaacgctgcgtgaagccgggcgtctcgacagcctgcaactgctgcacttccacctcggttcgcagatggcgaatattcgcgatatcgcgacaggcgttcgtgaatccgcgcgtttctatgtggaactggacaagctgggcgtcaatattcagtgcttcgacgtcggcggcggtctgggcgtggactatgaaggcacccgttctcagtctgactgctccgtaaactacggcctcaatgaatacgccaacaacatcatctgggcgattggtgatgcgtgtgaagaaaatggtctgccacatccgacggtaatcaccgaatcgggtcgtgcggtgactgcgcatcacaccgtgctggtgtcgaatatcatcggcgtggaacgtaacgaatacacggtgccgaccgcgcctgcagaagatgcaccgcgcgccctgcaaagcatgtgggaaacctggcaggaaatgcacgaaccgggaactcgccgttctctgcgtgaatggttacacgacagccagatggatctgcacgacattcatatcggctactcttccggcacctttagcctgcaagaacgcgcatgggctgagcagctttatttgagcatgtgccatgaagtgcaaaagcagctggatccgcaaaaccgtgctcatcgtccgattatcgacgagctgcaggaacgtatggcggacaaaatgtacgtcaacttctcgctgttccagtcgatgccggatgcgtgggggatcgaccagttgttcccggttctgccgctggaagggctggatcaagtgccggaacgccgcgctgtgctgctggatattacctgtgactcagacggtgctatcgaccactatattgatggtgacggtattgccacgacaatgcctatgccggagtacgatccggagaatccgccgatgctcggtttctttatggtcggcgcatatcaggagatcctcggcaacatgcacaacctgttcggtgataccgaagcggttgacgtgttcgtcttccctgatggtagcgtagaggtagaactgtctgacgaaggcgataccgtggcggacatgctgcaatatgtgcagctcgatccgaaaacgctgttaacccagttccgcgatcaggtgaagaaaaccgatcttgatgctgaactgcaacaacagttccttgaagagttcgaggcaggtttgtacggttatacctatcttgaagatgaataa

SEQ ID NO: 2348 - DNA, 252 bp, Escherichia coli
gtggtagcggatcctaccacgactctgcaggttaaaaacactggcagtctgagtgttaatcggtatggatggattaacatctggatggctattttaggtcagttcttcacccaatttccacttttttttgaatcgtgtctcattctgttaaaaacgtggctggaaatttttcctgacaatgctggcattctgcgtatttatcttttgcaattttctgccattgtggggtataaaacgcggcgcgcggcttaa

SEQ ID NO: 2349 - DNA, 1155 bp, Escherichia coli
atggcaaaacacctttttacgtccgagtccgtctctgaagggcatcctgacaaaattgctgaccaaatctctgatgccgttttagacgcgatcctcgaacaggatccgaaagcacgcgttgcttgcgaaacctacgtaaaaaccggcatggttttagttggcggcgaaatcaccaccagcgcctgggtagacatcgaagagatcacccgtaacaccgttcgcgaaattggctatgtacattccgacatgggctttgacgctaactcctgtgcggttctgagcgccatcggtaaacagtctcctgacatcaaccagggcgttgaccgtgccgatccgctggaacagggcgcgggcgaccagggtctgatgtttggctacgcaactaatgaaaccgacgtgctgatgccagcacctatcacttatgcacaccgtctggtacagcgtcaggctgaagtgcgtaaaaacggcactctgccgtggttgcgcccggacgcgaaaagccaggtgactttccagtatgacgacggcaaaatcgttggcattgatgctgtcgtgctttccactcagcactctgaagagatcgaccagaaatcgctgcaagaagcggtaatggaagagatcatcaagccgattctgcccgctgaatggctgacttctgccaccaaattcttcatcaacccgaccggtcgtttcgttatcggtggcccgatgggtgactgcggtctgactggtcgtaaaatcatcgttgatacctacggcggcatggcgcgtcacggtggcggtgcattctctggtaaagatccatcaaaagtggaccgttccgcagcctacgcagcacgttatgtcgcgaaaaacattgttgctgctggcctggccgatcgttgtgaaattcaggtttcctacgcaatcggcgtggctgaaccgacttccatcatggtagaaactttcggtactgagaaagtgccttctgaacaactgactctgctggtacgtgaattcttcgacctgcgcccatacggtctgattcagatgctggatctgctgcacccgatctacaaagaaaccgcagcatacggtcactttggtcgtgaacatttcccgtgggaaaaaaccgacaaagcgcagctgctgcgtgatgctgccggtctgaagtaa

SEQ ID NO: 2350 - DNA, 1395 bp, Escherichia coli
atgcctgacgctaaaaaacaggggcggtcaaacaaggcaatgacgtttttcgtctgcttccttgccgctctggcgggattactctttggcctggatatcggtgtaattgctggcgcactgccgtttattgcagatgaattccagattacttcgcacacgcaagaatgggtcgtaagctccatgatgttcggtgcggcagtcggtgcggtgggcagcggctggctctcctttaaactcgggcgcaaaaagagcctgatgatcggcgcaatcctgtttgttgccggttcactgttctctgcggctgcgccaaacgttgaagtactgattctttcccgcgttctgctggggctggcggtgggtgtggcctcttataccgcaccactgtacctgtcagaaattgcgccggaaaaaattcgcggcagtatgatctcgatgtatcagttgatgatcactatcgggatcctcggcgcttatctttctgataccgccttcagctacaccggtgcatggcgctggatgctgggtgtgattatcatcccggcaattttgctgctgattggtgtcttcttcctgccagacagcccacgttggtttgccgccaaacgccgttttgttgatgccgaacgcgtgctgctacgcctgcgtgacaccagcgcggaagcgaaacgcgaactggatgaaatccgtgaaagtttgcaggttaaacagagtggctgggcgctgtttaaagagaacagcaacttccgccgcgcggtgttccttggcgtactattgcaggtaatgcagcaattcaccgggatgaacgtcatcatgtattacgcgccgaaaatcttcgaactggcgggttataccaacaccaccgagcaaatgtgggggacagtgattgtcggcctgaccaacgtacttgccacctttatcgcaatcggccttgttgaccgctggggacgtaaaccaacgctaacgctgggcttcctggtgatggctgctggtatgggcgtactcggtacaatgatgcatatcggtatccactctccgtcggcgcagtatttcgccatcgccatgctgctgatgtttattgtcggttttgccatgagtgccggtccgctgatttgggtactgtgctccgaaattcagccgctgaaaggccgcgattttggcatcacctgctccactgccaccaactggattgccaacatgatcgttggcgcaacgttcctgaccatgctcaacacgctgggtaacgccaacaccttctgggtgtatgctgctctgaatgtactgtttatcctgctgacattgtggctggtaccggaaaccaaacatgtttcgctggaacatattgaacgtaatctgatgaaaggtcgtaaactgcgcgaaatcggcgctcacgattaa

SEQ ID NO: 2351 - DNA, 456 bp, Escherichia coli
atgcgtcgcctgcgggaaaaactcgcccaggccaacctgaagctagggcgtaactacccggagccaaaactctcttacacccagcgcggaacctctgccggaacagcctggctggaaagctatgaaattcgcctcaatcccgttttgctgttggaaaacagtgaagcctttattgaagaagtggtgccgcacgaactggcacatttgctggtatggaaacatttcggccgcgtagcgccacatggcaaagagtggaagtggatgatggaaagcgtgctgggcgttcccgcccgccgtacgcatcagttcgaactgcaatccgtgcgccgcaacaccttcccctaccgctgcaagtgccaggagcatcagcttaccgtacgccgtcataatcgcgtagttcgtggcgaagccgtctatcgctgtgttcactgcggcgaacagctggttgcgaaataa

SEQ ID NO: 2352 - DNA, 708 bp, Escherichia coli
atgtaccgttatttgtctattgctgcggtggtactgagcgcagcattttccggcccggcattggccgaaggtatcaatagtttttctcaagcgaaagccgcggcggtaaaagtccacgctgacgcgcccggtacgttttattgcggatgtaaaattaactggcagggcaaaaaaggcgttgttgatctgcaatcgtgcggctatcaggtgcgaaaaaatgaaaaccgtgccagccgcgtagagtgggaacacgtcgttcctgcctggcaattcggtcaccagcgccagtgctggcaggacggtggacgtaaaaattgcgccaaagatccggtctatcgcaagatggaaagcgatatgcataacctgcagccgtcagtcggtgaggtgaatggcgatcgcggcaactttatgtacagccagtggaatggcggtgacggccagtacggtcaatgcgccatgaaggtcgatttcaaagaaaaagttgccgaaccaccagcgcgtgcacgcggtgccattgcgcgcacctacttctatatgcgtgaccaatacaacctgacactctctcgtcagcaaacgcagctgttcaacgcatgggacaagatgtatccagttaccgactgggagtgcgagcgtgatgaacgcatcgcgaaggtgcagggcaatcataacccgtatgtgcaacgcgcttgccaggcgcgaaagagctaa

SEQ ID NO: 2353 - DNA, 732 bp, Escherichia coli
atgcgtatcccccgcatttatcatcctgaaccactgaccagccattctcacatcgcgctttgcgaagatgccgccaaccatatcgggcgcgtactgcgtatggggccgggacaggcgctgcaattgtttgacggcagcaaccaggtctttgacgccgaaattaccagcgccagcaaaaaaagcgtggaagtgaaggtgctggaaggccagatcgacgatcgcgaatctccgctgcatattcacctcggtcaggtgatgtcgcgtggtgaaaaaatggaatttactatccagaaatcgatcgaactcggtgtaagcctcattacgccacttttttctgagcgctgcggcgttaaactggatagtgaacgtctgaacaagaagctccagcagtggcagaagattgcaattgctgcctgtgagcagtgtggccgtaaccgggtgccggaaatccgtccagcgatggatctggaagcctggtgtgcagagcaggatgaaggactgaaactgaatcttcacccgcgcgccagtaacagcatcaatacgttgccgttaccggtcgaacgcgtccgcctgctgattggcccggaaggtggtttatcggcagatgaaattgccatgactgcccgctatcaatttactgatatcctgttgggacctcgcgttttgcgtactgagacaactgcgctcaccgccattaccgcgctacaagtgcgttttggcgatttgggctaa

SEQ ID NO: 2354 - DNA, 951 bp, Escherichia coli
atgatcaagctcggcatcgtgatggaccccatcgcaaacatcaacatcaagaaagattccagtttcgctatgttgctggaagcacagcgtcgtggttacgaacttcactatatggagatggccgatctctatttgatcaatggtgaggctcgcgctcgtacccgtactttgagcgtcgaacagaactacgataaatggtacgagttcacgggtgagcaggatctgccgctggccgatctcgatgtgatcctgatgcgtaaagacccgccgtttgataccgagtttatctacgcgacctatattctggaacgtgccgaagataaagggacgctgatcgttaacaagccgcagagcctgcgcgattgtaacgaaaaactgttcactgcctggttctctgacttaacaccagaaacgctggtcacacgcaataaagcgcagctaaaagctttctgggaaaaacacagcgacatcattcttaagccgctggacggtatgggcggcgcgtcgattttccgcgtgaaagaaggcgatccaaacctcggcgtgattgccgaaaccctgactgagcatggcactcgctactgcatggcgcaaaattacctgccagccattaaagatggcgacaaacgcgtgctggtagtggatggcgagccggtgccgtattgcctggcgcgtattccgcaggggggcgaaacccgtggcaatctggctgccggtggtcgcggtgaacctcgtccgctgacggaaagtgactggaaaatcgcccgtcagattgggccgacgctgaaagaaaaagggctgatttttgttggtctggatatcatcggcgaccgtctgactgaaattaacgtcaccagcccaacctgtattcgtgagattgaagcagagtttccggtgtcgatcaccggaatgttaatggatgccatcgaagcacgtttacagcagcagtaa

SEQ ID NO: 2355 - DNA, 636 bp, Escherichia coli
gtgacagcgcccttctttccacgcatactgggcgctgttgcttttttgaaccaggaaacagaacctctgacaatgaatttacagcatcactttcttattgccatgcctgctctccaggatccgattttccgtcgttccgtggtctacatttgcgaacataataccaatggtgcaatggggatcatcgtcaacaagccgctggaaaatctcaaaattgaagggattctggaaaagctgaagatcacgccggagccgcgtgatgaatcaatccgtctggataaaccggttatgctcggcggtccgctggctgaagatcgcgggtttattttgcatactccgccctccaattttgcttccagcattcgcatttcagacaacacagtgatgaccacttcccgcgatgtgctggaaacgctcggcaccgataaacaaccgtctgacgtattggtggctctgggttatgcctcctgggagaaaggtcaactggaacaagaaattctcgataacgcgtggctaacggccccggcagatctgaatattctgttcaaaacgccgattgccgaccgctggcgcgaggcggcaaaactgattggtgtggatattctcaccatgcctggtgtggcaggacacgcctga

SEQ ID NO: 2356 - DNA, 417 bp, Escherichia coli
atgagtggaaccttactcgccttcgacttcggcaccaaaagcattggcgtagcggtcggccaacgcattaccggcaccgctcgccctttgcctgcaattaaagcgcaggacggtacgccggactggaacattatcgagcgtttactgaaagagtggcagccggacgaaatcatcgtcggtttgccgctgaatatggacggcaccgaacagccgttaaccgccagagcgcgtaaatttgccaaccgtattcatggtcgtttcggtgttgaagtaaagctccatgacgagcgtcttagcaccgtggaggcacgttccggtctgtttgaacagggcggctatcgggcgctcaacaaaggcaaagtcgactctgcctctgcggttattattctcgaaagctatttcgagcagggatattaa

SEQ ID NO: 2357 - DNA, 981 bp, Escherichia coli
atgaatatggaagaaattgtggcccttagtgtaaagcataacgtctcggatctacacctgtgcagcgcctggcccgcacgatggcgcattcgcgggctaatggaagctgcgccgtttgatgcgccggacgtcgaagagctactgcgggagtggctggatgacgatcagcgggcaatattgctggagaatggtcagctggattttgctgtgtcgctggcggaaaaccagcgattgcgcggcagtgcgttcgcacaacggcaaggtatttctctggcgttacggctgttaccttcgcactgcccgcagctcgaacagcttggcgcaccaccggtattgccggaattactcaagagcgagaatggcctgattctggtgacgggggcgacggggagcggcaaatctaccacgctggcggcgatggttggctatctcaatcaacatgccgatgcgcatattctgacgctggaagatcctgtggaatatctctataccagtcagcgatgtttgatccaacagcgggagattggtttgcactgtatgactttcgcatcgggattgcgggctgcattgcgggaagatcctgatgtgattttgctcggagagctgcgtgatagcgagacaatccgtctggcgctgacggcggcagaaaccgggcatctggtgctggcgacattacacacgcgcggcgcagcgcaggcagttgagcgactggtggattcgtttccggcgcaggaaaaagatcccgtgcgtaatcaactggcaggtagtttacgggcggtgttgtcacaaaagctggaagtggataaacaggaaggacgcgtggcgctgtttgaattactgattaacacacccgcggtggggaatttgattcgtgaagggaaaacccaccagttaccgcatgttattcaaaccgggcagcaggtggggatgataacgtttcagcagagttatcagcagcgggtgaaagaagggcgcttgtga

SEQ ID NO: 2358 - DNA, 705 bp, Escherichia coli
atgaacgatattgcgcataacctggcacaggtccgggacaaaatctcagcggctgcaacgcgttgcggccgttctccagaagaaattacgctgcttgcagtcagtaaaacaaaacctgcgagcgccatcgcagaagccattgatgccgggcagcgtcaatttggtgaaaactacgttcaggaaggggtagataaaattcgccactttcaggaactgggcgtaacaggattagaatggcattttattggcccgttgcagtctaataaaagccgcctggtggcagagcatttcgactggtgtcataccatcgaccgtttgcgcatcgctacccgcctgaacgaccagcgcccggcagaacttccccctcttaacgtactgattcaaattaacattagtgatgaaaacagtaagtccgggattcaactggctgaactggacgagctggcagctgcggtcgctgaactaccgcgtttacgtctgcgcgggctgatggcaatccctgcgcctgagtcagaatatgtaaggcagtttgaagttgcacgccaaatggctgtagcatttgccggactgaaaacacgctacccgcatatcgacacgctctctctgggaatgtcggacgatatggaagccgccattgcggcaggtagcacgatggttcgtatcggcactgcaatttttggtgcgcgtgattactctaaaaaataa

SEQ ID NO: 2359 - DNA, 567 bp, Escherichia coli
atgaatacgttgactttcctgctttcaacggtcattgagctgtataccatggtgctgttattacgcatctggatgcagtgggctcattgtgatttttacaaccccttctcacagtttgtagtgaaggtaacgcagccgattatcgggccactgcgccgcgttattccggcaatgggccccattgatagcgcctcgctgctggttgcctatattctcagtttcattaaagccatcgtgctgtttaaagtggtgaccttcctgccaatcatttggattgccggtttattaattctgctgaaaaccatcggcctgctgatattctgggtcctgctggtgatggcgattatgagctgggtaagccagggtcgtagcccgattgaatacgtgctgattcagctggccgatccgctgctgcgcccgattcgccgcttgctaccggcaatgggtgggattgatttctcgccgatgatcctcgttctgctgctgtatgtcatcaatatgggtgtcgcagaagtcttgcaggcgaccggaaatatgctgctgccggggctgtggatggcgttatga

SEQ ID NO: 2360 - DNA, 291 bp, Escherichia coli
atgagtgccgtaacagttaatgatgacggtctggttttacggctctatattcagccgaaagccagccgtgattctattgtcggtttacatggcgacgaggtaaaagtcgccattaccgcgccgccggttgacggccaggccaacagccatctggtgaagtttctcggtaagcaattccgggttgccaaaagccaggtggtaattgaaaaaggcgaacttggccgccacaaacaaattaaaatcattaatccgcaacaaatcccgccagaaatcgcggcgttaattaattag

SEQ ID NO: 2361 - DNA, 594 bp, Escherichia coli
atgcaaaaagttgtcctcgcaactggcaatgccggtaaagtgcgtgagctggcgtcgctgcttagcgacttcggtcttgatatcgtggcccaaacagacctcggcgtagattccgctgaagaaaccggcctgacctttatcgaaaacgcgattctgaaagcgcgccatgcggcaaaagtgaccggtttaccggcaattgccgacgactccggtctggcggtagatgcgctgggtggcgcgccgggtatttactccgcgcgttattccggtgaagacgcgaccgatcaaaagaatctgcaaaaactgctggaaacaatgaaagacgtaccggacgaccaacgtcaggcgcgtttccactgcgtgctggtatatctgcgtcacgcggaagatcccactccgctggtgtgccacggcagctggccgggcgtgattactcgtgaaccagcgggcactggtggctttggttatgatccaatcttcttcgtaccttccgaagggaaaactgctgccgaactgacccgcgaagaaaagagcgccatttcccaccgtggtcaggcgttgaaactgctgctggacgctttacgtaatggttaa

SEQ ID NO: 2362 - DNA, 1137 bp, Escherichia coli
atggttaaattaccgccgctgagtctctacattcacatcccgtggtgcgtgcagaaatgcccgtactgcgatttcaactctcacgcgttgaaaggagaagtgccgcacgacgattatgttcagcatctgcttaacgatctgaacaacgatgtggcttacgctcagggccgtgaagtaaagacaatctttattggcggtggtacgccgagcctgctttccggcccggcgatgcaaacgctgctggacggcgtacgtgcgcgtttgccgctggcagcggatgcagaaattacgatggaagcgaatcctggtacggttgaagccgatcgctttgttgattatcagcgtgctggtgtgaaccgcatctccattggcgtacagagttttagcgaagaaaagctgaaacgacttgggcgcattcatggcccgcaagaagcgaaacgagcggcaaatctggcgagcggtttagggttacgtagctttaacctcgatttgatgcatgggctaccggatcaatcactggaagaggcgcttggcgatctacgccaggctattgaactgaatccgccgcatctttcctggtatcaactgaccatcgaacccaatacgctgtttggttcgcgccctcctgtactgccggacgatgacgcgctgtgggacattttcgaacaggggcatcagttattaaccgcagcgggttatcagcaatatgaaacttccgcttacgccaaacccggttatcagtgccagcacaatctcaactactggcgctttggtgactacatcggtattggctgcggcgcgcatggcaaagtgaccttcccggatgggcgcattctgcgtaccaccaaaacgcgtcatccacgtggttttatgcaggggcggtatctggaaagccagcgtgatgtcgaagccgcagataaaccatttgagttctttatgaatcgcttccgtttgctggaacctgcgccgcgcgtggagtttagccagtatactggcctttcagaagaggttattcgccctcagttagacgaggctattgctcagggttatctcacagaatgtgcggattactggcagataacggaacatgggaagttgtttttaaattcgttgctggagctttttctggcggagtaa

SEQ ID NO: 2363 - DNA, 1008 bp, Escherichia coli
gtgaaaaagcaatggattgttggtacggcgctgtttatgttgatgactggtaatgtctgggcagatggtgaaccgccaactgaaaatatcttaaaagatcaattcaaaaagcagtatcacggcattctcaagcttgatgtcatcaccttaaaaaatcttgatgctaagggtaatcaggccacctggtcagcggaaggcgatgtctcttccagtgacgatctctatacctgggtcggtcagttggcagattacgagctgctcgaacagacctggacgaaagataaaccggtgaaattctcggcgatgttaaccagtaaaggaacgcccgcgtctggctggtcggtgaacttttactcttttcaggcggcagccagcgatcgtgggcgggtggttgacgatatcaaaacgaataataaatatctgatcgtgaatagcgaagatttcaattatcgctttagtcagcttgagtctgcgttgaataaccagaataactcgattcctgcactgaaaaaggatgtaaaagcgcttgataagcaaatggtggcggcgcagaaagcagcggatgcatattggggaaaagatgcaaacggtaagcaaatgacccgcgaagacgcctttaaaaaaattcaccaacagcgtgatgattttaataaacagaacgatagtgaggcgttcgcggttaaatatgacaaagaggtttatcaaccggcgattgcggcatgtcataaacagagtgaagagtgttatgaagtgccaattcagcagaaacgagattttgatatcaacgaacaacggcgacagacttttctgcaatcacaaaaacttagccgtaaattgcaggatgactggataacgctcgagaaagggcaatatccgttaacgatgaaagtttcagaaataaacagtaaaaaagtcgcgattttgatgaaaattgacgatatcaaccaggctaatgaacgctggaaaaaagataccgaacaactgcggcgcaatggggtgattaagtaa

SEQ ID NO: 2364 - DNA, 1047 bp, Escherichia coli
atggagtttttcaaaaagacggcacttgccgcactggttatgggttttagtggtgcagcattggcattacccaatatcaccattttagcaaccggcgggaccattgccggtggtggtgactccgcaaccaaatctaactacacagcgggtaaagttggcgtagaaaatctggttaatgcggtgccgcaactgaaggacattgcgaacgttaaaggcgagcaggtagtgaatattggctcccaggacatgaacgatgatgtctggctgacactggcgaaaaaaattaacaccgactgcgataaaactgacggcttcgtcattacccacggtaccgacacgatggaagaaaccgcttacttcctcgacctgacggtgaaatgcgacaaaccggtggtgatggtcggtgcaatgcgcccgtccacgtctatgagcgcagacggtccattcaacctgtataacgcggtagtgaccgcagctgataaagcctccgctaatcgtggcgtactggtagtgatgaacgacaccgtgcttgatggccgtgatgtcaccaaaaccaacaccaccgacgtagcgaccttcaagtctgttaactacggtcctctgggttacattcacaacggtaagattgattaccaacgtaccccggcacgtaagcacaccagcgacacgccgttcgatgtctctaagctgaatgaactgccgaaagtcggcattgtttataactacgctaacgcatccgatcttccggctaaagcactggtagatgcgggctatgatggcatcgttagcgctggcgtgggtaacggcaacctgtataaaaccgtatttgacacccttgcaaccgctgcgaaaaacggcactgcagtagtgcgttcttcccgcgtaccgacgggcgctaccactcaggatgccgaagtggatgatgcgaaatacggcttcgtcgcctccggcatgttgaacccgcaaaaagcgcgcgttctgctgcaactggctctgacgcaaactaaagatccgcagcagatccagcagatcttcaatcagtactaa

SEQ ID NO: 2365 - DNA, 720 bp, Escherichia coli
atgatgcgcaaaatgctgctggcggcagcactttcagtgacggcaatgaccgctcacgccgactaccagtgcagcgtcacgccgcgtgacgatgtgattgtcagcccgcaaaccgtgcaggtgaagggcgaaaacggcaatctggtgatcacgccagacggcaacgtgatgtataacggtaagcaatattccctgaatgccgcccagcgcgagcaggcgaaggattatcaggctgaactacgtagcaccctgccgtggattgatgaaggcgcgaaaagccgcgtcgagaaagctcgtattgcgctggataaaattatcgttcaggagatgggcgaaagcagcaaaatgcgcagccgtctgaccaaacttgatgcgcagctgaaagagcagatgaaccgcattatcgaaacgcgcagcgatggcctgacgtttcactataaagccattgatcaggttcgtgccgaaggccagcaattagtgaatcaggcaatgggcggaattttacaggacagcattaatgaaatgggcgcgaaagcggtgctgaaaagcggcggtaacccattacagaacgtgctgggaagcctgggcggtctgcaatcctcaatccaaaccgagtggaaaaagcaggaaaaagatttccagcagtttggcaaagatgtttgtagccgcgttgtgactctggaagatagccgcaaagccctggtcgggaatttaaaataa

SEQ ID NO: 2366 - DNA, 327 bp, Escherichia coli
atggcaaagaaccgtagccgtcgtctgcgtaaaaaaatgcacatcgacgaattccaggaattaggattttcggtggcatggcgattcccggaaggtacatcggaagaacagattgataaaaccgttgatgactttattaacgaggttatcgaaccgaacaaactggcctttgacggcagcggttatctggcctgggaaggtctgatctgcatgcaggaaatcggcaaatgcaccgaagaacatcaggcgattgtgcgtaagtggctggaagaacgcaaactggaagaggtacgcaccagcgaacttttcgacgtttggtgggactaa

SEQ ID NO: 2367 - DNA, 720 bp, Escherichia coli
atgaaaaacgacgtcatctcaccggaatttgatgaaaacggccgcccgctgcgccgtatccgtagttttgtgcgccgccaggggcgactgaccaaaggccaggaacatgcgctggaaaactactggccggtgatgggcgttgagttcagcgaagatatgctggatttccctgcgctttttggccgtgaagcgccggtgacgcttgagattggttttggcatgggcgcgtcgttggtggcaatggctaaagatcgccccgagcaggacttcctcggcattgaagtgcattcaccgggcgttggtgcgtgcctgtcttctgcgcatgaagagggcttaagcaacctgcgcgtgatgtgtcacgatgcggttgaagtgctgcataaaatgattcctgacaattcattgcgcatggtgcagctctttttccctgacccgtggcacaaagcgcgccataataaacgccgtatcgttcaggtgccgtttgccgagctggtaaaaagcaaactgcagctggggggcatattccatatggcgaccgactgggaaccttatgcggaacatatgcttgaagtgatgtcttctattgacggttataaaaacctgtcagagagcaatgattacgtaccgcgtccggcatcacgtccggtgacgaaatttgaacaacgtggtcatcgtcttggtcacggagtatgggacttaatgttcgagagggtgaaataa

SEQ ID NO: 2368 - DNA, 1053 bp, Escherichia coli
atgcaagcgtcgcaattttcagcccaggttctggactggtacgataaatacgggcggaaaacgctgccctggcaaattgacaagacgccctacaaagtatggctctcagaagtgatgttgcaacaaactcaggttgcgaccgttatcccctattttgaacgctttatggtgcgcttcccaacggtgaccgatctcgccaatgcgccgctcgacgaagttctccacttgtggaccgggcttggctattacgcccgagcgcgcaacctgcataaagcggcacaacaagtggcggccttacacggcggtaaattcccggaaacatttgaggaagttgcagcactgccgggcgtcgggcgttccaccgcaggcgcgattctctcgctttctctgggtaagcactttccgattctcgacggtaacgtcaaacgggtgctggcgcgctgctatgctgtaagcggctggcctgggaaaaaagaggtcgagaacaaactatggagtttaagcgagcaggtgacgcccgcggttggcgtggaacggtttaaccaggcgatgatggatttgggcgcgatgatttgtacgcgctctaagccgaaatgttcgctctgcccgctacaaaacggatgtattgccgccgccaacaatagctggtcgctttatccgggcaaaaaaccgaaacagacgctgccagagcgcaccggctactttttgctgttacagcacgaagatgaagtattgctggcgcagcgtccgccgagcggattgtggggcggtttatactgtttcccgcagtttgccgatgaagaaagtttgcggcagtggctggcgcaacgacagatttctgccgataacctgacgcagctgaccgcgtttcggcataccttcagccatttccacttagatattgtgcctatgtggcttcccgtgtcgtcattcaccggctgcatggatgaaggcaatgcgctctggtataacttagcgcaaccgccgtcagttggcctggcggctcccgtggagcgtttgttacagcagttacgcactggcgcgccggtttag

SEQ ID NO: 2369 - DNA, 276 bp, Escherichia coli
atgagcagaacgattttttgtactttcctgcaacgtgaagcagaaggtcaggattttcagctgtaccccggcgaactgggaaaacgcatctataacgagatctccaaagaagcctgggcgcagtggcagcacaaacaaaccatgctgattaatgaaaagaaactcaacatgatgaatgccgagcaccgcaagctgctggagcaggagatggtcaacttcctgttcgagggtaaagaggtgcatatcgagggctatacgccggaagataaaaaataa

SEQ ID NO: 2370 - DNA, 1080 bp, Escherichia coli
atgaaaaaatatctcgcgctggctttgattgcgccgttgctcatctcctgttcgacgaccaaaaaaggcgatacctataacgaagcctgggtcaaagataccaacggttttgatattctgatggggcaatttgcccacaatattgagaacatctggggcttcaaagaggtggtgatcgccggtcctaaggactacgtgaaatacaccgatcaatatcagacccgcagccacatcaacttcgatgacggtacgattactatcgaaaccatcgccgggacagaacctgccgcgcatctgcgccgggcaattatcaaaacgttgctgatgggggacgatccgagttcggtcgatctctattccgacgttgatgatattacgatttcgaaagaacctttcctttacggtcaggtggtggacaacaccgggcagccgattcgctgggaaggtcgcgcgagcaacttcgcggattatctgctgaaaaaccgtctgaagagcctcagcaacgggctgcgtatcatctacagcgtcaccattaacatggtgccgaaccaccttgataaacgtgcgcacaaatatctcggcatggtccgccaggcatcacggaaatatggcgttgatgagtcgctgattctggcaattatgcagactgaatcttcctttaacccgtatgcggtcagccgttccgatgcgctgggattaatgcaggtggtacaacataccgccgggaaagatgtgttccgctcgcaggggaaatccggcacgccgagccgcagtttcttgtttgatcctgccagcaatattgataccggcaccgcgtatctggcgatgctgaacaacgtttatctcggcggaattgataacccaacatcgcggcgttatgccgtcatcaccgcctataacggcggcgcaggcagcgtgctacgagtcttttcgaatgataagattcaggctgccaatattattaacaccatgacgccgggcgatgtttatcagacgctgacgacccgccatccctctgcggaatctcgccgttatctttataaagtgaataccgcgcaaaaatcttaccgccgccgataa

SEQ ID NO: 2371 - DNA, 1257 bp, Escherichia coli
atgaatcttaagctgcagctgaaaatcctctcttttctgcagttctgtctgtggggaagttggctgacgaccctcggctcctatatgtttgttaccctgaagtttgacggtgcttctatcggcgcagtttatagctcactgggtatcgccgcggtctttatgcctgcgctgctggggattgtggccgacaaatggttaagtgcgaaatgggtctatgccatttgccacaccattggcgctatcacgctgttcatggcggcagaggtcactacgccggaggcgatgttccttgtgatattgattaactcgtttgcttatatgccaacgcttgggttaatcaacaccatctcttactatcgcctgcaaaatgccgggatggatatcgttactgacttcccgccaatccgtatctggggcaccatcggctttatcatggcaatgtgggtggtgagcctgtccggcttcgaattaagccacatgcagctgtatattggcgcagcgctttccgccattctggttctgtttaccctgactctgccgcatattccggttgctaaacagcaagcgaatcagagctggacaaccctgctgggcctcgatgcattcgcgctgtttaaaaacaagcgtatggcaatcttcttcatcttctcaatgctgctgggcgcggaactgcagattaccaacatgttcggtaataccttcctgcacagctttgacaaagatccgatgtttgccagcagcttcatcgtgcagcatgcgtcaatcatcatgtcgatttcgcagatctctgaaaccctgttcattctgaccatcccgttcttcttaagccgctacggtattaagaacgtaatgatgatcagtattgtggcgtggatcctgcgttttgctctgtttgcttacggcgacccgactccgttcggtactgtactgctggtactgtcgatgatcgtttacggttgcgcattcgacttcttcaacatctctggttcggtgtttgtcgaaaaagaagttagcccggcaattcgcgccagcgcgcaggggatgttcctgatgatgaccaacggcttcggctgtatcctcggcggcatcgtgagcggtaaagtggttgagatgtacacccaaaacggcattaccgactggcagaccgtatggctgattttcgcaggttactccgtggtgctggccttcgcgttcatggcgatgttcaaatataaacacgttcgtgtcccgacaggtacacagacggttagccactaa

SEQ ID NO: 2372 - DNA, 2136 bp, Escherichia coli
atgaaatcaatgaatattgccgccagtagtgaactggtatcccgactttctactcatcgccgcgtggtggcgttgggagatactgattttacggacgtcgcggcagtcgtcattaccgctgcggatagtcgcagtggcattcttgcattgcttaagcgcaccggttttcatctaccggtgtttttgtattccgaacatgctgttgaattacctgcgggcgttacggcggtaatcaacggcaacgagcagcagtggctggagctggaatccgcagcctgtcagtatgaagagaatttgctgccaccgttttatgacacgctgacgcagtacgttgagatgggtaatagcacctttgcttgccctggacatcaacatggtgcgttctttaaaaagcatcctgccggacgccatttttacgatttctttggcgagaacatctttcgcgccgatatgtgtaacgctgacgtaaaattgggcgatctgcttattcatgaaggatcggcgaaagatgcgcagaaatttgcagccaaagtctttcatgccgataaaacctattttgtgctgaacggcacatcggcagcgaataaagtggtgacgaatgcgctgttaacgcgtggcgatctggtgctcttcgaccgtaacaaccataagtcgaatcatcatggcgcgttgattcaggcgggggcgacaccggcctatctggaagcttcacgtaacccgtttggtttcattggcggtattgatgcgcactgttttaatgaagagtatctgcgccagcaaattcgcgacgttgcgccagaaaaagccgacctgccgcgcccgtttcgcctggcgattattcagctgggaacctatgacggcactgtctataacgcccgtcaggtgatcgataccgttgggcatctgtgtgattacattctgtttgattccgcgtgggtcggttacgaacagtttatcccgatgatggcggatagctcgccgctgctgttagaacttaacgaaaacgatccggggatctttgtgactcagtcggtgcacaaacagcaggcgggattctcacagacgtcgcagatccataaaaaagataaccatatccgtggacaggcgcgtttttgcccgcataagcggttgaataatgcctttatgctccatgcttctaccagcccgttctatccgctgttcgccgccctggacgttaacgccaaaattcatgaaggggagagtgggcgtcggctgtgggctgagtgcgttgagttgggtattgagtcgcgcaaggctattcttgcgcgctgtaagctgttccgcccgtttatcccgcccgttgttgatggcaaattgtggcaggattatccgacgtcagtgttagccagcgaccgccgttttttcagttttgagccgggggcgaattggcacggctttgaaggatatgccgcggatcagtattttgttgatccgtgcaagctgttactcaccacgccgggtatcgatgccgaaaccggcgaatatagcgactttggcgttccggcgacgattctggcgcactacctgcgtgagaacggcattgtgccggagaagtgcgatctcaactccattctgttcttattaactccggcggaaagccacgagaagctggcacaactggtggcgatgctggcgcagtttgaacagcatattgaggatgattcgccgctggctgaggtgttgccgagcgtttataacaaatatccggtgcgctatcgcgactacaccctgcgccagttgtgtcaggagatgcacgatttgtatgtcagtttcgacgtcaaagacctacaaaaagcgatgttccgccagcagagtttcccgtcagtggtgatgaatccccaggatgcgcatagcgcttatattcgcggtgaagtggagttggtgcggattcgtgatgccgaagggcgaattgcggcagaaggggcgttgccttatccacctggcgtgctttgcgtggtacccggggaagtctggggtggggcggttcaacgttatttccttgcgctggaagaaggcgtgaatttgttgccgggattttcgccggagttgcaaggtgtctatagcgaaaccgatgcggatggcatgaaacggttgtacggttatgtgttgaagtaa

SEQ ID NO: 2373 - DNA, 708 bp, Escherichia coli
gtggtcatcggcccttttatcaacgcaagtgcagtcttactgggtggcgttttcggcgcactccttagccaacgcttaccggaacgtatccgcgtctccatgacatcaatttttggtctggcatcgctggggattggtattttactggtggtgaaatgcgccaaccttccggcgatggttttagcaaccttactcggagcattaatcggcgaaatttgtctgctggaaaaaggcgtcaatacagtggtcgccaaagcgcataatctgtttcaccactcgcgtaagaagccagcgcatgaatcttttattcagaattttgtcgcgattattgtcctgttttgcgccagcggcaccggaatcttcggggcgatgaacgaagggatgaccggcgatccgagtattttaatcgccaagtcatttcttgatttctttacggcgatgatcttcgcctgctcgctgggtattgcggtgtcggtgattagcattccattactgatcatccagttaacactggcgtgggctgccgcgctgatattaccgctgaccacaccgtcgatgatggcagacttcagcgccgtaggcggtttactgctgctggcaaccggattacgcatctgtggcattaaaatgttcccggtggtcaacatgcttccagcactccttctggcaatgccgctttccgccgcctggaccgcctggtttgcctga

SEQ ID NO: 2374 - DNA, 1263 bp, Escherichia coli
atggcactgactgacgcaaaaatccgggcagcaaagcctactgacaaggcttataaactcactgacggggctagcatgttcctgctggtacatcctaatggttcccgttactggcgtctccgttatcgtattctgggtaaggagaaaactctggcacttggtgtgtatccagaagtttctctttctgaagctcgtacaaaacgggataaggcccgaaaactgatttcggaggggattgacccttgcgaacagaaaagaactaaaaaagtagtccctgatttacaactatcttttgaacatattgcacgacgctggcatgccagtaataaacaatgggcacaatcacacagcgataaagtactcaaaagcctcgagacacacgttttcccctttatcggcaaccgagatatcacaacactcagtaccccggacctgcttatccctgttcgtgctgcagaagctaaacaaatttatgaaatcgccagtcgtctgcagcaaagaatatctgctgtaatgcgttatgccgtacagtctggcatcatcagatataacccggccctggatatggctggtgcattgaccacggtaaaacgcaagcatcgtcctgcactggatctttcacgcctgcctgaacttctgtcgcgtattgacagttataaaggccagcctgtcacccggctggcagttatgctgaatttactggtttttattcgctccagtgaactcagatatgcccgctggtctgaaattgatattgacaatgccatgtggactattccagccgaacgcgaacctctgccaggcgtaaaattctcacaccgaggctccaaaatgcgaaccccacatcttgtgccactcagcaaacaggctgtagccatactaacagaacttcagacatgggctggtgaaaatggtctgatctttacgggagcgcatgacccacgtagaccaatcagtgaaaacaccgtaaataaagccctgagggttatgggatatgacacaacccaagaagtctgtggtcatggattccgggcgatggcatgtagtgcgctgatcgaatcaggtttgtggtcccgcgatgctgttgaacgtcagatgagccatcaggaacgtaacggtgtacgcgctgcttacattcataaagcagaacatctggaagaacgccgattgatgctacaatggtgggccgattttctggatgcaaacagagaaaaatttatcagtccatttgaatatgcaaaaattaacaatccattaaaatag

SEQ ID NO: 2375 - DNA, 240 bp, Escherichia coli
atggtcaacgttatcgttcattgtccccgttgtcagtctgctcagatttaccgccatgaggtgagctctaaaggccgtgagcgctttcgagactgccatcgcgtgtttatactcatttatacctatgaatcccgtaagcccagtgtcaaaaaaataccaaaattgtattcaatggaaccggtgtccggaatacggcaaggacgcttaaaaacggtattaacaccgtcattcgcactttaa

SEQ ID NO: 2376 - DNA, 837 bp, Escherichia coli
atgaaaagtcaaagtgctttatataaactaaacctttctgataaacgggccattttaaatataaatagattagaaatcagggatgttcacttttttgaatgtacaattatttatctctatgatgcacgaattgtattaaaaaatagcaatggtaaaaagacaattattttccctcagtcaatttgttatattgaaaaaaatacaactgtagatataattatatgtgataaaaaaaagggaaggccttatgatgtctataatgtagatggtgatatactcaataatatttgtgagataatgagtcctcttctttcccattttggaaatgtaaattatccatatgctaaggtgttctcatttacagcagatgatgttgataaaaaaatctttcatcttttaatgaaaaaggaaacgccatattacaggaagttatataaacttacataccttttatcaaagtgtgataatattgagacattaatttattcattatcaaaatcaaaaaataaaacaattactgaaagactaaaggatataattgagtcagacctatctaaaacatggcaaataagtgattttgcaaaaattctacatatgtcagagtcattaattagaaaaaggctcaaaggtgaaaatataaactataataccctgattgttgatattagaatgaactatgcatttaacatgttaatggcaacggaaaaaaacataaatataatatcaagagaggttggttatgtcagtacatcatattttattagtaaattcagaaattacttcggaattacaccaaaacagttttcaataaaagtaaagaataaaataaggagttag

SEQ ID NO: 2377 - DNA, 258 bp, Escherichia coli
atgtgtaaagcccgttttactgagcatcagatcatcgctgtgattaagtcggttgaagccggacgagacgttgaagatgtcggccgggaggctggtatctctgaggccaatataatagtcaggttccgattgtgcaggcgcaacctgtcactatttttcagtacactgcaactcgtctggctgggtactaacttccaactgcctgatactcggtatcatttctcagcatcgaccagattattctcgcgttcttgttag

SEQ ID NO: 2378 - DNA, 558 bp, Escherichia coli
gtggctctgatgcaacctacgatgcagtttgttccaccgaaaagccctgaacagcaggatattgaggggctacaccgtgcaagacagcgtattgtcaatcatcgtactgcgatagtctgtcaaatccgagagctgctgcttgatcggggaataacaattggtgcggcagtctcaagagttcgccgtgccgttctgcttatccttgaggatgcagaaaacgggttaagtgcccgtatgcgcagaacggttgcagagctttatgatctctttaacgatcttggccgccgtataaacttttttgataaagaaattgacgctgtgttcatgcaatcagaagcctgccagagcattgccaaaggaactgaatttaaaaatggtcgtcactttgccgcatggcttggcctggttccacgacagcactctagtggcaacaagcaggtactaatgaatatgacgaaaaaaggcgacaagcatttgcgtacattttttattcatggtgcccgcgctgtcgtcagagttgatatgaataacaattggctgcttgcatcagtgggttaa

SEQ ID NO: 2379 - DNA, 180 bp, Escherichia coli
atgtcgtgggcgtttagcctccgcctgcaatgcggcaataacgggctcatcacgcgtgatatccgggcggtaatggtaaaccgttctgctcagattgagactctggctggcttgatgaatactgagtccgaacgtcgttatcagatgagtgaccagctcacgcttaaaggctggttttaa

SEQ ID NO: 2380 - DNA, 381 bp, Escherichia coli
atgcagaaaaatgtgactctcggcaggcgaaaaggctgccctaattatcctcccgaatttaaacagcagctcgttgctgcctcctgtgaaccaaggatatccatctcaaaacttgctcttgaaaatggcattaacgccaatctgttgttcaaatggcaacaacaatggcgcgagggaaagctgctattactttctccagagagccctcagctacttcctgtgactctcgatgcaacagccgaacagccagaatcgcccgctgagtccccggcccccctcagtatcagctgcgaggtaacgttccggtacgggacgctccgcctcaatggcaatgtctgcgaaaagcgccaggctctgctgatacaggaactgaagcgatga

SEQ ID NO: 2381 - DNA, 201 bp, Escherichia coli
atgatcccgttaccttcctggaccaaaatctggctggttgccggtatcaccgatatgagaaatggcttcaacggcctggctgcgaaggtacagactacgctgaaagacgctcccatgccacccatgttttcattttccggggccgcagcggcagtcaagttaaactgctgtggtccaccggtgacgggctgtgcctcctga

SEQ ID NO: 2382 - DNA, 153 bp, Escherichia coli
atgtttttatatggtttaagtggaaaagatattgctaataacctcggtgtttcaatgaaaactgtttcgagttataaaaagtctttaatgaatagactgtatgtctgtaatgacatacagttattttacaaaggtagattgttatttagataa

SEQ ID NO: 2383 - DNA, 483 bp, Escherichia coli
atgaatataataattgttacgcacaataaatatcttgagttaggattgaaaaaattattgagcaggcattctattactattggtgctgatttttttataccagataatcgtgagcatataatacacaatgatgtttttgtcatcctttgtgataaaaaaaacagtatgttaatgagttatatttttaacggttataaatttcacttattaccagtagaatcaataagtagcctatcatcgatttatgaatatatttttagtggcagattgttgtttgggtactctccacataaattaaccatgaatgagatgattatactattctattatgttttccatgggtgtaatgtagcaagtattgcttatcagcttggtattagttcaaagactgtgtatactcatatatatagagccaagaaaaaaaatggaatactagggggaaatctcaaatataagtgtgcttatgaaagatttgtctgttaa

SEQ ID NO: 2384 - DNA, 4188 bp, Escherichia coli
atgaaaatgatttttaccggtaaggtcagcggagaaaaaaccgtgctgactgccggaggtcgtcatacagttaaagcacagcccggggaacagtatggacttatcgatgaggtgaccggcctggtgcctgatggtgttgaggcggatcgttccggtgatgatttaattctgcgtaaaaaggaagaagatactgaggtccggatagagggattctgggaagaatgccagcccggggaaacacagtgtacggcggtatttaatattgttggggaagatggacaggtcaccgaagctgtactgactcaggatggtccggtgcttgatgatattactgccggacaatcgggaaccttgtcagatgatgatcgtggcggttttatatggttgggcggtctggcatttggtgggggactggctgctatggctttagctgcaggtggcggtggaagcaaacatagacatgaaaatgatgactctgatactacagccccatcgtcaccagcactgaaggcagaggatgacggttctgtttctgttgtcttgccgggtgatgccaataaaggtgataccgttgaaatcacctttgaagatgaaaaaggtggtaagcacaccgtgacgctggagaaaggggataacggctggacatccagtgacccgacgctgatcccggacagcaatggcgataaagtgaccattccggcagataatgtgaaggataacagtgaagtcaccgccattgccaaagatccgagcggtaatgaaagcgatccttcaaccgtgacgtcaaaaactgatggtgtggcagatgccccggtcctgagcattcctgaagtggctgacggttatgccaatgccgatgagctgaaggatggtttgcaggcagaggtcacgttgccggcaggcacggcagaaggtgcggttattacactgactgtgacccgtccggataaaaccacggagaacgtgacgcataccgtgactaaagatgaagtggctgccggtaaagtatccatggatattccgaaggatgcggtgattgacgggcagaacagcgtcagtgtcagtctgactcagggcagtaacccggcgaagcccgggaatgtggttgattttactgccgatacccagatcccgggggataccgatggtgatggtgcaacagatgcaacaccggtagtagccattccggaagcagcagacggcgtgaatgccgaagagctgaaggacggtgtgcagaccgaagtcacggtaccgaaaggcagtgctgccggtgataccctgacactgacggtcactaaaccggacggcacgacggacacggtggagcacacgctgaccgcagatgaagtgactgcaggtaaagcggctgtgaccattccggcggataaagtgacggcagatggccagtattctgtaactgcggaaatcacagacccggcaggtaacacgagtggccagggccagccgacagactttactgtcgatactcagatcccgggcgatactgacggtgacggtgtggtggatgcaacaccggtagtgaccattccggaagcagcagacggcgtgaatgccgaagagctgaaggacggtgtgcagaccgaagtcacggtaccgaaaggcagtgctgccggtgataccctgacgctgacggtcactaaaccggacggcacgacggacacagtggagcacacgctgaccgcagatgaagtgactgcaggtaaagcggctgtgaccattccggcggataaagtgacggcagatggccagtattctgtaaccgcggaaatcacagacccggcaggtaacaccagtggccaggggcagccggcagacttcgcagtggatacagtggcgccgtcggcaccggtattaaaagcagaggatgatggttctgtttctgttgagctgccgggtgatgccaataaaggcgatactgtggatgtcacctttgaagatgaaaaaggtggtaagcacaccgtgacgctggagaaaggggataacggctggacatccagtgacccgacgctgatcccggacagcaatggcgataaagcgaccattccggcagataatgtgaaggataacagtgaagttaccggggttgccaaagatccgagcggtaatgaaagtgacccgtcaaccgtaacctcaaaaactgatgtgttaccaacagtgagtattagcgttgagacaacatcaacagatgtcaatggtgatggttttactggtatagctagtgtcaatgggaccgtaatggatgttcccgcaactattgaagataaggatgattccactggactggtttatacggtttctctgaatcatgtcactacaacagatgtaacagttacagttacattgggtagcggagctgggcattctgatgctgctgactattctgatattggtggagcacagcataacgggaaaataggccttcatggtgatactggaaaagtaacctatgatggtgcaacaaccgtaacaattgttattcctgccggttcaaaaagtgtttcatttatagttgatccaacgcttgaggctaaccaagatgcctttaatgccgagggtatggaaaaagttgttgcgaccattacgggaacatctgataacgttacggcagctactgacatcgttgataatgcgggagcatccgcaacaggtgttatttatgatggtaatgccatttcattacgtaatctggacggtgattttacactgaaatattcactatcatcttctgtcgccgaaaaaggggactttgggtataccattggcgcgaatagcggtgaaaatgatccaatggtaacaacagattacaatgatacggtttatgttggttattaccagagtggtaaagaaacaacatcgtatagtaatgttgctaactcacaggataatgggccagacggaacaaaaaccgatggcaatcaaagcattacgactgttgatttaggtgctggtgatgatctaatggtcattcgtggtaacatgctggctaatacaagagtatacactggtgagggtaacgatacttttactatggatggtatgaatactgcattacgtgttatgtatgcgggtagttatatctttactgagtctggcgatgatattgttacgatcaaacgtactggtgtaacaaatgccggacagatttatcttggttcaggtagtgatacatttatccagggggatgctactgacaataacgatacaacattatctggtttattggatcttggtagtggtacaaaagatatatctaatatgcctaaggaatatctttctgtttatcaggatggcagtaatttaagcttgggtaacgacaacaatattgacacagccacagatgttaataccgtcactatttatggctctgtatctggtgaaattttaggcggatacggtagtgataatattacggtaactaaaaatctgaccggtaatatttctgttggtgataatgccgataccttaactgctgggtggatttatggtggtgctactgtttctatgggggacggcaatgatactgttaccgtcactgatggtgcatataacacgactatttcactgggggcgggagatgatgtatttgattccactggtgcaactttaggttcagctgcgacgaccattgatggtggggaggggaatgacacaatcaaaataggtactatttcaaatggtaatataaccattgatgcgggtgccggtgatgatatcgttgttctaacaaaagactatgataccaaacctgttggtaatcaaggttccattaacggtggagaaggtagcgatactctggttctggcaggtaatatttctgtcaatctggctacagggaagaatgaaggtattgccggcttcgagaaagtggatatgactgttggcagcgatctgaaagctggcaatacagctcagttagtcaagttaacggcatcggatgtattgggtatgaatgacaattcaacgctttatatttccggtggtgccaatgacaaagttgatttgggtgctgacggtgcgggaagtctgggtacatttacggcaacggcaacaactgttaaagcaactgcgttagatggtattgagcatacttatacgctttacagcagtgtaagtggcgcaaatgtgtatattgataataatattattgatgcgaatggtgtaatttaa

SEQ ID NO: 2385 - DNA, 1248 bp, Escherichia coli
atgacagaaaaaacggaacggaataaagcgtcgtcagaggaggtcaggcagtcagacctggccctgttgacagatgtacaggcagcccttcagcaggaaaagcatcatgcccttttcctgatggtgatttttctgctggtactggtagtgacgtttgttatctgggcatggaacagtcctctggatgaagtgacccgtggtcaggggagtattattcccggcagcagggagcaggttatacagacccttgacccgggtattttgaaaacacttgaggtcagggaaggcgatattgttgagaaaggtcaggtactgctgacactggatgatacccgaagctctgccatgctgagggaaagtgaagcccgggtgaataacctggaagcagtcagggcaagactccgtgcagaagcttattccgaatcactgacatttccggatgacgtgcctgcagatttgagggagagggaaagtacagtttatcggctacgaaagactgaactggcacaaagcattgccggccttaagcagagtaaggctctgctggataaggaaatagcaatgacccggccaattgtgcgtgaaggggcgatgtcggaagtcgaactgttacgtatgcagcgtcagtcagcggagctgcagttacagatggatgagaaacagaataaatacctgacggaagctggagctgaactggtgaagacagaagcagagcttgcacaggcaaaagagaatatggctggcagagccgacccggttgagcgttcacgtatcagggctcccctgagaggcatcgtaaaaaatattcgggtaaatactttgggaggcgtggtttctgcaggacaggatataatggaaattattccgctggaagaccagttgctgattgaagcctatataaatccacgggatgttgcctatgtcagaacagggatgccggcacttgtaaaactgacggcttatgactatgccatttatggtggtcttgacggagtggtgatactggtaagtccggatactttacgtgaccagaaacggccgggagatttaaaactggatccaaatgaagcatattatcgggtactcgttactaccagtaataattatctgacagacaggaacggaaaaatattaccagttattcctggcatgatagccagcgtggatataaaaacaggtcagaaaagtgtatttcagtacctgattaaaccaatcaccagaatgaaacaagctcttcaggaacgctga

SEQ ID NO: 2386 - DNA, 2148 bp, Escherichia coli
gtgaagagtatttttgaaggattatcacagataacggcgttactgggtacacctgtatcagctgagacgctggctgccggtactgtccgtacagatgtatccgggattgattttcgttctgttggcgagtttcttcgtagtgaaggatttgataatcatctttcccggcggtctccggaagatatcccgtcacttgcggttccggcgcttcttttattgaacgctcaggaagccattgtggttgtgcgtattgagggggcaggtctggaaagacagtatcatgtgcttcagcccggaggtctccgtaagacactttctcacgatgcattaatggctgtttattctggttattgttggtttgttcagccacaggcaatgcaggatcgtcgctcggagctgccagagtatgacatgagcggggcatggttctggcgggtactgtggcgattcagggcatattacggacaggttattgttgcgagttttatcattaactttcttgcgctggtcagttccctgtatgtaatgaacgtctatgaccgggttatacctaatcgttcctgggaaacgttatggatgctgagtatcggggtgattgcagccattctgtttgagtgtgctgcaaagttaattcggagttatctgacggatattgcgggtaagaaggctgacctgattatcagttctgctctgctacgtcgggtgatggcggtaaaaatgtctgacaggccgtcatcctcaggttcatacgcaaacaatttgcgggaatatgagtctgtcagggagtttatgaccagcgctacgttactggcttttgtggatctgccttttattctgcttttcatcagtgttatcgggctcgtgggaggctggcttgcggttgtacctcttacgctggttccgctggttattctggcaggaatattactgcagcgaccgctttcccgtcatattaatgcctccatgcgggaatcatcgcagcgccagggattacttgtggaggctctggatggaatagaaaccctgaagctgaataatgctgttaactgggttcagcgacgctgggatggatatacagccagtgtcgcccgctcgtccattcgggtaaaaaataccagtaatggcataatctgcttttccactgcagtccagcaactgaatactgttctgctggtcattctgggaacgtaccttattcacagcgatgacccacataaccgtatcaccatgggggcactgattgcagccgttattctttccggccgcgcgctggcaccgcttggtcagatagcatcactggccacccgtttccagcaggcccgtctggctatgcaaggggtgaatgaaatagttcgccgcccggtggaacgggaaagtcagacacattatctgacagtgaaggatatccagggggaattccgtttcagcgcagtcacgtttttttataagcctgaattacctgcagccttgaaaggtatgtctgtctgtatccggcccggagaaaaggtgggcattattggcactatcggatgtggtaaatcgacgctactgaaaatgatggtggggctataccgtcaaaacaaaggacaaattacccttgacggggttgctatgcagcagttggatccctgttttgttcgggataaggttttccttcttgagcagaatccccgcctttttctgggaactctgcgtgaaaatctgcagctttcgcgtcttccgggaagcctgtcggatgtggatatgattaatgcagccggacgtttcgggtttgaccgttttattcgtcatcacccatgcgggcttgatatgcagataggggaaggaggtcaggggctgtcaggaggacagcgtcagatggtcgctctgacgagaatggtactgggttctccccgggtagttctgcttgatgaacccacgacgggtcttgatctgcagacagagaacattgttctgaaagggctgaatcactggagccgtggacgcacaatggtggtggtgacgcatcgtctgcaggtgctgaatattgttgaccgtattatcgtgatgaatgaaggccgggtaatgatggatggtccccgcgatgaaatactgaaaaaactgtcagggaaacagcagagtggggagagcagagcgataacttcatga

SEQ ID NO: 2387 - DNA, 1161 bp, Escherichia coli
atgcacgatcccatagtaatggaagcacgggcggagttaatttctgcacaatcccgtatagaacaggcaagctctgcacactggccagttgtcacagctacaggaagtaaactcctttcacaaagtcaccgttattcctacgattatgactctgaagatattttacccggtattcgtggtgaagtgaatatatttgcttcgggggctattgaggcggatgtgcatcggagtgaatcagaagctgaatattatcattataaaatggaagaaacaggagaggagacaattcgctcgtttgtttcattatatcttgatgcactcagggaaaaacaatccattgaagtacttaaacagagtctctcccggcataacgcaattcttaatgatctgaatactatcagtattcatgataccgggcgggagtctgagtttgttcaggctgaagccagaaggttaatggtccggcagcagataaattcccggagcagagtacttaaaaccacgctgggaaaactgtccacctggacaaaaaatccggtaaccgaaagtgatcttgaaaatcctttttcccggatgacagaggccagattgttaactgactttacacaggcacctcagaaaggtaacccgtcgtggcttgccagccgggctgatgtggagagtaaaaaagcagcactgaaagcgcaagagcttgccagatatcctcgggtggatttgacgggatctgtaacccgggatgacaggcagataggtgtcaatctgtcctgggacctgtttaatcgtaatgccagttatggtgttacggaaaaagctgcgcaaatagtggcagctaccggacgactggactctgtcgccagaatgattgatgaaactgggcgattatctctgataacggtcagacaaagtcgggtggaaatggaaacgctcagatgtcaggaacaggcttcagccagagttgtggacttttatcgtcttcagtttcgggtggcaagaaaaacactgattgaattactgaatgctgaaaacgaactgtacagtgtcggactctcccgggttcagacggaggatcagatgctccacggtatgctggattatctgtattcccagggaatgctcctgaaatggagcggagtgaatctttctgatgaagaagaaaaataa

SEQ ID NO: 2388 - DNA, 273 bp, Escherichia coli
atgcgtcattcttcttatgcaaaaaaaatatataattcaggattacaacgagcaagtgtaaatgatgagcacttttcgcttctgattgaaatatcaccaatcagaagtgaaaaaacaattgtggctcttagagaatatttggttgatggttactcaaaacaagaaagctgtaacagaaataatgtatccaatagttatttttgtttatgtctgaaaaaactgaattatacccatggtattgtatctgtcctgaaatatttctatcaaacataa

SEQ ID NO: 2389 - DNA, 324 bp, Escherichia coli
atgaagaacagggacttcagcccactgatgggaagaacaggggttgaactgggcaagaccttcagtggtaaggactggagtgtgacggcccgtgccggaaccagctggcagtttgacctgctgaataatggtgagaccgtactgcgtgatgcgtccggggagaaacggataaaaggagagaaggacagtcggatgctgtttaatgttggtatgaatgcgcagataaaggacaatatgcgctttggtctggagtttgagaaatccgcctttggtaaatataacgtggataatgcggtaaacgcgaatttccggtatatgttctga

SEQ ID NO: 2390 - DNA, 2115 bp, Escherichia coli
atggctcgtacaacacccatcgcacgctaccgtaacatcggtatcagtgcgcacatcgacgccggtaaaaccactactaccgaacgtattctgttctacaccggtgtaaaccataaaatcggtgaagttcatgacggcgctgcaaccatggactggatggagcaggagcaggaacgtggtattaccatcacttccgctgcgactactgcattctggtctggtatggctaagcagtatgagccgcatcgcatcaacatcatcgacaccccggggcacgttgacttcacaatcgaagtagaacgttccatgcgtgttctcgatggtgcggtaatggtttactgcgcagttggtggtgttcagccgcagtctgaaaccgtatggcgtcaggcaaacaaatataaagttccgcgtattgcgttcgttaacaaaatggaccgcatgggtgcgaacttcctgaaagttgttaaccagatcaaaacccgtctgggcgcgaacccggttccgctgcagctggcgattggtgctgaagaacatttcaccggtgttgttgacctggtgaaaatgaaagctatcaactggaacgacgctgaccagggcgtaaccttcgaatacgaagatatcccggcagacatggttgaactggctaacgaatggcaccagaacctgatcgaatccgcagctgaagcttctgaagagctgatggaaaaatacctgggtggtgaagaactgactgaagcagaaatcaaaggtgctctgcgtcagcgcgttctgaacaacgaaatcatcctggtaacctgtggttctgcgttcaagaacaaaggtgttcaggcgatgctggatgcggtaattgattacctgccatccccggttgacgtacctgcgatcaacggtatcctggacgacggtaaagacactccggctgagcgtcacgcaagtgatgacgagccgttctctgcactggcgttcaaaatcgctaccgacccgtttgttggtaacctgaccttcttccgtgtgtactccggtgtggttaactctggtgataccgtactgaactccgtgaaagctgcacgtgagcgtttcggtcgtatcgttcagatgcacgctaacaaacgtgaagagatcaaagaagttcgcgcgggcgacatcgcagctgcaatcggtctgaaagacgtaaccactggtgacaccctgtgtgacccggatgcgccgatcattctggaacgtatggaattccctgagccggtaatctccatcgcagttgaaccgaaaaccaaagctgaccaggaaaaaatgggtctggctctgggccgtctggctaaagaagacccgtctttccgtgtatggactgacgaagaatctaaccagaccatcatcgcgggtatgggcgaactgcacctcgacatcatcgttgaccgtatgaagcgtgaattcaacgttgaagcgaacgtaggtaaaccgcaggttgcttaccgtgaaactatccgccagaaagttaccgatgttgaaggtaaacacgcgaaacagtctggtggtcgtggtcagtatggtcatgttgttatcgacatgtacccgctggagccgggttcaaacccgaaaggctacgagttcatcaacgacattaaaggtggtgtaatccctggcgaatacatcccggccgttgataaaggtatccaggaacagctgaaagcaggtccgctggcaggctacccggtagtagacatgggtattcgtctgcacttcggttcttaccatgacgttgactcctctgaactggcgtttaaactggctgcttctatcgcctttaaagaaggctttaagaaagcgaaaccagttctgcttgagccgatcatgaaggttgaagtagaaactcctgaagagaacaccggtgacgttatcggtgacttgagccgtcgtcgtggtatgctcaaaggtcaggaatctgaagttactggcgttaagatccacgctgaagtaccgctgtctgaaatgttcggatatgcaactcagctgcgttctctgaccaaaggtcgcgcatcatacactatggaattcctgaagtatgatgaagcgccgagtaacgttgctcaggccgtaattgaagcccgtggtaaataa

SEQ ID NO: 2391 - DNA, 471 bp, Escherichia coli
atgccacgtcgtcgcgtcattggtcagcgtaaaattctgccggatccgaagttcggatcagaactgctggctaaatttgtaaatatcctgatggtagatggtaaaaaatctactgctgaatctatcgtatacagcgcgctggagaccctggctcagcgctctggtaaatctgaactggaagcattcgaagtagctctcgaaaacgtgcgcccgactgtagaagttaagtctcgccgcgttggtggttctacttatcaggtaccagttgaagtccgtccggttcgtcgtaatgctctggcaatgcgttggatcgttgaagctgctcgtaaacgcggtgataaatccatggctctgcgcctggcgaacgaactttctgatgctgcagaaaacaaaggtactgcagttaagaaacgtgaagacgttcaccgtatggccgaagccaacaaggcgttcgcacactaccgttggtaa

SEQ ID NO: 2392 - DNA, 375 bp, Escherichia coli
atggcaacagttaaccagctggtacgcaaaccacgtgctcgcaaagttgcgaaaagcaacgtgcctgcgctggaagcatgcccgcaaaaacgtggcgtatgtactcgtgtatatactaccactcctaaaaaaccgaactccgcgctgcgtaaagtatgccgtgttcgtctgactaacggtttcgaagtgacttcctacatcggtggtgaaggtcacaacctgcaggagcactccgtgatcctgatccgtggtggtcgtgttaaagacctcccgggtgttcgttaccacaccgtacgtggtgcgcttgactgctccggcgttaaagaccgtaagcaggctcgttccaagtatggcgtgaagcgtcctaaggcttaa

SEQ ID NO: 2393 - DNA, 288 bp, Escherichia coli
atgctgcacacattacatcgttcaccctggctgacggactttgctgcgctgctgcgtctgctcagtgaaggtgacgaactgctattattgcaagatggcgtaactgccgcagttgacggcaaccgctaccttgaaagtctgcgtaatgcccccattaaggtctatgctctgaacgaagaccttattgcccgcggtttgactggtcgaatttcgaacgacatcatttccattgactatactgatttcgtcagacttacggttaagcactccagccagatggcctggtga

SEQ ID NO: 2394 - DNA, 360 bp, Escherichia coli
atgaaacgaattgcgtttgttttttctactgcgcctcatggtacaactgcaggccgggaaggtttagatgctttactggcaacttccgcattaactgacgatctggccgtcttctttattgctgatggcgtttttcagctgctgtcaggacaaaagcccgatgcagtgctggcgcgtgattacattgccacttttaaattgttgggtctgtacgatattgaacagtgctggatttgcgcggcttcactgcgcgaacgtgggttagatccgcagacaccctttgtggtcgaagccacgccgctcgaagcagatgccttacgccgcgaactcgccaactacgatgttattttgaggttttga

SEQ ID NO: 2395 - DNA, 387 bp, Escherichia coli
atgcgttttgccatcgtggtgaccgggccagcatacggtacgcaacaggcgagtagtgcttttcagtttgcgcaggcgctgatagcagaaggccatgagttaagcagcgtttttttctatcgggaaggggtctataacgctaaccaattgacctcaccggcaagcgacgaatttgaccttgtgcgcggctggcaacagttgaatgcgcaacatggtgtggcgctgaatatctgcgtagcggcagcattacgccgtggcgttgttgatgaaacggaggccggaagactggggctcgcttcgtcaaaccttcagccgggatttaccttaagcggacttggcgcgctggcggaagcctcgctgacctgtgacagggtggtacagttctga

SEQ ID NO: 2396 - DNA, 723 bp, Escherichia coli
atgtccaggtcgcttttaaccaacgaaaccagtgagttggatttactggatcaacgtccttttgaccagaccgattttgatattctgaaatcctacgaagcggtggtggacgggttagcgatgcttattggctcccactgtgaaatcgttttgcactctttgcaggatctaaaatgttcagccattcgcattgctaacggtgaacatacaggccggaagattggttcgccaattactgacctggcgctacgtatgctgcacgatatgacgggagcggatagcagcgtttctaaatgctactttactcgcgccaaaagcggcgtattaatgaagtccctgactatcgcgattcgtaaccgcgaacagcgtgtaattggtctgctgtgcatcaatatgaatcttgatgttcccttctcgcagattatgagcacttttgtgccgccggaaactccggatgtcggttcaagcgtcaactttgcctcttctgttgaagatctggttacccaaacgctggagttcaccatcgaagaagtgaatgccgatcgcaatgtttctaataacgccaaaaatcgtcagatcgtgctaaatctctacgagaaagggatcttcgatattaaagacgcgatcaaccaggttgctgaccgcctgaacatctccaaacacactgtctatctctacatccgccagttcaagagcggtgatttccaggggcaagataagtaa

SEQ ID NO: 2397 - DNA, 813 bp, Escherichia coli
atgaaatcactgtttaaagtaacgctgctggcgaccacaatggccgttgccctgcatgcaccaatcacttttgctgctgaagctgcaaaacctgctacaactgctgacagcaaagcagcgttcaaaaatgacgatcagaaatcagcttatgcactgggtgcttcgctgggtcgttacatggaaaactctcttaaagaacaagaaaaactgggcatcaaactggataaagatcagctgatcgctggtgttcaggatgcatttgctgataagagcaaactttccgaccaagagatcgaacagactctgcaagcattcgaagctcgtgtgaagtcttctgctcaggcgaagatggaaaaagacgcggctgataacgaagcaaaaggtaaagagtaccgcgagaaatttgccaaagagaaaggtgtgaaaacctcttccactggtctggtttatcaggtagtagaagccggtaaaggcgaagcaccgaaagacagcgatactgttgtagtgaactacaaaggtacgctgatcgacggtaaagagttcgacaactcttacacccgtggtgaaccgctctctttccgtctggacggtgttatcccgggttggacagaaggtctgaagaacatcaagaaaggcggtaagatcaaactggttattccaccagaactggcttacggcaaagcgggtgttccggggatcccaccgaattctaccctggtgtttgacgtagagctgctggatgtgaaaccagcgccgaaggctgatgcaaagcaggaagctgatgcgaaagccgcagactctgctaaaaaataa

SEQ ID NO: 2398 - DNA, 219 bp, Escherichia coli
atgcaggatttatcattggaagcacgcctggcagagctggagagccgattggcttttcaggaaatcaccattgaagaactgaacgtcacggtgaccgctcatgaaatggagatggcgaaactgcgcgatcatctgcgtctgctgaccgagaagctaaaagccagccagccgtcgaacatcgcgtcgcaggctgaagaaacgccaccgccacattattga

SEQ ID NO: 2399 - DNA, 591 bp, Escherichia coli
atgaaagtagcaaaagacctggtggtcagcctggcctatcaggtacgtacagaagacggtgtgttggttgatgagtctccggtgagtgcgccgctggactacctgcatggtcacggttccctgatctctggcctggaaacagcgctggaaggtcatgaagttggcgacaaatttgatgtcgctgttggcgcgaacgacgcttacggtcagtacgacgaaaacctggtgcaacgcgttcctaaagacgtatttatgggcgttgatgaactgcaggtaggtatgcgtttcctggctgaaaccgaccagggtccggtaccggttgaaatcactgcggttgaagacgatcacgtagtggttgatggtaaccacatgctggctggtcagaacctgaaattcaacgttgaagttgtggcgattcgcgaagcgaccgaagaagaactggctcatggtcacgttcacggcgcgcacgatcaccaccacgatcacgaccacgacggttgctgcggtggtcatggccacgatcacggtcatgaacacggtggcgaaggctgctgtggcggtaaaggcaacggcggttgcggttgccactaa

SEQ ID NO: 2400 - DNA, 201 bp, Escherichia coli
atggcaatccgaaaacgttttattgcgggcgcaaaatgcccggcctgtcaggcacaggattcaatggcgatgtggcgcgaaaataatattgatatcgtagaatgtgttaagtgtggacatcagatgcgagaagcagacaaagaagcccgcgatcacgtccgcaaagatgagcaagtgatcgggatttttcatccggactag

SEQ ID NO: 2401 - DNA, 1806 bp, Escherichia coli
atggaaggttctgattttttactcgcaggagtgctgtttctcttcgcggcggtggctgcggtgccgctggcatcgcggctgggtattggtgcagtgttgggatatttgctggcggggattgcgattggcccgtgggggctggggtttattagcgacgtcgatgagatcctccacttttcggaactcggcgtggtattcctgatgtttatcatcggccttgagttgaatccctccaagctttggcaactgcggcgttcgatttttggcgtaggcgcggcacaggtgctgttaagcgcggcgttgctggcaggattattgatgctgacccatttctcatggcaggcggcggtggtcggtggcattggccttgcgatgtcttcaactgcaatggcgttgcaattgatgcgtgagaaagggatgaatcgcagcgaatccggccagttaggtttctcggtactgctgtttcaggatctggcggtgatcccggcactggcgttagtgccgttgttggcgggttcggcagacgaacatttcgactggatgaagatcggcatgaaggtgctggcgtttgtcggcatgctgattggcgggcgctatttactgcgtccggtattccgttttattgcagcttctggtgtgcgggaagtgttcaccgccgcgacgctgctgctggtgttgggttccgcattgtttatggatgcgctggggttgtcgatggcgctcggtacgtttattgcgggtgtgctactggcggaaagtgaatatcgccatgaactggaaacggctatcgatcccttcaaaggcttgctgcttggtttgttctttatctctgtcggcatgtcgctcaacctcggggtgctttatacccatctgttgtgggtagtgataagtgtggttgtgctggtggcggtgaaaattctcgtgctgtatctgctggcgcgattgtatggcgtgcgcagttctgagcggatgcagtttgctggcgtgttgagtcagggcggtgagtttgcctttgtcctcttttctaccgcttcttcacaacgcttattccagggcgaccagatggcgctgttgctggtgacggtgacgctttccatgatgaccacgccgctgctgatgaagctggtcgataaatggctatcccgccagtttaacggaccggaagaagaagacgaaaaaccatgggtcaacgatgataaaccgcaggtcattgtcgtgggctttgggcgttttggtcaggtgattggtcgtttgctgatggcaaataaaatgcgcattactgtactggagcgggatatcagtgccgttaacctgatgcgcaaatatggctacaaagtttattacggcgacgccacgcaggtagatcttttacgttctgcgggtgcagaggccgctgagtctatcgtcattacctgtaacgagccggaagacactatgaagctggtggaaatatgccagcagcactttccgcatttgcatattcttgcgcgagcgcgcggacgtgtggaagcgcatgagttattacaggcaggggtgacgcagttttcccgtgaaacattctccagtgcgttagagctggggcgcaagacgctggtcacgcttggcatgcatccgcatcaggcgcagcgcgcgcaactgcattttcgccgcctggatatgcgaatgctgcgggagttaatcccgatgcatgctgataccgtacaaatttctcgcgccagggaagcccgacgtgaactggaagagattttccagcgtgaaatgcaacaagaacgacgccagctggacggctgggatgaatttgagtag

SEQ ID NO: 2402 - DNA, 552 bp, Escherichia coli
atgtctcagccagcgaaagttttgctgctgtatgcccatccggaatctcaggactcggtggcaaaccgggttctgcttaaaccggccacgcagctcagcaatgttaccgtgcacgacctttacgcgcactatcccgacttttttattgatatccctcgtgagcaggcattactgcgcgagcacgaggtgattgtctttcagcatcctctttatacctatagctgcccggcgctactgaaagagtggctggaccgggtattaagccgtggttttgccagcggaccggggggaaaccaactggcgggaaagtactggcgtagcgtgattaccaccggggagccggaaagtgcttaccgttatgacgcgttgaatcgctacccgatgagcgatgttctgcgcccctttgaactggcggcgggcatgtgccggatgcattggttaagccccatcattatttactgggcgagacggcaaagcgcacaggagctggcgagccacgccagagcctacggtgactggctggcaaatccgctgtctccaggaggctgctga

SEQ ID NO: 2403 - DNA, 1914 bp, Escherichia coli
atgattgttttttcctcgttacaaattcgtcgcggcgtgcgcgtcctgctggataatgccaccgccaccatcaaccctgggcagaaagtcggcctggtgggtaaaaacggctgtggtaaatctaccctgctggcattgctgaaaaatgaaatcagcgccgacggcggcagctacacctttccgggaagctggcaactggcgtgggtgaatcaggaaacaccggcgttaccgcaagcggcgctggaatatgtcattgacggcgaccgtgaatatcgtcaactggaagcgcagctacacgacgccaacgaacgtaacgacgggcacgccattgcgaccattcatggcaagctggatgctattgacgcatggagtattcgctcccgtgccgccagcctgctgcacggcctcggtttcagcaatgaacaactggagcgcccggtaagtgatttctccggtggctggcgtatgcgtcttaaccttgcccaggcgctgatttgccgttcagacttgctgctgctcgacgaaccgactaaccacctcgatctcgatgccgttatctggctggaaaaatggctgaagagctatcagggcacgctgatcctgatctctcacgatcgcgatttcctcgatccgatcgttgataaaattattcatatcgaacaacaaagcatgttcgagtacaccggcaactacagttcgtttgaagtacagcgcgccacccgtctggcgcagcaacaagcgatgtatgaaagccagcaggaacgcgtagcgcatctgcaaagttatatcgaccgtttccgtgccaaagccaccaaagcgaagcaggcccagagccgcattaagatgcttgagcgtatggagctgattgcccccgcgcacgtcgacaacccgttccgctttagcttccgcgcgccggaaagcctgccaaatccgttactgaagatggaaaaagtcagcgcaggctatggcgatcgcattattctcgactcgattaaactgaatctggtccccggctcgcgcattggtctgctaggccgcaacggcgcgggtaaatcgacattaatcaaactgttagccggggaacttgcgccagtcagcggtgaaattggtctggcgaaagggatcaagctcggctacttcgcccagcatcaactggaatacctgcgcgccgacgaatcgcctattcaacatctggcacgtttagcgccgcaggagctggagcaaaaactgcgtgactacctcggcggctttggtttccagggcgataaagtaaccgaagaaacgcgccgcttctccggtggggaaaaagcccgcctggtgctggcattaattgtctggcagcgtccgaatctgctgctgctcgacgaaccgaccaaccaccttgacctcgacatgcgtcaggcactcaccgaagcattaatcgagttcgaaggcgcgctggttgtcgtctcgcacgaccgtcatttgctgcgttccaccactgacgatctctacctggttcacgatcgtaaagtcgaaccgttcgacggcgatctggaagattatcaacagtggttgagcgacgtacaaaagcaggaaaaccagaccgacgaagcgccaaaagagaacgcgaacagcgcccaggcacgtaaagatcagaagcgtcgggaagcggagctgcgtgcgcaaacccagccactgcgtaaagagattgcccgtctggaaaaagagatggagaagctgaacgcgcaactggcgcaggcggaagagaaactcggcgacagcgaactgtacgatcaaagccgtaaagcggagttgaccgcctgcctgcaacagcaagccagcgccaaatccggcctggaagagtgcgaaatggcatggctggaagcccaggagcagcttgagcagatgctgctggaaggccaaagcaactga

SEQ ID NO: 2404 - DNA, 1023 bp, Escherichia coli
atggcgcagataacaacgaccgatgccaatgaatttagcagcagtgctgaattcacccccatgcgcggctttagcaattgtcatctacaaaccatgctgccgcgtctgttccgtcgcaaggtgaaattcaccccgtactggcagcggctggagttgcccgacggcgattttgtcgatctcgcgtggagtgaagatcctgcacaggcgcggcataaaccgcgtttagtggtatttcacgggctggaaggcagtctcaatagcccttacgctcacggtctggttgaggcggcgcaaaagcgcggctggctgggcgtggtgatgcattttcgcggatgcagcggtgaaccaaaccgtatgcaccgcatttaccattcgggcgaaaccgaagacgccagttggtttttacgctggctgcaacgcgagtttggtcatgcgccaacggctgccgtcggctattcgctcggcggtaatatgctggcctgtttgctggcaaaagaaggcaatgatctcccgattgatgcggcagtgattgtctctgcgccgtttatgctggaggcctgtagttaccatatggaaaagggcttttcccgcgtttatcagcgttacttgctgaacctgttaaaagccaatgccgcgcgcaagctggcagcctaccccggcacactgccgattaatctcgcgcagttaaaatcggtacgtcgcatccgtgaatttgacgatctcatcaccgccagaattcacggctacgctgacgctatcgactattatcgtcagtgtagcgccatgccgatgctcaatcggatagccaaaccgacactgattattcacgccaaagacgatccgtttatggatcatcaggtgatcccgaaaccggaaagtctccccccgcaggtggagtatcagctgactgaacatggcggtcatgttggctttattggcggtacattacttcatccgcaaatgtggctggagtcacgcattcctgactggttaacaacgtatctggaggcgaaatcatgttga

SEQ ID NO: 2405 - DNA, 219 bp, Escherichia coli
atgttgattccgtggcaagacctctcccccgaaacgctggaaaatttaattgaaagctttgtgttacgtgaaggcaccgattatggtgaacatgagcgtacacttgaacagaaagtcgccgacgtcaaacgccagctacagtgcggagaagcggtgctggtatggtcggagctgcacgaaacggtcaatatcatgccgcgcagtcagtttcgcgaataa

SEQ ID NO: 2406 - DNA, 870 bp, Escherichia coli
atgtctgccaaacatccggtcattgcggtaacaggatccagcggcgcggggaccaccaccaccagcctcgcgtttcgtaaaatattcgcgcagttaaatctgcatgcagccgaggtggaaggcgacagttttcaccgttatacccgcccggaaatggacatggcgatccgcaaagcgcgcgacgccgggcggcatatcagctacttcggccccgaagcgaacgacttcggccttctggaacaaaccttcattgaatacggtcagagcggcaaagggaaatctcgcaaatatctgcatacctacgatgaagccgtaccgtggaatcaagtaccggggacattcaccccctggcaatctttaccggaacccactgatgtactgttttatgaaggtttacacggcggcgtagtcacgccacagcataacgttgcgcagcatgtggacttactggtcggcgtggtgcctatcgttaaccttgagtggattcaaaaactgatccgtgacaccagcgagcgcgggcactcacgagaagcagtgatggactcggtagtgcgttcaatggaagactatatcaactacatcacaccgcagttttcccgcacccatcttaacttccagcgcgttcccaccgtcgacacctcaaacccgttcgcggcaaaaggtatcccgtcgctggatgaaagctttgtggtgatccattttcgtaatctggaagggatcgatttcccctggctgctggcgatgttgcaaggctcattcatttcccacatcaatacgttagtggtgcctggcggcaaaatgggtctggcaatggaattaattatgctgccgctggtgcaacgattgatggaaggaaagaaaatcgagtaa

SEQ ID NO: 2407 - DNA, 405 bp, Escherichia coli
atgcaagcgcgagtgaagtgggtcgaagggttaacttttctgggcgaatccgcctctggtcaccagattttaatggacggcaactcaggcgataaagcaccaagcccgatggaaatggtgttgatggcggcgggtggttgcagtgccatcgatgtggtttctatcctgcaaaaagggcgtcaggatgtggtcgattgtgaagtaaaattgacctctgagcgccgcgaagaggcaccacgcctgtttacgcacattaatctgcattttatcgtcaccggtcgcgacctgaaagacgcagcggttgcgcgtgcggttgatctctctgccgagaaatattgttcagtggcgctgatgctggaaaaagcggtgaatattactcactcgtatgaagtggttgccgcgtga

SEQ ID NO: 2408 - DNA, 633 bp, Escherichia coli
atggtgcttggcaaaccgcaaacagacccgactctcgaatggttcttgtctcattgccacattcataagtacccatccaagagcacgcttattcaccagggtgaaaaagcggaaacgctgtactacatcgttaaaggctctgtggcagtgctgatcaaagacgaagagggtaaagaaatgatcctctcctatctgaatcagggtgattttattggcgaactgggcctgtttgaagagggccaggaacgtagcgcatgggtacgtgcgaaaaccgcctgtgaagtggctgaaatttcgtacaaaaaatttcgccaattgattcaggtaaacccggacattctgatgcgtctgtctgcacagatggcgcgtcgtctgcaagtcacttcagagaaagtgggcaacctggcgttcctcgacgtgacgggccgcattgcacagactctgctgaatctggcaaaacaaccggatgctatgactcacccggacggtatgcaaatcaaaattacccgtcaggaaatcggccagattgtcggctgttctcgtgaaaccgtgggacgcattctgaagatgctggaagatcagaacctgatctccgcacacggtaaaaccatcgtcgtttacggcactcgttaa

SEQ ID NO: 2409 - DNA, 2091 bp, Escherichia coli
atgtggcgcagactgatttatcaccccgatatcaactatgcacttcgacaaacgctggtgctatgtttgcccgtggccgttgggttaatgcttggcgaattacgattcggcctgctcttctccctcgttcctgcctgttgcaatattgcgggccttgatacgcctcataaacgttttttcaaacgcttaatcattggtgcgtcgctgtttgccacctgtagcttgctgacacaggtgctactggcaaaagatgttcccctgccctttttgctgaccggattaacgctggtacttggcgtcactgctgagctggggccattgcacgcaaaattgcttcccgcatcgctgctcgccgccatttttaccctcagtctggcgggatacatgccggtctgggaaccgttgctcatctatgcgctgggcactttgtggtacggattgtttaactggttttggttctggatctggcgcgaacaaccgctacgcgagtcactaagtctgctgtaccgtgaactggcagattactgtgaagccaaatacagtctgcttacccagcacaccgaccctgaaaaagcgctgccgccgctgctggtgcgccagcaaaaagcggtcgatttaattacccagtgctatcagcaaatgcatatgctttccgcgcaaaataataccgattacaagcggatgctgcgtattttccaggaggcgctggatttgcaggaacatatttcggtcagtttgcatcagccggaagaggtgcaaaagctggtcgagcgtagccatgcggaagaagttatccgctggaatgcgcaaaccgtcgccgctcgcctgcgcgtgctggctgatgacattctttaccatcgcctgccaacgcgttttacgatggaaaagcaaattggcgcactggaaaaaatcgcccgccaacacccggataatccggttgggcaattctgctactggcatttcagccgcatcgctcgtgtgctgcgcacccaaaaaccgctctatgcccgtgacttactggccgataaacagcggcgaatgccattacttccggcgctgaaaagttatctgtcactaaagtctccagcgctacgcaatgccggacgactcagtgtgatgttaagcgttgccagcctgatgggcaccgcgctgcatctgccgaagtcgtactggatcctgatgacagtattgctggtgacgcaaaatggctatggcgcaacccgtctgaggattgtaaatcgctccgtgggaaccgtggtcgggttaatcattgcaggcgtgacgctacactttaaaattcccgaaggttacaccctgaccttgatgctgattaccaccctcgccagctacctgatattgcgcaaaaactacggctgggcgacggtcggttttactattaccgcagtgtataccctgcaactgttgtggctgaacggtgagcagtacatccttccgcgtcttatcgataccattattggttgtttaattgctttcggcggtactgtctggctgtggccgcagtggcagagcggattattgcgtaagaacgcccatgacgctttagaagcctatcaggacgcgattcgcttgattctgagcgaggacccgcaacctacgccactggcctggcagcgaatgcgggtgaatcaggcgcataacactctgtataactcattgaatcaggcgatgcaggaaccggcgtttaacagccattatctggcagatatgaaactgtgggtaacgcacagccagtttattgttgagcatattaatgccatgaccacgctggcgcgggaacaccgggcattgccaccggaactggcacaagagtatttacagtcttgtgaaatcgccattcagcgttgtcagcagcgactggagtatgacgaaccgggtagttctggcgatgccaatatcatggatgcgccggagatgcagccgcacgaaggcgcggcaggtacgctggagcagcatttacaacgggttattggtcatctgaacaccatgcacaccatttcgtcgatggcatggcggcagcgaccgcatcacgggatttggctgagtcgcaagttgcgggattcgaaggcgtaa

SEQ ID NO: 2410 - DNA, 1221 bp, Escherichia coli
atggcaattgaacaaacagcaattacacgcgcgactttcgatgaagtgattctgccgatttatgctccggcagagtttattccggtaaaaggtcagggcagccgaatctgggatcaacagggcaaggagtatgtcgatttcgcgggtggcattgcagttacggcgttgggccattgccatcctgcgctggtgaacgcgttaaaaacccagggcgaaactctgtggcatattagtaacgttttcaccaatgagccggcgctgcgtcttggccgtaaactgattgaggcaacgtttgccgaacgcgtggtgtttatgaactccggcacggaagctaacgaaaccgcctttaaactggcacgccattacgcctgtgtgcgtcatagcccgttcaaaaccaaaattattgccttccataacgcttttcatggtcgctcgctgtttaccgtttcggtgggtgggcagccaaaatattccgacggctttggtccaaaaccggcagacatcatccacgttccctttaacgatctccacgcagtgaaagcggtgatggatgatcacacctgtgcggtggtggttgagccgattcagggcgagggcggcgtgacggcagcgacgccagagtttttgcagggcttgcgcgagctgtgcgatcaacatcaggcattattggtgtttgatgaagtgcagtgcgggatggggcggaccggcgatctgtttgcctatatgcactacggcgtgacgccggatattctgacctctgcgaaagcgttaggtggcggtttcccggttagcgccatgctgaccacggcggagattgcttccgcgtttcatcctggttctcacggttccacctacggcggtaatcctctggcctgtgcagtagcgggcgcagcgtttgatatcatcaatacccctgaagtgctggaaggtattcaggcgaaacgccagcgttttgttgaccatttgcagaagatcgatcagcagtacgatgtgtttagcgatattcgcggtatggggctgttgattggcgcagagctgaaaccacagtacaaaggtcgggcgcgtgatttcctgtatgcgggtgcagaggaaggcgtaatggtgctgaatgccgggcctgatgtgatgcgttttgcgccgtcgctggtggtggaagatgcggatattgatgaagggatgcatcgtttcgcccacgcggtggcgaaggtgattggggcgtaa

SEQ ID NO: 2411 - DNA, 564 bp, Escherichia coli
atgatcctgcttattgataactacgattcttttacctggaacctctaccagtacttttgtgaactgggggcggatgtgttggttaagcgcaacgatgcgttgacgttggcggatatcgacgcccttaaaccacaaaaaattgtcatctcacccggcccctgtacgccagatgaagccgggatctcccttgacgttattcgtcactatgccggacgcttgccgattcttggcgtctgcctcggtcatcaggcaatggcgcaggcatttggcggcaaagttgtgcgcgccgcaaaggtcatgcacggcaaaacctcgccgattacacataatggtgtgggcgtatttaaggggctggcaaatccactcaccgtgacacgctaccattcgctggtagtggaacctgactcattaccggagtgctttgaagtgacggcctggagcgaaacccgcgagattatggggattcgccatcgccagtgggatctggaaggtgtgcaattccatccagaaagtattcttagcgaacaaggacatcaactgctggctaattttctgcatcgctga

SEQ ID NO: 2412 - DNA, 495 bp, Escherichia coli
atgagcgataaattcggcgaagggcgcgatccgtatctttatccaggccttgatatcatgcgtaaccggctgaacatccgccagcagcagcggctggaacaggccgcttacgaaatgacggcgctgcgtgctgcgaccattgaacttggcccgttggttcggggtttaccgcatttgcgtactcttcatcgccagttgtatcaggatattttcgactgggcggggcaactgcgcgaagtcgatatttatcagggcgatacgccgttctgccactttgcttatatcgaaaaagagggcaatgccctgatgcaggatctggaggaagaaggttatctggttggcctggagaaagcgaagttcgtcgagcggctggcgcattactattgtgaaatcaacgtgctgcatcccttccgggtgggaagtggtttggcacagcggatctttcgagcaactggcgattcatgccggatatcaactgagctggcagggtattga

SEQ ID NO: 2413 - DNA, 168 bp, Escherichia coli
gtgaagaaactcaccgataagcaaaagtcccgtctctgggagcttcagcgtaatcgtaatttccaggccagtcgccgtcttgaaggcgtcgagatgcctttagtcactcttactgccgcagaggctttagcgcgccttgaagcgctgaggaggcactatgagcgataa

SEQ ID NO: 2414 - DNA, 573 bp, Escherichia coli
atgttcaaatcgaccctggcggcgatggctgctgttttcgctctttctgctctttctcccgcagcaatggcagcgaaaggggacccgcacgtattgttgacaacctcagctggtaacatcgaactggagctggataaacaaaaagcgccagtgtctgtgcaaaactttgtcgattatgtgaacagtggtttttataacaacacgacctttcaccgcgtcattcctggctttatgattcagggcggcggtttcaccgagcagatgcagcagaaaaaaccaaacccgccaatcaaaaatgaagcagataacggcctgcgcaacacgcgtggcaccatcgcgatggcgcgtaccgctgacaaagacagcgccaccagccagttctttatcaacgttgccgataacgccttccttgaccacggtcagcgtgatttcggttacgcggtatttggtaaagtggtgaaaggcatggacgttgccgataagatttcccaggtgccgactcatgacgttggtccgtaccagaatgtgccgtcaaaaccggtagttatcctttccgctaaagtcctgccgtaa

SEQ ID NO: 2415 - DNA, 1182 bp, Escherichia coli
atgactaacagcaatcgcatcaagctcacatggattagctttctttcctacgcactgaccggtgcgttggttattgtcaccgggatggtgatgggaaatatcgccgattatttcaatctgcctgtttccagcatgagtaacaccttcaccttcctcaatgccggcattttaatctctatcttcctcaacgcctggctgatggaaatcgtcccgttgaaaacgcagttacgttttggctttctcctgatggtgctggcggttgccggtttgatgttcagccacagcctggcgctgttctcggcggcgatgttcattctcggggtggtcagcggcatcaccatgtcgattggtacattcctggtaacacaaatgtatgaaggacgtcagcgcggttcacgcctgttatttaccgactccttcttcagtatggccgggatgattttcccaatgatcgccgcgtttctgctggcacgtagcattgagtggtactgggtttatgcctgcatcgggctggtgtatgttgctatttttattctgaccttcggctgtgagttcccggcactgggcaaacatgcgccaaaaacagatgctccggtagagaaagaaaagtgggggatcggcgtactgtttctctctgttgcggcgctgtgctacatcctcggtcagttaggttttatctcctgggtgcctgagtatgccaaaggcctgggcatgagcctgaacgacgcgggcacgctggtgagtaacttctggatgtcatacatggtcggcatgtgggcgttcagctttattcttcgcttctttgatttgcaacgcattctgaccgtactggctggtctggctgcgattctgatgtacgtctttaacaccggaacaccggcacatatggcgtggtcaattctcgccctgggcttcttctccagcgcgatctataccaccatcatcaccctgggttcacagcagaccaaagtaccgtcgccaaaactggttaactttgtcctgacctgcgggaccatcggtactatgttgacctttgtggttaccggcccgattgttgaacatagtggtccgcaggcggcgctgctgacggcaaacggtctgtacgctgtcgtctttgtgatgtgcttcctgttaggtttcgtcagccgtcaccgtcagcataacaccctgacctctcattaa

SEQ ID NO: 2416 - DNA, 2544 bp, Escherichia coli
atgagcaaagtcagactcgcaattatcggtaacggtatggtcggccatcgctttatcgaagatcttcttgataaatctgatgcggccaactttgatattaccgttttctgtgaagaaccgcgcatcgcttatgaccgcgtacacctctcgtcttacttctctcaccacaccgccgaagagctgtcgctggtgcgcgaaggcttctacgagaaacacggcatcaaagttctggtcggcgaacgcgctatcaccatcaaccgtcaggagaaggtgattcactccagcgccggacgtaccgttttttatgacaagctgatcatggcgaccggttcctacccgtggatcccgccaattaaaggttctgatactcaggactgctttgtctatcgcaccattgaagacctcaacgccattgaatcctgcgctcgtcgcagcaagcgcggtgccgttgttggtggcggcctgttaggtctggaagctgctggcgcgctgaaaaacttaggcattgaaacccacgttatcgaatttgcccctatgctgatggcggaacagcttgatcagatgggcggcgagcagctgcgtcgcaaaatcgaaagtatgggcgtgcgcgttcacaccagcaaaaacactcttgagattgtgcaggaaggtgttgaagcgcgtaaaaccatgcgttttgccgacggcagcgaactggaagtcgactttatcgtcttctctaccggtatccgtccgcgcgataagctggcaacccagtgtggtctggacgttgctccgcgtgggggtatcgtcataaatgattcctgccagacttccgatccggatatctacgccatcggtgaatgcgcaagctggaacaaccgtgtatttggtctggtagcaccaggctacaaaatggcgcaggtcgccgttgaccatattcttggtagcgaaaacgcctttgaaggtgcagaccttagcgccaagctgaaactgctgggcgtagacgtaggcggtattggtgatgcgcacggtcgcacgcctggcgcacgtagctacgtttacctcgacgaaagcaaagagatctacaaacgcctgattgtcagcgaagacaacaaaaccctgctcggtgcggtactggtgggcgataccagcgactacggcaacctgctgcaactggtgctgaacgctatcgagctgccggaaaacccggattccctgatcctgccagcgcactcgggtagcggtaagccgtctatcggtgttgataaactgccggacagcgcgcaaatctgctcctgcttcgacgtcaccaaaggcgacctgattgctgctatcaacaaaggctgccacaccgttgcggcgctgaaagccgaaaccaaagccggtacgggctgcggcggttgtattccgctggtcactcaggtactgaacgcggaactggcgaaacagggtatcgaagttaacaacaacctgtgtgaacactttgcttattcgcgtcaggaactgttccatttgatccgcgttgaaggcattaaaaccttcgaagaactgctggcgaaacacggcaaaggttacggttgtgaagtttgtaaaccgaccgtcggttcgctgctggcctcctgctggaacgaatacattctgaagccggaacatactccgctgcaggattctaacgacaacttcctcgcgaacatccagaaagacggcacctactcggtgatcccgcgttctccgggcggtgaaatcaccccggaagggctgatggcagtgggtcgtatcgcgcgtgaatttaatctctacaccaaaatcaccggctctcagcgcctggcgatgtttggcgcacagaaagacgatctgccagagatctggcgtcaactgattgaagccggcttcgaaaccggtcatgcctatgcgaaagcactgcgtatggcgaaaacctgcgtgggaagcacctggtgccgctacggtgttggcgacagcgtcggcctcggcgtggaactggaaaaccgttacaaaggcatccgtacgccgcacaaaatgaagttcggtgtctccggctgtacccgtgaatgttcagaagctcagggtaaagacgtgggtattatcgccaccgaaaaaggctggaacctgtacgtttgcggtaacggcggcatgaaaccgcgtcatgcggatctgctggcagcggatatcgatcgcgaaacgctgatcaaatatctcgaccgcttcatgatgttctacatccgtactgccgacaaactgacgcgtaccgcgccgtggttagaaaacctcgaaggtggcatcgattacctgaaagcggtgatcattgacgacaaactggggctgaacgctcatctggaagaagagatggcgcgcctgcgggaagcggtagtgtgcgaatggactgaaacggtcaatacgccgtctgcgcagactcgcttcaaacacttcatcaacagcgacaagcgtgacccgaacgtgcagatggtgccagagcgcgaacagcaccgtccggcaacgccgtatgaacgtatcccggtaactctggtggaggacaacgcatga

SEQ ID NO: 2417 - DNA, 327 bp, Escherichia coli
atgagccagtggaaagacatctgcaaaatcgatgacatcctgcctgaaaccggcgtctgcgcgctgttaggtgacgaacaagtagcaattttccgcccgtatcacagcgatcaggtgtttgcgatcagcaacatcgacccgttcttcgagtccagcgtgctgtcacgcgggttgattgcggaacaccagggcgagctgtgggtcgccagtccgctgaaaaagcagcgttttcgcttaagcgacggcttgtgcatggaagacgaacagttttccgtcaagcattacgacgcgcgagtgaaagacggcgtggtacagctgcgcggttaa

SEQ ID NO: 2418 - DNA, 807 bp, Escherichia coli
atgtttacagacactattactaagtgtgcggctaacgctgcgcgcattgcacgcctgtcggcaaataacccgctcggcttttgggtcagctccgccatggcgggcgcgtatgtgggtcttgggatcatcctgattttcacgctcggtaatttgctcgacccgtccgtacgtcctctggtgatgggcgcgacctttggtatcgccttaacgctggtgattatcgccggttctgaattgttcaccggacacaccatgttcctcacctttggggtgaaagcgggcaccatcagccacgggcaaatgtgggcaatcctgccgcaaacctggctgggtaacctggtcggttccgtcttcgttgccatgctttatagctggggcggcggtagcctgctgccggtagataccagcatcgttcactccgttgcgctggctaaaaccactgcaccggcaatggtactgttcttcaaaggtgcattgtgtaactggctggtttgcctggcaatctggatggcgctgcgcactgaaggggcggcgaaatttatcgctatctggtggtgtttgctggcatttatcgcgtccggctacgagcactccatcgctaacatgacgctgttcgcactctcctggttcggcaaccacagcgaagcctacacgctggcgggcattggtcataacctgctgtgggtgacgctgggtaatactttatcgggtgccgtattcatgggattgggttattggtatgctacgccgaaagcgaatcgtccggttgcggacaaatttaatcaaactgaaacggctgccggttaa

SEQ ID NO: 2419 - DNA, 1374 bp, Escherichia coli
gtggatcatttgcctatattttgccaattacgcgatcgcgactgtctgattgtcggcggtggtgatgtcgcggaacgcaaagcaaggttgctgttagacgcaggcgctcgcttaacggtgaatgcattagcgtttattccacagttcaccgcatgggcagatgcaggcatgttaaccctcgtcgaagggccatttgatgaaagccttctcgacacctgctggctggcgattgcagcgacagatgatgacgcgcttaaccagcgcgtcagcgaagccgctgaagctcgtcgcatcttctgtaacgtggtcgatgcgccgaaagccgccagctttattatgccgtcgattattgaccgctcgccgctcatggtagcggtctcctctggcggcacctctccggttctggcgcgcctgttgcgcgaaaaactcgaatcactgctgccgttacatctgggccaggtagcgaaatacgccgggcaattacgcgggcgagtgaaacaacagttcgccacgatgggtgagcgtcgccgtttctgggagaaattgttcgttaacgaccgcctggcgcagtcgctggccaacaacgatcagaaagccattactgaaaccaccgaacagttaatcaatgaaccgctcgaccatcgcggtgaagtggtgctagttggtgcaggtcctggcgatgccgggctgctgacactgaaaggtctgcaacaaattcagcaggcagatgtggtggtctacgaccgtctggtttctgacgatattatgaatctggtacgccgcgatgctgatcgcgttttcgtcggcaaacgcgcgggataccactgcgtaccgcaggaagagattaaccagatcctgctgcgggaagcgcaaaaaggtaaacgcgtggtgcgtctgaaaggcggcgatccgtttattttcgggcgtggcggagaagagctggaaacactgtgcaacgcgggtattccattctcggtggttccgggtattaccgcagcttctggttgctctgcctattcgggtattccgctcacgcatcgcgattatgcccagagcgtacgcttaattactggacacttaaaaaccggtggcgagctggactgggaaaacctggcggcagaaaaacagacgctggtgttttatatggggctgaatcaggctgcaactattcagcaaaagctgattgaatacggtatgcctggtgaaatgccggtggcaattgtcgaaaacggaacggcagtcacgcagcgcgtgattgacggtacgctcacgcagctgggcgaactggcgcagcaaatgaacagtccatcgctaattattattggtcgggttgttggcctgcgcgataaattgaactggttctctaaccattaa

SEQ ID NO: 2420 - DNA, 168 bp, Escherichia coli
atgaacaaatttattaaagttgcactggtaggcgcagtactggctacgttaactgcatgtactggtcatattgaaaaccgtgataagaactgctcttacgactacctgctgcacccggcaatttctatttctaaaatcattggcggttgcggtcctactgcacagtaa

SEQ ID NO: 2421 - DNA, 1086 bp, Escherichia coli
atgaagacgtttcctctgcaaagcctgacgcttattgaggcgcagcaaaagcagtttgcgctggtggacacgatttgccgtcattttcctggcagcgagtttcttacctgcggtgatttgggcttaacgccggggctaaatcagccccgcattacccagcgtgtggaacaggtgctggctgatgcatttcacgcacaggctgcggcgctggtacagggcgcgggtactggcgcgatccgtgcggcactggcggctttgctcaaatcggggcagcgtcttctggtgcatgacgcgcctgtttacccgacgacacgggttattattgagcagatggggctaacgctcattacggctgatttcaatgatctgtcggcactgaagcaggttgttgacgagcaacaacctgatgcagcgctggtgcagcatacgcgccagcagccgcaggaccgctatgtgctggcagacgtgctggcaacgttgcgcgcggcaggtgttccagcgttaaccgatgacaactatgcggtgatgaaggtagcgcgaatcggctgcgaatgcggggcgaatgtgtcgacattttcctgcttcaagctgtttgggccagagggcgttggtgcggtggtaggcgatgccgatgttattggtcggattcgcgccacgctctattccggcggcagccagattcagggtgcacaggcgctggaagtcttgcgtgggctggtgtttgcgccggtgatacatgcggtgcaggcgggagtatctgaacggttgctggctttacttaacggtggcgcagtggcggaagtgaaaagcgcggtgattgccaatgcgcagtcgaaggtgttgattgtggagtttcatcagccgattgccgccagagtactggaagaggcgcagaaactcggtgccttgccttacccggttggtgcagagtcaaaatatgaaatcccgccgctcttttatcgactttccggaacgtttcgccaggcgaatccgcagttagaacattgcgcgattcgcattaacccaaatcgcagcggtgaagagacgatattgcggatcttgcgtgaaagtattgccagcatttaa

SEQ ID NO: 2422 - DNA, 1305 bp, Escherichia coli
atggatctgtatattcagattatcgtggtggcgtgcctgacgggtatgacatcgcttctggcgcatcgctcggcagccgtttttcatgacggtatccgcccgatcctgccgcaactgattgaaggctatatgaaccgtcgcgaggcggggagtatcgcttttggtctgagcattggttttgtggcctcggtggggatctcttttaccctgaaaaccggtctgctcaacgcatggttactctttcttcctaccgatatcctcggcgtactggcgataaacagcctgatggcgtttggtcttggtgctatctggggaatattgatcctcacctgtctgttgccagtaaaccagctgctgaccgcgctaccggtggatgtattaggtagcctgggggaattaagctcgccggtggtttcagcttttgcactgttcccgttggtggcgattttctaccagtttggctggaagcaaagtctgatcgccgccgtggtggtactgatgactcgtgtggtggtagtgcgctatttcccacatcttaaccctgaatccatcgaaatctttattggcatggtgatgctgctggggatcgcaataactcatgacctgcgccatcgtgatgaaaatgatatcgatgccagcggtatgtcggtgtttgaagagcgtacatcacggattatcaaaaacttaccgtatatcgccatcgtgggtgcattgattgctgccgttgccagcatgaagattttcgccggtagtgaagtgtcgatcttcacactggagaaagcgtactccgcaggcgtaacgccggaacaatcgcaaacactaatcaaccaggcggcactggcagaatttatgcgcgggctgggttttgtgccgttgattgccaccaccgcgttagccaccggtgtgtatgcagttgcgggctttacctttgtttatgcggtgggctatctctcgccgaatccgatggttgcagcggtattaggcgcagtggttatttcggcggaagtcttgctgcttcgttcgatcggcaaatggttggggcgctacccgtcggtacgtaatgcgtcggataacatccgtaacgccatgaatatgctgatggaagtggcgttgctggtcggttcgatctttgcggcaatcaaaatggcgggctataccggattctctatcgcggttgccatttacttcctcaacgaatccctgggccgtccggtacagaaaatggcggcaccggtcgtagcagtaatgatcaccggcatcctgctgaatgttctttactggcttggcctgttcgttccggcttaa

SEQ ID NO: 2423 - DNA, 354 bp, Escherichia coli
atgaaaaagattggcgttgcaggcttacagcgtgagcagattaaaaaaaccattgaagcgacggctcctggctgttttgaagttttcattcacaacgacatggaagcggcaatgaaagtgaaatccgggcaactggattactacatcggcgcgtgtaataccggtgcgggcgcggccttgtcgattgctatcgcggtgattggctataacaaaagttgcaccattgccaagccgggcattaaagcgaaagacgaacatatcgccaaaatgatcgctgaaggaaaagtggcgtttggcctttccgttgagcacgttgaacacgcgattccgatgctgattaaccatctgaaataa

SEQ ID NO: 2424 - DNA, 879 bp, Escherichia coli
atgagttttgatccgacgggctacaccctcgcccatgagcatctgcatattgatctttccggctttaaaaacaacgtggactgccgccttgatcagtatgcgttcatttgccaggagatgaacgacctgatggcccggggcgtgcgtaatgtgattgagatgaccaaccgttacatggggcgcaatgcgcaatttatgctcgatgtaatgcgcgaaaccgggatcaacgtggtggcctgtaccggttattaccaggacgcgtttttcccggaacatgtggcgacccgcagcgtgcaggaactggcgcaggagatggtcgatgaaattgagcagggtatcgatggcactgacctgaaagccggaattatcgcggagatcggctccagcgaagggaagattacgtcgctggaagagaaggtgtttattgccgccgcgctggcacataaccaaaccggacgcccgatctccacgcatacgtcgttcagcacgatggggctggagcaactggctctgttgcaagcccacggagttgatctttcgcgcgtcaccgtcggccactgcgatctgaaagacaatctcgacaacattttgaagatgatcgatctcggcgcgtatgtgcagttcgacaccatcggcaagaacagttactacccggacgaaaagcgcattgcgatgctccatgcgctacgtgaccgtgggttgctgaaccgcgtcatgctgtcgatggatattacgcggcgctctcatttaaaagccaacggtggttatggctatgactttttattgaccacttttattccgcaattgcgccagtcaggattcagtcaggccgatgtggatgtgatgttacgtgaaaatccctctcaatttttccaataa

SEQ ID NO: 2425 - DNA, 1227 bp, Escherichia coli
atggcgcgatttgtggtgttagtgattgatagctttggcgtaggggcaatgaaagatgtcacgttggtgcgtccgcaggatgccggggcgaatacctgtggtcacatcctgagccagttgccgcatttgcagctaccaacgctggagacgctggggctaatcaacgcattgggttatgcgcctggcgatatgcagccgtcagactccgcaacctggggcgtggcagagctgcaacatgaaggtggcgatacctttatggggcatcaggagattttaggtacgcgcccattaccgccgctgcggatgccctttcgtgatgtgattgaccgtgttgagcaggcattagtttccgctggctggcaggttgagcgtcgtggcgatgatctgcaatttctgtgggtcaatcaggcggttgcgattggcgataatctcgaggcggatttaggtcaggtctataacatcaccgccaatctctctgtgatctcttttgacgacgcaatcaaaatgggtcgtatcgtgcgtgagcaggtacaggtcggtcgggtcattacatttggtggcctgttaaccgacagccagtgcatcctcgatgccgcagaaagcaaagaagggcgctttattggcatcaatgcgccgcgttctggcgcctatgacaacggtttccaggtcgtacatatgggctacggtgtcgatgaaaaagtgcaggtaccgcaaaaactgtatgaagcgggcgtgccaaccgtgctggtgggtaaggtggcagatatcgtcagcaatccttatggcgtgagctggcaaaacctggtggatagccagcggattatggatatcaccctcaacgaatttaacacctatccgacggcgtttatttgtaccaatatccaggaaaccgacctcgctggtcatgcagaagacgtcgcacgttatgccgaacgtttgcaggtcgttgaccgtaaccttgcccggcttgttgaggcgatgcagccagatgattgcctggtcgtgatggcggatcacggtaacgatccgaccattggtcacagccaccatacccgcgaagtggtgccagtgctggtttatcagcaaggactggtcgctacgcagctcggtgtgcgcaccacgctttctgatgtgggggctaccgtgtgtgaatttttccgtgcgccaccgccacaaaatggtcgctcttttctttcctccttccggtttgcaggagacaccctatga

SEQ ID NO: 2426 - DNA, 1164 bp, Escherichia coli
atgtttgtagaagcattgaaacgccagaatccggcgctgatttccgccgcactaagtttgtggcagcagggcaagatcgccccggacagttgggtgatcgacgtggatcaagttctggaaaacggcaagcggctgattgagacggcgcggctttacggcattgaactgtatctgatgaccaaacaattcggtcgtaatccgtggctggcagaaaaactgctggctctgggctacagcggcattgtggcggtggattacaaagaggcgcgagtcatgcgccgcgccggtttgccggtagcgcatcaggggcatctggtacaaatcccttgtcatcaggtttctgacgccgttgaacagggcaccgacgtcatcaccgtgtttactctcgacaaagcgcgggaagtttctgcggcagcggtgaaggccggacgtgtgcagtctgtgctgctcaaagtttatagcgacgatgattttctttatccggggcaggagagcggttttgtacagcattcgctgcacgaggtggttgctgaaatccagaatctgccggggctacatttggcgggacttacccatttcccttgcctgctttgggatgaggctgccgggaaagttttgccgacaccgaatcttcacacgctggtacaagcacgggatcaactggcgaaatctggtattgcgattgagcaactgaacgcgccttcagcgaccagctgcacgtcgctgccattgctggcggaatacggtgtgactcataccgaacccggtcatgcgctgacgggtactattccggcaaatcaacagggcgatcagcctgaacgtatcgcgatgctctggttaagtgaaatctcccatcatttccgtggcgacagctactgctacggcggcggttactaccgtcgtggtcacgcgcaacatgcgctggtgtttacgccagaaaatcaaagaattactgaaacatatctcaacgccgttgatgacagcagtatcgactacaccctgccgctggcaggcgagcatccggtaagcagtgcagtggtgctctgttttcgcacgcagatttttatcacccgtagcgatgtggtgctggtgtccggtattcaccgtggcgaaccagaaatagttggtcgttatgacagcctcggcaaccctctggaggcgtaa

SEQ ID NO: 2427 - DNA, 363 bp, Escherichia coli
atggaaaccagactcaacctgctttgcgatgcaggcgttattgataaggacatctgcaaaggcatgatgcaggtcgtcaatgtactggaaacagagtgccatctaccggtgcgcagtgagcaaggaacgatggcgatgacacatatggcgagtgcactgatgcgcagtcgccgtggtgaagaaatagagccgctggatgacgaattgctggcggaactggcgcaatccagccactggcaagccgttgtgcaattgcatcaggtattgttgaaggaatttgcactggaagttaacccgtgtgaagaaggctatttgctggccaacctttatggattatggatggctgctaacgaagaggtttga

SEQ ID NO: 2428 - DNA, 906 bp, Escherichia coli
atgcgtcgaacgtttatcaaaaaagaaggcgtcgttatcacgacactggcccgttatttgttgggtgaaaagtgcggtaatcgactgaaaaccatagatgagctggcaactgaatgccgttcatcggttggcctgacgcaggccgcgttgaaaacgctggaatcaagcggagcgatacggattgaacgccgtgggcgcaatggcagttatctggtcgagatggataacaaagcattgctgactcatgtggatatcaacaacgtggtatgtgcgatgcccttgccctatacccgtttgtacgaaggcctggcgagcggattgaaagcccagtttgatggcattcctttttactatgcgcatatgcgcggcgcggatattcgcgtggagtgtttacttaatggcgtgtatgacatggcggtggtttcgcgactggcggcggaaagttatctcacgcaaaaaggattatgcctcgcgctggagttgggaccgcatacctacgttggcgagcaccagttgatttgccgtaaaggcgagtccgcaaacgtgaagcgcgtggggctggataaccgttcggcagatcagaaaatcatgaccgatgtcttttttggcgatagtgatgtggaacgagtcgatctctcttatcacgagagtttacaacgcattgttaaaggcgatgttgacgcggttatctggaacgtagtggcggaaaacgaactgactatgctgggattagaagcgacgccgctcacagacgatccgcgatttttacaggccaccgaagccgtgatcctgacgcgtgccgatgattacccaatgcaacaactgctgcgtgcagttgttgataaacatgccctgcttgctcatcaacagcgagtagtcagtggggaacaggaacccagttattaa

SEQ ID NO: 2429 - DNA, 1005 bp, Escherichia coli
atgactaagcccatcgtttttagtggcgcacagccctcaggtgaattgaccattggtaactacatgggtgcgctgcgtcagtgggtaaacatgcaggatgactaccattgcatttactgtatcgttgaccaacacgcgatcaccgtgcgccaggatgcacagaagctgcgtaaagcgacgctggatacgctggccttgtatctggcttgtggtatcgatcctgagaaaagcaccatttttgttcagtcccacgtgccggaacatgcgcagttaggctgggcactgaactgctatacctacttcggcgaactgagccgcatgacgcagtttaaagataaatctgcgcgttatgccgagaacatcaatgctggtctgtttgactatccggtgctgatggctgcggacatcctgctgtatcaaactaatctggtaccggtgggtgaagaccagaaacagcacctggaactgagccgcgatatcgcccagcgtttcaacgcgctgtacggcgatatctttaaagtgccggagccgtttattccgaaatccggcgcgcgcgtaatgtcgctgctggagccgaccaagaagatgtccaagtctgacgataaccgcaataacgttatcggcctgctggaagatccgaaatcggtagtgaagaaaatcaaacgcgcggtcactgactccgacgagccgccggtagttcgctacgatgtgcagaacaaagcgggcgtttccaacctgctggatatcctttctgcggtaacgggccagagcatcccggaactggaaaaacagttcgaaggcaagatgtatggtcatctgaaaggtgaagtggctgatgccgtttccggtatgctgactgaattgcaggaacgttaccaccgtttccgcaacgatgaagccttcctgcaacaggtgatgaaagacggcgcagaaaaagccagcgcacacgcttcccgtacgctaaaagcggtgtacgaagcgattggatttgtggcgaagccgtaa

SEQ ID NO: 2430 - DNA, 759 bp, Escherichia coli
atgaataagtttgaagatattcgcggcgtcgcttttgatctcgacggtacgctggttgacagtgcacccggtcttgctgctgcggtagatatggcgctgtatgcgctggagttgcctgtcgcaggtgaagaacgcgttattacctggattggtaacggcgcagatattctgatggagcgcgcattgacctgggcgcgtcaggaacgtgcgactctgcgtaaaacaatgggtaaaccgcccgttgatgacgacattccggcagaagaacaagtacgtattctgcgtaaactgttcgatcgctactatggcgaggttgccgaagaggggacgtttttgttcccgcacgttgccgatacgctgggcgcattgcaggctaaaggcctgccgctaggtctggtcaccaacaaaccgacgccgttcgtcgcgccgctgctcgaagccttagatatcgccaaatacttcagcgtggtaattggtggtgatgatgtgcaaaacaaaaaaccgcatccggacccgctgttactggtggctgagcggatgggaattgctccacaacagatgctgtttgttggcgactcacgcaatgatattcaggcagcaaaagcggcaggttgcccatcagttggcttaacctacggatataactacggcgaggctatcgatctcagccagcctgatgtaatttatcagtctataaatgaccttctgcccgcattagggcttccgcatagcgaaaatcaggaatcgaaaaatgactaa

SEQ ID NO: 2431 - DNA, 678 bp, Escherichia coli
atgaaacagtatttgattgccccctcaattctgtcggctgattttgcccgcctgggtgaagataccgcaaaagccttggcagctggcgctgatgtcgtgcattttgacgtcatggataaccactatgttcccaatctgacgattgggccaatggtgctgaaatccttgcgtaactacggcattaccgcccctatcgacgtgcatctgatggtgaaacccgtcgatcgcattgtgcctgatttcgctgccgctggtgccagcatcattacctttcatccagaagcctccgagcatgttgaccgcacgctgcaactgattaaagaaaatggctgtaaagcgggtttggtatttaacccggcgacacctctgagttatctggattacgtgatggataagctggatgtgatcctgctgatgtccgtcaatcctggtttcggcggtcagtctttcattcctcaaacactggataaactgcgcgaagtacgtcgtcgtatcgacgagtctggctttgacattcgactggaagtggacggtggcgtgaaggtgaacaacattggcgaaatcgctgcggcgggcgcggatatgtttgttgctggttcggcaatcttcgaccagccagactacaaaaaagtcattgatgaaatgcgcagtgaactggcaaaggtaagtcatgaataa

SEQ ID NO: 2432 - DNA, 837 bp, Escherichia coli
atgaagaaaaatcgcgcttttttgaagtgggcagggggcaagtatcccctgcttgatgatattaaacggcatttgcccaagggcgaatgtctggttgagccttttgtaggtgccgggtcggtgtttctcaacaccgacttttctcgttatatccttgccgatatcaatagcgacctgatcagtctctataacattgtgaagatgcgtactgatgagtacgtacaggccgcacgcgagctgtttgttcccgaaacaaattgcgccgaggtttactatcagttccgcgaagagttcaacaaaagccaggatccgttccgtcgggcggtactgtttttatatttgaaccgctacggttacaacggcctgtgtcgttacaatctgcgcggtgagtttaacgtgccgtttggccgctacaaaaaaccctatttcccggaagcagagttgtatcacttcgctgaaaaagcgcagaatgcctttttctattgtgagtcttacgccgatagcatggcgcgcgcagatgatgcatctgtcgtctattgcgatccgccttatgcgccgctgtctgcgactgccaactttacggcgtatcacacaaacagttttacgcttgaacaacaagcgcatctggcggagatcgctgaaggtctggttgatcgccatattccagtgctgatctccaatcacgatacgatgttaacgcgtgagtggtatcagcgcgcaaaattgcatgtcgtcaaagttcgacgcagtataagcagcaacggcggcacacgtaaaaaggtggacgaactgctggctttgtacaaaccaggagtcgtttcacccgcgaaaaaataa

SEQ ID NO: 2433 - DNA, 1287 bp, Escherichia coli
atggatgaattcaaaccagaagacgagctgaaacccgatcccagcgatcgtcgtactggtcgttctcgtcaatcttctgaacgttctgagcgtactgaacgtggcgaaccgcagatcaattttgatgatattgaacttgatgacactgacgatcgccgtccgactcgtgcgcaaaaagagcgcaatgatgagccggaaatcgaagaagaaattgacgaatccgaagatgaaatcgtggatgaagagcgcgtagagcgtcgtccgcgtaagcgcaaaaaagcagccagtaaacccgcttctcgtcagtatatgatgatgggggtcggcattctggttctcctgctgttgatcatcggtatcggttctgcgctaaaagccccctcgacctcttccagcgatcaaaccgcgtctggcgagaagagtattgatcttgcaggcaatgcgaccgatcaggccaatggcgtgcagccagcgccgggaaccacgtctgcggaaaatactcagcaggatgtttctctgccgccgatctcttctacgccgactcaagggcaaaccccggtggcaacggatggtcaacaacgtgttgaagtgcagggtgacctgaacaatgcgctgacccagccacaaaatcagcaacagttgaacaatgtggcggtcaattctacattgccgactgaacccgcaacggttgcgcctgttcgcaatggcaatgcatcgcgtgacacggcgaaaacgcaaaccgctgaacgtccggccactacgcgcccagctcgtcagcaggcggtgattgaaccgaaaaaaccgcaagcaaccgtgaaaacggaaccgaagccagtcgcacagacgccgaagcgaactgaaccagctgcccctgtggcgagcacaaaggcaccggctgcgacttctacgccagcaccaaaagagacggcgactacggctccagtacagacggcatccccggcgcaaaccacggcaacaccagccgctggagggaagaccgcaggtaatgttggttcgttgaaatcggcaccgtccagccattacactctgcagctgagcagttcctctaactacgacaacctgaacggttgggcgaagaaagagaatctgaaaaactacgttgtctatgaaacgacgcgtaatggtcagccgtggtatgtcctggtttctggcgtgtatgcttcgaaagaagaggcgaaaaaagcggtatctacattgccagcagatgtccaggccaaaaacccgtgggcgaaaccgctgcgtcaggtacaggccgatctgaagtaa

SEQ ID NO: 2434 - DNA, 1089 bp, Escherichia coli
atggagaggattgtcgttactctcggggaacgtagttacccaattaccatcgcatctggtttgtttaatgaaccagcttcattcttaccgctgaaatcgggcgagcaggtcatgttggtcaccaacgaaaccctggctcctctgtatctcgataaggtccgcggcgtacttgaacaggcgggtgttaacgtcgatagcgttatcctccctgacggcgagcagtataaaagcctggctgtactcgataccgtctttacggcattgttacaaaagccgcatggtcgcgatactactctggtggcgcttggcggcggcgtagtgggtgatctgaccggcttcgcggcggcgagttatcagcgcggtgtacgtttcattcaagtcccgacgacgttactgtcgcaggtcgactcctccgttggcggcaaaactgcggtcaaccatcccctcggtaaaaacatgattggcgcgttctaccagcccgcttcagtggtggtggatctcgactgtctgaaaacgcttcccccgcgtgagttagcgtcggggctggcagaagtcatcaaatacggcattattcttgacggtgcgttttttaactggctggaagagaatctggatgcgttgttgcgtctggacggtccggcaatggcgtactgtattcgccgttgttgtgagctgaaagcagaagttgtcgccgccgacgagcgcgaaaccgggttacgtgctttactgaatctgggacacacctttggtcatgccattgaagctgaaatggggtatggcaattggttacatggtgaagcggtcgctgcgggtatggtgatggcggcgcggacgtcggaacgtctcgggcagtttagttctgccgaaacgcagcgtattataaccctgctcacgcgggctgggttaccggtcaatgggccgcgcgaaatgtccgcgcaggcgtatttaccgcatatgctgcgtgacaagaaagtccttgcgggagagatgcgcttaattcttccgttggcaattggtaagagtgaagttcgcagcggcgtttcgcacgagcttgttcttaacgccattgccgattgtcaatcagcgtaa

SEQ ID NO: 2435 - DNA, 522 bp, Escherichia coli
atggcagagaaacgcaatatctttctggttgggcctatgggtgccggaaaaagcactattgggcgccagttagctcaacaactcaatatggaattttacgattccgatcaagagattgagaaacgaaccggagctgatgtgggctgggttttcgatttagaaggcgaagaaggcttccgcgatcgcgaagaaaaggtcatcaatgagttgaccgagaaacagggtattgtgctggctactggcggcggctctgtgaaatcccgtgaaacgcgtaaccgtctttccgctcgtggcgttgtcgtttatcttgaaacgaccatcgaaaagcaacttgcacgcacgcagcgtgataaaaaacgcccgttgctgcacgttgaaacaccgccgcgtgaagttctggaagcgttggccaatgaacgcaatccgctgtatgaagagattgccgacgtgaccattcgtactgatgatcaaagcgctaaagtggttgcaaaccagattattcacatgctggaaagcaactaa

SEQ ID NO: 2436 - DNA, 1209 bp, Escherichia coli
atgcttatacccggcgtacaggcggcaaagccgcaaaaagtgacgctgatggtggatgacgttccggtagctcaggtgttgcaggcgctggctgaacaggagaagttgaacctggtggtttcgccagacgtcagcggtacggtgtcgttacatttaactgacgttccctggaagcaggcactacaaactgtagtgaaaagcgccggattgataacgcgccaggagggcaacattctctcggtgcattccgttgcctggcagaatgacaatatcgcccgccaggaggcggagcagacgcgggcgcaggcaaatctgccgctggaaaatcgcaatattactctgcaatacgccgacgccggagagctggcgaaagcgggggagaagctactgagtgccaaagggagtatgaccgtcgataaacgcaccaatcgccttttgctgcgagataacaaaacggcgttaagcacgcttgaacagtgggtatcgcaaatggatctgccggtcgggcaggttgagctctcggcgcatattgtcaccattaatgaaaaaagtttgcgtgagttaggtgtgaaatggacgctggccgatgcgcaacaagctggtggcgttgggcaagtcaccacgcttggcagcgacctctccgtagcgacggcgacaacgcatatcggttttaacattggacgcatcaacggacgtttactggatcttgagctttccgcgctcgaacaaaaacagcagctggatattatcgccagtccgcgtctgctggcctcacatcttcagcctgccagcattaaacaggggagcgaaattccatatcaggtttccagcggggaaagtggcgcgacgtcggtagaatttaaagaggccgtcctggggatggaagtcacgcccacggtgttacaaaaaggtcgcatccggctgaaattacacatcagccagaacgttccggggcaggtgctacagcaggcagatggcgaagtgctggcgattgataagcaggagatcgaaacgcaggtcgaggtcaaaagcggagaaacgttggcgctgggcggcatttttacccgtaaaaataaatcgggtcaggatagcgtaccgttgcttggcgacattccctggttcgggcaattatttcgtcatgacggaaaagaagatgaacgacgcgagttagtggtgtttatcacgccacgactggtttccagtgagtaa

SEQ ID NO: 2437 - DNA, 405 bp, Escherichia coli
atgagggttaaacgctggttgttggcaggtattgcattgtgccttttaaccggtatgcgtgacccttttaaaccgccggaagatctatgccggattagcgaacttagccagtggcgctatcagggaatggtagggcgaggcgagcgcatcatcggtgtaataaaagatgggcaaaaaaaatggcgacgggtgcagcaaaacgatgtgctggaaaacggctggacgatcttacagctgacgccagacgcactaacgctgggaaccgggacaaactgcgaaccgccacactggttgtggcaacggcaaggagatacaaatgaagcaatggatagccgcactactgttgatgcttatacccggcgtacaggcggcaaagccgcaaaaagtgacgctgatggtggatga

SEQ ID NO: 2438 - DNA, 441 bp, Escherichia coli
atggacatgttctttgactggtggttctccacatcaccccgcctccgccagctttgctgggcagtctggttgctggtgttagttacgctcatttttctgtcattgacacaccatgaagagagcgatgcattaattcgactacgggcaaatcatcaccagcagtgggctgcactgtatcgcctggtagacaccacttccttcagcgaagaaaaaacgctgcccttttcgccactggattttcagttatccggcgcgcaactggtttactggcatccatccgcgcagggaggtgagttggcgttgaaaacgctgtgggaagcagtgccgtcggcatttacacggctggcagagcgcaacgtcagcgtgagccgtttttcgttaagcgtggaaggtgatgaccttttgttcacgctacaactggagacgccgcatgagggttaa

SEQ ID NO: 2439 - DNA, 540 bp, Escherichia coli
atgaacccgccaattaattttttgccctggcgacagcaacgccggaccgcttttcttcgtttctggttgctgatgttcgttgcgcctctgctgctggccgtcgggattacgctaataatgcgtctgacaagcaacgccgaagcacgcgtaaacgccattttgcttcaggcggaacaacaacttgcccacagcttacagataacgaaaccacgtttgctggaacgccaacaaattcgtgagcagcgtttgcaaaggcagcgccagcgacaatttacccgtgactggcaatctgcgctggaagcactggcggcgcttttacccgaacatgcctggctgacaacgataagctggcagcagggaacgctggagatcaaggggcttacaacaagcattaccgcgttaaacgcactagaaacgtcactccgccaggatgcttcttttcatctcaatcagcggggggccacgcagcaggatgcgcagggacgctggcaatttgagtatcagttaacaaggaaggttagcgatggacatgttctttga

SEQ ID NO: 2440 - DNA, 780 bp, Escherichia coli
atggcatttaagatctggcaaattggtttgcatttacaacagcaagaagcggtagcggttgcgatcgtgcggggcgcaaaagaatgctttttgcaacgctggtggcggttgccgctggagaacgacattatcaaagatgggcggattgttgatgtgcagcggctggctaaaacgttgttaccgtggagccgcgaactgccgcagcgtcatcacattatgttggcgtttcccgccagtcgcacattacagcggtcatttccgcgcccgtcgatgtccctcggtgagcgggagcaaacggcctggctttccgggacgatggcccgcgagctggatatggatccggactccctgcgcttcgattacagcgaagactcactcagtcccgcctataacgtgactgccgcgcaaagcaaagagctggcaacgctgcttactctggcagaaaggttgcgtgttcatgttagtgcgatcaccccggatgccagtgcattacagcgattcctgccttttttaccttctcatcagcaatgtctggcctggcgtgataacgaacagtggctgtgggcgacgcgctatcgctgggggcgcaaactggcgatggggatgactagcgcgaaggagctggcggcagcgttatccgttgatcccgaaagcgtcgcgatatgtggcgaaggcggatttgatccctgggaggccgtttctgttcgtcagccgccgctaccgccgccaggtggagactttgccatcgcgctggggctggcgctagggaaggcgtactga

SEQ ID NO: 2441 - DNA, 2553 bp, Escherichia coli
gtgaagttcgtaaagtattttttgatccttgcagtctgttgcattctgctgggagcaggctcgatttatggcctataccgctacatcgagccacaactgccggatgtggcgacattaaaagatgttcgcctgcaaattccgatgcagatttacagcgccgatggcgagctgattgctcaatacggtgagaaacgtcgtattccggttacgttggatcaaatcccgccggagatggtgaaagcctttatcgcgacggaagacagccgcttctacgagcatcacggcgttgacccggtggggatcttccgtgcggcaagcgtggcgctgttctccggtcacgcgtcacaaggggcgagtactattacccagcagctggcgagaaacttcttcctcagtccagaacgcacgctgatgcgcaagattaaggaagtcttcctcgcgattcgcattgaacagttgctgacgaaagacgagatcctcgagctttatctgaacaagatttacctcggttaccgcgcctatggtgtcggtgctgcggcacaagtctatttcggtaaaacggtcgaccaactgacgttgaacgaaatggcggtgatagccgggctgccgaaagcgccttccaccttcaacccgctctactcaatggatcgtgccgtcgcgcggcgtaacgtcgtgctgtcgcggatgctgaatgaagggtatatcacccaacaacagttcgatcagacacgcactgaggcgattaacgctaactatcacgcgccggagattgctttctctgcgccatacctgagcgaaatggtgcgccaggagatgtataaccgttatggcgaaagtgcctatgaagacggttatcgcatttacaccaccatcacccgcaaagtgcagcaggccgcacagcaggcggtacgtaataacgtgctggactacgacatgcgccacggctatcgcggcccggcgaatgtgctgtggaaagtgggcgaatcggcgtgggacaacaacaaaattaccgatacgctgaaggcgctgccgacctatggtccgctgctgcctgccgcagtcaccagcgccaatcctcaggaagcaacagcgatgctggcagacgggtcgaccgtcgtattgagtatggaaggtgttcgctgggcgcgcccttaccgttcggatactcagcagggaccgacgccgcgtaaagtgaccgatgttctgcaaacgggtcagcaaatctgggttcgtcaagttggcgatgcatggtggctggcacaagtgccggaagtgaactcggcgctggtgtcgatcaatccgcaaaacggtgccgttatggcgctggtcggtggctttgatttcaatcagagcaagtttaaccgcgccacccaggcactgcgtcaggtgggttccaacatcaaaccgttcctctacaccgcggcgatggataaaggtctgacgctggcaagtatgttgaacgatgtgccaatttcccgctgggatgcaggtgccggttctgactggcaaccgaagaactcaccaccgcaatatgccggtccaattcgcttacgtcaggggctgggtcagtcgaaaaacgtggtgatggtacgcgcaatgcgggcgatgggcgtcgactacgctgcagaatatctgcaacgcttcggcttcccggcacaaaacattgtccacaccgaatcgctggcgctgggttcagcttccttcaccccaatgcaggtggcgcgcggctacgcggtcatggcgaacggcggcttcctggtggacccgtggtttatcagcaaaattgaaaacgatcagggcggcgtgattttcgaagcgaaaccgaaagtagcctgcccggaatgcgatattccggtgatttacggtgatacgcagaaatcgaacgtgctggaaaataacgatgttgaagatgtcgctatctcccgcgagcagcagaatgtttctgtaccaatgccgcagctggagcaggcaaatcaggcgttagtggcgaagactggcgcgcaggagtacgcaccgcacgtcatcaacacaccgctggcattcctgattaagagtgccttgaacaccaatatttttggtgaaccaggctggcagggtactggctggcgagcaggtcgtgatttacaacggcatgatataggcggaaaaacgggtaccactaacagttcgaaagatgcgtggttctcgggttacggtccgggcgttgtgacctcggtctggattggctttgatgatcaccgtcgtaatctcggtcatacaacggcttccggagcgattaaagatcagatctcaggttacgaaggcggtgccaagagtgcccagcctgcatgggacgcttatatgaaagccgttcttgaaggtgtgccggaacagccgctgacgccgccaccgggtattgtgacggtgaatatcgatcgcagcaccgggcaattagctaatggtggcaacagccgcgaagagtatttcatcgaaggtacgcagccgacacaacaggcggtgcacgaggtgggaacgaccattatcgataatggcgaggcacaggaattgttctga

SEQ ID NO: 2442 - DNA, 561 bp, Escherichia coli
atgagcaaatcattacaaaaacccaccattctgaatgttgaaactgtagcccgttcccgactgtttaccgtcgaaagcgtggatctggagttcagcaatggcgtgcggcgtgtttatgaacgaatgcgtccaaccaaccgggaagcagtgatgattgtgccgattgtggacgatcacctgatcctgatccgcgaatacgcagtgggaactgaatcctacgaattaggtttttcgaaaggattaattgatccgggtgaaagcgtctttgaagccgctaaccgcgagctaaaagaagaggttggatttggtgcgaacgatctgacttttttgaagaagctcagcatggcaccgtcttacttttccagcaaaatgaatatcgtggtagcgcaagatctctacccggaatcactggaaggcgatgagccagagccgctaccacaggtgcgctggccgctggcgcatatgatggatttgctggaagcccctgacttcaacgaagcgcgtaatgtcagcgcgctgttcctcgtgcgcgaatggttgaaagggcaggggcgagtgtaa

SEQ ID NO: 2443 - DNA, 2124 bp, Escherichia coli
gtgatttttttagctgctttgctggcctgctcactacttgcgggatggctgataaaagtgcgatccagacggcgtcagctgccctggaccaacgccttcgtggatgcgcaaacgcgtaaactcacatctgaagaacgtagcgccgttgaaaattatcttgagagcctgacgcaggtattacaggtgcctggcccaacgggagccagcgcggcaccgatctctctggcgctgaatgccgaaagcaacaacgtcatgatgctgacacacgctatcacgcgttatggcatctctaccgacgatccgaataaatggcgttactacctcgattcggtagaagtccacctgccgcctttctgggaacagtacatcaacgatgagaataccgttgaactgattcataccgattcgctgccgctggttatttcactcaacggtcatacgctgcaggagtacatgcaggaaactcgcggctatgccttgcaacctgttccgtcaacacaggcgtcgattcgcggggaagagagtgagcaaatcgagctactcaatattcgcaaagaaacgcacgaagagtatgcgctaagtcgtccgcgcgggctgcgcgaagcgttgctgattgtcgcctccttcctgatgttctttttctgcctgattaccccggatgtctttgttccgtggctggcaggcggcgcgttactgctgctgggcgcaggactgtgggggctattcgcgcccccggcaaaatcctccctgcgggaaattcattgtctacgcggcacaccccgtcgttggggattgtttggcgaaaacgatcaggaacagatcaacaatatttcactcggtattatcgacctggtctatcccgcacactggcagccctacattgctcaggatcttggtcaacaaaccgatatcgatatctatctcgaccgccacgtagtgcgtcaggggcgatatctttcgctgcatgatgaagtaaaaaactttccgttacagcactggctgcgcagtacgattatcgctgcgggctcgctgctggtgctgtttatgctgttattctggatcccgctggatatgccgctgaaattcaccctctcgtggatgaaaggcgcacagaccattgaagccaccagcgtaaaacaactggctgacgctggcgtgcgggttggcgatacattgcgtattagcggtacgggaatgtgtaatattcgcacttccggtacctggagcgcgaaaaccaattcaccttttttaccgtttgactgctcgcagatcatctggaacgacgcccgctcattgccattaccagaatctgaactggtcaacaaagcgacggcattgaccgaagcagttaatcgccagctgcaccctaaaccggaagatgaatctcgcgtcagtgcctcattacgttcagcaattcaaaaatccggcatggtattgcttgatgattttggcgacatagtactgaagacagcagatctgtgttctgccaaagatgactgtgtgcgactgaaaaatgcgctggtcaatctcggcaacagtaaagactgggacgcgctggtaaaacgcgccaacgccgggaaacttgatggcgtgaatgtgttattacgcccggtgagtgcggaatcgctggataacctggtggcaacctccaccgcgccgtttatcacgcatgaaacggcgcgagcggcacaatcactaaacagtccggcccccggcgggttcctgattgtcagcgacgaaggcagcgattttgttgatcagccctggccttcggcatcactttacgactatccgccgcaagaacagtggaacgctttccagaaactggcacaaatgctgatgcatacgccgtttaacgccgaaggtatcgtcacaaaaatcttcactgacgccaatggtacgcagcatattggccttcatccgatcccggatcgttccggtctgtggcgctatctcagcaccacgctgctgctactgacgatgctgggtagcgccatttataatggcgtacaggcctggcgtcgttaccagcgtcatcgcactcgcatgatgaagattcaggcctattatgaaagctgcctgaacccgcagctgatcaccccttcagaaagccttatcgaataa

SEQ ID NO: 2444 - DNA, 669 bp, Escherichia coli
atgcatatcaacattgcctggcaggacgtagataccgttctgctggatatggacggcacgttgctcgacctcgccttcgataactatttctggcaaaagctggtgcctgaaacatggggcgcgaaaaacggagttacgccacaggaagcgatggaatatatgcgccagcaatatcacgacgtacagcatacgctaaactggtactgtcttgattactggagtgagcaactgggtctggatatctgtgcgatgaccaccgagatgggaccgcgtgccgtactgcgtgaagataccattccgtttcttgaggcactgaaagccagcggtaagcagcgaattttgctcaccaatgcgcatccgcacaacctggcggtaaaacttgagcataccggtctggacgcacaccttgatttattactttccacccacacatttggttatccgaaagaggatcagcggttatggcatgcggtggccgaagctacgggtcttaaagctgaaagaacgctgtttattgatgacagcgaagcgattctcgatgctgccgcgcaatttggtattcgttactgcctcggtgtgactaatcctgactccgggattgccgagaaacagtatcaacgccatccgtcactgaatgactaccgccgcctgatcccctcgctaatgtga

SEQ ID NO: 2445 - DNA, 402 bp, Escherichia coli
atgaaagaaaaacctgctgttgaggttcgactggataaatggctatgggctgcccgtttttataaaacccgcgcgctggcccgtgaaatgattgaaggcggtaaggtgcattacaacgggcagcgcagcaagccaagcaaaatcgtcgagctgaatgccacgctcactctgcgccagggaaatgacgaacgcacggtgattgtaaaggcgattactgaacagcgtcgccccgccagcgaggcagccttgctgtatgaagagactgcggaaagtgtagagaaacgcgaaaaaatggcgctggcacgtaaacttaatgccttaaccatgccgcacccggaccgacgcccggacaaaaaagagcgccgcgacctgttacgatttaaacacggcgacagtgaataa

SEQ ID NO: 2446 - DNA, 879 bp, Escherichia coli
atgccgcaacatgaccaattacatcgctatctgtttgaaaactttgccgttcgcggcgaactggtaaccgtttcggaaaccctacaacagatccttgagaaccacgattatccgcagcccgttaaaaacgtgctggcagaactgctggttgcgaccagcctgttaaccgctacgctgaagtttgatggtgatatcaccgtacagctgcaaggcgacggtccgatgaatctggcggttattaacggtaacaacaaacagcagatgcgcggtgtggcgcgcgtgcagggcgaaattccagaaaatgccgacctgaaaacgctggtcggcaatggttacgtggtgatcaccatcaccccgagcgaaggtgaacgctatcagggcgtggtgggtctggaaggtgatactctggcggcctgcctggaagattactttatgcgttctgaacagctgccgacgcgcctgtttattcgcaccggcgacgtagacggcaaaccggctgcaggcggtatgttgttgcaggtaatgcctgcgcaaaatgcccagcaggacgactttgaccacctggcgacgctaaccgaaaccatcaaaaccgaagaactgttgaccttaccggcaaacgaagtgttgtggcgtttgtatcacgaagaagaggtgacggtttacgatccgcaggatgtggagttcaaatgcacctgctcgcgtgaacgttgcgccgacgcgctaaaaacgctgccggatgaagaagtcgatagcatcctggcggaagatggcgaaattgacatgcattgtgattactgcggtaaccactatctgttcaatgcgatggatattgctgaaatccgcaacaacgcgtctccggcagatccgcaagttcattaa

SEQ ID NO: 2447 - DNA, 1725 bp, Escherichia coli
atggataacgttgaactttcaccggcaacacgctgggggatgattgctaccggattacttcaggggttggtttgctacctgctgatcgcctggcttgccggaaaaaatctcagttggattgtttatggcgtgcctgtgaccgtcgcgttttcatccgttttactcttctccgtgatctcctttaaacagaagcgcctttggggatggctggcgctggtgtttattgccacgctgggaatgagcggctggctgaagtggcaaactgatggcatgaccccctggagagctgaaaaggcgctttgggattttggctgctatctgctgctgatggcaatgttgttgctaccgtggatacaacaaagccttcgcatccgcaatgacagtagccgctatcgctacttttaccagtctgtatggcataacgtacttatattactggtgatttttctcgccaatggcctgacgtggctggtgcttttactgtggagtgagttgtttaaacttgttggcatcacgtttttcaaaacgctcttttttgcaaccgactggtttatttatctcacgttaggtctggctaccgcgctggcggtgatcctcgcgcgaacacagtcacgtttaatcgactctattcaaaagttgttcacgttaatcgccacggggttgctgccgttagtatcattgctaaccctgatgtttattatcaccctgccgtttacgggcctgagcgcgatttctcgccacatctccgccgccgggttgctgttgacgctggcctttttgcaattgatcttaatggctattgtccgcgatccgcaaaaagcgtcacttccctggacggggccattgcgttgcctgattaaaaccgctttgctggttgctccgctgtatgtgttcgtcgccgcctgggcgttatggctgcgggtcgctcagtacggctggactgccgaccgcttgcagggcgcgctggcggtgctggtgttactggtatggtcgctggggtattttgtcagtatcgtctggcgtaaagggcaaaatccccttgatcttcagggcaaagtgaaccttgtggtttcgttattggtgttggtaatactggtgcttcttaattctccggtgctggacagtatgcgcattagcgtgaacagtcatatggcgcgttatcagagcggcaaaaacacgccagaccaggtaagtctctatatgctcgaacagagcggtcgctatggacgtgcggcgcttgagtcgctgaaaagcgatgccgagtatatgaaagacccgaaacgcaggcggggtctgctgatggcttttgatggagtacaacgtcttcagcagcagatatcggaaaaagcattagcagataatgtatttattgcctcaggttctggaaaaccggatacgatattctggtcggcagtgatgaaaaatcgctataacgcaatgatatgcattgaaaaagatgcctgcgtgctggtagagcaagatctgaatagtgatggcagggcagagcggatcctgtttgcctttaatgatgaaagatacattgtctatggtattgatcctgctgggaaagaatggaaagagattacgatgaattcactcccggctgtaataacgaaagaaaaattactcatggctgcggaggatggaaaactggggacgaagcctaaagtgtggcgcgatcttacggtggatggcgaaagactggatttgaatctgaatgaatga

SEQ ID NO: 2448 - DNA, 1623 bp, Escherichia coli
atgcgcgttaacaatggtttgaccccgcaagaactcgaggcttatggtatcagtgacgtacatgatatcgtttacaacccaagctacgacctgctgtatcaggaagagctcgatccgagcctgacaggttatgagcgcggggtgttaactaatctgggtgccgttgccgtcgataccgggatcttcaccggtcgttcaccaaaagataagtatatcgtccgtgacgataccactcgcgatactttctggtgggcagacaaaggcaaaggtaagaacgataacaaacctctctctccggaaacctggcagcatctgaaaggcctggtgaccaaacagctttccggcaaacgtctgttcgttgtcgacgccttctgtggtgcgaacccggatactcgtctttccgtccgtttcatcaccgaagtggcctggcaggcgcattttgtcaaaaacatgtttattcgcccgagcgatgaagagctggcaggtttcaaaccagactttatcgttatgaacggcgcgaagtgcactaacccgcagtggaaagaacagggtctgaactccgaaaacttcgtggcgtttaacctgaccgagcgcatgcagctgattggcggcacctggtacggcggcgaaatgaagaaagggatgttctcaatgatgaactacctgctgccgctgaaaggtatcgcttctatgcactgctccgccaacgttggcgagaaaggcgatgttgcggtgttcttcggcctttccggcaccggtaaaaccaccctttccaccgacccgaaacgtcgcctgattggcgatgacgagcacggctgggacgatgacggcgtgtttaactttgaaggcggctgctacgcaaaaactatcaagctgtcgaaagaagcggaacctgaaatctacaacgctatccgtcgtgatgcgctgctggaaaacgtcaccgtgcgtgaagatggcactatcgactttgatgatggttcaaaaaccgagaacacccgcgtttcttatccgatctatcacatcgaaaacatcgttaagccggtgtccaaagcgggccacgcaactaaagttatcttcctgaccgcagacgcctttggtgtgctgccgccggtttctcgtctgactgccgatcaaacccagtaccacttcctctctggcttcaccgccaaactggctggtacagagcgcggcatcaccgaaccgacgccaactttctccgcctgcttcggcgcggcattcctgtcgctgcacccgactcagtacgcagaagtgctggtgaaacgtatgcaggcggcaggcgcgcaggcgtatctggttaacaccggctggaacggcactggcaaacgtatctcgattaaagatacccgcgccattatcgacgccatcctcaacggttcgctggataacgcagaaaccttcactctgccgatgtttaacctggcgatcccaaccgaactgccgggcgtagacacgaagatcctcgatccgcgtaacacctacgcttctccggaacagtggcaggaaaaagccgaaacgctggcgaaactgtttatcgacaacttcgataaatacaccgacaccccggcgggtgccgcgctggtagcggctggtccgaagctgtaa

SEQ ID NO: 2449 - DNA, 1353 bp, Escherichia coli
atgaggcgattgcgcttctcgccacgaagttcatttgcccgtacgttattgctcatcgtcaccttgctgttcgtcagcctggtgacgacttatctggtggtgctgaacttcgcgattttgccgagcctccagcagtttaataaagtcctcgcgtacgaagtgcgtatgttgatgaccgacaaactgcaactggaggacggcacgcagttggttgtgcctcccgctttccgtcgggagatctaccgtgagctggggctctctctctattccaacgaagctgccgaagaggcaggtctgcgttgggcgcaacactatgaattcttaagccatcagatggcgcagcaactgggcggtccgacggaagttcgcgtcgaggttaacaaaagttcgcctgtcgtctggctgaaaacctggttgtcgcccaatatctgggtacgcgtgccgctaaccgaaattcatcagggcgatttctccccgctgttccgttatacgttggcgattatgctattggcgataggcggggcgtggctgtttattcgtatccagaaccgaccgttggtcgatctcgagcacgcagccttgcaggtgggtaaagggattattccgccgccgctgcgtgaatatggcgcttcggaggtgcgttccgttacccgcgcctttaaccatatggcggctggtgttaagcaattggcggatgaccgtacgctgctgatggcgggggtaagccatgatctgcgcacgccgctgacgcgtattcgcctggcaaccgagatgatgagcgagcaggatggctacctggcagaatcgatcaataaagatatcgaagagtgcaacgccatcattgagcagtttatcgactacctgcgcaccgggcaggagatgccgatggaaatggcggatctcaacgcagtactcggtgaggttattgctgccgaaagtggctatgagcgggaaattgaaaccgcgctttaccccggtagcattgaggtgaaaatgcacccgctgtcgatcaaacgcgcggtggcgaatatggtggtcaacgccgtccgttacggcaatggctggatcaaagtcagcagcggcacggagccgaatcgcgcctggttccaggtagaagatgacggtccgggtattgcgccggaacaacgtaagcacctgttccagccgtttgttcgtggcgacagtgcgcgcaccattagcggcacgggattagggctggcgattgtgcagcgtatcgtggataaccataacgggatgctggagcttggcaccagcgaacggggcgggctttccattcgcgcctggctgccagtgccggtaacgcgggcgcagggtgcgacaaaagaagggtaa

SEQ ID NO: 2450 - DNA, 720 bp, Escherichia coli
atgcaagagaactacaagattctggtggttgatgacgacatgcgcctgcgcgcgctgctggaacgttatctcaccgaacaaggcttccaggttcgaagcgtcgctaatgcagaacagatggatcgcctgctgactcgtgaatctttccatcttatggtactggatttgatgttacctggtgaagatggcttgtcgatttgccgacgtcttcgtagccagagcaatccgatgccgatcattatggtgacggcgaaaggggaagaagtggaccgtatcgttggcctggagattggcgctgacgattacattccaaaaccgtttaacccgcgtgaactgctggcccgcattcgtgcggtgctgcgtcgtcaggcgaacgaactgccaggcgcaccgtcacaggaagaggcggtaattgctttcggtaagttcaaacttaacctcggtacgcgcgaaatgttccgcgaagacgagccgatgccgctcaccagtggtgagtttgcggtactgaaggcactggtcagccatccgcgtgagccactctcccgcgataagctgatgaaccttgcccgtggtcgtgaatattccgcaatggaacgctccatcgacgtgcagatttcgcgtctgcgccgcatggtggaagaagatccggcgcatccgcgttacattcagaccgtctggggtctgggctatgtctttgtaccggacggttctaaagcatga

SEQ ID NO: 2451 - DNA, 477 bp, Escherichia coli
atgaaaacgcccctggttacccgggaagggtatgaaaaactcaaacaagagcttaattatctctggcgtgaagaacgcccggaggtcacaaaaaaggtgacctgggccgcaagtctgggcgaccgcagcgaaaatgctgactatcagtataataaaaagcgtctgcgtgaaatcgaccgtcgcgtgcgctatctcactaaatgcatggaaaatctcaaaatcgtcgattactccccgcagcaggaaggcaaagtcttttttggcgcgtgggtggagattgaaaacgacgatggcgtgactcaccgtttccgtattgtcggctacgatgaaatttttggccgtaaagattacatctctatcgattccccgatggctcgcgcattgttgaaaaaagaggtgggcgatttggcggtggtgaatacccctgccggggaagcgagctggtatgttaatgctatcgagtacgtgaaaccgtaa

SEQ ID NO: 2452 - DNA, 2322 bp, Escherichia coli
atgatgaatgattcgttctgccgcattattgcgggtgaaattcaggcgcgcccggaacaggttgacgctgccgttcgcctgcttgacgaagggaataccgtgccgtttatcgcacgttatcgtaaggaaatcaccggcggtctggatgacacgcagctgcgtaatctggaaacgcgtctgagctatctgcgcgagctggaagagagacgtcaggcgatcctcaagtctatttccgagcaaggcaaactcaccgatgatctggcgaatgccatcaacgccaccctaagcaaaaccgaactcgaagacctctacctgccctacaaacctaaacgccgcacccgtgggcaaatcgccattgaagcagggcttgagccgttggccgatctgctgtggagcgatccgtcacacacgccagaagtcgccgctgcacaatatattgatgccgataaaggcgtggcagataccaaagccgcgctggacggcgcgcgctatatcctgatggaacggtttgccgaagatgccgcgctgctggcgaaagtgcgtgattatctgtggaagaacgcgcatttggtttcgacggtggtgagcggtaaagaagaggaaggggcgaaattccgcgactatttcgatcatcacgaaccgctgtccacggtgccttctcaccgcgcgctggcgatgttccgtgggcgtaacgaaggcgtacttcagctttcgctgaatgccgatccgcagttcgatgagccgccaaaagagagctattgcgagcaaatcatcatggatcatctcggcctgcgcctgaacaatgccccggcggatagctggcgcaaaggcgtggtgagctggacgtggcgcatcaaggtgctgatgcatctggaaactgaactgatgggcaccgtgcgcgaacgcgcggaagatgaagcaatcaacgtctttgcccgtaacctgcacgatctgctgatggcggcccctgccggactacgtgcaacgatgggcctcgatccgggtctgcgtaccggggtaaaagtagcggtagtcgatgcgacaggtaaactggtggcgaccgataccatttacccgcacaccggacaagccgcaaaagcagcgatgaccgttgctgcgctgtgtgaaaagcataacgttgaactggtggcgatcggcaacggtacagcttctcgcgaaaccgaacgtttctatctcgacgtgcagaagcagttcccgaaagtgaccgcgcagaaagtgatcgtcagcgaagctggcgcgtcggtttactcggcttccgagctggcagcacaggaattcccggatctcgacgtttcgctgcgtggcgcggtgtctatcgcccgtcgtttgcaggatccgctggcggagctggtgaaaatcgatccgaaatctatcggcgtaggtcagtatcagcatgacgtcagccagacgcagcttgcacgcaaactggatgcagtagtagaagactgcgtaaacgccgttggcgtcgatctcaacaccgcttctgttcctctattaacccgcgtggcgggcctgacgcgcatgatggcgcaaaacatcgtggcctggcgcgatgagaacggccagttccagaaccgtcagcaactgttaaaagtgagccgtctggggccgaaagccttcgagcagtgcgcgggcttcttgcgcattaaccacggtgataacccgctggacgcttctaccgttcacccggaagcctatccggtggtggaacgcattctggcagcaacacagcaggcactgaaagatctgatgggtaacagcagcgaactgcgtaacctgaaagcatctgactttactgatgagaaattcggtgtgccgacggtaaccgacatcatcaaagagctggaaaaaccgggtcgcgatccgcgtccggaatttaaaaccgctcagtttgccgatggcgtcgagacaatgaacgacctgcaaccgggtatgatcctcgaaggtgcggtgaccaacgtcaccaactttggcgcgtttgtcgatattggtgtgcatcaggacggcctggttcacatctcttcattgtcgaacaagtttgtggaagatccgcataccgtggtgaaagcgggcgacattgtgaaggtgaaagtgctggaagtggatcttcagcgtaaacgtatcgccctgaccatgcgtctggacgagcagcctggcgaaaccaacgcccgtcgcggtggcggtaacgatcgcccgcaaaacaaccgcccggcagccaaaccgcgtgggcgtgaagcgcagcctgccggtaatagcgcgatgatggatgcgctggcggcggcaatgggcaaaaaacgttaa

SEQ ID NO: 2453 - DNA, 228 bp, Escherichia coli
atgcaatacactccagatactgcgtggaaaattactggcttttcccgtgaaatcagcccggcatatcgccaaaaactgctttctcttggcatgttacctggctcctcttttaatgtggtgcgcgtcgctccactcggtgaccccattcatatcgaaacccgtcgtgtgagcctggtattacgcaaaaaagatctggccttattagaagtggaagcggtttcctgttaa

SEQ ID NO: 2454 - DNA, 2322 bp, Escherichia coli
atgaaaaaattaaccattggcttaattggtaatccaaattctggcaagacaacgttatttaaccagctcactggctcacgtcagcgtgtaggtaactgggctggcgttaccgtcgaacgtaaagaagggcaattctccaccaccgatcatcaggtcacgctggtggacctgcccggcacctattctctgaccaccatctcatcgcagacctcgctcgatgagcaaatcgcctgtcactacattttgagtggcgacgcagacctgctgattaacgtggtggatgcgtctaaccttgagcgtaacctgtacctgacgctgcaactgttggaactcggcattccatgcatcgtggcgctgaacatgctcgacattgccgagaagcaaaatattcgcattgaaattgatgctctgtcggcgcgtcttggctgcccggtgatcccgctggtttcaacccgtggtcgcggtattgaagcgctcaagctggcgattgatcgctataaagctaacgaaaatgtggaactggtgcattacgctcagccgctgctcaacgaagcagattcactggcaaaagtgatgccttccgacatcccgctgaaacaacgtcgctggctgggcctgcaaatgctggaaggcgatatctacagccgcgcctacgccggtgaagcgtcgcagcatctggatgccgccctcgcccgtctgcgtaatgagatggacgatccggcgctgcacattgccgatgcgcgttaccagtgcatttctgccatctgtgatgtggtaagcaacaccctgacggcagaacccagccgtttcaccactgcggtagataaaatcgtgctcaaccgtttcctcggtctgccgattttcctctttgtgatgtacctgatgttcttgctggctatcaacatcggcggggcgttacagccgctgtttgacgtcggctccgtagcactctttgtgcatggtattcagtggattggctacacgctccacttcccggactggctgactatcttcctcgcccaaggcctgggcggtggtattaacaccgtgctgccactggtgccgcagatcggcatgatgtacctgttcctctccttccttgaggactccggctatatggcgcgtgcggcgtttgtgatggaccgtctgatgcaggcgctgggcttgccggggaaatcctttgtaccgctgatcgttggtttcggttgtaacgtaccgtcggtaatgggcgcacgtacgcttgatgcaccgcgtgaacgtctgatgaccatcatgatggcaccgtttatgtcctgcggcgcgcgtctggctatcttcgcagtattcgcggctgccttcttcgggcagaacggtgcgctggcggtcttctcgctgtatatgctgggtatcgtaatggcggtgctgactggcctgatgctcaagtacaccatcatgcgcggtgaagcgacgccgtttgtcatggagctgccggtctaccatgtaccacacgttaaaagcctgattatccagacctggcagcgtctgaaaggcttcgttctgcgtgctggtaaagtgattatcatcgtcagcattttcctgagcgccttcaacagcttctcactgagcgggaaaatcgtcgataacatcaacgactcggcgctggcttccgtcagccgggtgatcaccccggtcttcaagccgattggcgtacatgaagataactggcaggcaacggttggcctgtttacaggtgccatggcgaaagaagtggtggtgggtacgctcaacaccctctacaccgcagaaaatattcaggacgaagagttcaatccggcggaatttaacctcggtgaagagctgttcagtgcggtagatgaaacctggcagagcctgaaagacaccttcagccttagcgtactgatgaaccccattgaagccagcaaaggcgacggcgaaatgggtaccggggcgatgggcgtgatggatcagaaattcggtagcgcagctgccgcatacagctacctgattttcgtcctgctgtacgtaccgtgcatctcggtgatgggggctatcgcgcgtgaatcaagccgtggctggatgggcttctccatcctgtgggggctgaatattgcttactcactggcaacattgttctatcaggtcgccagctacagccagcatccaacttacagcctggtgtgcattctggcagttatcctgtttaacatcgtggttatcggtctgctgcgccgcgcgcgtagccgggtagatgtcgaactgctggcaacgcgcaaatcggtaagcagttgctgtgcggccagcaccactggcgattgccactaa

SEQ ID NO: 2455 - DNA, 237 bp, Escherichia coli
atggcttcgctcattcaagtgcgtgatttactggcattacggggccgtatggaagcggcccagattagccagacactgaacactccgcagccaatgattaacgccatgctgcaacagctggaaagcatgggcaaagccgtgcggattcaggaagaacctgacggctgcctctctggcaattgtaaaagctgcccggaaggcaaagcctgcctgcgcgagtggtgggcgctgcgttaa

SEQ ID NO: 2456 - DNA, 894 bp, Escherichia coli
atgagcaaaaagcagagttccaccccacacgatgcgctgttcaaactctttttacgccaaccggagacggcacgcgattttcttgcgtttcatttaccggcacccattcacgcgctctgtgatatgaaaaccctcaagctggagtcgagcagctttattgatgacgatctgcgtgaaagctattccgacgtgctgtggtcggtgaaaacggaacaaggaccaggatacatctattgtctgattgaacatcaaagcacctcaaacaaactgatcgcatttcgcatgatgcgctacgccattgccgcaatgcaaaatcacctggatgccggatacaaaaccttgccgatggtggtgccattgttgttttaccacggtattgaaagcccctatccctattcgctgtgttggcttgattgtttcgccgatcccaacctggcaaggcagctttatgcctctgcatttccgctgattgatgtcaccgtcatgcctgatgatgaaatcatgcagcaccgacgtatggcactgctggagttaattcaaaaacatattcgtcaacgcgacctgatggggctggtagagcaaatggcctgcttattaagtagtggatacgctaatgacagacaaatcaaagggctgtttaattacatcttgcaaaccggcgatgcggtacgttttaacgattttatcgacggcgttgccgaacattcaccgaaacacaaggagaacttaatgactattgcggaaagattgcggcaggaagggtttcagaaaggtatacgtaccaacgccctaaatattgccaaaaccatgctggacgccggagtttctcttgaggacgttctgcgatttaccagcctgacggttgaagaccttgctgaaataaatcatcaataa

SEQ ID NO: 2457 - DNA, 771 bp, Escherichia coli
atgaataacatctggtggcagaccaaaggtcaggggaatgttcatcttgtgctgctgcacggatggggactgaatgccgaagtgtggcgttgcattgacgaggaacttagctcgcattttacgctgcaccttgttgacctgcccggcttcgggcgtagccggggatttggtgcgctatcacttgctgatatggccgaagtcgtgctgcgacaggcaccagataaagccatttggttaggctggagtctgggcgggctggtggcaagccagattgcgttaacccatcccgagcgtgttcaggcgctggtcaccgtggcgtcgtcgccttgttttagtgctcgtgacgagtggccggggataaaaccggacgtgctggcgggatttcagcagcagctgagtgatgattttcagcgtacagtggagcggttcctggcgttacaaaccatgggtactgaaacggcgcgccaggatgcgcgggcgttgaagaaaaccgtactggcgttaccgatgccggaggtggacgtgctcaatggtgggctggaaatcctcaaaacggtcgatctccgtctgccgctgcaaaacgtgtccatgccgtttttgcgattgtatggctatcttgatggtctggtgccgcgcaaagtagtgccgatgctggataaactctggccgcacagcgagtcgtacattttcgccaaagcggcccatgcgccgtttatttcgcatccggtcgagtttcatcacctgctggtggcgttgaagcagagggtgtag

SEQ ID NO: 2458 - DNA, 684 bp, Escherichia coli
atgctaacagtaccgggattatgctggctatgccgaatgccactggcgttaggtcattgggggatttgttcggtctgctctcgcgccgcccgtacagataaaacgttatgcccacaatgtggattacccgccacacactctcatcttccctgcggtcgctgcctgcaaaaaccgctgccctggcaaagactggtcacggtcgccgactatgcgccgccattaagtccgctcattcaccagcttaagttttcccggcgcagtgaaatcgccagcgccctgtcacgtctgttactattggaagtcttacacgctcgtcgcaccaccggcttgcaactgcctgatcgcatcatcagcgttccgttatggcagcgccgtcactggcgtcggggatttaatcagagcgatttgctgtgtcagccgttatcacgctggctacactgccaatgggatagcgaagccgtcacacgaacacgggccaccgcgacccagcattttcttaacgcccggctacgcaaacacaacctgaaaaatgcctttcgccttgaattgcctgtgcaaggtcgccatatggtgattgtggatgatgtcgttaccaccggaagtaccgtcgcagagattgcgcagttgcttttacgcaatggtgcggcgactgtccaggtctggtgcctttgtcgaaccttgtag

SEQ ID NO: 2459 - DNA, 576 bp, Escherichia coli
atgatccgtatttccgatgctgcacaagcgcactttgccaaactgctggcaaaccaggaagaagggacacaaatccgcgtatttgtgattaaccctggcacgcctaacgctgaatgtggcgtttcttattgtccgccggacgctgtggaagccaccgacactgccctgaaatttgacctgctgaccgcgtatgttgatgagttaagcgctccttacctggaagatgcagagatcgattttgttaccgaccagttgggttcgcagctgacgctgaaagcgcctaacgccaaaatgcgtaaagtggctgacgatgcgccgctgatggagcgcgtggagtatatgctgcaatcacagatcaacccacagcttgctggtcacggtggtcgcgtttcgctgatggaaatcaccgaagacggttacgccattttgcaatttggcggtggctgtaacggttgttccatggtcgacgtcaccctgaaagaagggatcgaaaagcagttgctgaacgaattcccggagctgaaaggtgtacgcgatctcaccgaacaccaacgcggcgagcactcttactactaa

SEQ ID NO: 2460 - DNA, 1317 bp, Escherichia coli
atgccattagtcattgttgctatcggtgtaatcttgttattactcctgatgatccgcttcaaaatgaacggcttcatcgctctcgtcctcgtggcgcttgctgttggattaatgcaagggatgccgctggataaagttattggctccatcaaagccggtgtcggcggaacgctcggtagccttgccctgatcatgggttttggtgcgatgctgggcaaaatgctggcagactgcggtggtgcacaacgtatcgctaccacgctgattgccaaatttggtaaaaaacacatccagtgggcggtggtactgaccggttttaccgttggttttgccctgttctatgaagtgggtttcgtgctgatgctgccgctggtgtttaccatcgcggcttccgcgaatattccactgctgtatgttggtgtaccaatggcggctgcactgtctgtgacccacggcttcctgccaccgcatccgggtccgactgcgattgccaccattttcaatgccgatatgggtaaaactctgctgtacggtactattctggcaatcccgaccgtgattctcgccggtccggtttacgctcgcgtgttgaaaggtatcgataagccgatcccggaaggtctgtacagcgcgaaaaccttcagcgaagaagagatgccgagctttggcgtcagcgtctggacctctctggtgccggtggttctgatggcgatgcgtgcgattgccgaaatgatcctgccgaaaggtcacgctttcctgccggtagcggagttcctcggtgacccggtaatggctacgctgattgccgtgctgatcgcgatgttcacctttggtctgaaccgtggtcgttcaatggatcagattaacgacacgctggtttcttccatcaaaatcattgcgatgatgctgttgattatcggtggtggcggtgcgttcaagcaggtgctggtagacagcggcgtggacaaatacattgcttccatgatgcacgaaaccaacatttctccgctgctgatggcctggtcgattgctgccgtactgcgtatcgcgctgggttccgcaaccgtcgcggcaatcactgcgggtggtatcgcggcaccgctgattgcaacgacgggtgttagcccggagctgatggttattgcggttggttccggtagtgtgattttctctcacgtgaacgatccgggcttctggctgttcaaagagtactttaacctgactatcggcgagaccatcaaatcctggtcgatgctggaaaccattatctcggtgtgcggtctggtaggctgtctgctgctgaatatggtgatttga

SEQ ID NO: 2461 - DNA, 2085 bp, Escherichia coli
atggaaagcaaacgtctggataatgccgcgctggcggcggggatcagccccaattacatcaatgcccacggtaaaccgcagtcgattagcgccgaaaccaaacggcgtttgcttgacgcgatgcatcaacgtaccgccacgaaagtggcggtaacgccagtcccgaatgtcatggtttataccagcggcaaaaaaatgccgatggtggtggagggcagcggcgaatatagctggctgctgaccaccgaagaaggaaagcagtacaaaggccatgtgacggggggcaaagcgttcaatctaccgacgaagctgccggaaggttatcacacgctgacgcttacccaggacgaccagcgcgcgcattgccgggtgattgtcgccccgaaacgctgttacgaaccgcaggcgttgctgaataaacaaaagctgtggggtgcctgcgttcagctttatacgctgcgatcggaaaaaaactggggtattggggattttggcgatctcaaagcgatgctggtggatgtggcaaaacgtggcgggtcgtttattggtctgaacccgattcatgcgctctatctggcaaatccggaaagtgccagcccgtacagcccgtcttctcgccgttggctgaatgtgatttatatcgacgttaacgcagttgaagatttccatcttagcgaagaggctcaggcctggtggcagttgccgaccacgcaacagacgctgcaacaggcgcgggatgccgactgggttgattactccacggttaccaccctaaaaatgacagcattacgaatggcgtggaaaggtttcgcgcaacgtgatgatgagcagatgaccgcgtttcgccagtttgttgcagagcagggcgacagcctgttctggcaggcagcctttgatgcgctacatgcccagcaagtgaaagaggacgaaatgcgctggggctggccagcatggccagagatgtatcagaacgtggattcaccagaagtgcgccagttctgcgaagaacatcgtgatgacgtcgatttttatctctggttgcagtggctggcttacagccagtttgccgcctgctgggagataagccagggctatgaaatgccgattggcttgtatcgtgatctggccgttggtgtagcagaaggtggggcagaaacctggtgcgaccgtgaactgtattgcctgaaagcgtcggttggcgcgccgccggatatcctcggcccgttggggcagaactggggattgccgccaatggacccgcatatcatcaccgcgcgtgcctatgaaccgtttatcgagctgttgcgtgccaatatgcaaaactgcggcgcattacgaattgatcacgtgatgtcgatgctgcgtttgtggtggataccgtatggcgagacggcagatcagggcgcgtatgttcactatccggtggatgatctgctctcgattctggcactcgaaagtaaacgtcatcgctgtatggtgattggtgaagatctcggtaccgtaccggtagagattgtcggtaagctgcgcagcagcggtgtgtactcctacaaagtgctctatttcgaaaacgaccacgagaagacattccgcgcaccgaaagcgtacccagagcagtcgatggcggttgcggcgacacacgacctgcctacgctacgcggctactgggagagtggggatttaacgctgggcaaaacgctggggctgtatccggatgaagtggtactgcgcggtctgtatcaggatcgcgaactggcgaagcaagggctgctggatgctctgcataaatatggttgcctgccaaaacgtgccgggcataaggcatcgttgatgtcgatgacaccgacgctgaatcgtggcttacagcgctacatcgccgatagcaacagcgccctgttagggctccagccggaagactggctggatatggcagatccggtaaatattcccggcaccagttaccagtataaaaactggcgacgtaaactttccgcaacgcttgagtcgatgtttgccgatgatggtgtgaacaaattgctgaaggatttggacagacggcgcagagcggcagcgaagaagaagtag

SEQ ID NO: 2462 - DNA, 2394 bp, Escherichia coli
atgtcacaacctatttttaacgataagcaatttcaggaagcgctttcacgtcagtggcagcgttatggcttaaattctgcggctgaaatgactcctcgccagtggtggctggcagtgagcgaagcactggccgaaatgctgcgtgctcagccattcgccaagccagtggcgaatcagcgacatgttaactacatctcaatggagtttttaattggtcgcctgacgggcaacaacctgttgaatctcggctggtatcaggatgtacaggattcgttgaaggcttatgacatcaacctgactgacctgttggaagaagagatcgacccggcgctggggaacggtggtctgggacgtctggcggcgtgcttcctcgactcaatggcaactgtcggtcagtctgcgacgggttacggtctgaactatcaatatggtttgttccgccagtcttttgtcgatggcaaacaggttgaagcgccggatgactggcatcgcggtaattacccgtggttccgccacaacgaagcactggatgtgcaggtagggattggcggtaaagtgacgaaagacggacgctgggagccggagtttaccattaccggtcaagcgtgggatctccccgttgtcggctatcgtaatggcgtggcgcagccgctgcgtctgtggcaggcgacgcatgcgcatccgtttgatctgactaaatttaacgatggtgatttcctgcgtgccgaacagcagggcatcaacgcggaaaaactgaccaaagttctctatccaaacgataaccatactgccggtaaaaagctgcgcctgatgcagcaatacttccagtgtgcctgttcggtagcggatattttgcgtcgccatcatctggcggggcgtaaactgcacgaactggcggattatgaagttattcagctgaacgatacccacccaactatcgcgattccagaactgctgcgcgtgctgatcgatgagcaccagatgagctgggatgacgcctgggccatcaccagtaaaacttttgcttacaccaaccataccctgatgccagaagcgctggaacgctgggatgtgaaactggtgaaaggcttactgccgcgccacatgcagattattaacgaaattaatacacgctttaaaacgctggtggaaaaaacctggccgggcgatgaaaaagtgtgggccaaactggcggtggtgcacgacaaacaagtgcatatggcgaacctgtgtgtggttggcggtttcgctgtgaacggtgttgcggcgctgcactcggatctggtggtgaaagatctgttcccggaatatcaccagctatggccgaacaaattccataatgtcactaacggtattaccccacgtcgctggatcaaacagtgcaacccggcactggcggctctgttggataaatcactgaaaaaagagtgggctaacgatctcgatcaactgatcaatctggaaaaattcgctgatgatgcgaaattccgtcagcaatatcgcgagatcaagcaggcgaataaagtccgtctggcagagtttgtgaaagttcgtaccggtattgagatcaatccacaggcgattttcgatattcagatcaaacgtctgcatgagtacaaacgccagcatctgaatctgctgcatattctggcgttgtacaaagaaattcgtgaaaacccgcagtctgaccgcgtaccgcgcgtcttcctcttcggcgcgaaagcagcaccgggctactacctggcgaaaaatattatctttgcgatcaacaaagtggctgacgtgatcaacaacgatccgctggttggcgacaagttgaaggtggtgttcttgccggattattgtgtttcggcggcggaaaaactgatcccggcggcggatatctccgaacaaatttcgactgcaggtaaagaagcttccggtaccggcaatatgaaactggcgctcaatggtgcgcttactgtcggtacgctggatggtgcgaacgttgaaatcgctgagaaagtcggtgaagaaaatatctttatttttggtcataccgtggaacaagtgaaggcaattctggccaaaggctacgacccggtgaaatggcggaagaaagataaggtgctggacgcagtattgaaagagctggaaagcggtaaatacagcgacggcgataagcatgccttcgaccagatgctgcacagtatcggcaaacagggcggcgatccgtatctggtgatggcagatttcgccgcttatgtagaggcacaaatgcaggtggatgtgctgtaccgcgaccaggaggcctggactcgcgcggcgatcctcaataccgcccgctgcggtatgtttagctcggatcgctctattcgcgattatcaggctcgtatctggcaggcaaaacgctaa

SEQ ID NO: 2463 - DNA, 2706 bp, Escherichia coli
atgctgattccgtcaaaattaagtcgtccggttcgactcgaccataccgtggttcgtgagcgcctgctggctaaactttccggcgcgaacaatttccggctggcgctgatcacaagtcctgcgggctacggaaagaccacgctcatttcccagtgggcggcaggcaaaaacgatatcggctggtactcgctggatgaaggtgataaccagcaagagcgtttcgccagctatctcattgccgccgtgcaacaggcaaccaacggtcactgcgcgatatgtgagacgatggcgcaaaaacggcaatatgccagcctgacgtcactcttcgcccagcttttcattgagctggcggaatggcatagcccactttatctggtcatcgatgactatcatctgatcactaatccagtgatccacgagtcaatgcgcttctttattcgccatcaaccagaaaatctcacccttgtggtgttgtcacgcaaccttccgcaactgggcattgccaatctgcgtgttcgtgaccagctgctggaaattggcagtcagcaactggcatttacccatcaggaagcgaagcagttttttgattgccgtctgtcatcgccgattgaagctgcagaaagcagtcggatttgtgatgatgtttccggttgggcgacggcactgcagctaatcgccctctccgcccggcagaatactcactcagcccataagtcggcacgccgcctggcgggaatcaatgccagccatctttcggattatctggtcgatgaggttttggataacgtcgatctcgcaacgcgccattttctgttgaaaagcgccattttgcgctcaatgaacgatgcactcatcacccgtgtgaccggcgaagaaaacgggcaaatgcgcctcgaagagattgagcgtcaggggctgtttttacagcggatggatgataccggcgagtggttttgctatcacccactgtttggtaacttcctgcgccagcgctgccagtgggaactggcggcggagctgccggaaatccaccgtgccgccgcagaaagctggatggcccagggatttcccagcgaagcgattcatcatgcgctggcggcaggcgatgcgctgatgctgcgcgatattctgcttaatcacgcctggagtttgttcaaccatagcgaactgtcgctgctggaagagtcacttaaggccctgccgtgggacagtttgctggaaaatccgcagttggtgttattgcaggcgtggctgatgcaaagccagcatcgctacggcgaagttaacaccctgctggcccgcgctgaacatgaaatcaaggacatcagagaaggcaccatgcacgcagaatttaacgctctgcgcgcccaggtggcgattaacgatggtaacccggatgaagcggaacggctggcaaaactggcactggaagagctgccgccgggctggttctatagccgcattgtggcaacctcggtgctgggtgaagtgttgcactgcaaaggcgaattgacccgctcactggcgttaatgcagcaaaccgaacagatggcacgccagcacgatgtctggcactacgctttgtggagtttaatccagcaaagtgaaattctgtttgcccaagggttcctgcaaaccgcgtgggaaacgcaggaaaaagcgttccagctgatcaacgagcagcatctggaacagctgccaatgcatgagtttctggtacgcatccgtgcgcagctgttatgggcctgggcacggctggatgaagctgaagcgtcggcgcgcagcgggattgaagtcttgtcgtcttatcagccacagcaacagcttcagtgcctggcaatgttgattcaatgctcgctggcccgtggtgatttagataacgcccgtagccagctgaaccgtctggaaaacctgctggggaatggcaaatatcacagcgactggatctctaacgccaacaaagtccgggtgatttactggcaaatgaccagcgataaagccgccgctgccaactggttgcgtcatacggctaaaccggagtttgcgaacaaccacttcctgcaaggtcaatggcgcaacattgcccgtgcacaaatcttgctgggcgagtttgaatctgcggaaattgtcctcgaagaactcaatgaaaatgcccgcagtctgcggttgatgagcgatctcaaccgtaacctgttgctgcttaatcaactgtactggcaggccggacgtaaaagtgacgcccagcgtgtgttgctggacgcattaaaactggcgaatcgcaccggatttatcagtcattttgtcatcgaaggcgaagcgatggcgcaacaactgcgccagcttattcaactcaatacgctgccggagctggaacagcatcgcgcacagcgtattctgcgagaaatcaatcaacatcatcggcataaattcgcccatttcgatgagaatttcgttgaacgtctgctaaatcatccggaagtgccagagctgatccgcaccagcccgttgacccaacgtgaatggcaggtcctggggctgatttactccggttacagcaatgagcaaattgcaggcgagctggaagtagcggcaaccaccatcaaaacgcatatccgcaatctgtaccaaaaactcggtgtcgcccaccgtcaggccgcggtacaacacgcgcagaaactgctgaagatgatgggatatggagtgtga

SEQ ID NO: 2464 - DNA, 1017 bp, Escherichia coli
atgaaaaggatgattgcgctggatggcgcacagggcgaaggcggcgggcagatcctgcgctcggcgctgagcctgtcgatgataaccggccagccatttaccatcaccggcattcgtgccgggcgggcgaaaccggggctgttgcgccaacatctgaccgcggtaaaagcggctgcggaaatttgtagggcaacggtggaaggcgcggagctggggtcgcagcgtctggtcttccggcccggtaccgtgcgtggcggcgattaccgctttgctatcggtagtgccggaagcagcacgctggtgctgcaaacggtgctacccgcgctgtggtttgctgatgggccttcgcgtgttgaagtgagcggcggcaccgataacccgtcggcaccgcctgcggattttatccgccgggtgctggagccgctgctggcgaaaatgggcattcatcagcaaaccacattattacgccacggtttttatcctgctggaggcggggtggtggcaacggaagtctcgccggtggcattgtttaacaccttgcaacttggcgagcgcgggaacattgtgcagatgcgtggagaggtgctattagctggcgtgccgcgccatgtcgctgagcgtgaaatcgctacactggcggggagtttttccctgcatgagcaaaatattcataacctgccgcgtgaccagggaccgggtaataccgtttcgcttgaagtcgaaagtgaaaatatcaccgaactcttttttgtcgtcggtgaaaagcgcgtcagtgccgaagtggtggctgcgcagttagtgcaagaggtgaaacgttacctggcgagccctgcggcggtaggggagtatctcgctgaccagctggtactgccaatggcgttagcgggcgcgggagaatttacggtcgcccatccctcatgccatctgctgaccaatattgcggtggtggagcgtttcttgccagtgcggtttagtctggtggaggcggatggcgtaacgcgggtgagcattgaatga

SEQ ID NO: 2465 - DNA, 1227 bp, Escherichia coli
atgaattacgaattactgaccactgaaaatgctccggtaaaaatgtggaccaaaggcgtgccggtagaagccgatgcgcgtcagcaacttattaataccgcgaagatgccatttattttcaaacatattgcggtaatgcctgatgtacacctgggtaaaggttccaccattggtagcgtgatcccgaccaaaggggcgattattccggcggcggtgggcgtggatattggctgtggaatgaacgcactgcgtaccgcgttaacggcggcggacctgcctgaaaacctggcagagctgcgtcaggcgattgaaacggccgtaccgcacggacgtactaccgggcgttgtaaacgtgataaaggcgcatgggaaaatccgcctgttaacgtcgatgcgaaatgggctgagctggaggccggttatcagtggttaacgcaaaaatatccgcgtttccttaacactaataactataaacacctgggaacgctgggtacgggtaaccactttattgaaatttgccttgatgagtcggatcaggtgtggattatgctgcactccggttcacgcggaattggtaacgccatcggaacttattttatcgatctggcgcaaaaagagatgcaggaaacgcttgaaacgttgccatcgcgtgacctggcgtactttatggaaggtacggaatactttgatgattacctgaaagccgtggcctgggcgcagctttttgccagccttaaccgcgatgcgatgatggaaaacgtggtaacggcgttgcagagcgttacgcagaaaacggtaaaacagccacaaacgctggcgatggaagagatcaactgtcaccacaactatgtgcaaaaagaacagcactttggcgaagagatctatgtgacgcgtaaaggcgcggtgtctgcgcgtgctggtcaatatggaattattcccggttcgatgggggcgaaaagctttatcgtccgtgggctgggaaatgaagagtcgttctgttcgtgcagccacggtgccgggcgggtaatgagccgtactaaagcgaaaaaactgttcagtgtggaagatcaaatccgtgccaccgcgcatgtggagtgccgtaaagatgccgaggtgatcgacgaaatcccgatggcgtataaagatattgatgcggtgatggcggcacaaagcgatctggtggaagttatctataccctgcgtcaggtggtgtgcgtaaaaggataa

SEQ ID NO: 2466 - DNA, 1599 bp, Escherichia coli
atgcgtaaaacagtggcttttggctttgtcggaacggtgctggattatgccgggcgcggcagtcagcgctggtcaaaatggcgtccgacactctgtctatgccagcaagaatcgttagttatcgatcggctggaattattgcacgacgcccgctcgcgctcgctattcgaaacgcttaaacgcgatatcgccagcgtttcgccagaaacagaagtggtgggcgttgagatagaactgcataacccttgggatttcgaagaggtttacgcctgcctgcatgatttcgcccgtggttacgcgttccagccagaaaaagaagactatttaattcacatcaccaccggcacccacgtcgcgcagatttgctggtttctgctggcagaagcgcgttacctgcccacccggttgatacaatcttcaccaccgcgcaaaaaagagcggcccgatagccctggcgcagtgacgattatcgatctcgatttaagccgttataacgccatcgccagccgctttgccgaggaacgccagcaaacgcttgattttcttaagtccggcattgccacgcgtaattcccacttcaaccgcatgattgagcagattgaaaaagtggcgataaaatcccgcgcaccgatcctgcttaacggcccgaccggtgcaggtaagtcatttctggcacgacgcatcttcgagctaaaacaggcgcggcatcagtttagcggcgcgtttgtggaagtgaactgcgccaccctgcgcggcgataccgccatgtcgacgctgtttggtcatgtgaaaggcgcgtttaccggggcgcgggaatcgcgtgaaggattattacgcagcgccaacggcggaatgttgtttcttgatgagattggcgaactgggcgcagacgaacaggcaatgctgctgaaagccattgaagagaaaaccttttacccgtttggcagcgatcgccaggtgagcagtgattttcagcttatcgccggaacggtgcgcgatttgcgccagttggttgccgaaggcaaatttcgtgaagacctgtacgcgcgaataaatctctggaccttcaccttgccaggattacgccaacgccaggaagatattgaaccgaacctgaattatgaagtggagcgccacgcctcactcactggcgacagcgtgcgttttaacaccgaagcgcggcgtgcctggctggcctttgcgacctctccccaggcaacatggcgcggtaactttcgcgaactttctgccagcgtcacgcggatggccacctttgccactagcggacgcatcacactggatacggtggaagatgagatcaaccgtctgcgctataactggcaggagagtcgcccctccacgcttacggcgttgctgggcgcagaggcagaaaacatcgatctcttcgaccgtatgcaactggaacacgttatcgctatctgccgccaggcaaagtcgctttctgctgccggacgtgaactgtttgacatttcgcgccagggtaaagccagcgtcaatgacgcggatcggctacgcaaatacctggcgcgttttggtctgacatgggaagcaatgcaggatcagcacagctccagttga

SEQ ID NO: 2467 - DNA, 759 bp, Escherichia coli
atgaaacaaacacaacgtcacaacggtattatcgaactggttaaacagcagggttatgtcagcaccgaggagctggtagagcatttctccgttagcccgcagactattcgccgcgatctcaacgagctggcagagcaaaacctgatcctgcgccatcatggcggtgcggcgctgccttccagttcggttaatacgccgtggcacgatcgcaaggccacccagaccgaagaaaaagagcgcatcgcccgcaaagtggcggagcaaattcccaatggctcgacgctgtttatcgatatcggcaccacgccggaagcggtggcgcacgcgctgcttaatcacagcaatttacgcattgtgaccaacaatctcaacgtcgctaacacgctgatggtaaaagaggatttccgtatcattcttgccggtggcgaattacgcagccgcgatggcgggatcattggcgaagcaacgctcgattttatctcccagttccgcctcgatttcggcattctggggataagcggcatcgatagcgacggctcgctactggagttcgattaccacgaagttcgcaccaaacgcgccatcattgagaactcgcgccacgttatgctggttgtcgaccactcaaaatttggccgtaacgcaatggtcaatatgggtagcatcagcatggtcgatgctgtctacaccgacacgatgccgcctgcgagcgtgatgcaggtgctgaaggaccatcatattcaactggagctgtgctga

SEQ ID NO: 2468 - DNA, 831 bp, Escherichia coli
atgttgatgattacctcttttgctaacccccgcgtggcgcaggcgtttgttgattacatggcgacgcagggtgttatcctcacgattcaacaacataaccaaagcgatgtctggctggcggatgagtcccaggccgagcgcgtgcgggcggagctggcgcgttttctcgaaaacccggcagatccgcgttatctggcggccagctggcaggcgggccataccggcagtggcctgcattatcgccgttatcctttctttgccgccttgcgtgaacgcgcaggtccggtaacctgggtgatgatgatcgcctgcgtggtggtgtttatcgccatgcaaattctcggcgatcaggaagtgatgttatggctggcctggccattcgatccgacgctgaagtttgagttctggcgttacttcacccacgcgttaatgcacttctcgctgatgcatatcctctttaacctgctctggtggtggtatctcggcggtgcggtggaaaaacgcctcggtagcggtaagctaattgtcattactctcattagcgccctgttaagcggctatgtgcagcaaaaattcagcgggccgtggtttggcgggctttctggcgtggtgtatgcgctgatgggctacgtctggctacgtggcgaacgcgatccgcaaagtggcatttacctgcaacgtgggttaattatctttgcgttgatctggattgtcgccggatggtttgatttgtttgggatgtcgatggcgaacggagcacacatcgccgggttagccgtgggtttagcgatggcttttgttgattcgctcaatgcgcgaaaacgaaaataa

SEQ ID NO: 2469 - DNA, 327 bp, Escherichia coli
atggatcagttcgaatgtattaacgttgccgacgcgcaccagaagttgcaggaaaaagaggcggtgctggtcgatattcgcgatccacagagtttcgcaatggggcatgcgacccaggctttccatttaactaacgacacactgggcgcgtttatgcgtgataacgactttgacacaccggtgatggtgatgtgttatcacggcaatagcagcaaaggcgcggcgcagtatctgctgcaacagggctacgatgtggtctacagcattgatggcggttttgaagcctggcagcgccagtttcccgcagaggtggcgtacggcgcgtaa

SEQ ID NO: 2470 - DNA, 1506 bp, Escherichia coli
atggaaaccaaagatctgattgtgataggtggcggcatcaatggtgctggtatcgcggcagacgccgctggacgcggtttatccgtgctgatgctggaggcgcaggatctcgcttgcgcgacctcttccgccagttcaaaactcattcacggtggcctgcgctaccttgagcactatgaattccgactggtcagcgaggcgctggctgaacgtgaagtgctactgaaaatggccccgcatatcgccttcccgatgcgttttcgcctgccgcatcgtccgcatctacgcccggcgtggatgattcgcattggtctgtttatgtacgatcatctgggtaagcgcaccagcctgccgggatcaaccggtttgcgttttggcgcaaactcagtgttaaaaccggaaattaagcgcggattcgaatattctgactgttgggtagacgacgcccgtctggtactcgccaacgcccagatggtggtgcgtaaaggcggtgaagtgcttactcgtactcgtgccacgtctgctcgccgcgaaaacggcctgtggattgtggaagcggaagatatcgataccggcaaaaaatatacatggcaggcgcgcggcctggttaatgctaccggcccgtgggtgaaacaatttttcgacgacgggatgcatctgccttcgccttatggcattcgcctgatcaaaggcagccatattgtggtgccgcgtgtgcatacccagaagcaagcctacattctgcaaaacgaagataaacgtattgtcttcgtgatcccgtggatggacgagttttccatcatcggcaccaccgatgtggaatacaaaggcgatccaaaagcagtgaagattgaagagagtgaaatcaattacctgttgaaagtgtataacacgcactttaaaaagcagttaaaccgggacgatatcgtctggacctactccggcgtgcgtccgctatgtgatgatgagtccgactcgccgcaggccattacccgtgattacacccttgatatccatgatgaaaacggcaaagccccgctgctgtcggtattcggcggtaagctgaccacctaccgcaaactggcggagcacgcgctggaaaaactgacgccgtattatcagggcattggtccggcgtggacgaaagagagcgtgctgccgggtggtgccattgaaggcgaccgtgacgattacgccgcccgcctgcgccgccgttacccattcctgaccgaatcactggcacgtcactacgcgcgcacttacggcagcaacagcgaactgctgctcggcaatgcaggggcgataagcgacctcggtgaagatttcggtcatgagttctacgaagcggagctgaaatatctggtggatcacgaatgggtccgccgcgccgacgatgccctgtggcgtcgcacaaaacaaggcatgtggctgaatgcggaacaacaatctcgtgtgagtcagtggctggtggaatatacgcagcagaggttgtcgctggcgtcgtaa

SEQ ID NO: 2471 - DNA, 606 bp, Escherichia coli
atgattaaattccggctttatattccccctgtaattctcggttttgttatcgtaccattattggtatggccgacggttattgccttagccgtacttatattcacgttaacttttctggcggaaataatattctcctttccgctcctggttgtgcgtatttctcttcaggaattacaacttgagttattggttgaatatgcactttttttcagtgtaatgtgtggcatcggttggcaattctcccgcagaacgcctcctgaattaaaaaacaggttacattgctggctggtcttttctccggtctatttttggttaattctctcgaacttcattctttatatttctccagagaaatcagcgttgctggaaaatatccgaaatttctttctgacgtttgtctggcttcccctgaatttttcccctttttggccgcagccgtggactgattttgttggcccgattagtgcacagcttggttttgcgttgggatattattgtcagtggcgtagcaaaaatagaagccataggaagaagtggggcgattgggtaacgtgcttaagtttggcgattttatctctggggccgttattcaattattcacaatga

SEQ ID NO: 2472 - DNA, 768 bp, Escherichia coli
atgcaccccactcctgccatgcaggcattaattgagcagatatatcatatttttcgtcgttatccggcgccgcagcaatttgtggtttgttgtgaatattgtctgagtcaacaggaacaaaaagcattacggaatacatcgttgcgagcgattccttattccttaatcaatgcctggaatagtagtccaggacctgatccgcaaaacagcgatgaggttcgttattttctgcctcgtttactggagtttgttgcgcaggggcaatttgacaatattcacgaagtattttctctacggcgtatcaaccttgccagtaaagaaaactggcgtgaggatgaacgggaaatattgcagcaatttgcttgccagtatatgactgattgggtatccggggatgaggctgtcgaattacagtacaagctggaaatgtttttccgtgccgatatcgctctttcgccattgcttgatgccactatttcagttcccggattttggtcggcagcgtctcttgcctgtttattgaatacgtatcgtgacggttatatcagagataaccaggacgatatcgataaagccattaccgcccaaatcaatgcctgggccttcaacaatcaatccatcctgaaagaacgcgcgcggcaggcgattgagaacccgcttaagcagcccgaacagggcacacagtatcagatatgggaagacgactggatgattgatgagtgtttatgcgcgatgtatgacgcatcatccgaatcaccaggaaaataa

SEQ ID NO: 2473 - DNA, 711 bp, Escherichia coli
atggaattagttgatacgttatttgcaagcctctccggtactgatccattcactggcgtggatattacgattgccaactgcaaatcaacatactgggatgaaggcattgttcagcaactcattaaccaggtcctggatgaaggggaaaagttcgccggtgctgccggtcttgagggattatctcgatatgatgtcacattaaatattggtttaacgtccagcaatgtatggccgggattttccttcgataccgccaccattagccgtctttgtgcctgtggtgctgactttggatttgacctctatatcagtgatgtaccagatgttcaatgtgatctgaacacgacaaatgacttcaccgtacaatttacggcgatgttcaacccggatgagcgggtgatcatagcaaagcgcctacttaaaaaatgtgacgcctggattgaggatgtttatatctttcaggtgtttaaagaagcctggcaatttcaaaacgataacagtttacgcggatttcgcgataagcaggctgaactgaaactctacgcgcgtcattactcagtggaaaattgcacagaggaaagctgttgggactgtaattattgcattcggcccagcttttccctctctcgtagtgccattattcgcctgaacgcggcgaatgccctttttatctatcagccgtttatgcacgatcagcgggcgagggggtaa

SEQ ID NO: 2474 - DNA, 1122 bp, Escherichia coli
atgattacttatgccggatataaagtgaaaattatttttataatttttttattcttagtttgccatgtcgtagcctatgctgaaatgggccgggatcgtgaattttgctatcctgggactccagaaaacaatactaccccagcgacctttttttatgattttggcacagttattatttcagatgttaacaacaattcagccggtactgttttaccatctcaaaactggaaaatagatcggtataaagcttactgtaattctcttgatgattatgagatttatttttcaggtgtttcaggaatagatccttcaggtgcttcaggtaattttcagggcgcagaaatatttattcctgttacgcatgaaatatctatttcaacacatataaagctctacaatagaaatgggacaatgacagataaaacagtaccattcgagaactatagtactaattatcctgctgacagaagtaaagcaagctactggtcttcaggaacagaaggctatattaaaattaggttagataaaaaaatcatctctgatatctctctgaacaatgtacttttagtttcattgtatgccagtcagcggcaaacggaacatgggccagtaccattatttaatgcctggatcagtaacctggatattcaggttccgcaaggttgcacaattaatgagggtacgagttttactgttaatatgccggatgtgtgggccagtgaattgagccgggctggtgctggagcgaagcccgctggtattactcctgtagcaaccactattccgataaactgtacgaataaagatacagatgcggtaatgacgttggtattcgacggtaacatttcagctacacgtgataccaatgggaaacaaagtattattcaggcacaagataatcctgatgttggtattatgattatggatagtcagcaaaactccgtagatttaaatgctctggcaacatcagtaggcgttccgttcagattggtggaaaaccaggctgtttctgcgcaaactgctgatgttactttcctggctttacctgttagtacaactggaaaagtgcctgcggcaggtcgttataatgcactggctatattgcgagtggaatatcagtaa

SEQ ID NO: 2475 - DNA, 780 bp, Escherichia coli
atgcgtcagtatcgtttatggttagctatgattaaggttaccatagtattattcctcctgatatttcctactgcacaagcaggattagtaatcggtggaacgcgttttgcgtatccggaaaataagtcctcaatatctgttgaactcaaaaacacttcagacagagatatgttagtcaaggttgaagtctcccctgatgatgctcgtcagttgacgggaacggttgaatctttgccctcattttctggaacggtatttatcgcaactccgccactgtttgttttgaagcctgacaaaaatacaaaaataagaattaatcgtgtcggtggtagtttacctgccgaccgggaaagtttatttatacttaatgttgctgcattaccatcgttggaaaatagtcatccaaccaaaactgataatcaattgcaaatagcggtccgcaatcgtatgaaaatattctatcggccatcaaatttgtctgaagaccccaatatgtcatatcaaaaattgcgctgggtacgaaaaaatgaaattgttaccgtttataatccaggccccaggtatgtgacactctataaccttcatgttgatggtaaagttatgtatggtggtatgatcgcaccatttagccaccgccaaaaatcatggtgtaaatcgcaaggggtttgtgaaataacatggcagacattggacatttataataatgtattgcctgcatggaaagtaaatatgaatccgttgcagatggatgtgttaggctcacaagttaaaacggattag

SEQ ID NO: 2476 - DNA, 573 bp, Escherichia coli
atgccgggcaagcaaatgctctgttgtattttgatatcgattatcagtgagggagatatgaagatattcattagtttatttttgtttataatatcaacaaattcttttgctgatgatatcactcatgccggagtggttcgtattgaagggttaattaccgaaaaaacctgtattatttctgatgagtcaaaaaattttacagttaatatgccagacgtacccagtagttcggtaaggagtgcaggagatgttactgaaaaggtttatttttccataacgttaacccgctgtggtagtgatgttggcaacgcgtatataaagtttaccggcaatacagtttcagaagatgccagtttatataagctggaagacggctcggtagaggggcttgcactcacgatttttgataagaacaaaggcagtattagtaatgatgttaaaagcatcggtttttcacttacaccatcggttgataatatattgcatttttttgcggcctacaaagcattaaaaaataatgtccaaccaggggatgcaaatgcgtcagtatcgtttatggttagctatgattaa

SEQ ID NO: 2477 - DNA, 564 bp, Escherichia coli
atgaatttaatattctctaaatattctgtattttttattcttttcgttttttttgcttttccgctctcagggcaggccaatgattcagttgttgttacatttactgggattttgttggcaaaaagctgtgacattactaccggaagtaaagatcagtcggtaaaaatgggcacttatgacgctaatgaatttttaaatgtaggtgatgtttctccgagtcaaacgtttacgattaatgtacaaggatgcccgactgcaaaaagtactgtttatagttctggtgtgagcgccaatgtgcggtttactggtgatgcagatgccattaatagcgcattactgcgtctctccgccggtgcagatagtgcgactggactgggaatagaaatattggataacaatgatgtggcgattgccattaatggtgaatcaggttttcgtgatttagtgttaaatgaaaacggtgatgctaatttgacgtttaaacttcgctataaatcaactcaggaaaatgtacatgccgggcaagcaaatgctctgttgtattttgatatcgattatcagtga

SEQ ID NO: 2478 - DNA, 2595 bp, Escherichia coli
atgaacctaaagctcaaaagatgcgaatattggatggcggcacaaaagcagatgaaacgggttgtaccgcttcttctggttattatgcctgcatgttcaatcgcgggaatgcgctttaaccctgcttttctgtcgggtgatactgaagctgttgctgacttatcccgcttcgagaaagggatgacttatcttcctggtagctatgaagtcgaagtttgggtcaatgattcccctttactctctcgtactgtaacttttaaagcagacgatgagaatcaactgattccctgcctttcacttgctgacttattaagccttggaattaacaaaaatgcgctgccagagcaggctttggcttcatctgaaaatagttgccttgatttgcgtatctggtttcctgatgtgcattacatgccggagctggatgcacagagacttaaactgacctttccgcaggcgataataaaacgtgatgcccgcggatatattccaccagaacagtgggataacggtattacagcttttttgctgaattataacttttctggtaataacgatcgtggtgattactcttcaaataactattatttaaaccttcgcgctgggatcaatattggtgcatggcgttttcgcgattattcaacctggagtcgtgggagtaattcagcaggtaaactggagcatatcagtagtacgttgcagcgcgttattattcctttcagaagtgaattaacgctaggagatacatggtcatcatcagatgttttcgacagtgttagtattcgtggtataaaactggaatctgacgagaatatgttgccagatagtcaaagtggtttcgctcccacggtgcgcggaattgcgaaaagtcgcgctcaggtaacaatcaaacagaatggttatgtcatttatcaaacctatatgccgccgggaccgtttgagattagcgatcttaacccgacatcatctgcgggagatctggaagttaccatcaaagagtctgataattcagaaactgtctataccgtaccttatgccgctgtccccatcctgcaacgagaaggtcattcaaaatattctactacggttggccaatatcgaagcaatagctataaccagaaaagtccttatgtatttcagggggaattaatttggggtttaccctgggatattacggcttatggtggggcacaattctctgaggattaccgggcgttggcgctcggccttggcctgaatctgggtgtatttggtgcaacatcgtttgatgttactcaggctaacagttcgcttgtggatgggagcaaacatcaagggcaatcttatcgttttctttattccaaatcgttagttcagacaggaacagcattccatattattggctatcgttattcaacccagggcttttacactttaagtgatacgacataccaacaaatgtcagggactgttgttgatccaaaaacgttagatgataaagattacgtttataactggaatgatttttataacttgcgttatagcaaacgtggaaaatttcaggctagtgtatcgcaacctttcggtaactacgggtctatgtatttatcggctagtcagcaaacatactggaatactgataaaaaagattctttataccaagttggttataacaccagtattaagggtatctatctaaatgttgcgtggaattacagtaaatcaccagggacaaatgcggataaaattgtctcgctaaatgtctcattacctataagtaattggttatcttccacgaatgatgggcgctcatcatcgaatgccatgactgcaacgtatggttatagtcaggataaccacggacaggtaaaccaatatacgggggtatctggttctctgttggagcagcataatctcagttataacatacaacatggttttgctaatcaggataatagcagtagtggttctgttggtgttaattatcgtggggcatatggttccttgaattccgcctacagttacgataatgaaggtaatcaacaaataaactatggcatcagtggtgctcttgttgtacatgaaaatggtcttacgttgagtcaaccattaggtgaaactaatgttttgataaaagcgcctggagcgaataatgtggatgtccagcgggggacaggaatatccactgactggcgtggatatgcagttgttccttatgcaacagaatatagacgtaataacatttcattagatcctatgtcaatgaatatgcatactgaactggatatcacttccactgaagttattccgggaaaaggtgcgttagttcgtgcagagtttgctgctcatatcggtattcgtggtttgttcacagttcgttatcgtaataaatcagtcccattcggtgctacagccagcgcacagattaaaaatagtagtcaaattaccgggattgtcggcgataatggacaactttatctctcaggattgcctttagaaggtgttattaatatccagtggggagacggtgttcagcaaaaatgtcaggctaattacaagctccctgaaacagaactggataatcctgttagctatgcaactctggagtgccgctaa

SEQ ID NO: 2479 - DNA, 753 bp, Escherichia coli
atgaaatgtattattggaaataaaaaatgggtttgtggattcagggatgaattaaaagtatcacaaaatattatacgctcagggattctttttttactatcgatattatttattaataatgcgtccgcgggcgggtttggccttggcgtaacgcgattgatttatccggcagaaagtaagcaaataacactcagtgtgcaaaatagcggtgacaacaccagttatttaattcaatcatgggttgatgacagtaaaacggaaaaaaagagccaggattttgttatcactcctcccctctttatgttgccaacgcgtaaagaagcttcattacgtatcatgtttcttggtaagactaatttgccgaccgatcgtgaaactttgtattggatgaatgttaaagcaattccgccaacagatgagaaaaatacacagaagaataccttacagttggcattacaaaacaaaatcaagctattttatcgcccggaaaatctacctgtgcaaccaggaaaagcacgaaatatgttgcggtttaagtatgagggcaaacaactaaaagttatcaatccttcgccttattacctgacactgacaggaattaaagtacaagggagtaaattgcccaatacgtttgtaccaccgaaaagcgatattacggtctcgtcgccagtgacgttggctggtgaaattacttatcaaacaattaatgactttggcgctacgacggagcggcagaaaggaataatgcagtaa

SEQ ID NO: 2480 - DNA, 705 bp, Escherichia coli
atgaaattcaatttatctaatttatccgcagtattactggcatcaggtatgctgatgtctactgcggtaaccgcagcacccggcgatgcaacacaatttggtggggcggatactgactggagcaccgttgattatcccaggctcactgatatggatgacaacgttgattcaatgggggggaaaatccgctttactggccgtgtagtgaaagctacctgtaaggtcgcaaccgattcaaaacagattgaagttgtcctgccggttgtgccttccaaccttttcactggtatcgacgtagaagcacagggggcgagcaaccagaccgatttcaatattaatctgaccgaatgtagcaatacagaggatcagaaaattgagttccgctttaccggtaccgcagatagcgctaataaaacgctcgctaacgaagtagaaggatcaacggatgctgacaacaacggcaatgcgggggcgactggtgtagggattcgaatttactccaaaggtacgacgaataatggtctgattaacctgaatactactgcggcagagggtagcgcctccaccgccgcttatacaattccaggaaatgctacgacccatgatttcagcgcggcctttactgcaggttatgctcaaaacggtagcactgttgcacctggtgtagttaagtcaacagcaagttttgttgtgctgtacgagtaa

SEQ ID NO: 2481 - DNA, 2448 bp, Escherichia coli
atgaatgctccgtttacatattcatcgcccacgcttagcgtagaagctcttaagcactctatcgcttacaagctgatgtttacgattggcaaggatccggtcgtcgccaataaacatgaatggctgaacgcaacgttatttgctgtgcgcgatcgtctcgtggagcgctggttacgctcaaaccgtgcccagttgtcgcaagaaactcgtcaggtttactacctgtcgatggagtttttgattggccgtacgctttccaacgccatgttgtcgctaggaatttacgaagatgtacagggcgcactggaagcgatgggattaaatctcgaagagctgattgatgaagaaaatgacccgggcctcggtaacggtggcctgggccgtctggcggcttgcttcctcgattctctggcgacgttagggttgccggggcgcggttacggcatccgctatgactacggtatgttcaagcagaacatcgttaacggtagccagaaagagtcgcctgactactggctggaatacggtaacccgtgggaattcaaacgccacaacacgcgctataaagtccgttttggcggtcgcattcagcaggaaggtaaaaaaacgcgctggattgaaaccgaagagattctgggagtagcttacgatcagataatcccaggttacgacaccgacgcgaccaacacgttgcgtttgtggagtgcccaagccagtagcgaaattaacctcggtaaattcaaccagggcgactacttcgcggcagtggaagataaaaaccactccgagaacgtatctcgcgtactgtatccggacgactccacctactccgggcgtgagctacgactgcgtcaggaatacttcctggtttcctcgaccattcaggacattttaagccgccattatcagttgcataaaacctacgataacctggcggataaaattgcgattcacctcaacgatactcatccggtgctgtcgattcctgagatgatgcgtctgctgatcgatgagcaccaatttagctgggacgacgcgtttgaagtgtgttgtcaggtcttctcctacaccaaccacacgctaatgagcgaggcgctggaaacctggccagtcgatatgctgggtaaaattctgccgcgtcacctgcagatcatctttgaaatcaacgactatttcctgaaaaccttgcaggaacagtatccgaacgataccgatctgctgggacgggcgtcgatcattgatgaatccaacggtcgtcgtgtgcgtatggcctggctggcggttgtggtgagccacaaagttaacggtgtatcggagctgcactctaacctgatggtgcaatcgctatttgccgactttgcgaaaatcttcccgggtcgtttcaccaacgtcaccaacggtgtgacgccgcgtcgctggctggcggtagcgaacccatcgctttcagccgtgttggacgaacacctgggccgcaactggcgcaccgaccttagcctgcttaatgatctgcaacaacactgtgatttcccaatggttaatcacgcggtgcatcaggcgaagctggagaacaaaaagcgtctggcggagtatatcgcccagcagctgaatgtggtggtaaatccgaaagcgctgttcgatgtgcaaatcaaacgtattcacgaatacaaacgtcaattgatgaatgtgttgcacgtgatcacccgctataaccgcatcaaggccgacccggatgcgaagtgggtaccgcgcgtgaatatttttggcggtaaggcggcttcggcctattacatggcgaagcacattattcatttgatcaatgacgtagcgaaagtgatcaacaacgatccgcagattggcgacaagctgaaagtcgtgttcatcccgaactacagtgttagcctggcgcagttgatcattccggcggccgatctgtctgaacagatttcgctggcggggacggaagcttccggcaccagtaacatgaagtttgcgcttaacggcgcgctgactatcggtacgctggacggtgcgaatgtcgagatgctggatcatgtcggtgctgacaatatctttatctttggtaacacagcggaagaagtggaagaactgcgtcgtcagggctacaaaccgcgtgaatactacgagaaagatgaggagctgcatcaggtgctgacgcaaatcggcagcggtgtattcagtccggaagatccgggtcgctatcgcgatctggttgattcgctgatcaacttcggcgatcactaccaggtactggcggattatcgcagttatgtcgattgtcaggataaagtcgacgaactctacgagcgtcaggaagagtggaccgcaaaagcgatgctgaacattgccaatatgggctacttctcttctgaccgtacgatcaaagagtacgccgatcatatctggcatattgatccggtgagattgtaa

SEQ ID NO: 2482 - DNA, 1434 bp, Escherichia coli
atgcaggttttacatgtatgttcagagatgttcccgctgcttaaaaccggcggtctggctgatgttattggggcattacccgcagcacaaatcgcagacggcgttgacgctcgcgtactgttgcctgcatttcccgatattcgccgtggcgtgaccgatgcgcaggtagtatcccgtcgtgataccttcgccggacatatcacgctgttgttcggtcattacaacggggttggcatatacctgattgacgcgccgcatctctatgatcgtccgggaagcccgtatcacgataccaacttatttgcctataccgacaacgtattgcgttttgcgctgctggggtgggttggggcagaaatggccagcgggcttgacccattctggcgtcctgatgtggtgcatgcgcacgactggcatgcaggccttgcgcctgcgtatctggcggcgcgcgggcgtccggcgaagtcggtgtttactgtgcacaacctggcctatcaaggcatgttttatgcacatcacatgaatgacatccaattgccatggtcgttctttaatattcatgggctggaattcaacggacaaatctctttcctgaaggccggtctgtactatgccgatcacattacggcagtcagcccaacctacgctcgcgagatcaccgaaccgcagtttgcctacggtatggaaggtttgttgcaacagcgtcaccgtgaagggcgtctttccggcgtactgaacggcgtggacgagaaaatctggagtccagagacggacttactgttggcctcgcgttacacccgcgatacgttggaagataaagcggaaaataagcgccagttacaaatcgcaatggggcttaaggttgacgataaagtgccgctttttgcagtggtgagccgtctgaccagccagaaaggtctcgacctggtgctggaagccttacctggtcttctggagcagggcgggcagctggcgctactcggcgcgggcgatccggtgctgcaggaaggtttccttgcggcggcagcggaataccccggccaggtgggcgttcagattggctatcacgaagcattttcgcatcgcattatgggcggcgcggacgtcattctggtgcccagccgttttgaaccgtgcggcttaacgcaactttatggattgaagtacggtacgctgccgttagtgcggcgcaccggtgggcttgctgatacggtttctgactgttctcttgagaaccttgcagatggcgtcgccagtgggtttgtctttgaagatagtaatgcctggtcgctgttacgggctattcgacgtgcttttgtactgtggtcccgtccttcactgtggcggtttgtgcaacgtcaggctatggcaatggattttagctggcaggtcgcggcgaagtcgtaccgtgagctttactatcgcttgaaatag

SEQ ID NO: 2483 - DNA, 1296 bp, Escherichia coli
atggttagtttagagaagaacgatcacttaatgttggcgcgccagctgccattgaaatctgttgccctgatactggcgggaggacgtggtacccgcctgaaggatttaaccaataagcgagcaaaaccggccgtacacttcggcggtaagttccgcattatcgactttgcgctgtctaactgcatcaactccgggatccgtcgtatgggcgtgatcacccagtaccagtcccacactctggtgcagcacatccagcgcggctggtcattcttcaatgaagaaatgaacgagtttgtcgatctgctgccagcacagcagagaatgaaaggggaaaactggtatcgcggcaccgcagatgcggtcacccaaaacctcgacattatccgccgttataaagcggaatacgtggtgatcctggcgggcgaccatatctacaagcaagactactcgcgtatgcttatcgaccacgtcgaaaaaggcgcacgttgcaccgttgcttgtatgccagtaccgattgaagaagcctccgcgtttggcgttatggcggttgatgagaacgataaaattatcgaattcgttgaaaaaccagctaacccgccgtcaatgccgaacgatccgagcaaatctctggcgagtatgggtatttacgtctttgacgccgactatctgtatgaactgctggaagaagacgatcgcgatgagaactccagccacgactttggcaaagatttgattcccaagatcaccgaagccggtctggcctatgcgcacccgttcccgctctcttgcgtacaatccgacccggatgccgagccgtactggcgcgatgtgggtacgctggaagcttactggaaagcgaacctcgatctggcctctgtggtgccggaactggatatgtacgatcgcaattggccaattcgcacctacaatgaatcattaccgccagcgaaattcgtgcaggatcgctccggtagccacgggatgacccttaactcactggtatccggcggttgtgtgatctccggttcggtggtggtgcagtccgttctgttctcgcgcgttcgcgtgaattcattctgcaacattgattccgccgtattgttaccggaagtatgggtaggtcgctcgtgccgtctgcgccgctgcgtcatcgatcgtgcttgtgttattccggaaggcatggtgattggtgaaaacgcagaggaagatgcacgtcgtttctatcgttcagaagaaggcatcgtgctggtaacgcgcgaaatgctacggaagttagggcataaacaggagcgataa

SEQ ID NO: 2484 - DNA, 1974 bp, Escherichia coli
atgacacaactcgccattggcaaacccactcccctcggcgcgcattacgacggtcagggcgtcaacttcacacttttctccgctcatgccgagcgggtagagctgtgtgtctttgatgccaatggccaggaacatcgctatgacttgccagggcacagtggcgacatttggcacggttatctgccggatgcgcgcccgggtttgcgttatggttatcgcgttcatggcccctggcaacccgccgaggggcatcgctttaacccggcgaagttgttgattgatccttgcgcgcggcaaattgacggggagtttaaagataacccgctgctgcacgccggtcataatgaacctgactatcgcgacaacgccgccattgcgccgaaatgcgtagtggtggttgatcactatgactgggaggatgatgccccgccgcgcacgccgtggggcagcaccatcatttatgaagcccatgtcaaaggattaacgtatctgcacccggagatcccggtcgatatccgcggcacttataaagccctggggcatccggtgatgatcaactatttgaaacagttgggcattactgcgctggagttgctgccggtggcacaatttgccagcgaaccacgtctgcaacgcatggggcttagtaactactgggggtacaacccggtggcgatgtttgcgctgcatccggcgtatgcctgctcgccagaaacggcgctggatgagtttcgcgatgcaatcaaagcactgcataaagcgggtatcgaagtcattcttgatatcgtgctcaaccatagtgcggaactggacctcgacggcccgttattctcgctgcgtgggatcgacaaccgtagctattattggataagagaagacggcgattatcacaactggaccggttgtggtaacacgctcaatttgagtcatccggcggtggtagattatgccagcgcctgcctgcgttattgggtagaaacctgccacgtcgatggtttccgctttgatctggcggcagtcatgggccgtacgccagagttccgtcaggatgcgccgttgtttaccgctatccagaactgcccggtgctctcgcaggtgaagttaattgctgaaccgtgggatatcgctcctggtggttatcaggtgggaaatttcccgccgctgtttgccgagtggaacgatcatttccgcgatgctgcccgtcgtttctggcttcattatgatttgcctctgggggcgtttgccgggcgttttgctgcctccagcgatgtttttaaacgtaatggtcgtctgccgagtgccgcgattaatctcgtcaccgcgcatgacggttttacgcttcgcgactgcgtttgcttcaaccataaacacaatgaagcaaacggagaagaaaatcgcgacgggaccaacaacaattacagtaacaatcatggtaaagaagggttaggcggtactcttgacctggttgaacggcgtcgcgacagcattcacgccctgttaacaacgttgttgctctcccagggtacgccgatgttactggccggtgacgaacatggtcacagccagcatggcaataacaatgcctactgtcaggataaccaattaacctggttggactggtcgcaggcaagcagtggtttaaccgcatttaccgccgcgttaatccatctgcgcaagcgcattcctgctttgatggagaatcgctggtgggaagaaggcgacggcaatgtccgttggctaaatcgatatgctcaacctttaagcacggatgagtggcaaaacgggccgaaacagctgcaaattctgctctcggatcgctttttgatcgcaattaacgccacgcttgaggtaacagagattgttttacctgctggggagtggcacgccattcccccattcgctggagaggataacccagtgattacggctgtctggcagggacctgcacacggattgtgtgtgttccagagatga

SEQ ID NO: 2485 - DNA, 2187 bp, Escherichia coli
atgtccgatcgtatcgatagagacgtgattaacgcgctaattgcaggccattttgcggatcctttttccgtactggggatgcataaaaccaccgcgggactggaagtccgtgcccttttacccgacgctaccgatgtgtgggtgattgaaccgaaaaccgggcgcaaactcgcaaaactggagtgtctcgactcacggggattctttagcggtgtcattccgcgacgtaagaattttttccgctatcagttggctgttgtctggcatggtcagcaaaacctgattgatgatccttaccgttttggcccgctaatccaggaaatggatgcctggctattatctgaaggtactcacctacgtccgtatgaaaccttaggcgcgcatgcagatactatggatggcgtcacaggtacgcgtttttctgtctgggctccaaacgcccgtcgggtctcggtggttgggcaattcaactactgggacggtcgccgtcatccgatgcgactgcgtaaagagagcggaatctgggaactgtttatccccggggcgcataacggtcagctctataaatacgagatgattgatgccaatggcaacttgcgtctgaagtccgacccttatgccttcgaagcgcaaatgcgcccggaaaccgcgtctcttatttgcgggctgccggaaaaggttgtgcagactgaagagcgcaaaaaagcgaatcagtttgatgcgccaatctctatttatgaagttcacctgggctcctggcgtcgccacaccgacaacaatttctggttgagctaccgcgagctggccgatcaactggtgccttatgctaaatggatgggctttacccatctcgagctactgcccattaacgagcatcccttcgatggcagttggggttatcagccaaccggcctgtatgcaccgacccgccgttttggtactcgcgacgacttccgttatttcattgatgccgcacacgcagctggtctgaacgtgattctcgactgggtgccaggccacttcccgaccgatgactttgcgcttgccgaatttgatggcacgaacttgtatgaacacagcgatccgcgcgaaggctatcatcaggactggaacacgctgatctacaactatggtcgccgtgaagtcagtaacttccttgtcggtaacgcactttactggattgaacgttttggtattgatgcgctgcgcgtcgatgcggtggcgtcaatgatttatcgcgactacagccgtaaagagggggagtggatcccgaacgaatttggcggtcgcgagaatcttgaagcgattgaattcttgcgtaataccaaccgtattcttggtgagcaggtttccggtgcagtgacaatggcggaggagtctaccgatttccctggcgtttctcgtccgcaggatatgggcggtctgggcttctggtacaagtggaacctcggctggatgcatgacaccctggactacatgaagctcgacccgatttatcgtcagtatcatcacgataaactgaccttcgggatgctctacaactacactgaaaacttcgtcctgccgttgtcgcatgatgaagtggtccacggtaaaaaatcgattctcgaccggatgccgggcgacgcatggcagaaattcgctaacctgcgcgcctactacggctggatgtgggcattcccgggcaagaaactactgttcatggggaacgaatttgcccagggccgcgagtggaaccatgacgccagcctcgactggcatctgttggaaggcggcgataactggcaccacggtgtccagcgtctggtgcgcgatctgaaccacacctaccgccaccataaagcaatgcatgaactggattttgacccgtacggctttgaatggctggtggtggatgacaaagaacgctcggtgctgatctttgtgcgtcgcgataaagagggtaacgaaatcatcgttgccagtaactttacaccggtgccgcgtcatgattatcgcttcggtattaaccagccgggtaaatggcgtgaaatcctcaataccgattccatgcactatcacggcagtaatgcaggcaatggcggcgcagtacacagcgatgagattgccagccacggtcgtcagcattcactgagcctgacgctaccacctctggccactatctggctggttcgggaggcagaatga

SEQ ID NO: 2486 - DNA, 1104 bp, Escherichia coli
atgaaaaatgttggttttatcggctggcgcggtatggtcggctccgttctcatgcaacgcatggttgaagagcgcgacttcgacgccattcgccctgtcttcttttctacttctcagcttggtcaggctgcgccgtcttttggcggaaccactggcacacttcaggatgcctttgatctggaggcgctaaaggccctcgatatcattgtgacctgtcagggcggcgattataccaacgaaatctatccaaagcttcgtgaaagcggatggcaaggttactggattgacgcagcatcatctctgcgcatgaaagatgacgccatcatcattcttgaccccgtcaatcaggacgtcattaccgacggattaaataatggtatcaggacttttgttggcggtaactgtaccgtaagcctgatgttgatgtcgctgggtggtttattcgccaatgatcttgttgattgggtgtccgttgcaacctaccaggccgcttccggcggtggtgcgcgacatatgcgtgagttattaacccaaatgggccatctgtatggccatgtggcagatgaactcgcgaacccgtcttctgctattctcgatatcgaacgcaaagtcacaaccttaacccgtagcggtgagctgccggtggataactttggtgtgccgctggcgggtagcctgattccgtggatcgacaaacagcttgataacggtcagagccgcgaagagtggaaagggcaggcggaaaccaacaagatcctcaacacatcttccgtaattccggtagatggtttatgtgtgcgtgtcggggcattgcgctgccacagccaggcattcactattaaattgaaaaaagatgtgtctattccgaccgtggaagaactgctggctgcgcacaatccgtgggcgaaagttgttccgaacgatcgggaaatcactatgcgtgagctaaccccagctgccgttaccggcacgctgaccacgccggtaggccgtctgcgtaagctgaatatgggaccagagttcctgtcagcctttaccgtgggcgaccagctgctgtggggggccgcggagccgctgcgtcggatgcttcgtcaactggcgtaa

SEQ ID NO: 2487 - DNA, 594 bp, Escherichia coli
atgaatgaaatcatttctgcaacagttttattgatcctgattatggatccgctcggaaacctacctattttcatgtccgtactgaaacatactgaaccgaaaagacggcgggcaatcatggtgcgagagttgcttattgctctccttgtgatgctggtgttcctgtttgcgggcgagaaaattctggcatttcttagcctgcgggcagaaaccgtctccatttctggcggcatcattctgtttctgatcgccattaagatgattttccccagcgcttcaggaaatagcagcgggcttccggcaggtgaagagccatttatcgtgccgttggcaattccgttagtcgccgggccgactattctcgccacgctgatgttgttgtctcatcagtacccgaatcagatgggacatctggtgattgctctgctgctggcctggggcggcacctttgtcatcctgctacagtcttcgctatttttacgtctgctgggcgagaaaggggtgaacgcacttgaacgcctgatgggattgattctggtgatgatggcaactcagatgttcctcgacggcattcgaatgtggatgaaggggtaa

SEQ ID NO: 2488 - DNA, 1341 bp, Escherichia coli
gtgactacattaacgcttgttttaacagcagtagggtctgttttactgctgctgtttttagtcatgaaggcgcgtatgcacgctttcctggctttaatggtggtgtccatgggggctggccttttttccggtatgccgctcgataaaatcgcagcgacgatggaaaaagggatgggaggcaccctcggcttcctggcggtggttgtcgccctgggagccatgtttggtaagatcttacatgaaaccggcgcggtcgatcagattgccgtcaaaatgctcaaatccttcggtcacagccgcgtgcattatgccatcggccttgcggggctggtttgtgcgctaccgctgttctttgaagtggcgattgttctgctgattagcgttgctttctcaatggcgcgccacaccggcacgaacctggtgaagctggtaatcccattatttgcaggcgtggcggcagcggctgcgttcctggtgcctgggccagcgccaatgctgctggcatcgcagatgaacgccgactttggctggatgatcctgattggcctgtgcgcggcaattccgggaatgattattgccgggccgctgtggggtaatttcatcagccgctacgtggagttgcatattcctgacgacatcagcgaaccgcatctcggcgaaggcaaaatgccgtccttcggattcagcctgtcgctgatcctgttgccactggtgctggtggggctgaaaaccattgccgcgcgttttgtgccagaaggctctactgcttacgaatggttcgagtttattggtcatccgtttaccgcgattctggttgcttgcctggtggcgatttacggtctggcaatgcgtcagggtatgccaaaagacaaagtgatggagatttgcggtcacgcgctgcaaccggcggggatcattctgctggtgattggtgcgggcggcgtgttcaaacaggtgctggttgactctggtgtcggtccggcactgggcgaagcgttaaccggcatgggcctgccgattgccatcacctgctttgtgctggctgcggcggtgcgtatcattcagggttctgccaccgttgcctgtttaacggcggtgggactggtgatgccggttattgaacaactgaactactccggtgcgcaaatggcggcgctgtcgatttgtatcgccggtggttcgattgttgtcagccacgttaacgacgctggtttctggttgttcggtaaatttaccggcgcgaccgaagccgaaacgctgaaaacctggaccatgatggaaaccatactcggcactgttggtgccatcgttgggatgattgctttccagctgttgagttaa

SEQ ID NO: 2489 - DNA, 528 bp, Escherichia coli
ttgagcacgactaaccatgatcaccacatttacgtcttgatgggcgtatcgggcagcggcaaatctgcggtcgccagtgaagtggcgcatcaacttcatgccgcgtttcttgatggcgatttcctccatccgcgctgcaatatcgaaaaaatggcgtctggcgaaccgctgaatgacgacgatcgcaaaccgtggttgcaggcgctgaacgacgccgcgtttgctatgcagcgcaccaataaagtatcgctgatcgtctgttctgcactgaaaaaacactatcgcgacttgctgcgtgaaggtaatcctaatctctctttcatctacctgaaaggcgattttgatgtgattgaaagccgcctgaaagcgcgcaaaggccatttctttaaaacccaaatgctggtgacgcagtttgaaacgctgcaggagccgggtgcggacgaaaccgatgtacaggtggtggatattgatcaaccgctggaaggtgttgtggcaagcaccattgaggttattaaaaaaggcaaataa

SEQ ID NO: 2490 - DNA, 996 bp, Escherichia coli
atgaaaaagaaaagacccgtacttcaggatgtggctgaccgtgtaggcgtgaccaaaatgacggtcagccgttttttacgcaacccggagcaggtttccgtcgctctacgcggcaagattgccgccgctcttgatgaactgggttatattcccaatcgcgcgcccgatatactctctaacgccaccagccgggcgattggcgtcctgttaccttctctcaccaaccaggttttcgcggaagtattacgcggaatcgaaagcgtcaccgacgcgcacggttatcaaaccatgctggcgcactacggttataaaccggaaatggagcaagaacgcctcgaatcaatgctctcatggaatatcgacggcctgatcctcaccgaacgtacccacacgccgcgtaccttaaagatgattgaagtggcggggattccggtggtggagttgatggacagtaagtcgccgtgcctcgatatcgccgtcggttttgataactttgaagcggcacgccagatgaccaccgccattattgctcgcgggcatcgtcacattgcctatctcggcgcacgcctcgacgaacgtactatcatcaaacagaagggatacgaacaggcgatgctggatgcaggcctggtgccgtatagcgtgatggttgagcaatcttcttcttactcttccggtattgaactgattcgccaggcgcggcgggaatatccgcagctggatggcgtgttctgtactaatgatgacctggcggtcggcgcggcgtttgaatgtcagcgtctggggttgaaagttcctgacgatatggcgattgccggtttccacggtcatgacattggtcaggtgatggagccacggctagcgagtgtgctgacgccgcgtgagcggatgggcagcattggcgctgagcgcctgctggcgcgtattcgtggcgaatctgtgacaccgaaaatgttagatttaggtttcaccttgtcaccgggcggatctatttaa

SEQ ID NO: 2491 - DNA, 696 bp, Escherichia coli
atgatctacttacgcaaagcaaatgaacgcggtcatgcaaatcatggctggctggactcctggcatactttctcttttgccaactattacgatccgaattttatgggcttctctgcgctgcgcgtgattaacgacgacgtgattgaagcagggcagggcttcggcactcacccgcataaagatatggaaattttgacctacgtgctggaaggtactgttgagcaccaggacagcatgggcaataaagagcaggttccggcgggcgagttccagattatgagtgcgggtacgggtattcgtcactcagagtacaacccaagcagcaccgagcgtctgcatctgtatcagatctggatcatgcctgaagaaaacggtattacgccgcgttatgaacagcgtcgcttcgatgccgtgcagggcaaacaactggtgctttcgccggatgcgcgagatggttcattgaaagtgcatcaggatatggaactgtatcgttgggcgctggtgaaagatgagcagtcggtgcatcagattgccgctgaacgccgcgtctggatccaggtggtgaaaggcaatgtcaccattaacggcgtgaaagcctcgaccagcgatggtctggcaatctgggatgagcaggcgatttccatccatgctgatagcgacagtgaaatcctgctgttcgatttaccgccagtctaa

SEQ ID NO: 2492 - DNA, 1038 bp, Escherichia coli
atggtcattaactgcgcctttattggcttcggcaaaagcaccacccgttaccatctgccgtatgtacttaaccgcaaggatagctggcatgtcgcgcatatttttcgccgccatgcgaagccggaagaacaggcccccatttattcccatatccatttcaccagcgatctcgacgaagtgctaaacgatcccgatgttaagctggttgtcgtctgcacccacgcggacagccacttcgagtacgcgaagcgcgcgctggaagccgggaaaaatgtgctggtcgaaaaaccgttcactccgacaattgcgcaggcgaaagagctgtttgcactggcgaaaagcaaagggctgatcgttacgccgtatcagaatcgtcgctttgattcctgcttcctgacagcgaaaaaagcgattgaaagcggcaagctgggagagattgtcgaagtggaaagccattttgactattaccgcccggtggcagaaaccaaaccggggctgccgcaggatggcgcgttctatggccttggtgtgcatacgatggaccagattatttctctgttcggtcgcccggatcacgtcgcttatgacatccgcagcctgcgtaataaagccaatcctgacgacacctttgaagcgcagctgttttatggcgacctgaaagccatcgtcaaaaccagccatctggtgaaaatcgattatccgaaatttatcgttcacggtaagaaaggttcgtttattaaatacggtatcgaccagcaggaaaccagcctcaaggctaatattatgccgggcgaaccgggattcgcagcggatgattcggtcggtgtgctggagtatgtcaatgacgagggcgtgacggtaagagaagagatgaagccagagatgggcgattatgggcgcgtttatgatgcgttgtatcaaaccatcaccaacggtgcgccaaattacgtcaaggaatctgaagttcttacgaatctggaaatccttgaacgcggttttgagcaagcttctccctccgcagtgactctcgcgaggtaa

SEQ ID NO: 2493 - DNA, 489 bp, Escherichia coli
atgagtgagatagtaatacgccacgcagaaacacgcgattacgaggccatcaggcagattcacgcccagccggaggtgtattacaacacgctacaggtgcctcatccttcagaacaaatgtggctggaacgactcaccgctcgccctggcatcaagcagttagtcgcctgtattgatggaatcgtcgtaggccatctcaccattgacgtgcaacaacgcccacgccgcagtcatgttgccgattttggtatctgtgtcgactcccgttggaagaaccgcggcgtcgccagcgccctgatgcgagagatgattgaaatgtgcgacaactggttgcgggtagatcgtattgagctaacggtgttcgtcgataacgcgccagcaattaaggtctataaaaaatttggctttgagattgaagggactggcaagaagtacgcgctgcgtaatggtgaatatgtcgatgcgtattatatggcgcgggtgaagtaa

SEQ ID NO: 2494 - DNA, 1179 bp, Escherichia coli
atgagtaatattgtttatctgacagtaacgggagaacaacaaggaagcatctccgcaggttgtgggactactgaatctataggtaatcgctggcagagcgggcatgaggatgaaatatttacattctcactcttaaatagtattactaatacggggcttggttcacagttccatggtataacattttgtaaattaattgataaaagcactccattatttattaattccattaacaataatgaacaattatttatggaatttgacttctatcgaataaatagatttggtagatgggaaaagtattattatatacaactaagacgcgcttttttatcggctattcatcaccagatctttgaaaaccaactggatacagaaacaataactgttagttatgaatttatcctctgtcaacatcttatcgcaaataccgagttcagctatttggcactccctgaaaattataaccgcttgtttttaccaaattcaaaaaacaaaacaaataatggtttaaaaacgttaaacagcgaagctgttggcaggctacttgctgctggtagcgtatacaatgggaacattgaaggattcagagatactgcggaaaaactgggtggagatgcaatcaaaggctatgatcaaatactaaatgaaaaaacagcgggcatagcgatagcaacagcatctattcttttaacaaagcgttctaatgttgatacatatacagaaataaatagttacttaggcaaacttagaggtcaacaaaaacttcttgatggtatagacataatagaaataatatacattaagagaccttcaaaagacttagctaacttacgaaaggagtttaataaaaatgtaagaaaatattttcttatcaaacttgcaaaaacctccgaagcatctggaagattcaacgccgaagaccttttaagaatgagaaagggcaatgttcctctaaattataatgtacaccataaactatctctagatgatggtggtactaatgatttggaaaatttagtattaatcgaaaacgaaccatatcataaggtttttactaacatgcaatcacgaatagctaagggaatattagtgggtgaaagcaaaatcactccctgggccattccatctggctcaatttatcctcccatgaaaaatattatggaacccacaaaatga

SEQ ID NO: 2495 - DNA, 459 bp, Escherichia coli
atgatgaatgatttagactatccatttgaagcaccgctcaaggaatcatttattgaaagtataatccaaataaaatttaattctaactcaactaattgcctggagaagttatgtaatgaagttagtattctctttaataatcaacctgattatcttacttttttaagagcaatggatggattcgaagttaatggattacgattatttagcctctcgattccagaaccttcagttaaaaacctttttgccgtaaatgaattttatagagataatgatgatttcataaatcctgacttacaagaacggttagtgatcggggatgatagcatttcaatatttacttatgacattaaaagtaacttttttgaaattagagataatattggcacagaaaatatattcagttcgtttagtgatttctcttcattcttaaacgaaatcatggacagttgttcataa

SEQ ID NO: 2496 - DNA, 285 bp, Escherichia coli
atgattacttatcacgacgcattcgcgaaagcgaacaattaccttgatgatgcaaatctcccggtcgtcattactctacatggacgctttagccagggctggtatttctgtttcgaagcacgagaatttctcgaaactggagatgaggccgcgcgcttagctggtaacgcaccttttattgttgataaaggcagtggtgaaattcattctctgggaacggcaaagccactggaagaatatctacaggattatgaaataaaaaaggctaccttcggcttgccctga

SEQ ID NO: 2497 - DNA, 1734 bp, Escherichia coli
atgataaaaccgacgtttttacgccgggtggccattgctgctctgctcacaggaagttgttttagtacggtagccgcgccacctgtttcttatggtgtggaggaagatgtctttcatccggtacgcgcgaaacagggaatggtggcgtctgtagatgctactgccactcaggtgggggtggatatcctcaaggagggcgggaatgccgttgatgccgccgtggcggtgggctacgcgctggcggtaacgcatccgcaggcagggaatctgggcggtggtggttttatgttaatccgctcgaaaaatggcaataccacggctatcgatttccgcgaaatggcacctgccaaagcgacccgcgatatgttcctcgatgatcagggcaacccggacagcaaaaaatcactcacttcgcatctggcttccggcacacccggtacggtagcgggtttctcgttggcgctggataaatacggcaccatgccgttgaataaagtggtgcaaccggcgtttaaactggcacgcgatggttttatcgttaacgacgcgctggctgacgatctcaaaacctacggcagtgaagtgctgccgaaccacgaaaacagcaaagctatcttctggaaagagggcgaaccgctgaaaaagggcgacaagctggtgcaggcgaacctcgcaaagagcctggagatgattgccgaaaacggaccggacgaattttataaaggcacgatagcggagcagattgcccaggagatgcagaaaaacggtggcttgatcagcaaagaagatttagcggcatataaagcggtcgaacgcacaccgataagcggcgattatcgcgggtatcaggtttactccatgccaccgccatcttccggcggtattcatatcgtacaaatcctcaatattctggaaaacttcgatatgcagaagtacggctttggcagcgccgacgcgatgcaaatcatggcagaagctgagaaatacgcctatgccgaccgctcggaatatcttggcgacccggattttgtcaaagtaccgtggcaggcgctgaccaataaagcctatgccaaatctattgccgatcaaatcgatatcaataaagcgaagccatccagcgaaattcgtcctggcaagcttgcgccttatgagagtaatcaaactacccattactcagtagtggataaagacggtaacgccgtggcggtgacctatacgctgaataccaccttcggtacgggcattgtcgcgggcgagagcggtattctgcttaataaccaaatggatgatttctccgccaaaccaggcgtaccgaacgtttacgggctggtgggcggtgatgccaacgccgtcgggccgaataaacgcccgctgtcgtcgatgtcaccaaccattgtggtcaaggatggtaaaacctggctggtcaccggaagcccaggcggtagccggattatcaccactgtgctgcaaatggtggtgaatagcatcgattatggaatgaacgtcgccgaagcgaccaatgcgccgcgtttccaccatcagtggttgccggacgagctgcgtgtcgaaaaagggtttagcccggatacgatcaagctgctggaagcaaaaggtcagaaagtggcgctgaaagaggcgatgggcagtacacaaagcattatggttgggccggacggtgagctgtacggtgcatccgacccgcgctcggtggatgatttaacggcggggtattaa

SEQ ID NO: 2498 - DNA, 441 bp, Escherichia coli
atgaaacgacttctgcttttgacggcactcctgccgtttgtcggctttgcacagcccattaatactctgaacaaccctaaccagccgggatatcagatccccagccagcagcggatgcaaactcaaatgcagacgcagcaaatccagcaaaaagggatgctgaaccagcaactgaaaacgcaaacgcagctgcaacagcagcatttagaaaaccagataaacaataattctcagcgggtgttgcagtcacagccgggggagcgaaatcccgcccggcagcaaatgctgcccaacaccaacggcgggatgttaaacagcaaccgtaatccggatagttcgttgaatcagcagcatatgctgccggagaggagaaacggcgacatgctgaatcagcccagcacgccgcagcctgacattccgttgaaaactattgggccgtaa

SEQ ID NO: 2499 - DNA, 744 bp, Escherichia coli
atgagtaactggccttatccccgcatcgtcgcccatcgtggtggcggtaagctggccccggaaaacaccctggcagcaatcgacgtcggggcaagatacggtcataagatgatcgaatttgacgcaaagttatcgaaagatggcgagatcttcctgctccatgacgacaatctcgaacgtaccagcaacggctggggcgttgcgggcgagctgaactggcaggatttactgcgcgtggatgcaggcagttggtacagcaaagcgtttaaaggtgagccgctgccgttgctttcgcaggtggcggaacgctgccgcgaacacgggatgatggcgaatatcgaaatcaaacccaccactggcactggaccattaacgggcaaaacggtggcgttggcggcacgcgaactgtggaccggtatgacgccgccgctgctgtcatcgtttgagattgatgctttagaagccgcgcaacaggcagcaccggaactgccgcgtggtttattgcttgatgaatggcgcgacgactggcgagaattgaccgcgcgactgggctgcgtctctattcatctcaatcataagttgctcgataaagcgcgagtgatgcagttgaaagatgccggattacggattctggtttataccgtcaataaaccccagcgcgcggcagagttgctgcgctggggcgtggattgcatctgtaccgatgcgattgacgtgattggtccgaactttacggcccaatag

SEQ ID NO: 2500 - DNA, 1071 bp, Escherichia coli
atggcaggactgaaattacaggcagtaaccaaaagctgggatggcaaaacccaggtcattaaaccgctgacccttgatgtggcggatggcgaatttatcgtgatggtcgggccgtctggctgcgggaaatcgacgttattgcgaatggttgccggactggagcgggtaacgacgggcgatatctggatcgaccgcaagcgtgtcaccgaaatggagccgaaagatcgcgggattgcgatggtgttccagaactacgcgctctatccgcatatgagcgtagaggagaacatggcgtgggggctgaaaattcgcggcatgggcaagcaacaaattgccgaacgtgttaaagaagcggcgcgcattctggagctggacggcctgcttaagcgccgcccgcgtgagctatccggcggtcagcgtcagcgtgtggcgatggggcgtgcgattgtgcgtgagccggcagtgttcctgtttgatgagccgctctctaacctcgatgccaagttgcgtgtgcagatgcgtcttgaactgcaacagctgcaccgtcgcctgaaaacgacttcactctatgttacccacgatcaggttgaggcgatgacgctcgcccagcgagtaatggtgatgaacggcggcgtcgccgaacagattggcacgccagttgaagtgtacgaaaagcccgccagcctgtttgtggcgagttttatcggcagcccggcgatgaacctactggctggccgcgtgaataacgaaggtacgcatttcgaactggatggtggtattacgctgccgctaaacggtggctaccgtcagtatgccgggcgtaaaatgaccctcggcattcgcccggaacatatagcgctaagctcgcaggcagaaggtggtgtgccgctggtgatggacacgctggagatcctcggcgcagataacctggcgcacggacgttggggcgaacagaagctggtggtgcgactggcgcatcaggagcgcccgacggcaggcagcacgctgtggctgcatctgccggaaaatcagctgcatctttttgatggtgaaacaggacaacgagtatga

SEQ ID NO: 2501 - DNA, 846 bp, Escherichia coli
atgattgagaaccgtccgtggctgacaatattcagccataccatgctgatcctcgggatcgcggtgatcctcttcccgctgtacgtggcgtttgtcgcggcgacgctggataaacaagaagtctatgccgcaccgatgacgctaatccccggcacacatctgctggaaaacatccacaacatctgggtaaacggggtaggcacgaatagcgcgccgttctggcggatgttgcttaacagctttgtgatggcgttcagcattacgctcggcaaaattaccgtctcgatgctctcggcatttgccattgtctggtttcgttttccgctacgtaacctcttcttctggatgatttttatcaccctgatgctgccggttgaagtgcgtatcttcccgacggtggaagtcatcgccaacctgaaaatgctcgacagctacgcaggtttaacgctgccgctgatggcctcggcgaccgccacgtttctgtttcgccagttctttatgaccctaccggatgaactggtggaagccgcgcggatcgacggcgcgtcgccaatgcgtttcttttgcgacatcgtttttccgctgtccaaaaccaatctggcggcgctgtttgtgatcacctttatttacggctggaaccagtatttgtggccgttgttgattattaccgacgttgatctcggcaccaccgtggcagggattaaagggatgatcgccacaggcgaaggcacaacggaatggaactcggtgatggcggcgatgttgttaaccctgatcccaccagtagtgattgttttagtgatgcagcgtgccttcgtgcgcggcctggtcgatagtgagaaataa

SEQ ID NO: 2502 - DNA, 888 bp, Escherichia coli
atgtcatcatcccgtccggtgttccgctcgcgctggctgccttatttgctggtcgcgccgcagctcatcatcaccgttatcttttttatctggcctgcgggcgaagcgttgtggtactcgctacaaagcgtcgatccgtttggtttctccagccagtttgtcggcctggataatttcgtcacgctgtttcacgacagctactatctcgacgccttctggacgacgataaaattcagcacctttgtcaccgtcagcggtttgctggtatcgctgttcttcgcagcgctggtggagtacatcgtgcgcggcagtcgtttctatcaaaccttgatgctgctgccgtatgccgtggctcccgccgttgccgccgtattgtggatctttctgtttaaccccggtcgcgggctgatcacccattttctcgctgagttcggctacgactggaaccacgcgcaaaacagcggtcaggcgatgttcctggtggtgtttgcctcagtgtggaagcaaatcagctacaactttctgttcttctatgccgcgctgcaatccatcccccgttcgttgatcgaagccgcagccattgatggggctggcccgattcgccgcttctttaagattgcgctgccgcttatcgctccggtgagtttcttcctgctggtggtgaacctggtgtatgccttcttcgacaccttcccggtgatcgacgccgccacgtccggcgggccagtacaggccaccacgacgctgatttataagatttaccgtgaaggctttaccggactggatttggcttcgtctgccgcgcagtcggtggtgttgatgttcctcgtcatcgtgctgacggtggtgcagttccgctatgttgaaagcaaggtacgttaccaatga

SEQ ID NO: 2503 - DNA, 1317 bp, Escherichia coli
atgaaaccgttacgttatacagcttcagcactggcgctcggactggctttaatggcaaatgcgcaggcagtgacgaccattccgttctggcattctatggaaggggaactgggtaaagaggtggattctctggcccaacgttttaacgccgaaaacccggattacaaaattgtaccgacctataaaggcaactacgaacagaatttaagcgcggggattgccgcatttcgtaccggcaacgctccggctattttgcaggtttatgaagttggcaccgccaccatgatggcgtcgaaagccattaaaccggtgtatgacgtatttaaagaggcagggattcaattcgatgagtcgcagtttgtgccgacggtttcaggctattactccgacagcaaaaccggccacttactctcccagccgttcaacagctcgactcccgttctctattacaacaaagacgccttcaagaaagcaggattagacccggaacagccgccgaaaacctggcaggatctggcggactatgccgcaaaactaaaagcctccggcatgaagtgcggctacgccagcggctggcagggctggatccaactggaaaactttagcgcctggaacggtctgccgtttgccagcaaaaacaacggctttgacggcacagacgcggtgcttgagttcaacaagccggagcaggtgaaacacatcgccatgctcgaagagatgaacaagaagggcgatttcagctacgttgggcgtaaggatgaatccaccgagaagttctataacggtgattgcgcgatgactaccgcctcttccggttctcttgccaacattcgcgagtacgccaaatttaactatggcgtaggcatgatgccttacgacgccgatgcgaaagacgcgccgcaaaacgccattatcggcggagccagtctatgggtaatgcagggtaaagataaagaaacctacaccggcgtggcgaagttcctcgacttcctcgcaaagccagaaaacgctgccgagtggcatcagaaaaccggctatctgccaatcactaaagcggcgtatgacctgacccgtgagcagggcttttacgagaaaaacccaggagcggatattgccacgcgtcagatgctgaacaagccaccgttgccgttcaccaaaggtttgcgtctgggcaacatgccgcagatccgcgtgattgtggatgaagagctggagagcgtgtggaccggtaagaagacaccacagcaggcgctggatactgccgttgagcgtgggaaccagttactgcgccgctttgagaaatcgacgaagtcttaa

SEQ ID NO: 2504 - DNA, 714 bp, Escherichia coli
atggaaaaagtcatgttgtcctttgacaaagtcagcgcccactacggcaaaatccaggcgctgcatgaggtgagcctgcatatcaatcagggcgagattgtcaccctcattggcgcgaacggggcggggaaaaccaccttgctcggcacgttatgcggcgatccgcgcgccaccagcgggcgaattgtgtttgatgataaagacattaccgactggcagacggcgaaaatcatgcgcgaagcggtagcgattgtcccggaagggcgtcgcgtcttctcgcggatgacggtggaagagaacctggcgatgggcggcttttttgccgaacgcgaccagttccaggagcgcataaagtgggtctatgaactgtttccacgtctgcatgagcgccgtgttcagcgagcgggcactatgtctggcggtgaacagcagatgctggcgattggtcgcgcgctgatgagcaacccgcgtttgttgttgcttgatgagccatcgctcgggctggcaccgattatcatccagcaaattttcgacaccatcgaacaactgcgcgagcaggggatgaccatcttccttgtcgagcagaacgccaaccaggcgctaaagctggcggatcgcggctacgtgctggaaaacggtcatgtagtgctctccgataccggcgacgcgctgctggcgaatgaagcggtgagaagtgcgtatttaggcgggtaa

SEQ ID NO: 2505 - DNA, 768 bp, Escherichia coli
atgagtcagccattattatctgttaacggcctgatgatgcgcttcggcggcctgctggcggtgaacaacgtcaatcttgaactgtacccgcaggagatcgtctcgttaatcggccctaacggtgccggaaaaaccacggtcttcaactgcctgaccggattctataaacccaccggcggcaccattttactgcgcgatcagcacctggaaggtttaccggggcagcaaattgcccgcatgggcgtgatgcgcaccttccagcatgtacgtctgttccgtgaaatgacggtgattgaaaacctgctggtggcacagcatcagcaactgaaaactgggctgttctccggcctgttgaaaaccccctctttccgtcgcgcccagagcgaagcgctcgaccgcgccgctacctggcttgagcgcattggtttgctggaacatgccaaccgtcaggcgagtaacctggcctatggtgaccagcgccgtctggagattgcccgctgtatggtgacgcagccggagattttaatgctcgacgaaccggcagcaggtcttaacccgaaagagacgaaagagctggatgagctgattgccgaactgcgtaaccatcacaacaccactatcttattgattgaacacgatatgaagctggtgatggggatttcagacagaatttacgtggtcaatcaggggacgccgctggcaaacggtacaccggagcagatccgtaataacccggacgtgatccgtgcctatttaggtgaggcataa

SEQ ID NO: 2506 - DNA, 1278 bp, Escherichia coli
atgaaaccgatgcatattgcaatggcgctgctctctgccgctatgttctttgtgctggcgggcgtctttatgggcgtgcaactggagctggatggcaccaaactggtggtcgacacggcttcagacatccgttggcagtgggtgtttatcggcactgcggtggtctttttcttccagcttttgcgacctgctttccagaaagggttaaaaagcgtttccgggccgaagtttattctgcccgcgattgatggttccacggcgaagcagaaactgttcctcgtggcgctgctggtgcttgcggtggcgtggccgtttatggtgtcgcgtgggacggtggatatcgccactctgaccatgatctacattattctcggtctcgggctgaacgtggttgttggtctttctggtctgctggtgctgggatacggcggcttttatgccatcggcgcttacacttttgcgctgctcaatcactattacggtctgggcttctggacctgtctgccgattgccgggttgatggcggcggcggcgggcttcctgctcggcttcccggtgttgcgtctgcgcggtgactatctggcgatcgttaccctcggtttcggcgaaattgtgcgcatattgctactcaataacaccgaaattaccggcggaccgaacggtatcagtcagattccgaaaccgacgctcttcggactcgagttcagccgtaccgcccgtgaaggcggctgggacacgttcagtaatttctttggcctgaaatacgatccctccgatcgcgtcatcttcctctacctggtggcgttgctgctggtggtgttaagcctgtttgtcattaaccgcctgctgcggatgccgctggggcgtgcgtgggaagcgttgcgtgaagatgaaatcgcttgtcgttcgctgggcttaagcccgcgtcgtatcaagctgactgcctttaccatcagcgctgcgtttgccggttttgctggaacgttgtttgctgcgcgccagggctttgtcagccctgaatccttcacttttgccgaatcggcgtttgtgctggcgatagtggtgctcggcggtatgggctcgcaatttgcagtgattctggcggctgttttgctggtggtatcgcgcgagttgatgcgtgatttcaacgaatacagcatgttaatgctcggtggtttgatggtgctgatgatgatctggcgtccgcagggcttgctgcccatgacgcgcccgcaactcaagctgaaaaacggcgcagcgaaaggagagcaggcatga

SEQ ID NO: 2507 - DNA, 927 bp, Escherichia coli
atgtctgagcagtttttgtatttcttgcagcagatgtttaacggcgtcacgctgggcagtacctacgcgctgatagccatcggctacaccatggtttacggcattatcggcatgatcaacttcgcccacggcgaggtttacatgattggcagctacgtctcctttatgatcatcgccgcactgatgatgctgggcattgataccggctggttgctggtggcggcgggattcgtcggcgcaatcgtcattgccagcgcctacggctggagtatcgaacgggtagcctatcgcccggtgcgtaactctaagcgcctgattgcactcatctcggcaatcggcatgtctatcttcctgcaaaactacgtcagcctgaccgaaggttcgcgcgatgtggcgctgcccagcctgtttaacggtcagtgggtggtgggccatagcgaaaacttctctgcgtctattatcaccatgcaggcggtgatatggattgttactttcctcgccatgctggcgctgacgattttcattcgctattcccgtatggggcgcgcctgccgtgcctgcgcggaagatctgaaaatggcgagcctgcttggcatcaacaccgaccgggtgattgcgctgacctttgtgattggcgcggcgatggcggcagtggcgggcgtgctgctcggtcagttctacggcgtaattaacccttacatcggctttatggccgggatgaaagcctttaccgctgcggtgctcggtgggattggcagcattccgggggcgatgattggcgggctgctcctggggattgcggaggcgctctcttctgcctatctgagtacggaatataaagatgtggtctcattcgccctgctgatcctggtgctgctggtgatgccgaccggtattctgggtcgcccggaggtagagaaagtatga

SEQ ID NO: 2508 - DNA, 1110 bp, Escherichia coli
atgaaacggaatgcgaaaactatcatcgcagggatgattgcactgacaatttcacacaccgctatggctgacgatattaaagtcgccgttgtcggcgcgatgtccggcccgattgcccagtggggcgatatggaatttaacggcgcgcgtcaggcaattaaagacattaatgccaaagggggaattaagggcgataaactggttggcgtggaatatgacgacgcctgcgacccgaaacaagccgttgcggtcgccaacaaaatcgttaacgacggcattaaatatgttattggtcatctgtgttcctcctctacccaacctgcatcagatatctatgaagacgaaggtattctgatgatctcgccgggagcgaccaatccggagctgacccaacgcggttatcaatacatcatgcgtactgccgggctggactcttcccaggggccaacggcggcaaaatacattcttgagacggtgaagccccagcgcatcgccatcattcacgacaaacaacagtatggcgaagggctggcacgttcggtgcaggacgggctgaaagcggctaacgccaacgtcgtcttcttcgacggcattaccgctggagagaaagatttctccgcgctgatcgcccgcctgaaaaaagaaaacatcgacttcgtttactacggcggttactacccggaaatggggcagatgctgcgccaggcccgttccgttggcttgaaaacccagtttatggggccggaaggtgtcggtaatgcgtcgctgtcgaacattgccggtgatgccgctgaaggcatgttggtcaccatgccaaaacgctatgaccaggatccgacaaaccagggcatcgttgatgcgctgaaagccgacaagaaagatccgtccgggccctatgtctggatcacctacgcggcggtgcaatctctggcaactgcccttgaacgtaccggcagcgatgagccgctggcgctggtgaaagatttaaaagctaacggtgcaaacaccgtaattgggccgctgaactgggatgaaaaaggcgatcttaagggattcgattttggtgtcttccagtggcatgccgacggttcatccacggcagccaagtga

SEQ ID NO: 2509 - DNA, 384 bp, Escherichia coli
atgaagctgaccatcattcgattagaaaactttagcgaccaggaccggattgacctgcaaaagatctggccggagtattccccttcctctttacaggttgacgataaccaccgtatctacgccgcgcgttttaacgagcgccttctcgcggccgtgcgggtaaccttaagcggcaccgagggggcactggattccctgcgtgtgagggaagtcacccgccgtcgcggtgtggggcaatatctgctggaagaggttttgcgtaacaatcctggcgtttcatgttggtggatggcggatgctggcgtggaagatcgcggcgtgatgacggcgtttatgcgagcactgggatttacggcacaacagggtggctgggagaagcgttaa

SEQ ID NO: 2510 - DNA, 1104 bp, Escherichia coli
atgaacataaagggtaaagcgttactggcaggatgtatcgcgctggcattcagcaatatggctctggcagaagatattaaagtcgccgtcgtaggcgcaatgtccggtccggtggcgcagtacggtgaccaggagtttactggcgcagagcaggcggttgcggatatcaatgctaaaggtggtatcaaaggcaacaaactgcaaatcgtaaaatatgacgatgcctgtgacccgaaacaggcggttgcggtggcgaacaaagtcgttaacgacggcattaaatacgtgattggtcacctctgctcttcatcaacgcagccagcgtctgacatctacgaagacgaaggcattttaatgatcaccccagcggcaaccgcaccagagctgaccgcccgtggctatcagctgatcctgcgcaccaccggcctggactcagaccaggggccgacggcggcgaaatatatacttgagaaagtgaaaccgcaacgcattgctatcgttcacgacaaacagcagtacggcgaaggtctggcgcgtgcagtgcaggacggcctgaagaaaggcaatgctaacgtggtgttctttgatggcatcaccgccggggaaaaagatttctctaccctggtggcgcgtttgaagaaagagaatatcgatttcgtttactacggcggttatcacccggaaatggggcaaatcctgcgtcaggcacgcgcggcagggctgaaaactcagtttatggggccagaaggcgtggctaacgtctcgctgtctaacattgcgggcgaatcagcggaagggctgctggtgaccaagccgaagaactacgatcaggttccggcgaacaaaccgattgttgacgcgatcaaagcgaaaaaacaggacccaagcggcgcgttcgtctggaccacctacgccgcgctgcaatctttgcaagcgggcctgaatcagtctgacgatccggcggagatcgctaaatacctgaaagcgaactcggttgatacggtgatggggccgctgacctgggatgagaaaggcgatctgaaaggctttgagttcggtgtgtttgactggcacgccaacggcacggcgactgatgcgaagtaa

SEQ ID NO: 2511 - DNA, 855 bp, Escherichia coli
atgactgacaaaatgcaaagtttagctttagccccagttggcaacctggattcctacatccgggcagctaacgcgtggccgatgttgtcggctgacgaggagcgggcgctggctgaaaagctgcattaccatggcgatctggaagcagctaaaacgctgatcctgtctcacctgcggtttgttgttcatattgctcgtaattatgcgggctatggcctgccacaggcggatttgattcaggaaggtaacatcggcctgatgaaagcagtgcgccgttttaacccggaagtgggtgtgcgcctggtctccttcgccgttcactggatcaaagcagagatccacgaatacgttctgcgtaactggcgtatcgtcaaagttgcgaccaccaaagcgcaacgcaaactgttcttcaacctgcgtaaaaccaagcagcgtctgggctggtttaaccaggatgaagtcgaaatggtggcccgtgaactgggcgtaaccagtaaagacgtacgtgagatggaatcacgtatggcggcacaggacatgacctttgacctgtcctctgacgacgattccgacagccagccgatggctccggtgctctatctgcaggataaatcatctaactttgccgacggcattgaagatgataactgggaagagcaggcggcaaaccgtctgaccgacgcgatgcaaggtctggacgagcgtagccaggacatcatccgcgcgcgctggctggacgaagacaacaagtccacgttgcaggaactggctgaccgttacggtgtttccgctgagcgtgtgcgtcagctggaaaagaacgcgatgaaaaaattgcgcgctgctattgaagcgtaa

SEQ ID NO: 2512 - DNA, 1059 bp, Escherichia coli
atgaataagcgcgatgcaatcaatcacattcggcagtttggcgggcgtctggatcgcttccgtaaatcggtcggcggctctggcgacggcggtcgtaacgcgccgaaacgcgcgaaatcctcgccaaaaccggtaaatcgcaaaaccaacgttttcaacgaacaggtacgctatgccttccgcggcgcattgcaggatctgaaaagcaaaccgttcgccacgtttttaacggtgatggttatcgccatctccctgacgctgcccagcgtctgttatatggtgtacaaaaacgttaaccaggcggcgacgcaatattatccgtcaccgcaaatcactgtttatctgcaaaaaacgctggatgatgacgccgctgcgggcgtggtggcacagttgcaggccgagcaaggcgtggagaaagtgaattatctttctcgtgaagacgcactgggcgagttccgtaactggtctggttttggtggtgcgctggatatgctggaagaaaacccgcttccggcagtagcggtggtgatcccgaaactcgattttcaggggacggagtcactgaatacgctgcgtgatcgtatcacgcagattaacggcattgacgaagtgcggatggatgacagctggtttgcccgcctggcggcgttaaccgggctggtcgggcgcgtttcggcgatgatcggcgtgttgatggtggcagcagtgtttctcgtcatcggcaacagtgtgcgtctgagcatctttgctcgccgtgactctattaacgtgcagaaactgattggtgcgacggatggtttcatcctgcgcccgttcctgtacggtggcgcactgctgggattttctggcgcattgttgtcattaattttgtcagaaattctggtgctgcgattgtcatcggcggttgcggaagtggcacaggttttcggaacgaagtttgatatcaatggtttatcgttcgatgaatgcctgctattgctgctggtatgctcgatgattggctgggtggcagcgtggcttgccacggtacaacatttacgccactttacgcctgaataa

SEQ ID NO: 2513 - DNA, 669 bp, Escherichia coli
atgattcgctttgaacatgtcagcaaggcttatctcggtgggagacaggcgctgcagggcgttacgttccatatgcagccgggtgagatggcgtttctgaccggtcattccggcgcagggaaaagtaccctcctgaagctgatctgtgggattgagcggcccagcgccgggaaaatctggtttagcggccatgacatcacgcgtctgaaaaaccgtgaagttccgtttctgcgccgccagattggcatgattttccaggatcaccatctactgatggaccgtactgtctatgataacgtggcgatcccgctgattatcgccggtgccagcggtgatgacattcgtcgccgggtgtcggcggcgctggataaagtcgggctactggacaaagcgaagaacttccctattcagctttccggcggtgaacaacagcgtgttggcattgcccgcgcggtggtgaacaagcccgcggtactgctggcggacgaaccgactggtaacctggacgacgcgctgtcggaaggcattttacgtctgtttgaagagtttaaccgcgttggagtaaccgtattgatggcaacgcacgacatcaacctgatttcgcgacgttcttatcgcatgctcaccctgagcgatggtcacttgcatggaggcgtgggccatgaataa

SEQ ID NO: 2514 - DNA, 1497 bp, Escherichia coli
atggcgaaagaaaaaaaacgtggctttttttcctggctgggctttggtcaaaaagagcagaccccggaaaaagagacagaagttcagaatgaacaaccagttgtagaagaaatcgttcaggcgcaagagcctgtgaaggcttctgaacacgccgttgaagagcagccgcaggcgcatactgaagccgaggcggaaacttttgctgccaacgttgtggacgttactgaacaggttgctgaaagtgaaaaagcgcagcctgaagcggaagtcgttgcacagccggaaccggtcgtagaagaaacgccggagccagtggctatcgaacgtgaagaactgccgttgccggaagacgtcaacgccgaagcggtttcgccagaagagtggcaggccgaagcggaaaccgtagagattgtcgaagcggcggaagaagaagcggctaaagaagaaatcaccgacgaagagccggaggcacaggcgctggctgccgaagtggcagaagaggcggtaatggtggtttctccggcagaagaagatcagccggtggaagaaatcgctcaggagcaggaaaaaccgaccaaagaaggtttcttcgcgcgcctgaaacgcagcctgttaaaaaccaaagaaaatctcggttccggatttatcagtctgttccgcggtaaaaaaatcgacgatgatctgtttgaagagctggaagaacagctgttgatcgccgatgtgggcgtggaaaccacacgtaaaattatcaccaatctgacggaaggcgcatcccgcaagcagcttcgtgatgccgaggcgctctatggcctgctgaaagaagagatgggcgagattctggcgaaagtcgatgagccgctgaatgttgaaggtaaaacgccgttcgtgatcctgatggtgggcgtcaacggtgtgggtaaaaccacgacgattggtaagctggcgcgtcagtttgagcagcagggtaaatcggtgatgctggcggcaggcgatactttccgtgcggcagcggttgaacagcttcaggtctggggtcagcgcaacaatattccggtgattgcccagcataccggtgctgattccgcttctgttatcttcgacgccattcaggccgctaaagcgcgtaacatcgacgtcctgattgccgataccgccggacgcctgcaaaacaaatcgcacctgatggaagagttgaagaaaatcgtccgcgtgatgaagaaactcgacgttgaagctccgcatgaagttatgctgactattgatgccagcaccgggcagaatgcggtaagccaggccaaactgttccacgaagccgttggcttaaccggcatcacgctaacgaaactggacggcacggcgaaaggcggggtaattttctcggtggctgaccagtttggtatccctatccgctacattggtgtcggcgaacgtattgaggatttgcgtccgtttaaggcggacgactttatagaggcactttttgcccgagaggattaa

SEQ ID NO: 2515 - DNA, 597 bp, Escherichia coli
atgaaaaaaccgaatcattccggcagcggccaaatccgcattattggcgggcagtggcgaggccgtaaactcccggttcctgatagtccaggtctgcgccccaccaccgaccgcgtacgcgaaacgttgtttaactggctggctccggtcattgttgacgcccaatgtctggattgcttcgccgggagcggcgcgctggggctggaagcgttatcgcgctacgctgcgggggccacgttgattgagatggatcgtgcggtttctcagcagttaattaagaatctggcgacactaaaagcaggcaatgcacgcgtggtgaacagcaacgcgatgtcattcctggcgcaaaaaggcacaccgcataatatcgtgtttgtcgatccaccgttccgccgtggcttgttagaagagacgataaatttactggaagataacggctggctggctgacgaagccctgatttatgtcgaaagcgaagtcgaaaacggtctgcccaacgttccggcaaactggtcattacatcgggaaaaagtggcgggtcaggtggcttatcggctgtatcaacgcgaagcacaaggagaaagtgatgctgattaa

SEQ ID NO: 2516 - DNA, 270 bp, Escherichia coli
atgctgattaatattggtcgtttgttaatgctctgtgtttggggatttttaatcctcaacctggtgcatcccttcccacgcccgctgaatattttcgttaacgtggcgctgatttttaccgtgctgatgcatggtatgcagctggcgctattgaaatccactttaccgaaagatggcccgcagatgaccaccgccgaaaaggtgcggattttccttttcggcgtgtttgaactgctggtctggcagaagaaatttaaagttaaaaaataa

SEQ ID NO: 2517 - DNA, 360 bp, Escherichia coli
atgagtaaaccacctcttttctttattgttatcattggcttaatcatcgtctccgcatcgtttcgttttatgcaacaacgacgggaaaaagctgataatgatatggcaccgctccagcaaaagctggtggtggtgagcaacaagcgggaaaaaccgattaacgatcgccgttcgcgccagcaggaagtgaccccggcaggcaccagtatgcgctatgaggcaagcttcaaaccgcaaagcggaggaatggagcagacgtttcgcctcgacgcccagcagtaccacgccctgacagtgggtgataaaggtacgctgagctataaaggaacgcgctttgtcagctttgtaggcgaacaataa

SEQ ID NO: 2518 - DNA, 627 bp, Escherichia coli
atgctttggtcgtttatcgctgtctgtctttccgcatggctatctgtggatgcatcgtatcgtgggccaacctggcaacgctgggtgtttaaaccgttaacccttcttctcctgctgttgctggcctggcaagcgccgatgttcgacgccattagctatctggtgctggcggggctgtgtgcctcactgctgggcgatgcgctaaccctgttgccacgtcaacgtctgatgtacgccatcggcgcgtttttcctctcgcacctgctgtacaccatctatttcgccagtcagatgacgctctctttcttctggcctctgccgttggtgctgctggttctgggcgcgctgttactggcgattatctggacgcgtctggaagagtatcgttggcctatctgcacgtttatcggcatgacgctggtgatggtgtggctggcaggtgaactgtggttcttccgtccgaccgctccggcgctctctgcgtttgtcggcgcttcgttgctgtttatcagtaactttgtctggctgggtagtcactatcgccgacgcttccgtgcggataacgccattgccgcggcctgctactttgctggtcacttcctcatcgtccgctcgctgtatctctga

SEQ ID NO: 2519 - DNA, 2199 bp, Escherichia coli
atgtcgactcctgacaatcacggcaagaaagcccctcaatttgctgcgttcaaaccgctaactacggtacagaacaccaacgactgttgctgcgacggcgcatgttccagcacgccaactctctctgaaaacgtctccggcacccgctatagctggaaagtcagcggtatggactgcgccgcctgtgcgcgcaaagtggaaaatgccgtgcgccagcttgcaggcgtgaatcaggtacaggtgttgttcgccaccgaaaaactggtggtggatgccgacaatgacatccgggcacaagttgaatctgcggtgcaaaaagcgggctattccctgcgcgatgaacaggcctccgacgaaccacaagaatcacgcctgaaagagaatctgccgctgattacgcttatcgtgatgatggcaatcagttgggggctggagcagttcaatcatccgtttggtcaactggcgtttatcgcgaccacgctggttgggctgtacccaattgctcgtcaggcattacggctgatcaaatctggcagctacttcgccattgaaaccttaatgagcgtagccgctattggtgcgctgtttattggcgcaacggctgaagctgcgatggtgttgctgctgtttttgattggtgaacgactggaaggctgggccgccagccgcgcgcgtcagggcgttagcgcgttaatggcgctgaagccagaaaccgccacgcgtctgcgtaacggtgagcgtgaagaggtggcaataaacagcctgcggcctggcgatgtgattgaagttgcggcaggtgggcgtttgcctgccgacggtaaactgctctcaccgtttgccagttttgatgaaagtgccctgaccggagaatccattcctgtggagcgcgcgacgggcgataaagttcctgcaggcgccaccagcgtagaccgtctggtaacgctggaagtgctgtcagaaccgggtgccagcgccattgaccggattctgaaactgattgaagaagccgaagagcgccgcgcacctattgagcggtttatcgaccgtttcagccgtatttacacgccagcgattatggccgtcgccctgctggtaacgctggtgccgccgctgctgtttgccgccagctggcaggagtggatttataaagggctgacgctgctgctgattggttgcccgtgtgctttagttatctccacgcccgcggcgattacctccgggctggcggcagcagcgcgtcgtggggcgttgattaaaggcggcgcggcgctggagcagctgggtcgtgttacccaggtggcgtttgataaaaccggtacgctgaccgtcggtaaaccgcgcgttaccgcgattcatccggcaacgggtattagtgaatctgaactgctgacactggcggcggcggtcgagcaaggcgcgacgcatccactggcacaggccattgtgcgcgaagcacaggttgctgaactcgccattcccaccgcccaatcacagcgggcgctggtcgggtctggcattgaagcgcaggttaacggtgagcgcgtgttgatatgcgctgccggaaaacatcctgctgatgcatttgctggtttgattaatgaactggaaagcgccgggcaaacggtagtgctggtagtacgtaatgatgacgtgctgggtgtcattgcgttgcaggataccctgcgcgccgatgctgcaactgctatcagtgaactgaacgcgctgggtgtcaaaggggtgatccttacaggcgataatccacgcgcagcagcggcaatcgccggggaactggggctggaatttaaagcgggcctcttgccggaagataaagtcaaagcggtgaccgagctgaatcaacatgcgccgctggcgatggtcggtgatggtattaacgacgcgccagcgatgaaagctgccgccatcgggattgcaatgggtagcggcacagacgtggcgctggaaaccgccgatgcagcattaacccataaccacctgcgcggcctggtgcaaatgattgaactggcgcgcgccactcacgcgaatattcgccagaacatcactattgcgctggggctgaaaggcgttttcctcgtcaccacgctgttagggatgaccggcctgtggctggcggtgctggcagatacgggtgcgacggtgctggtaacggcgaatgcgttacggttattgcgcaggaaataa

SEQ ID NO: 2520 - DNA, 246 bp, Escherichia coli
atgaccgatctcttttccagccctgaccacacactcgacgcacttggcctgcgctgcccggaaccagtaatgatggtgcgcaaaacagtgcgcaatatgcagccaggtgaaacgttgctgattattgctgacgatccggcgacgacccgtgatattcctgggttttgtacctttatggaacacgaactggttgctaaagagacggatggactgccttatcgttatttgattcgtaaaggcggttga

SEQ ID NO: 2521 - DNA, 666 bp, Escherichia coli
atgaacgttttctcgcaaactcaacgctataaggcgttgttctggttatcgttatttcatcttctggtgatcacctccagtaactatctggttcagcttcccgtatccatttttggtttccataccacctggggcgcgtttagctttccgtttattttccttgctaccgacctgactgtgcgtatttttggcgcaccgctggcccgtcgtatcatctttgcggtgatgatcccggcgttactgatctcctacgtcatctcgtcgctgttctatatgggttcctggcagggattcggcgcgctcgcccatttcaacctgtttgtcgcccgtatcgccaccgccagtttcatggcctacgcgctggggcaaatcctcgacgtgcacgtttttaaccgcctgcgtcagagtcgtcgctggtggctggcaccgacggcgtccacactgttcggtaacgtcagcgacacgctggccttcttcttcattgccttctggcgcagcccagatgcctttatggctgaacactggatggaaatcgcgctggtcgattactgtttcaaagtgttaatcagtatcgttttcttcctgccaatgtatggcgtattactcaatatgctgttgaaaagactggcagataaatccgaaatcaacgctttgcaggcgagttaa

SEQ ID NO: 2522 - DNA, 558 bp, Escherichia coli
atgcgcaatctggttaaatatgtcggaattggcctgctggttatggggcttgcggcctgtgatgataaagacactaacgctacggcgcagggttcggtcgcggaaagtaacgctaccgggaatcccgtcaacctgcttgatggcaagttaagtttctcgctgccagcggatatgaccgaccagagcggtaagctgggaacgcaggctaataacatgcatgtctggtccgacgccaccgggcagaaagcagtcatcgtcatcatgggcgatgatccgaaagaagatctggcggtgctggcgaagcgcctggaagatcagcaacgtagccgcgatccgcagctgcaagtggtaaccaataaagccattgagctgaaaggtcacaaaatgcagcagttagacagcattatctccgcgaaaggccagacggcgtactcttccgttattctgggtaacgtgggtaatcaactgctaaccatgcaaattacgctgcccgctgacaatcagcaaaaagcacagaccaccgcagaaaacatcattaatacgctggttattcagtaa

SEQ ID NO: 2523 - DNA, 1260 bp, Escherichia coli
atggtaaaaatgaaacactgttgtaaaaatgtggtgatcctcatgcccgaacccgtagccgaacccgcgctaaacggattgcgcctgaatttgcgcattgtctccattgtcatgtttaacttcgccagctaccttaccatcgggttgccgctcgctgtattaccgggctatgtccatgatgtgatgggctttagcgctttctgggcaggattggttatcagcctgcaatatttcgccaccttgctgagccgtcctcatgccggacgttacgccgatttgctgggacccaaaaagattgtcgtcttcggtttatgcggctgctttttgagcggtctgggatatctgacggcaggattaaccgccagtctgcccgtcatcagcctgttattactgtgccttgggcgcgtaatccttgggattgggcaaagttttgccggaacgggatcgaccctgtggggtgttggcgtggttggttcgctacatatcgggagggtgatttcgtggaacggtattgtcacttacggggcgatggcgatgggtgcgccgttaggtgtcgtgttttatcactggggcggattgcaggcgttagcgttaatcattatgggcgtggcgctggtggccattttgttggcgatcccgcgtccgacggtaaaagccagtaaaggcaaaccgctgccgtttcgcgcggtgcttgggcgcgtctggctgtacggcatggcgctggcactggcttccgccggatttggcgttatcgccacttttatcacgctgttttatgacgctaaaggttgggacggtgcggctttcgcgttgacgctgtttagctgtgcgtttgtcggtacgcgtttgttattccctaacggcattaaccgtatcggcggcttaaacgtggcgatgatttgctttagcgttgagataatcggcctgctactggttggcgtggcgactatgccgtggatggcgaaaatcggcgttttactggcgggggcggggttttcgctggtgttccctgcattgggcgtagtggcggtaaaagcggttccgcagcaaaatcagggggcggcgctggcaacttacaccgtatttatggatttatcgcttggcgtgaccggaccactggctgggctggtgatgagttgggcgggcgttccggtgatttatctggcggcggcgggactggtcgcaatcgcgttattactgacgtggcgattaaaaaaacggcccccggtggaaatacctgaggccgcctcatcatcttaa

SEQ ID NO: 2524 - DNA, 1050 bp, Escherichia coli
atggaaacccctcaacccgataaaacgggcatgcacattctgctcaagttggcctcgctggtagtgatcctcgcgggcattcacgcagcggcagatatcattgtgcagctattactggcgctgttttttgccatcgttctcaacccgctcgtcacctggtttattcgtcggggggtacaacgccccgttgccattacgattgtggttgtggtgatgctgatcgcactcaccgcgctggtcggcgtactggcggcatcgtttaacgaatttatctctatgctgccgaggtttaataaggagctgacgcgcaaactttttaaattgcaggagatgttgccttttcttaatttgcatatgtcgccggagcgaatactacagcggatggactcggaaaaagtggttaccttcaccacggcgctaatgaccgggctttccggggcaatggcgagcgtgcttttgctggtgatgaccgtagtttttatgctgtttgaagtgcgccacgtcccttacaaaatgcgtttcgcgttgaataatccacagattcacatcgccggactacaccgcgcacttaaaggcgtttcgcattatctggcgttaaagacgctactcagtttatggacaggcataatcgtctggctggggctggagctgatgggggtgcagtttgcgctgatgtgggcagtactggcgtttttgctcaactacgtgcccaatatcggtgcggtaatttccgccgtaccgccaatgattcaggtgctgctgtttaatggtatttacgaatgtattctggtcggcgcattgtttttagtggtccatatggtcatcggcaatattttagaaccacggatgatgggccatcgcctggggatgtccaccatggtggtatttctttcattgttaatttggggatggctgctcggcccggtagggatgctactttcggtgccattaaccagcgtgtgtaaaatctggatggaaaccaccaaaggcggcagcaaactggcgattttactggggccaggcagaccgaaaagtcggttaccgggatga

SEQ ID NO: 2525 - DNA, 588 bp, Escherichia coli
atgtatcggatagttctggggaaagtttcgaccttaagcgcagctcctctgccaccgggtttacgcgagcaagcaccgcaaggtccacgacgtgaacgctggctggcggggcgtgcattgctttcgcacacgctttccccgctaccggagatcatctatggcgaacaaggcaaacctgcattcgcgccggaaacgccgctatggttcaacttaagccatagtggtgacgatatcgccctgctgttgagcgatgaaggcgaagtcggctgcgatatcgaagtgattcgcccgcgcgccaactggcgctggctggcgaacgccgtattcagccttggggaacatgccgagatggacgccgtgcatcctgatcagcaactggaaatgttctggcgcatctggacgcgcaaagaagccatcgttaaacagcgtggcggcagcgcctggcaaatcgtcagcgtagacagcacctataactcctcgctgtcagtcagccattgtcagctagaaaatttaagcctggcgatctgcacccctaccccctttacgctcaccgccgacagtgtgcaatggatcgattcagttaactga

SEQ ID NO: 2526 - DNA, 1575 bp, Escherichia coli
atgttctctacactccgccgcactctatttgcgctgctggcttgtgcgtcttttatcgtccatgccgctgcaccagatgaaatcaccaccgcctggccggtgaatgtcgggccactaaacccgcacctttacacgcctaaccaaatgttcgcccagagcatggtttatgaaccgctggtgaaatatcaggcagacggttcggtgatcccgtggctggcaaaaagctggactcattcagaagatggtaaaacctggaccttcaccctgcgtgatgacgtgaaattctccaacggcgaaccgtttgatgcagaggcggcggcagaaaacttccgtgcagtgctcgataaccgtcaacgtcacgcctggctggagctggcaaaccagattgttgatgtcaaagcactcagcaaaaacgagctgcaaatcaccctgaaaagcgcctactatcctttcctgcaagaactggccctgccccgtcctttccgttttatcgcaccctcgcagtttaaaaaccacgaaaccatgaacggaattaaagcgccgattggcaccgggccgtgggttttacaggaatcgaaactgaatcagtacgatgtcttcgtccgtaacgaaaactactggggcgaaaagccagcgattaaaaagatcacctttaacgtgatcccggacccgactacccgcgcggtggcgtttgaaactggcgatatcgacctgctgtacggaaacgaagggttattaccgctcgataccttcgcccgctttagccagaacccggcttaccacactcaactgtcacagccgatcgaaaccgtgatgctggcgctcaataccgccaaagcccccaccaacgagctggcagtacgtgaagctcttaattacgcggtgaacaaaaaatcgctgattgataacgcgttgtatggtacccagcaggtcgccgacaccctgtttgccccttctgtgccctacgccaacctcggcctgaaaccgcgccagtacgatccgcagaaagcgaaagcgttgctggaaaaagccggttggacgctgcctgcaggcaaagacatccgcgagaaaaatggtcagccgctgcgcattgaactgtcgttcatcggcaccgatgcgttaagcaaatcgatggcggaaatcattcaggctgatatgcgccagattggcgcagatgtctcgctgattggcgaagaagagagcagtatctatgctcgtcagcgcgacggtcgttttggcatgattttccaccgcacctggggcgcgccatacgatccacacgccttcctgagttcaatgcgcgtaccgtcgcacgctgacttccaggcacagcaaggtttagccgacaagccgctgattgataaagagatcggcgaagtgctggcgacccatgacgaaacgcaacgtcaggcgctgtatcgcgacattctgacccgtctgcatgacgaggcggtttatctgcctatcagttacatctcaatgatggtggtttcaaaaccggaactgggtaacatcccctacgcgccgatcgccaccgaaatcccgttcgaacagattaaaccggtgaaaccttaa

SEQ ID NO: 2527 - DNA, 945 bp, Escherichia coli
atgttgcgttatgtattacgccgctttctgctgctgatcccgatggtgctcgccgcctcggtgatcatttttttgatgctgcgcctcggcaccggtgacccggcgctcgattatctccgtctgtctaacctgccgccgacgccggagatgctggcctctactcgaactatgctggggctggatcagccgctgtacgtccagtatggcacctggttgtggaaggcgctgcatcttgactttggtatctcattcgccagccaacgcccggtgctggacgatatgctgaatttcctgcccgccacgctggaacttgcaggtgcggcgctggtattaattctgctcacctccgtaccgctcggtatctgggcggcgcgccatcgcgatcgtctgccggatttcgccgtccgtttcatcgcgtttctcggcgtgtcgatgcctaacttctggctggcgtttttactggtgatggcgttttcggtgtatctgcaatggctacccgcgatgggttacggcggctggcagcacatcattttgcctgcggtatccatcgcctttatgtcgctggcgattaacgcgcgtttgctgcgcgccagtatgctggacgtcgccggtcagcgtcacgtcacctgggcacgactgcgtggtctgagcgacaaacagaccgaacgccgccatattctgcgcaatgcctcgctgccgatgatcactgccgtggggatgcacattggcgaactgattggcgggacgatgattatcgaaaacatctttgcctggccgggcgtcgggcgctatgcggtgtcggcgatttttaaccgtgactatccggtgatccaatgctttacgctgatgatggtggtggtttttgtggtctgtaatttgattgtcgatttgctcaacgccgcgctggacccgcgtattcgtcgtcatgaaggagcgcacgcgtga

SEQ ID NO: 2528 - DNA, 834 bp, Escherichia coli
gtgaactttttcctctcctcccgctggtcggttcgcctggcgctgatcattatcgccctgctggcgctgattgcgctcaccagccagtggtggctgccgtatgaccctcaggctattgatttgccgtcgcgcctgctctcgccggatgcgcagcactggctgggcaccgatcatttagggcgcgatattttctcgcggctgatggcagcgacccgcgtgtcgctcggctcggtaatggcctgcctgctgttggtgctgacattagggctgattattggcggcagcgccgggctgattggcgggcgcgttgatcaggccaccatgcgcgtcgctgatatgtttatgaccttcccaacctcgattctgtcgttctttatggtcggcgtgctcggcaccgggttgaccaatgtgattatagccatcgccctgtcgcactgggcgtggtatgcacgcatggtgcgtagcctggtgatttcactgcgccagcgcgagtttgtgctggcatcacggctttctggcgcgggccatgtgcgggtgtttattgatcatctggcaggtgcggtgatcccctcgctgctggtgctggcgacgctggatatcggtcatatgatgctacacgtcgcggggatgtccttcctcggtctcggcgtgaccgcgccgaccgccgaatggggcgtgatgattaacgacgcgcgtcagtatatctggacccagccggtgcaaatgttctggccggggctggcgctgtttatcagcgtgatggcctttaacctggtgggtgacgcactgcgcgatcatctggaccctcatctggtgacggagcacgcacactaa

SEQ ID NO: 2529 - DNA, 765 bp, Escherichia coli
atgccacaacagattgaactccgtaatatcgcgctacaggccgcgcagccgctggtgcacggcgtatcgttaaccctgcaacgtgggcgtgtgctggcgttagtcggcggtagtggcagcgggaagtcgctgacctgcgccgcgacgctgggcattctgcctgctggcgttcgccagacggcgggggaaattttggccgatggaaaaccggtttctccctgcgccctgcgcggaatcaaaattgccaccatcatgcagaacccgcgcagtgcctttaatccgctgcacaccatgcacacccacgcgcgtgaaacctgcctggcgctggggaaacccgccgatgacgctacgcttaccgctgccatagaagcggtggggctggaaaacgccgcgcgcgtgctgaagctctacccgttcgagatgagcggcggcatgttgcagcgcatgatgattgcgatggcggtgctgtgcgaatcaccgtttatcatcgccgatgaaccgaccaccgatctcgacgtggtagcacaggcgcgcatcctcgatctgctggaaagcattatgcaaaaacaagcaccgggaatgctgctggttacccatgatatgggcgtggtagcgcgtctggcagacgatgtggcggtaatgtctcacggtaagattgttgaacagggcgatgtagaaacgctgtttaacgcccccaaacatgcggtaacgcgcagcctggtttccgctcatctcgccctctacggtatggagctggcatcatga

SEQ ID NO: 2530 - DNA, 807 bp, Escherichia coli
atgactttacttaacgtctccgacctttcccatcactacgcgcacggtggatttagcggcaaacatcaacaccaggcggtgctgaataacgtttccctggccctgaaaagcggtgaaaccgtcgccctgctggggcgcagcggctgcggaaaaagtaccctcgcgcggctgctggtagggttagagtcgccctcacagggaaatattagctggcgcggcgaaccgttggcgaagctcaatcgcgcgcaacgtaaagcgttccgccgtgatattcaaatggtgtttcaggactccatcagcgccgtgaatccgcgcaaaaccgtgcgcgagatcctgcgtgaaccgatgcgccacctgctatcgctgaaaaaagccgaacaactggcgcgcgccagtgaaatgctgaaggcggtcgatctcgacgacagcgtgctcgacaaacgcccaccgcagttaagcggcggccagctccagcgcgtctgcctggctcgcgcgctggcggtcgaaccgaaactgctgattctggatgaagcggtttcgaaccttgatctcgtgttacaggcgggcgtcattcgcctgctgaaaaagctgcaacaacagtttggcaccgcctgcctgttcatcacccacgacttacgcctggtggaacgcttctgtcagcgggtgatggtgatggacaacggacaaatcgtcgaaacccaggtggtgggagataaattaaccttttcctctgacgccggacgtgtgctacaaaacgcggtattacccgcattccccgtgcgccgtcgcaccacagaaaaggtttaa

SEQ ID NO: 2531 - DNA, 402 bp, Escherichia coli
atgcaacgagtcaccatcacgcttgatgacgatttactggagacgctggacagcctgagccagcgtcgtggttataacaaccgttccgaggcgatccgcgatattctgcgtagcgccctggcgcaggaagccactcaacaacacggcacacaaggtttcgcggtgctgtcgtatgtgtatgaacacgaaaaacgcgacttagccagccgtattgtctccacccagcatcatcaccacgatctctcggttgctactctgcatgtgcacattaatcacgacgactgtctggaaatcgccgtgttgaaaggtgacatgggcgacgtgcagcattttgccgatgacgtcatcgcccagcgcggcgtgcggcacgggcatttgcagtgcctgccgaaggaagattaa

SEQ ID NO: 2532 - DNA, 1125 bp, Escherichia coli
atgcgccatttacgcaatatttttaatctgggtatcaaagagttgcgcagtctgctcggtgataaagcgatgctgacgctgattgtcttctcgtttacggtgtcggtgtattcgtcagcgaccgttacgccaggatcgttgaacctcgcgccgatcgccattgccgatatggatcaatcgcagttatcgaaccggatcgttaacagcttctatcgcccgtggtttttgccaccggagatgatcaccgccgatgagatggatgccgggctggacgccggacgttataccttcgcgataaatattccgcctaattttcagcgtgatgtcctcgccggacgccagccggatattcaggtgaacgttgatgccacgcgcatgagccaggcatttaccggcaatgggtatatccagaatattatcaacggtgaagtgaacagctttgtcgcgcgctaccgtgataacagcgaaccgttggtatcgctggaaacacggatgcgctttaacccgaaccttgatcccgcgtggttcggtggggtgatggcgatcatcaacaacattaccatgctggcgattgtattgaccggatcggcgctgatccgcgagcgtgaacacggcacggtggaacacttactggtgatgccgataacgccgtttgagatcatgatggcaaaggtctggtcgatggggctggtggtgctggtggtgtcgggattatcgctggtgctgatggtgaaaggcgtgctgggcgtaccgatagaaggctcgatcccgctgtttatgctgggcgtggcgctcagtctgtttgccaccacgtcaatcggtatttttatggggacgatagcgcgttcaatgccgcaactggggctgctggtgattctggtgctgctgccgctgcaaatgctttccggtggttccacgccgcgcgaaagtatgccgcagatggtgcaggacattatgctgaccatgccgacgacacactttgttagcctcgcgcaggccatcctctaccgtggtgccggattcgaaatcgtctggccgcagttcctgacactgatggcaattggcggcgcgtttttcaccatcgcactgctgcgattcaggaagacgattgggacaatggcgtga

SEQ ID NO: 2533 - DNA, 2736 bp, Escherichia coli
atgacgcatctggaactggttcccgtcccgcctgtcgcgcaactggcgggcgtgagccagcattatggaaaaaccgttgcgctgaacaatatcacactcgatattccggcccgttgcatggtcgggctgattggaccggatggtgtcggtaaatcgagcttgttgtcgttgatttccggtgcccgcgtcattgagcagggcggcgtgatggtgctgggcggcgatatgcgcgacccgaagcatcgccgcgacgtctgcccgcgcattgcctggatgccgcaggggctgggcaaaaatctctaccacaccttgtcggtgtatgaaaacgtcgattttttcgcccgcctgttcggtcacgacaaagcggagcgggaagtgcgtattaatgagctgctgaccagcaccggattagcaccgtttcgcgatcgtccggcagggaaactctccggcgggatgaagcaaaaacttgggctgtgctgtgcgttaatccacgacccggaattgttgattcttgatgaaccaacaacgggggttgacccgctttcccgcgcccagttctgggatctgatcgacagcattcgccagcggcagagcaatatgagcgtgctggttgccaccgcctatatggaagaggcggaacgcttcgactggctggtagcgatgaatgccggagaagtgctggcaaccggtagcgccgaagaactgcggcagcaaacgcaaagcgccacgctggaagaagcatttataaatctgttaccgcaagcacaacggcaggcgcatcaggcggtagtgatcccaccgtatcaaccggaaaacgcagagattgccatcgaagcgcgcgatctgaccatgcgttttggttcctttgtcgccgttgatcacgtcaattttcgcattccacgcggggagatttttggtttcctcggttcgaacggctgcggtaaatccaccaccatgaaaatgctcaccggactgctgcccgccagcgaaggtgaggcgtggctgttcgggcaaccggttgatccaaaagatatcgatactcgtcgccgggtgggctatatgtcgcaggcgttttcgctctataacgaactcaccgtgcggcaaaacctggagttacatgctcgtctgtttcatatcccggaagcggaaattcccgcgcgagtggctgaaatgagcgagcgttttaagctcaacgacgtcgaagatgtattgccggagtcattgccgctcggcattcgccagcggctatcgctggcggtggcggtgattcatcgcccggagatgttaatccttgatgaaccgacttctggcgtcgatccggtggcgagggatatgttctggcagttgatggtggatctctcgcgccaggacaaagtgactatcttcatctccacccactttatgaacgaagcggaacgttgtgaccgtatctcactgatgcacgccggaaaagtgctcgccagcggtacaccgccggaactggttgagaaacgcggagccgccagtctggaagaggcatttatcgcttatttgcaggaagcggcagggcagagcaacgaagctgaagcgccgccggtggtacacgacaccacccacgcgccacgtcagggattcagcctgcgccgtctgtttagctacagccgccgcgaagcgctggaactgcgacgcgatccggtacgttcgacgctggcgctgatgggaacggtgatcctgatgctgataatgggttacggcatcagtatggatgtggaaaacctgcgctttgcggtgcttgaccgcgatcaaaccgtcagtagccaggcgtggacgctcaatctctccggttcccgttactttatcgaacagccaccgctcaccagttatgacgagcttgatcgtcggatgcgtgcgggcgatattacggtggcaattgagatccctcccaatttcgggcgcgatatcgcgcgtggtacgcccgtggaactcggtgtctggatcgacggtgcgatgccgagccgcgccgaaacggtaaaaggctacgtgcaggccatgcaccagagctggctacaggatgtggcgagccgacagtccacacccgccagccaaagcgggctgatgaatattgagacgcgctatcgctataacccggacgtaaaaagcctgccggcgattgttccggcggtgatcccgcttctgctgatgatgatcccgtcaatgctaagcgcccttagcgtggtgcgggaaaaagagctagggtcgattatcaacctttacgtgactcccaccacccgtagcgaatttttacttggcaaacagctgccatacattgcgctggggatgctgaactttttccttctctgcgccctgtcggtgtttgtgtttggcgtgccgcataaaggcagtttcctgacgctcaccctggcggcgctgctgtatatcatcatcgccaccggaatggggctgctgatctccacctttatgaaaagccagattgccgccattttcggtacggcgattatcacgttgatcccggcgacacagttttccgggatgatcgatccggtagcttcgctggaaggtccaggacgttggatcggcgaggtttacccgaccagtcattttctgactatcgcccgcgggacgttctcgaaagcgctggatctgactgatttgtggcaactttttatcccgttgctgatagccataccgctggtgatgggcttaagcatcctgctgctgaaaaaacaggagggatga

SEQ ID NO: 2534 - DNA, 1068 bp, Escherichia coli
atggataagagtaagcgccatctggcgtggtggggtgtcggggcactggcggtggctgccgtcgtggcgtggttgctgttgcgcccggcgggtgtgccggaaggctttgctgtcagcaatgggcgcattgaagcgacggaagtggatatcgccagcaaaattgccgggcgtatcgacaccattctggtgaaagaaggccagtttgttcgagaaggtgaagtgctggcgaagatggatactcgcgtgttgcaggaacagcgactggaagccatcgcgcaaatcaaagaagcacaaagtgccgttgccgccgcgcaggctttgctggagcaacgccaaagcgaaactcgtgccgcacagtcgctggttaatcaacgccaggcagaactggactccgtagcaaaacgtcatacgcgttcccgctcactggcacaacggggggcaatttctgcgcaacagttggatgacgaccgcgccgccgctgagagcgcccgagctgcgctggaatcggcaaaagctcaggtttctgcttctaaagccgctatagaggcggcacgcaccaatatcattcaggcgcaaactcgcgtcgaagcggcacaagccactgaacggcgcattgccgcagatatcgatgacagcgaactgaaagccccgcgtgacggacgcgtgcagtatcgggttgccgagccaggcgaagtgctggcggcaggcggtcgggtgctgaatatggtcgatctcagcgacgtctatatgaccttctttctgccaaccgaacaggcgggcacgctgaaactgggcggtgaagcacgtttgattcttgatgctgcaccagatctgcgtattcccgcgaccatcagttttgtcgccagcgtcgcccagttcacgccaaaaactgtcgaaaccagcgatgagcggctgaaattgatgttccgtgtcaaagcgcgtatcccaccggaattactccagcagcatctggaatatgtcaaaaccggattgccgggcgtagcgtgggtgcgggtgaatgaagaacttccgtggcctgacgacctggtggtgaggttgccgcaatga

SEQ ID NO: 2535 - DNA, 1065 bp, Escherichia coli
atggggtttaaaatgaatatatatatcggatggttgtttaaattaattcctttactgatgggtataatatgcatcgcattaggtgagtttgtattaaccggttcagggcaaagtgaatatttcgttgcagggcatgttctgatttctctttctgcgatatgtctggcattgttcactaccgcatttattattatatctcagttaactcacggcatgaataaattctacaacaggttatttcccgttattggttatgccggttctgctacaactatgatttggggatggtcactgttggcaagcaataatgtgatggcagatgaatttgtcgccggtcatgttattttcggcgttggcatgattgccgcttgtgtatcaaccgtagcggcatcttccggacattttctgttgatccccaaaaacgcctcgggcagtaagagtgacggtacgccattgcaggcctattcttcaacaatcggtaattgcttaattgccgttcccgttctgcttactctctttggtttcatttggtcagtcatactgttacgtagtgcagatatcacaccacattatgttgcaggtcacgtactaatggggttaacggcaatttgcgcttgtcttattggccttgtcgccactattgtccatcaaacgcggaatacgttctcagtgaaagaacattggctgtggtgctattgggttattttgcttggctcacttaccattatttttggtctctacgtattaatcagttcagatgcaagcgcccgcctggcccccggcattattctcatttgcctggggatgatctgctacagtattttctccaaagtgtggttgttagcgctggtatggcgacgcacctgttcgttagccaacagaatacccatgattccggtatttacctgtctgttttgtctgttccttgctgcgttcctggctgaaattgcgcaaaccgatatggcttactttattccttcgcgagttctggttggcttaggtgcagtttgttttacactgttttccatcgtttctatattagaagcgggttcagcgaaaaaataa

SEQ ID NO: 2536 - DNA, 1194 bp, Escherichia coli
gtggaaaggtttgatgccattattataggcgctggtgcggcaggtatgttctgttctgcgctggcaggtcaggcaggacgccgggttctgctgatcgataatggtaaaaaaccagggcgcaaaatcctcatgtctggcggtgggcgctgcaactttaccaacctttatgtcgaaccgggcgcttatctgagccagaatccgcatttttgtaagtctgcactcgcgcgttttacccagtgggatttcattgatctggtcaataaacacggcatcgcctggcacgagaaaacgttagggcagctcttctgcgatgactccgcgcagcagattgtcgacatgctggtggatgagtgcgagaagggcaatgtggccttcagattgcgtagcgaagtgctgagcgtggcgaaggatgatacaggcttcacgcttgaactgaacggcatgactgtcggttgcgaaaagctggtcattgcgaccggtggactgtcaatgccggggctgggcgcatcgccgtttggttataagattgccgaacaattcggcctcaacgtgctgccgacccgtgcgggtctggtgccattcactctgcataaaccgttgcttgaagagttacaggtgctggcgggcgtggcggtgccttccgtgattaccgctgaaaacggtaccgttttccgtgagaacttactcttcacccaccgcggcttatctggaccggcggtgttgcagatttccagctactggcaaccgggtgaatttgtcagcatcaatctgctaccggatgtggacctcgaaaccttcctgaatgagcagcgtaatgcacatccgaatcaaagcctgaaaaacacgctggcggttcatctgccgaagcggttggttgaacggttacaacaactcgggcaaatcccggatctctcgctaaaacagctcaacgtgcgtgaccaacagacactgattagcacattgactgactggcgcgtacaacccaacggcactgaaggctatcgcactgccgaagtgacgctcggcggcgtggacaccaacgaactctcttcacggacgatggaagcgcgcaaagtgcctgggctgtacttcatcggcgaagtgatggacgtcaccggctggctggggggctataacttccagtgggcgtggtcgagtgcatgggcttgtgcgcaggatttggtggcagaataa

SEQ ID NO: 2537 - DNA, 1500 bp, Escherichia coli
atgctacatttgtttgctggcctggatttgcataccgggctgttattattgcttgcactggcttttgtgctgttctacgaagccatcaatggtttccatgacacagccaacgccgtggcaaccgttatctatacccgcgcgatgcgttctcagctcgccgtggttatggcggcggtgttcaactttttgggtgttttgctgggtggtctgagtgttgcctatgccattgtgcatatgctgccgacggatctgctgcttaatatgggatcgtctcatggccttgccatggtgttctctatgttgctggcggcgattatctggaacctgggtacctggtactttggtttacctgcatccagctctcatacgctgattggcgcgatcatcgggattggtttaaccaatgcgttgatgaccgggacgtcagtggtggatgcactcaatatcccgaaagtattaagtattttcggttctctgatcgtttcccctattgtcggcctggtgtttgctggcggtctgattttcttgctgcgtcgctactggagcggcaccaagaaacgcgcccgtatccacctgaccccagcggagcgtgaaaagaaagacggcaagaaaaagccgccgttctggacgcgtattgcgctgatcctttccgctatcggcgtggcgttttcgcacggcgcgaacgatggtcagaaaggcattggtctggttatgttggtattgattggtgtcgcaccagcaggcttcgtggtgaacatgaatgccactggctacgaaatcacccgtacccgtgatgccatcaacaacgtcgaagcttactttgagcagcatcctgcgctgctgaaacaagcgaccggtgctgatcagttagtaccggctccggaagctggcgcaacgcaacccgcggagttccattgccatccgtcgaataccattaacgcgctcaaccgcctgaaaggcatgttgactaccgatgtggaaagctacgacaagctgtcgcttgatcaacgtagccagatgcgccgcattatgctgtgcgtttctgacactatcgacaaagtggtgaagatgcctggcgtgagtgctgacgatcagcgcctgttgaagaaactgaagtccgacatgcttagcaccatcgagtatgcgccggtgtggatcatcatggcggtcgcgctggcgttaggtatcggtacgatgattggctggcgtcgtgtggcaacgactatcggtgagaaaatcggtaagaaaggcatgacctacgctcaggggatgtctgcccagatgacggcggcagtgtctatcggcctggcaagttataccgggatgccggtttccactactcacgtactctcctcttctgtcgcggggacgatggtggtagatggcggcggcttacagcgtaaaaccgtaaccagtattctgatggcctgggtgtttacccttccggctgcggtactgctttccggcgggctgtactggctctccttgcagttcctgtaa

SEQ ID NO: 2538 - DNA, 336 bp, Escherichia coli
atgataagcaccgtcgcattattttgggctttatgtgtcgtttgcattgttaacatggcgcgctatttctcatcactacgcgcgttgttagtggtactgcgtaactgcgatccattgctctatcaatatgttgatggagggggcttttttacctcacatggccaacccaacaaacaggtgcgtctcgtttggtatatctatgcccaacgttatcgcgatcatcacgatgatgagtttattcgccgctgtgagcgggtgcgtcggcagtttattctgaccagcgcattgtgtggtctggtggtggtcagcctgattgcattgatgatttggcattaa

SEQ ID NO: 2539 - DNA, 435 bp, Escherichia coli
atggcttataaacacattctcatcgcggtcgacctctccccggaaagcaaagttctggtagagaaagcagtctctatggctcgcccctacaatgcgaaagtttctctgatccacgtagatgtaaactactctgacctatacaccgggcttatcgatgtgaatctgggtgatatgcagaaacgcatctctgaagagacacatcatgcgctgaccgagctttcaaccaatgcaggctacccaatcactgaaaccctgagcggcagcggcgatctgggccaggtactggtcgatgcaatcaagaaatacgatatggatctggtggtttgtggtcaccaccaggacttctggagcaaactgatgtcttccgcacgtcagctgatcaacaccgttcacgttgatatgctgattgttccgctgcgcgacgaagaagaataa

SEQ ID NO: 2540 - DNA, 1470 bp, Escherichia coli
atgaatacaacaacacccatggggatgctgcagcaacctcgcccatttttcatgatcttttttgtcgagttatgggagcgattcggctactacggcgtgcagggcgtactggcggttttcttcgttaaacagcttgggttctcgcaagagcaggcttttgtcacttttggtgcttttgctgcgctggtctatggcctcatttccattggtggctatgttggcgaccacctgctgggaaccaaacgcaccattgttctcggagcacttgtgctggcgattggctacttcatgaccggcatgtcgctacttaagcctgacctgattttcatcgccctggggactatcgctgtcggtaacggcctgtttaaagctaacccagccagcttgctttcgaagtgctacccgccgaaagatccgcggcttgatggcgcattcaccctgttctatatgtcgatcaatatcggctcgttgatagcgttatcgctggcccctgtgatcgctgatagattcggttattcagtcacctacaacctgtgcggtgcagggttaattatcgcattactggtttacatcgcctgtcgtggaatggtgaaagacattggttctgaacccgacttccggccgatgagcttcagtaaactgttgtacgtattacttggcagcgtggtgatgatcttcgtctgcgcctggctgatgcacaacgtagaagtcgccaatctggtgctgattgttctctccatcatcgtcaccatcatcttctttcgtcaggcattcaagctggataaaaccgggcgcaataaaatgtttgtcgcctttgtcctgatgctcgaagcggtggtgttttacattctctacgcccagatgccaacgtcgctgaacttctttgccatcaacaacgtgcatcatgaaattctcggcttttccatcaacccggtcagcttccaggcgcttaacccgttctgggtggtactcgccagcccaatactggcaggcatttacacgcatctgggtaacaaaggcaaagatctctcgatgccaatgaagtttactctcggcatgtttatgtgctcactgggctttttgacggctgcagcggctggaatgtggtttgcggatgcccaggggctgacatcgccatggtttatcgtgctggtgtacttattccagagcttaggtgaactgtttattagcgcccttggcctggcgatgattgctgccctggtgccgcagcatttgatgggctttattctcgggatgtggttcctgacgcaggctgccgcgttcttgctgggcggctatgtggcaacatttaccgcagtaccagacaacattaccgatccacttgagacgttgcccgtctataccaacgtgtttggtaagattggcctggttacgctgggcgttgccgtagtgatgctattgatggtgccgtggctaaaacgcatgattgcgacgccggaaagccattaa

SEQ ID NO: 2541 - DNA, 753 bp, Escherichia coli
gtgaaaatctgcttaattgatgaaacaggcgccggagacggtgccttatctgttctggcggctcgctgggggctggagcacgatgaagacaacctgatggcgctggtgttaacgccggagcacctggaactgcgcaagcgtgatgagccgaaacttggcggcatctttgttgattttgttggcggagcgatggcgcaccgacgcaaattcggcggcggacgtggtgaagcggtggcaaaagcagtgggtattaaaggcgattatttgccggatgtggtggacgccaccgcaggattagggcgcgatgcctttgtgctggcttcggtcggctgccgcgtgcggatgctggagcgcaatccggtggttgccgcgttgctcgacgatggtctggcgcgtggttatgcggatgcggaaatcggcggctggttacaggaacgtttgcagttgattcacgcctccagtctgacggcgctgagcgatatcaccccgcgtccgcaggtagtttatcttgacccaatgttcccgcataagcagaaaagcgcgctggtgaaaaaagagatgcgcgtgtttcagtcgctggtggggccggatcttgatgccgatggattgttggagcctgcgcggttgctggcaaccaaacgcgtggtggtgaagcgtccggactatgcgccgccgctggcgaatgtcgccacgccaaacgcggtagtcactaaagggcatcgctttgatatttatgccggaacgccggtgtaa

SEQ ID NO: 2542 - DNA, 2043 bp, Escherichia coli
atgacgaatccgttactgactccctttgaattgcctccgttttctaaaattctcccggaacatgtcgttccagccgtgactaaggcgctgaacgactgccgcgaaaatgtggagcgcgtagtagcgcaaggggcaccgtacacctgggaaaatctctgccagccgttggcggaagtggacgatgtgctggggcgtatcttctccccggtcagccatctgaactcggtgaaaaatagcccggaactgcgtgaagcgtacgaacaaaccctgccgctgctgtcagaatacagcacctgggtagggcaacatgaagggctgtataaagcatatcgcgacctgcgcgatggcgatcattacgccacgctgaacacggcgcagaaaaaagcggttgataacgcactgcgcgacttcgaactctctggcatcggtctgccgaaagagaaacagcagcgttacggcgaaattgctacccgtctttctgaactgggcaatcagtacagcaacaacgtcctcgatgcgacgatgggctggaccaaactcgttaccgacgaagcggagctggcgggaatgcctgaaagcgcgctggctgcggcaaaagcccaggccgaagcgaaagagctggaaggttatttgctgacgctggatatcccaagctacctgccggtaatgacctactgcgacaaccaggctctgcgcgaagagatgtatcgcgcttatagcactcgtgcttccgatcaaggtccgaacgccggtaagtgggataacagcaaggtgatggaagagatcctcgcgctgcgtcacgaactggcgcaactgctgggctttgaaaactacgccttcaaatcacttgccactaaaatggcagaaaacccgcagcaggtgctggatttcttaaccgatctggcaaaacgcgcgcgcccgcaaggcgaaaaagagctggcgcaactgcgcgccttcgccaaagccgaatttggcgtcgatgagttgcaaccgtgggatatcgcttactacagcgaaaaacagaaacagcacctctacagcatcagcgatgaacaactgcgtccgtacttcccggaaaacaaagcggttaacggcctgtttgaagtggtgaaacgtatttacggcatcaccgctaaagagcgtaacgatgttgatgtctggcatccggatgtacgtttcttcgaactgtatgacgagaacaacgaactgcgcggcagcttctacctcgacctgtatgcccgtgaaaacaaacgcggcggggcgtggatggatgactgcgtaggccagatgcgtaaagccgacggttcgctgcaaaaaccggtcgcgtatctgacctgcaacttcaaccgcccggtaaatggtaaaccagcgctgtttacccatgacgaagtgatcaccctgttccacgagttcggtcacggcctgcaccatatgctgacccgcattgaaaccgctggtgtttccgggatcagtggggtgccgtgggatgcggtcgaactgccgagccagtttatggaaaactggtgctgggagccggaggcgctggcgtttatctccggtcactatgaaaccggcgagccgctgccgaaggagctgctggataaaatgctggcagcgaaaaattaccaggcggcgctgtttattctgcgccagctggagttcggcctgttcgatttccgcctccatgcagagttccgtccggatcagggggcgaaaatcctcgaaactctggcagaaatcaagaaactggttgccgtagtaccgtctccgtcatggggccgtttcccgcatgctttcagccacatatttgccggtggttatgcggcaggttactacagctacctgtgggccgatgtgctggcggcagatgccttctcgcgttttgaggaagagggcattttcaaccgtgaaactgggcaatcgttcctcgacaacattctgagccgtggcggttcagaagagccgatggagctgttcaaacgcttccgtggtcgtgaaccacagctggatgcgatgctggagcattacggcattaagggctga

SEQ ID NO: 2543 - DNA, 843 bp, Escherichia coli
atgctcagttatcgccacagctttcacgctggcaaccacgccgacgtccttaaacataccgttcagagcctgatcattgagtcgctgaaagagaaagataaaccgtttctctatctcgacacccacgcaggggccgggcgttatcagttaggcagcgaacatgccgagcgtaccggcgaatatctcgaaggcatcgcccgtatctggcagcaggacgatttgcctgcggagctggaggcgtacatcaatgtggtaaaacacttcaaccgtagcgggcagttgcgttattaccccggttcgccgttgattgctcgccagctactgcgtgaacaggacagcctgcaactgaccgaactgcacccgagcgattacccgttgctgcgttctgaatttcagaaagacagccgtgcgcgcgtcgaaaaagccgacggtttccagcagcttaaggccaagctgccgccggtttcccgccgtggtttaatccttatcgacccgccgtatgaaatgaaaaccgactatcaggcggtggtcagcgggatagcagaaggttacaaacgtttcgccactggcacttacgcattgtggtatccagtggtgctgcgccagcaaattaagcgcatgatccacgacctggaagcgaccggcattcgcaaaattctgcaaattgaactggcggtgctgccagacagcgatcgccgtggcatgaccgcttccggcatgattgtgattaacccgccgtggaagctggaacagcagatgaataacgtgctgccgtggctgcacagcaaactggttccggcaggcaccgggcacgccaccgtaagctggatcgtgccagagtaa

SEQ ID NO: 2544 - DNA, 1353 bp, Escherichia coli
atgactaaacactatgattacatcgccatcggcggcggcagcggcggtatcgcctccatcaaccgcgcggctatgtacggccagaaatgcgcactgattgaagccaaagagctgggcggcacctgcgtaaatgttggctgtgtgccgaaaaaagtgatgtggcacgcggcgcaaatccgtgaagcgatccatatgtacggcccggattatggttttgataccactatcaataaattcaactgggaaacgttgatcgccagccgtaccgcctatatcgaccgtattcatacttcctatgagaacgtgctcggtaaaaataacgttgatgtaatcaaaggctttgcccgcttcgttgatgccaaaaccattgaagtcaacggcgaaaccatcacggccgatcatattctgatcgccaccggtggtcgtccgagccacccggatattccaggcgtggaatacggtattgattccgacggattcttcgcccttccggctttgccagagcgcgtagcggttgttggcgcgggttacatcgccgttgaactggcgggcgtgattaacggcctcggtgcgaagacgcatctgtttgtgcgtaaacatgcgccgctgcgcagcttcgacccgatgatctctgaaacgctggttgaagtgatgaacgccgaaggcccgcagttgcacaccaacgccatcccgaaagcggtagtgaaaaatgccgatggtagcctgacgctggagctggaagatggtcgcagtgaaacggtggattgcctaatttgggcgattggtcgcgagcctgccaatgacaacatcaacctggaagccgctggcgttaaaaccaacgaaaaaggctatatcgtcgtcgataaatatcaaaacaccaacgttgaaggtatttacgcggtgggcgataacacgggtgcagtggaactgacaccggtggctgttgcagcaggtcgccgtctctctgaacgcctgtttaataacaagccggatgagcatcttgattacagcaacattccgaccgtggtcttcagccatccgccgattggtactgttggtttaacggagccgcaggcgcgcgagcagtacggcgacgatcaggtgaaagtgtataaatcctctttcaccgcgatgtataccgccgtcaccactcaccgccagccgtgccgcatgaaactggtatgcgttggaccggaagagaagattgtcggtattcacggcattggttttggtatggacgaaatgttgcagggcttcgcggtggcgctgaagatgggtgcaaccaaaaaagacttcgacaacacggttgccattcacccgacagcggcagaagagttcgtgacaatgcgttaa

SEQ ID NO: 2545 - DNA, 216 bp, Escherichia coli
atgcatccgcttactcatccattgcctgtcacggcgcatgtctcattgttagatgtgggctatctcactccagccagagccaccaactcagggctgaacagtaaaaaaaccgacgcgaagtcggtttttttacgtcctgattcagacctcctttcaaatgaatgcccaacgcttaattcacacctacacctttctctacacttacatattcgttaa

SEQ ID NO: 2546 - DNA, 426 bp, Escherichia coli
atgagcaacattaccatttatcacaacccggcctgcggtacgtcgcgtaatacgctggagatgatccgcaacagcggtacagaaccgaccattatctattatctggaaacaccaccgacgcgcgatgagctggtaaaactcattgccgatatggggattaccgtacgcgcgttgctgcgtaaaaacgtcgagccgtatgagaaactgggccttgcagaagataaatttactcacgatcagttaatcgactttatgcttcagcacccgattctgattaatcgcccgattgtggtgacgccacagggaactcgcctgtgccgcccttcagaagtcgtgctggaaattctgccagatgcgcaaaaaggcgcgttcaccaaggaagatggcgagaaagtggttgatgaggcgggtaatcgcctgaaataa

SEQ ID NO: 2547 - DNA, 174 bp, Escherichia coli
atgtcaattgactttaccccaggtgtaataaatacatataacggtgatatttataactgcacaacaaataccgataatgttaaaacgccagacacaccgaagtggccttgtgataaccgggaagaacaacaccccattaattccccattctctggagaatggatacacctctga

SEQ ID NO: 2548 - DNA, 567 bp, Escherichia coli
atgaacatgacaaaaggtgcactcatcctcagcctttcatttttgcttgccgcatgtagttcaattccgcaaaatatcaaaggcaataaccaacctgatattcaaaaaagttttgttgctgttcataaccagccggggttatatgttggtcaacaagcgcgctttggtgggaaggttatcaacgttatcaatggcaaaacggatacgttgttagaaatcgctgtattaccgttggatagctatgcgaagcctgatattgaagccaactatcagggccgactgctcgccagacaaagcggcttccttgatccagtgaactatcgtaatcactttgttaccatcctcggtaccattcagggtgaacaacctggctttatcaataaagtcccgtataacttcctggaagtgaatatgcagggcatccaggtgtggcatttgagagaagtggttaataccacctataacttgtgggattacggctatggtgcattctggccggaaccgggctggggggctccttactacaccaatgcggtgagtcaggtaacacctgagctggtcaaataa

SEQ ID NO: 2549 - DNA, 531 bp, Escherichia coli
atgtttcttataattaccagggatacgatgtttttcaccgcgatgaaaaacattctgagtaaaggtaatgtcgttcatatacagaacgaagaagagatcgacgtaatgttgcatcagaatgccttcgtcattattgatacattaatgaataatgtatttcattctaattttctcactcaaattgaacgattaaaacctgtccatgtaattattttctccccctttaatattaaacgctgcctggggaaagtaccggtgacctttgttccgcgaactatcgccatcatcgactttgtcgcactcatcaatggcagttactgctctgtgcctgaagcggatgtgtccctctcgcgcaagcagcatcaggttctgagctgcattgcgaatcaaatgacaacggaagatattctggagaaactgaaaatatcgctaaaaacgttctactgccataaacacaatatcatgatgatcctcaatcttaagcggatcaatgagctggtacgccatcagcatattaattatctggtgtga

SEQ ID NO: 2550 - DNA, 1029 bp, Escherichia coli
atgaaccactacacacgctggcttgagttaaaagaacaaaatcccggaaagtacgcgcgtgacatcgcaggtttaatgaatatcagcgaagcagaactggcatttgcacgcgtcacgcacgacgcgtggcggatgcgcggcgatattcgtgaaattctggcggcgctggaaagcgttggtgaaaccaaatgtatttgtcgtaatgaatatgcagtccatgagcaagttggctcgttcacaaaccagcatttgaacggacatgccggattgatcctcaatccgcgcgcgctggatttacgtctgtttctcaatcaatgggccagtgttttccacatcaaagaaaacacggctcgtggcgaacgccagagtattcagttctttgatcatcagggcgatgcattactaaaagtttatgccaccgacaataccgatatggcggcatggagtgagcttctggcacggtttatcaccgatgagaatacgccgcttgagttaaaagccgttgatgcgccagttgttcaaacgcgagccgatgccagtgtggtcgagcaagagtggcgggcgatgaccgacgttcatcagttttttacgttgctcaagcgccacaacctgacgcgccaacaggcgttcaatctggtggcagacgatttggcctgcaaagtatccaacagtgcgttggcgcaaattcttgaatctgcacagcaggatggcaatgaaatcatggtgtttgttggcaaccgtggctgcgtacagattttcaccggtgtggtagaaaaagtggtgccaatgaaaggttggctgaatattttcaacccgacgtttacccttcatctattagaagagagcattgctgaagcctgggttacccgtaaaccgaccagcgatggccacgtaaccagcctggaattgtttgcccatgatggtacgcagatagcgcaactttatggtcaacgtacagaaggtgaacaggagcaagcgcaatggcgtaagcaaattgcttcgttgataccggaaggcgttactgcataa

SEQ ID NO: 2551 - DNA, 1983 bp, Escherichia coli
atgtcacgtccgcaatttacctcgttgcgtttgagtttgttggctttggctgtttctgccaccttgccaacgtttgcttttgctactgaaaccatgaccgttacggcaacggggaatgcacgtagttccttcgaagcgcctatgatggtcagcgttatcgacacttccgctcctgaaaatcaaactgctacttcagccactgatttgctgcgtcatgttcctggaattactcttgatggtaccggacgaaccaacggtcaggatgtaaatatgcgtggctatgatcatcgcggcgtgctggttcttgtcgatggtgttcgccagggaacggataccggacacctgaatggcacttttctcgatccggcgctgatcaagcgtgttgagattgttcgcggaccttcagcattactgtatggcagtggcgcgctgggtggagtgatctcctacgatacggtcgatgcaaaagatttattgcaggaaggacaaagcagtggttttcgtgtctttggtactggcggcacgggggaccatagcctaggattaggcgcgagcgcgtttgggcgaactgaaaatctggatggtattgtggcctggtccagtcgcgatcggggtgatttacgccagagcaatggtgaaaccgcgccgaatgacgagtccattaataacatgctggcgaaagggacctggcaaattgattcagcccagtctctgagcggtttagtgcgttactacaacaacgacgcgcgtgaaccaaaaaatccgcagaccgttgaagcttctgatagcagcaacccgatggtcgatcgttcaacaattcaacgcgatgcgcagctttcttataaactcgccccgcagggtaacgactggttaaatgcagatgcaaaaatatactggtcggaagtccgtattaatgcgcaaaacacggggagttccggcgagtatcgtgaacagataacaaaaggagcaaggctggagaaccgttccactctatttgccgacagtttcgcttctcacttactgacatatggcggtgagtattatcgtcaggaacaacatccgggtggcgcgacgacgggcttcccgcaagcaaaaatcgattttagctctggctggctacaagatgagatcaccttacgcgatctgccgattaccctgcttggcggaacccgctatgacagttatcgcggtagcagcgacggctacaaagatgttgatgccgacaaatggtcatctcgtgcggggatgactatcaacccgaccaactggctgatgttatttggctcatatgctcaggcattccgcgccccgacgatgggcgaaatgtataacgattctaaacacttctcgattggtcgcttctataccaactattgggtgccaaacccgaacttacgtccggaaactaacgaaactcaggagtacggttttgggctgcgttttgatgacctgatgttgtccaatgatgctctggaatttaaagccagctactttgataccaaagcgaaagattatatctccacgaccgtcgatttcgcggcggcgacaactatgtcgtataacgtcccgaacgccaaaatctggggctgggatgtgatgacgaaatataccactgatctgtttagccttgatgtggcctataaccgtacccgcggcaaagacaccgataccggggaatatatctccagcattaacccggataccgttaccagtaccctgaatattccgatcgctcacagtggcttctctgttggttgggtcggtacgtttgccgatcgctcaacacatatcagcagcagctacagcaaacaacctggctatggtgtgaatgatttctacgtcagttatcaagggcagcaggcgctcaaaggcatgaccactactctggtattgggcaacgccttcgataaagagtactggtcgccgcaaggcatcccacaggatggtcgtaacggaaaaattttcgtgagttatcaatggtaa

SEQ ID NO: 2552 - DNA, 915 bp, Escherichia coli
atgccaaggatcatcaccaggccgtttcttttttccccactaacgttatgtatttcagccgtggcctctgccgcgaagaccatggtaaaacgaaaaaaattgtttacggcattactggctcttagctggacttttagcgtaacggctgccgaacgtatcgtggtcgcaggaggatcgctgacggagctaatctacgcgatgggcgctggcaaacgcgtggttggtgtcgatgaaacgacatcctatccaccagaaaccgccaaactgccgcatattggttactggaaacaactcagcagcgaaggcattttgtcacttcgcccggatagcgtaattacctggcaggatgcaggaccgcaaattgtgctcgaccaactgcgggcgcaaaaagtcaacgtcgtcactctgccgcgtgtaccagccacccttgagcagatgtacgccaacattcgccaactggcaaaaacgttacaggttcctgaacaaggcgaggcgctggtgacacagatcaaccaacgcctggagcgagtacagcaaaacgtggcggccaaaaaagccccggttaaagccatgtttattctctccgcaggcggaagtgcgccacaggttgccggtaaaggcagcgtcgcggacgccattctttcgcttgccggagcagaaaacgtcgctacccaccagcagtacaaaagctacagcgcggaatcactgattgcggctaaccctgaagtgattgtcgtcacctcacaaatggtcgatggcgatattaatcggctacgttctattgccggaattacccacactgccgcatggaaaaaccagcgcattatcaccgttgatcaaaacctgattctgggaatgggtccgcgtattgctgatgtcgttgagtctttacaccagcagctttggccgcaataa

SEQ ID NO: 2553 - DNA, 1338 bp, Escherichia coli
atgaacacaaataacaccctggatctcacgccacattttgctttagacggtgatcagccctttaaagacaggcgcgccatgatgccgtttcgtggggccattccggttgccaaagagcaactggcacagacctggcaagagatgatcaatcaaacggtatcaccacgtaagcgactggtttacctacacattcctttttgtgcgacacactgcacgttttgtggtttttatcagaaccgttttaatgaagatgcgtgtgctcattataccgacgccctgattcgtgaaatagaaatggaagcagacagcgtattgcatcagtcggcccccatccacgcagtctatttcggtggcggcacgccttccgcgctttcggcacacgatttgaccagaatcatcaccacattacgagaaaagctgccactggcccctgattgtgaaatcactatcgaaggccgggtactgaattttgacgctgagcgaatcgatgcttgccttgatgcaggagcaaaccgcttctcaattggtattcagtcgtttaacagcaaaatccgcaagaaaatggcccgcacctcggatggcccaaccgctattgcgtttatggaaagcctggtcaaacgcgaccgtgccgcggtggtctgtgacctgctgtttggtctgccgggtcaggatgcgcaaacctggggagaagatctggctattgcccgcgatatcggtctcgacggcgtcgatctctatgcgctcaatgtcctgcccaatacaccgctgggcaaagccgtggaaaatgggcgtactaccgtgccctctccggcagaacgtcgcgatctttacctgcaaggatgtgattttatggacgatgccggttggcgctgcatcagtaacagccactggggccgtaccacacgcgaacgcaatctctataacctgctgattaaacaaggtgccgattgtctggcctttggttccggagccggcggttcgattaatgggtactcctggatgaacgaacgcaatcttcagacctggcatgaatccgtcgcggcaggcaaaaaaccgctgatgatgatcatgcgtaacgccgaacgtaatgcgcaatggcgtcataccttgcagtcgggcattgaaacggcgcgtgtaccgctggacgaacttacgccacatgccgaaaaactcgcgccgttactggcccagtggcaccaaaaaggcttaagccgcgatgcgtcaacgtgtctgcggttgaccaatgaaggtcgtttctgggcaagcaacattttgcagtctcttaatgaactgattcaggtacttaatgcgccagcaattgcgcttgaaaaaccataa

SEQ ID NO: 2554 - DNA, 495 bp, Escherichia coli
atgagccatgtctcgttacaggaatttttgaaaacggagccagacggtacgctggaggcgatcgccgaacaatacaacaccacgctgctggaggtagtgaaaaatctgccctctccgactgttgtgtcaggtgataaattcgatactgtctgggataccgtctgcgaatggggcaacgtcaccacgttagtacatactaccgatgtaatactcgaatttagcggcgaactgccttcgggtttccatcgccacggctatttcaacctacgcggaaagcacggcatgtccgggcatatcaaagcagaaaactgcacgcatattgccttgatcgaacgtaaatttatgggcatggacaccgcctctattctctttttcaataaggaaggcagcgcaatgctgaaaatcttcctcggtagggatgatcatcgtcagctcctgagcgaacaagtcagcgccttccatgctctggcagcatcgttaaaggaacacgcctga

SEQ ID NO: 2555 - DNA, 624 bp, Escherichia coli
atgacaccgtggctactctttggcgcaggcggaaaaggtgtgggtgccagaacgcttgaactggcgctggcggaacaacgtccggtcgttgctgtcattcgtcatgccgatgccgccacgaaactggcgcaacaaggcgtacaggtttttacaggcgacgcctgtgatgccagcgtagtcgcggctgcttgccgcgcagctggcccggatgcgcttatcatctcaacaatgggcggagctcaggattatctggcgcacagaacagtgattgatgaggccgagaaggctggcatcagtcgcatgattctggtgacctctttgggatgcggcgatagctggccgtttttatcagagcgggcaaaggctgcgtttggtcaggcggtacgggaaaaaacgctggcggaaagctggttgcaaaccagccagcttgattatgccattctccgccccggcggtctgcttgatggtgcggcaacgggcaaagcacaacggatacaaaatcaggagtgtcatggttttgttaaccgtgctgatgtcgccgcacatatccatgaactggcaaatgcgccagcacttaaccagcaggtctacagtctgattgaaccggacctgaaaccggcgtga

SEQ ID NO: 2556 - DNA, 957 bp, Escherichia coli
atggggctatcactattattgctagctctggtgctgtttggtgccagtcagggagcgttaaagatcagttttgatgccctttttgatgaggaataccgcgatatctggctcaatattcgtctaccacgggttttgctggcggtgctggtaggtgcagcgttggcaaccgcaggggtaattatgcaagggctttttcgcaacccaatggctgaccctggattacttggcgtcagtagcggttctgcattaatggttggcgttgctattgtgctgcccttctccttcccagtggtgctggtgctttatgagcaaatggtgtttgccattgccggaagtttagtggtctgcaccatcatttttctcatcacgcagcgccatcgcgatggcagcatgatgcaattattactcgccggtatcgccatcaatgccctgtgcggcgcagcgatcggcatcctgagctatatcggcgatgagcagcagctacgacaactcacattgtggatgatgggcaatcttggacaggcgcaatggccgacgttattggttgccagttcattcatcctaccggccattatcgcaacaacttgtctcgccggaacgctgaatttactgcagctcggtgatgaagaagcccactacctcggcgtgaacgtgaagcgtaaacgccagcaattactgttagtgagctcactgctcgttggtgctgccgtatcggtaagcggcattatcggctttattggcctggtgatcccgcatctgattcgcatgactaccggggcaaatcaccgctggctaatcccttgttccgccctcgccggagcctgtttattgctgatggcagacacgcttgcccgcacgctggtacagccagcagaaatgcccgtgggattattaaccagcctgcttggtggcccttattttatgtggttgattctgcgcaaccggaggatcacatga

SEQ ID NO: 2557 - DNA, 771 bp, Escherichia coli
atgatcagcgcccagaatctggtttatagccttcaggggcggcgtctgactgataatgtctcgctgacttttcccggtggggaaattgttgccatcctcgggcctaatggtgcgggaaaatctacgctgcttcgccagctaaccggctatcttcaacctgatagcggcgaatgtcggttgtttaataagccattaaatgaatggtcgattactgaactggcgaaacaccgggccgtgatgcgtcaaaatagccacatggcgtttccattcagcgtacaagaagttatccagatggggcggcatccgcatcgtactggtaatcaggataatgaaacagcacaaataatggcgttatgtgactgtcaggcgttagcaaaccgcgactatcggcaattatccggtggtgaacaacagcgcgtgcaattagcgcgcctgctggtgcaactctgggaacctactccctcaccgaaatggttatttcttgatgaaccaacttcggcgctggatattcaccatcagcagcacttgtttcgtttattacgccagttagttcacgaacggcagttcaatgtttgctgcgtattgcacgatctaaatcttgccgcgcgttatgcagaccgtgttgtattaatgcaaaaaggaaaggttatcgcaaatggtaagccgcaggacgtattgacacagcaggcgctgacaatgctctacggcgcggatattaccgtacttaaagatcctgccaaccattcaccactgatcgtcctcgatcattaa

SEQ ID NO: 2558 - DNA, 576 bp, Escherichia coli
atgcgcggcaaaggagcagggttacgcacacatgtattaattggcatgggaagcgccctgtttatgattgtttcgaaatatggttttgctgacgtgctgtctttaggtcacgtcggactggatcccagccgtattgctgctcaggttgtgacgggcgtcgggtttatcggtgcaggtaacattctcgttcgtaaccaaaatattgtaggtctgacgacggcagcggatatctgggtgaccgccgccattggtatggttattggcagcggtatgtacgaactgggtatttatggttcagtgatgaccttgctggtgctggaagtcttccatcaattaaccttccgcctgatgaacaaaaattaccatttacagctgacattagtgaacggtaatacggtatcaatgctcgactggtttaagcagcaaaaaataaaaacggatttagtttcgttgcaggaaaatgaagatcatgaagtggtcgccattgatatccagcttcatgccacaacgtcgatagaagatctgttgcgattattaaaaggtatggcaggggtgaaaggcgtttcaattagctaa

SEQ ID NO: 2559 - DNA, 339 bp, Escherichia coli
atgggttacaaaatgaacatttcatctctccgtaaagcgtttatttttatgggcgctgtagcggctttgtcactggtgaacgcacaatctgcgctggcagccaatgaatccgctaaagatatgacctgccaggaatttattgatctgaatccaaaagcaatgacaccagttgcgtggtggatgctgcatgaagaaacagtatataaaggtggcgataccgttactttaaatgaaaccgatctcactcaaattcctaaagtgatcgaatactgcaagaaaaacccgcagaaaaatttgtataccttcaaaaatcaagcatctaatgacttgccgaattaa

SEQ ID NO: 2560 - DNA, 333 bp, Escherichia coli
atgaaaaaagtattaggcgttattcttggtggtctgcttcttctgccagtagtgagcaatgcagcggatgcacaaaaagcagctgataacaaaaaaccggtcaactcctggacctgtgaagatttcctggctgtggacgaatccttccagccaactgcagttggttttgctgaagcactgaacaacaaagataaaccagaagatgcggttttagatgttgagggtattgcaaccgtaaccccagctatcgttcaggcttgtactcaggataaaaaagccagctttaaagataaagttaaaggcgaatgggacaaaattaagaaagatatgtaa

SEQ ID NO: 2561 - DNA, 573 bp, Escherichia coli
atgttatatatagataaggcaacaattttgaagtttgatctggagatgcttaaaaaacatcgcagagcaatccagtttattgccgtgctgctgtttatcgtcgggttgctgtgtatcagttttccgttcgtctctggcgacattttaagcacagtagtgggtgcattattaatctgctcgggcattgcgcttattgtcgggctattcagcaaccgcagtcataatttctggccggtattatccggtttcctcgtcgcagtcgcctatttattgatcggctatttcttcatccgcgcaccagagctgggcatttttgccattgcggcatttattgccggtttgttctgtgtggcaggggttattcgcctgatgaattggtatcgtcagcgttcaatgaaaggcagttggctacagctcgttattggtgtgctggatatcgtcattgcctggatattccttggtgctacgccgatggtgtcggtaacgctggtttccacactggtgggaattgaactgatatttagcgccgccagtctgttcagcttcgccagtttgttcgttaaaaagcaataa

SEQ ID NO: 2562 - DNA, 528 bp, Escherichia coli
atgatttttctcatgacgaaagattcttttcttttacagggcttttggcagttgaaagataatcacgaaatgataaaaatcaattccctgtcagagatcaaaaaagtaggcaataaacccttcaaggtgatcattgacacctatcacaaccatatccttgatgaagaagcgattaaattcctggagaaattagatgccgagagaattattgttttggcaccttatcacatcagtaaactaaaagctaaagcgcctatttattttgtcagccgtaaagaaagtatcaaaaatcttcttgagattacttatggtaaacacttgccccataagaattcacaactatgtttttcacataatcagttcaaaattatgcaactgattctgaaaaacaaaaatgaaagcaatatcacgtcaacgctcaacatttcgcaacaaacattaaagattcagaaattcaacattatgtacaagctgaaattaagacgtatgagcgacatcgtcaccctgggtatcacatcttatttttag

SEQ ID NO: 2563 - DNA, 330 bp, Escherichia coli
atgagggatttacagaccagcggcatagtggggttgtcagccagtaagatgggatgcaagcacagtgatcgacatggtgaggtcaacgacaaaaaaaatgttgccattctgccaacagtttctgccagcattcgggcaacgaagggttctactggtggatacacataccaggggaataaagtcgttttcgtctctccttcaataatcaccgggggtattgaaatcagcatctgcatccctcgtcatgccagccatcaatttcagttgcttatgtccttactaaaaataagatgtgatacccagggtgacgatgtcgctcatacgtcttaa

SEQ ID NO: 2564 - DNA, 1158 bp, Escherichia coli
atgaacagaagaagaaaactgttaataccgttgttattctgcggcgcgatgctcaccgcctgcgatgacaaatcggcggaaaacgccgccgccatgacgcctgaggtcggtgtcgtcacactctcccccggttcggtcaatgtgttgagcgaattgcccggtagaaccgttccttatgaagttgccgagatacgtccccaggtgggcggtattatcattaaacgcaactttatcgaaggcgataaagtgaaccagggcgattcgctgtatcagattgatcctgcgcctttacaggcagagctgaactccgccaaaggttcgctggcgaaagcgctctctaccgccagcaatgcccgcatcacctttaaccgccaggcatcgttgctgaagaccaactatgttagccgtcaggattacgacaccgcgcgcacccagttgaatgaagcagaagccaatgtcaccgtcgccaaagcggctgttgaacaggcgacgatcaatctgcaatacgcgaatgtcacctcgccgattacgggcgtcagcgggaaatcgtcggtgaccgtcggcgcactcgttaccgctaatcaggcagattcgctggttaccgtacaacgtctggacccgatttatgtcgatctcacgcagtcggtgcaggatttcttgcgcatgaaagaagaggtcgccagtgggcaaatcaaacaggttcagggcagtacgccagtacagctcaatctggaaaatggtaaacgttacggccagaccggcacgctgaaattctccgacccgacggtggatgaaaccacgggctccgtgacgttacgggcgattttccccaacccaaatggtgacttgctgcctggcatgtatgtcacggcattagtggatgaaggtagccgccagaatgtattactggtgccgcaggaaggcgtcacccacaacgcccagggtaaagcaacggcactcattctggataaagacgatgtcgtgcagctacgcgaaatcgaagccagcaaagccatcggcgaccagtgggttgtcacctctggcttgcaggctggcgatcgggtgatcgtttccggcttgcaacgcattcgtccgggtatcaaagcacgagcaatttcctccagccaggaaaacgccagcaccgaatcgaaacaataa

SEQ ID NO: 2565 - DNA, 3114 bp, Escherichia coli
atggctaactattttattgatcgcccggtttttgcctgggtacttgccattattatgatgcttgcaggcggtctggcgatcatgaacttaccggttgcgcagtatccgcagattgcgccaccgaccattaccatcagcgctacctatccgggtgccgatgcgcaaacggtagaagactcggtcactcaggtgattgagcaaaatatgaatgggcttgatggcctgatgtacatgtcttcaaccagcgatgcggcaggtaatgcctccatcactctgaccttcgagacggggacatcacctgatatcgcacaggttcaggtgcaaaataaactgcaactcgctatgccttcattacctgaagcggtgcagcagcagggaattagcgtcgataagtcgagcagtaatatcctgatggtagcggcatttatttctgataacggcagcctcaaccagtacgatatcgcggactatgtagcgtctaatatcaaagacccgctaagccgtaccgcgggcgttggtagcgtacagctctttggttccgagtacgccatgcgtatctggctggacccgcaaaaactcaataaatataacctggtaccttccgatgttatttcccagattaaggtgcaaaacaaccagatttccggtggtcaactgggtggcatgccacaggcagcagaccagcaactgaacgcctcgatcattgtgcagacgcgtctgcaaacgccggaagaatttggcaaaatcctgttgaaagttcagcaagatggttcgcaagtgctgctgcgtgatgtcgcccgcgtcgaacttggggcggaagattattccaccgtggcgcgctataacggcaaacctgctgccgggatcgccatcaaactggctaccggagcaaacgccctggatacctcgcgagcggtgaaagaggagctgaaccgtttatcggcttatttccctgcaagcctgaagacggtttatccttacgacaccacaccgtttatcaaaatttctattcaggaagttttcaaaacgctggttgaggctatcatcctcgtcttcctggtcatgtatctgtttttgcagaatttccgcgccacaatcatcccgacgattgccgtaccggtggttattctcgggacgtttgcgatcttgtcggcggtcggtttcaccatcaacacgttaactatgttcgggatggtgctggcgatagggttactggtggatgacgccatcgtggtggtggagaacgtcgagcgtgtcattgcggaagataagctaccgccgaaggaagcgacgcataaatcgatggggcagatccaacgtgcgctggtcgggattgccgttgttctttccgcagtgtttatgccgatggcctttatgagcggtgcgaccggggagatctaccgccagttctccatcacgctgatctcctccatgctgctttcagtatttgtagcaatgagcctgacccctgccctgtgcgccaccattctgaaagccgcgccggagggcggtcacaaacctaacgccctgttcgcacgattcaacacgctgtttgaaaaatcaactcagcactataccgacagcacccgctcgctgttgcgttgtaccggtcgctacatggtggtctacctgctgatttgcgccgggatggcggtgctgttcctgcgtacgccgacctctttcttaccagaagaggatcagggggtatttatgaccaccgcgcagttaccttccggtgcaaccatggttaacaccacgaaagtgctacaacaggtgacggattattatctgacaaaagagaaaaataatgttcagtcggtgtttaccgttggtggctttggcttcagtggtcaggggcaaaacaacggtctggcgtttatcagcctcaagccgtggtctgaacgtgtcggcgaggaaaactcggttaccgcgattattcagcgggcaatgattgcgctaagcagtatcaataaagccgtcgtcttcccgttcaacttacccgcggtggctgaactgggcaccgcgtcaggttttgatatggaactgctggacaacggcaatctggggcacgaaaaactgacccaggcgcgaaacgagctgttatcactggcagcgcaatcaccgaatcaggtcatcggggtacgcccgaacggcctggaagatacgccgatgttcaaagtgaacgtcaacgccgcgaaagccgaggctatgggtgtggcgctgtctgatatcaaccagacaatttccaccgccttcggtagcagctacgtgaacgacttcctcaaccaggggcgggtgaaaaaagtgtatgtccaggcaggcacgccgttccgtatgttgccggataacatcaaccaatggtatgtacgcaacgcctctggcacgatggcaccgctttctgcctattcgtctaccgaatggacctatggttcaccgcgactggaacgctacaacggcatcccgtcaatggagattttaggtgaagcggctgccgggaaaagtaccggtgacgccatgaaatttatggcagacctggtcgcaaaacttccggcaggcgtcggctactcatggaccgggctgtcgtatcaggaagcgttatcctcaaaccaggctcccgcgctatatgccatttcactggtcgtggtgttcctcgccctcgccgcactttatgaaagctggtcaattccgttctcggtgatgttggttgttccgttaggcgtcgttggcgcattactggccaccgatctgcgcggcttaagtaatgacgtttacttccaggttggtttgctgaccaccatcgggctttccgccaagaacgccatcctgattgtcgaatttgccgttgagatgatgcagaaagaagggaaaacgccggtagaagcaatcatcgaagcagcgcgtatgcgtttacgcccaatcctgatgacttctctggcctttattctcggcgtgctgccgctggttatcagtcatggtgccggctctggcgcgcaaaacgcggtaggtaccggcgtaatgggcgggatgtttgccgcaacagtgctggcaatttacttcgttccggtctttttcgttgtagtggaacatctctttgcccgctttaaaaaagcgtaa

SEQ ID NO: 2566 - DNA, 282 bp, Escherichia coli
atgtttgggattattaagctaacaattcatacgattacgggaatgtgggtcagtattgtgctgttcaaattgatgacgaatggctggagtggtttctactttcagtgctgtgtactaagcctggtattcctgacggttagctggttgttgagtggtgaatggttagcaggaaagagtaaggctgaaccctcacgttcaaccttactctcatttacacgttacgcttttttaaagcgggcaaagagatgttccactacaacgaaaaagaccggaacgaagtaa

SEQ ID NO: 2567 - DNA, 729 bp, Escherichia coli
atggctcatgtctgctcggtgatcctcgttcgtcgttcattcgatattcatcatgaacagcaaaaaatatcgttgcataacgagagtatcctgctgctggataaaaatttggcagacgattttgcgttttgttcactggatacgcgacggctggatatcgaagagctgacagtttgccattacttacaaaatattcgtcagttgccacgcaatttaggattgcatagcaaagaccgtttgttaattaaccagtcaccccccatacagctggtgacggcgatttttgatagtttcaatgacccccgggtcaattcgccgatactgagcaaaatgctctatctttcctgtttatcaatgttttctcataagaaagaactgatccccttacttttcaatagtatcagtactgtttcaggaaaagttgaacgccttattagctttgatatcgctaaacgttggtatctacgcgatatcgcagaaagaatgtacaccagcgagagtctcatcaaaaaaaagttgcaggatgaaaatacctgtttcagtaaaatattactcgcctccaggatgtcgatggccagacgattactcgagttacgtcaaatacctctgcatactattgcggaaaaatgtggctatagcagtacgtcatactttataaatacatttagacaatattatggtgtaacgccacatcagttttcgcaacattcgccgggtaccttttcctga

SEQ ID NO: 2568 - DNA, 825 bp, Escherichia coli
atgcaaccactacatggtaattgtctaattgcgtacgcaagacataaatatattctcaccatggttaatggtgaatatcgctattttaatggcggtgatctggtttttgcggatgcaagccaaattcaagtggataagtgtgttgagaatttcgtattagtttcaagagacacgctttcattatttctcccgatgctcaaggaggaggcattaaaacttcatgcacataaaaaagttccttcattactcgttcatcactgtaccagagatattcctgtttttcaggaagttgcgcaactatcgcagaataagaatcttcgctatgcagaaatgctacgtaaaagggcattaatctttgcgttgttatctgtttttcttgaggatacgcaatttataccgttacttctgaacgtgttgcaaccgaatatgcgaacacgagtttgtacggtcatcaataataatatcgcccatgagtggacattagcccgaatcgctagcgaattgttgatgagtccaagcctgttaaagaaaaaattgcgcgaagaaggtacgtcatattcacagttgcttactgagtgtaggatgcagcgtgctttacaacttattgttatatatggggtttcaattaagcgagttgcagtatcctgtggatatcacagcgtgtcgtatttcatttacgtttttcgaaattattatgggatgacgcccacagagtatcaggagcgatcggcgcaggaattaccgaactgtggcccggcggcaagtatggctgcgcaagggattttttacggtactgaccgttctgcggaaggaataagattatag

SEQ ID NO: 2569 - DNA, 405 bp, Escherichia coli
atggaacatgaacttcattatatcggtatcgacaccgctaaagagaaactggatgtcgatgtgttgcgtcctgatggtcgtcatcgcaccaaaaaattcgctaacaccactaaagggcacgatgagctggtgagttggctgaaatgtcacaagattgaccatgcgcatatctgcatcgaagcgaccggcacctatatggaacctgtcgcagagtgcctttacgatgctggctacatagtgtcagtcattaatcctgcactgggtaaagctttcgctcagagtgaaggactgcgtaacaagactgataccgtggatgccgcatgctggcagagttctgtcgtcagaagcgccctgcagcctgggaagcgcatcacccgcttgaacgcgcgttgcatgccctggtag

SEQ ID NO: 2570 - DNA, 225 bp, Escherichia coli
atgcacaggcaggaactgaatcgcactgaaacggcgcgggaagtccagaggccgagcattgatgctcaccttctgtggcttgaagcagagctgaagcgtcttgagaagcagataaaagacctgacagacgatgatccggatatgaaacaccgcaggaaactgctggaaagcatcccgggtatcggagagaaaacatctgcggtattgctggcttacatggtctga

SEQ ID NO: 2571 - DNA, 177 bp, Escherichia coli
atgcctgcaatggtagccaccagtaagactgagtggggacgggcgttggcagctaatggcaagaaaggaaaggtgattctcggctcgataatgcgcaagctggcacaggtggcgtatggagtgctgaagtcaggcgtgccgttcgatgcgtcacggcataatccggtagctgcgtaa

SEQ ID NO: 2572 - DNA, 1299 bp, Escherichia coli
atggctgaaagtactgtaacggcagacagcaaactgacaagtagtgatactcgtcgccgtatttgggcaattgttggggcctcttcaggtaatctgatcgagtggttcgatttctatgtctactcgttctgttcactctacttcgcccacatcttcttcccttccgggaacacgacgacccaactactgcaaacagcaggtgtttttgctgcaggatttctgatgcgcccaataggcggttggctatttggccgcatagccgataaacatggtcgcaaaaaatcgatgctgttatcggtgtgtatgatgtgtttcggctcactggttatcgcctgtttgccaggctacgaaacaatcggtacctgggctccggcattattgcttctcgcgcgtttattccagggattatccgttggcggagaatatggcaccagcgccacctatatgagtgaagttgccgttgaagggcgcaaaggtttttacgcatcatttcagtatgtgacgttgatcggcgggcaactgctagctctactggttgtcgtggttttacaacacaccatggaagacgctgtactcagagagtggggatggcgtattcctttcgcgttaggggctgtgttagctgttgtggcgttgtggttacgtcgtcagttagatgaaacttcacaacaagaaacacgcgctttaaaagaagctggatctctgaaaggattatggcgcaatcgccgtgcattcatcatggttctcggttttaccgctgcgggctccctttgtttctataccttcaccacttatatgcagaagtatctggtaaatactgcgggaatgcatgccaacgtggcgagtggcattatgactgccgcattgtttgtattcatgcttattcaaccacttattggcgcgctgtcggataagattggtcgccgtacctcaatgttatgtttcggttctctggcaaccatttttaccgttcctattctctcagcattgcagaacgtttcctcgccttatgccgcttttggtctggtgatgtgcgccctgctgatagtgagtttttatacttcaatcagtggaatactgaaggctgagatgttcccggcacaggttcgcgcattaggcgttggtctgtcatatgcggtcgccaatgctatatttggtggttcggcggagtacgtagcgttgtcgctgaaatcaataggaatggaaacagccttcttctggtatgtgaccttgatggccgtggtggcgtttctggtttcactaacattgcaccgtaaaggaaaagggatgcggctttag

SEQ ID NO: 2573 - DNA, 273 bp, Escherichia coli
atggctaacgatagctggagcgggcaggataaagctcaacactttatcgcctcggcgatgctttccgccgtcggaaatgaatattcacagcatcaggggatgagccgggatcgcagtgccatgtttggattgatgttctctgtcagtctgggggcgtcaaaagagctttgggatagccgccctgaggggagcggctggagctggaaggattttgcctgggatatcgccggtgcaagcaccggctataccgtctggcaactgacccgtcactaa

SEQ ID NO: 2574 - DNA, 1356 bp, Escherichia coli
atgttgtcaaaatttaagcgtaataaacatcaacaacaccttgcccaactacccaagatttctcaatcagttgatgatgtcgatttcttttacgctcccgccgacttccgggagacgctgctggaaaaaatagccagcgcgaagcagcgcatttgcattgtcgccctgtatctcgaacaggatgacggtggcaaaggcattctgaacgcgttgtatgaggctaaaaggcagcgtccggaactggatgtgcgggtgctggtcgactggcatcgtgcacaacgtggacgcattggcgctgcggcatctaacactaacgctgactggtactgccgcatggcgcaggaaaatccgggcgtagatgttccggtttatggcgtgccaatcaatacccgtgaagcccttggtgttctgcactttaaaggctttatcatcgacgatagcgtactttatagcggtgccagcctgaacgatgtttacctgcatcagcacgataaatatcgctacgaccgttatcatctgatccgtaaccgtaagatgtcagacattatgtttgaatgggttacacagaatattatgaatggccgcggcgttaatcgtctggatgatgttaatcggccaaaaagcccggaaatcaagaacgacattcgcctgttccgacaggagctgcgtgatgccgcttatcatttccagggcgatgccgacaacgatcagctttccgtaacgccgctagtggggctggggaaatcgagtctgttgaacaagactattttccatcttatgccttgtgccgagcagaaactaaccatctgcacaccttacttcaacctaccagcaatccttgtgcgcaatatcatccagttgctgcgcgaagggaaaaaggtcgaaattattgttggtgataaaaccgcgaatgacttctacattccggaagatgaacctttcaagataattggcgcattgccttatctctatgagatcaatctgcgtcgtttcctgagtcgtttacagtattacgtcaacactgaccagttagtagttcggttatggaaagatgacgacaacacctatcacctgaaagggatgtgggttgatgataagtggatgttgatcaccggtaataacctgaacccgcgcgcctggcgtctggatctggaaaacgccattttgatccacgatccgcaactggagcttgcgccacagcgagagaaagaactggatctgatccgcgagcataccaccatcgttaagcactatcgcgatctgcaaagtattgccgattatccggtgaaggttcgtaaactcatccgccgtttgcgccgtatccgcatcgaccgattaattagccgcatcctgtaa

SEQ ID NO: 2575 - DNA, 2661 bp, Escherichia coli
atgagtcagcgaggactggaagcactattgcgaccaaaatcgattgcggtaattggcgcatcgatgaaacccaatcgcgcaggttacctgatgatgcgtaacctgctggcgggaggctttaacggaccggtactcccggtgacgccagcctggaaagcggtgttgggtgtgttggcctggccggatattgccagcttgccctttacacccgaccttgcggttttatgtaccaatgccagccgtaatcttgctcttctggaagagctcggcgagaaaggctgtaaaacctgcattattctttccgccccggcatcgcaacacgaagatctccgcgcctgcgccctgcgccataacatgcgcctgctaggaccaaacagtctgggcttactggctccctggcaaggtctgaatgccagcttttcgcctgtgccgattaaacgcggcaagctggcgtttatttcgcaatcggctgctgtctccaacaccatcctcgactgggcgcaacagcgtgagatgggcttttcctactttattgcgctcggcgacagcctggatatcgacattgatgaattgctcgactatctggcgcgcgacagtaaaaccagcgccatcctgctctatctcgaacagttaagcgacgcgcgacgctttgtttcggcagcccgtagtgcctcgcgcaataaaccgattttggtgattaaaagcggacgtagcccggcggctcaacgtctgttgaacaccacggcaggaatggatccggcgtgggatgcagctattcagcgtgccggtttgttgcgagtacaggacacccacgaactgttttcggcggtggaaacccttagccatatgcgcccgctgcgtggcgaccggttgatgattatcagcaacggtgctgcgcctgccgcgctggcgctggatgctttatggtcacgcaatggcaagctggcaacgctaagcgaagaaacctgccagaaactgcgcgatgcactgccagggcatgtggcaatctctaacccgctcgatctgcgcgatgacgccagcagcgagcattatgtcaaaacgctggacattctgctccacagccaggattttgatgcgctgatggttattcattcgcccagcgccgctgctcccgcaacagaaagcgcgcaagtattaattgaagcggtaaagcatcatccccgcagcaaatatgtctctttgctgacgaactggtgcggcgagcactcctcgcaagaggcacgacgtttattcagcgaagccgggctgccgacctaccgtactccggaaggaaccatcactgcttttatgcatatggtcgagtaccggcgtaatcagaagcaactacgcgaaacgccggcgttgcccagcaatctgacttccaataccgcagaagcgcatcttctgttgcaacaggcgattgccgaaggggctacgtcgctcgatacccatgaagttcagcccatcttgcaagcgtatggtatgaatactctccctacctggattgccagtgatagcaccgaagcggtacatattgccgaacagattggctatccggtggcactgaaattgcgctcgccggatattccacataaatcggaagttcagggcgtcatgctctacctacgtacagccaatgaagtccagcaagcggcaaacgctattttcgatcgcgtaaaaatggcctggccgcaggcgcgggtccacggcctgttggtgcaaagtatggctaaccgtgctggcgctcaggagttgcgggttgtggttgagcacgatccggttttcgggccgttgatcatgctgggtgaaggcggtgtggagtggcgtcctgaagatcaagccgtcgtcgcactgccgccgctgaacatgaacctagcccgctatctggttattcaggggatcaaaagtaaaaagattcgtgcgcgcagtgcgctacgcccattggatgttgcaggcttgagccagcttctggtgcaggtttccaacttgattgtcgattgtccggaaattcaacgtctggatattcatcctttgctggcttctggcagtgaatttaccgcgctggatgtcacgctggatatcgcgccgtttgaaggcgataacgagagccggctggcagtgcgcccttatccgcatcagctggaagagtgggtagaattgaaaaacggtgaacgctgcttgttccgcccgattttgccagaagatgagccacaacttcagcaattcatttcgcgagtcaccaaagaagatctttattaccgctactttagcgagatcaacgaatttacccatgaagatttagccaacatgacgcagatcgactacgatcgggaaatggcatttgtagcggtacgacgaattgatcaaacggaagagatcctcggcgtcacacgtgcgatctccgaccctgataacatcgatgccgaatttgccgtgctggttcgctcggatctcaaagggttaggcttaggtcgacgcttaatggaaaagttgattacctatacgcgagatcacggactgcaacgtctgaatggtattacgatgccaaacaatcgtggcatggtggcgctggcccgcaagctcgggtttaacgttgatatccagctcgaagaggggatcgttgggcttacgctaaatcttgcccagcgcgaggaatcatga

SEQ ID NO: 2576 - DNA, 699 bp, Escherichia coli
atgaccgaaaacgctgttctccagttacgcgccgagcgtattgcgcgtgcaacacgtccttttcttgcccgcggtaatcgcgttcgtcgctgccaacgctgtcttttgccagagaaattatgtctctgttcgacaattaccccagcacaagcaaaaagtcgcttctgtttgctgatgttcgacaccgagccaatgaagcccagtaataccgggcgtctgattgctgatattttgcctgataccgttgcgtttcaatggtcgcgtaccgaaccctcgctagatttgctggatctggtacaaaacccggactatcagccaatggtggtctttcccgcctcgtatgctgatgagcaacgggaagtgatcttcacaccacctgccggtaagcctccgctatttatcatgctcgatggtacctggcctgaagctcgcaagatgtttcgtaaaagtccgtatctggataatcttcccgtcatttccgtcgatctttcccggctttctgcctatcgcctgcgtgaagcccaggctgaaggccaatattgtactgccgaggtagccatcgcactgttagatatggccggcgataccggggcggcggcagggttaggcgagcattttacccgctttaaaacacgctatctggcaggaaaaacgcaacatctgggtagcatcacagcagaacagttagaaagcgtttaa

SEQ ID NO: 2577 - DNA, 420 bp, Escherichia coli
atgaataccgtttgtacccattgtcaggccatcaatcgcattcccgacgatcggatcgaagatgcggcaaaatgcggacgctgcggtcacgacttgtttgacggagaggtgattaatgcgaccggtgaaacgctcgacaaattgctgaaagatgatctacctgtggtgatcgacttctgggcaccgtggtgcggcccctgccgtaatttcgcaccaatttttgaagatgtcgcgcaagagcgtagcggtaaagtgcgctttgtgaaagtgaataccgaagctgaacgtgaattgagcagccgctttggtattcgcagtattccgacgatcatgattttcaaaaatggtcaggttgtcgacatgcttaatggcgcagtgccgaaagcgccgttcgatagctggctgaatgaatctctttaa

SEQ ID NO: 2578 - DNA, 1038 bp, Escherichia coli
atgaacgatgaaatgaaaggtaaaagcggcaaggtcaaagtgatgtatgtccgcagtgatgatgattctgataaacgtacccacaacccgcgtaccgggaaagggggcgggcgtccaggaaaatctcgtgctgacggtggccgtcgccccgcccgcgatgacaaacagagtcagccccgtgaccgcaagtgggaagagtcgccgtggcgcacagtttcccgcgcgccgggtgatgagacgccggaaaaggccgatcacggtggcatcagtggtaaaagttttattgatccggaagtgttgcgtcgtcagcgtgcggaagaaacccgcgtctacggcgaaaatgcctgtcaggcactgttccagagccgtccggaagcgattgttcgcgcctggtttatccagagtgtaacgccgcgttttaaagaagccttgcgctggatggcagcaaaccgcaaagcgtaccatgtggtagatgaagcggaactgacaaaagcgtcaggcacggaacatcacggcggcgtttgcttcctgatcaaaaagcgtaacggtacaaccgtgcagcagtgggtaagccaggcaggcgcgcaggattgtgtactggcgctggaaaacgaatctaacccgcataacctgggtggcatgatgcgcagctgcgcgcacttcggcgtgaaaggcgttgtggtgcaggatgcggcactgctggagtcgggggcggctatccgtaccgcagaaggcggcgcagagcacgttcagccgattactggcgacaacattgttaacgtgctggatgatttccgtcaggcaggttacaccgtagtgaccacttccagcgagcaggggaaaccgctgttcaaaaccagtctgccagcgaaaatggtactggtgctgggtcaggaatatgaagggttaccggatgccgcacgcgatccgaacgatttgcgcgtgaagattgatggtactggcaacgttgccgggctgaatatctctgtcgcaaccggcgttcttcttggcgaatggtggcgtcagaataaagcctga

SEQ ID NO: 2579 - DNA, 690 bp, Escherichia coli
atggctaacgaattaacctggcatgatgtgctggctgaagagaagcagcaaccctattttcttaatacccttcagaccgtcgccagcgagcggcagtccggtgtcactatctatccgccacaaaaagatgtctttaacgcgttccgctttacagagttgggtgacgttaaagtggtgattctcggccaggatccttatcacggaccgggacaggcgcatggtctggcattttccgttcgccccggcattgcgacaccgccgtcactgctgaatatgtataaagagctggaaaatactattcccggtttcacccgccctaatcatggttatcttgaaagctgggcgcgtcagggtgttctgctgctcaatactgtcttgacggttcgcgctggtcaggcgcattcccacgccagcctcggctgggagacgtttactgataaagtcatcagcctcataaatcagcatcgcgaaggcgtggtgtttttgttgtggggatcacatgcgcaaaagaaaggggcgattatagataagcaacgccatcatgtactgaaagcaccgcatccgtcgccgctttcggcgcatcgtggattctttggctgcaaccattttgtgctggcaaatcagtggctggaacaacgtggcgagacgccgattgactggatgccagtattaccggcagagagtgagtaa

SEQ ID NO: 2580 - DNA, 384 bp, Escherichia coli
atgattacaggtatccagattactaaagccgctaacgacgatctgctgaactctttctggctgctggacagcgaaaaaggcgaagcgcgttgcatcgttgcgaaagcaggttttgcagaagacgaagtggttgcagtaagcaaactgggtgacattgagtaccgtgaagttccagtagaagtgaaaccagaagttcgcgttgaaggtggtcagcacctgaacgtaaacgttctgcgtcgtgaaactctggaagatgcagttaagcatccggaaaaatatccgcagctgaccatccgtgtatccggttatgcagttcgctttaactctctgactccggaacagcagcgcgatgttatcgctcgtacctttactgaaagcctgtaa

SEQ ID NO: 2581 - DNA, 588 bp, Escherichia coli
gtgacaccgacccttttaagtgctttttggacttacaccctgattaccgccatgacgccaggaccgaacaatattctcgcccttagctctgctacgtcgcatggatttcgtcaaagtacccgtgtgctggcagggatgagtctgggatttttgattgtgatgttactgtgtgcgggcatttcattttcactggcagtgattgacccggcagcggtacaccttttgagttgggcgggggcggcatatattgtctggctggcgtggaaaatcgccaccagcccaacaaaggaagacggacttcagacaaaaccaatcagtttttgggccagctttgctttgcagtttgtgaacgtcaaaatcattttgtatggcattacagcactgtcgacgtttgtcctgccgcaaacgcaggcgctaagctggataattggcgtcagcgttttgctggcgatgattgggacgtttggcaatgtgtgctgggcgctggcggggcacctgtttcagcgattgtttcgccagtatggtcgccagttaaatatcgtgctcgcgctgctgctggtctattgcgcggtacgcattttctattaa

SEQ ID NO: 2582 - DNA, 882 bp, Escherichia coli
atggatctgcgccgttttattacacttaaaaccgtggtggaagagggttcctttttgcgagcttcgcaaaaattgtgctgcacacaatcgacggtgacttttcatattcagcagcttgagcaggagttctcggtacaattgtttgagaaaattggtcgacgaatgtgccttacccgcgaaggaaaaaagctgctgccgcacatctatgaacttacccgagtgatggatacgcttcgtgaggctgctaaaaaagagtcggatccggacggggaactacgcgttatttcaggcgaaacgttgctctcttatcgaatgccgcaggtgttgcagcgttttcggcaacgcgctccaaaagtgcgtttatcgttgcagtcgctgaactgttacgtgatccgtgatgcgctactgaatgatgaggccgatgtcggggttttttatcgcgtagggaatgatgatgctctgaaccgacgagagttgggtgaacaaccgctggcgctggtggcttcaccgcaaattgcagatgtcgattttactgagccgggaagacataacgcctgtagctttattatcaacgaaccacaatgtgtcttccggcagatatttgagagcacgctgcgccagcggcggatcacggtggaaaacaccattgagcttataagtatcgaaagcatcaagcgttgtgtcgcggcaaatatcggagtcagttacctgccgcgttttgcggtggtaaaagagttggagtgcggagaattaattgaattgccttttggcgaacagtcgcagaccattacggcaatgtgcgctcaccatgccggaaaagcggttagcccggcgatgcacacttttattcagtgtgttgaagagtgttttttgccgggataa

SEQ ID NO: 2583 - DNA, 1335 bp, Escherichia coli
atgactgtaacgactttttccgaacttgaactcgacgaaagcctgctggaagccctccaggataaaggtttcactcgcccgaccgccattcaggctgccgccattccgcctgcgctcgatggccgtgatgtactcgggtctgcgccgacaggcaccggtaaaacggcggcgtatctgctgccagcgttgcagcacctgctcgatttcccacgtaagaaatccggtccgccgcgtattttgatccttaccccgactcgcgaactggcgatgcaggtggccgatcatgcccgcgaactggcgaaacatacgcatctggatattgccaccatcaccggcggcgtggcctatatgaaccacgcagaagtgttcagcgaaaaccaggacattgtggtcgccacgaccggacgtctgctgcaatacataaaagaagagaacttcgattgccgcgcggttgaaacgctgatcctcgacgaagcagaccgtatgctggatatgggcttcgcccaggatatcgaacatattgctggcgaaacgcgctggcgtaaacagaccctgctcttttcggcaacgctggaaggcgatgcgattcaggattttgccgagcgtctgctggaagatccggtggaagtttctgcgaatccgtccacccgtgagcgcaaaaaaattcatcagtggtattaccgcgccgatgatcttgagcataaaaccgcgttgctggtgcatctgttaaaacagccggaagcgacccgctcaattgtgtttgtgcgtaagcgtgagcgtgtgcatgagctggcaaactggctgcgcgaagcaggcatcaacaactgctatctcgaaggtgagatggtacaaggcaagcgtaacgaagcgattaaacgcttgaccgaaggccgcgtaaacgtactggttgctaccgatgttgccgcgcgcggtatcgacattcctgacgtcagccacgtctttaacttcgatatgccgcgcagtggcgatacttatttgcaccgtatcggacgtaccgcgcgcgccggtcgtaaaggcaccgcgatttcgctggtggaagcccatgaccatctgctgctgggcaaagttggccgttatattgaagagccaattaaagctcgcgtaattgatgagttacgtccgaaaacgcgtgcgccaagcgagaagcagaccggcaagccatcgaagaaagtgttggctaaacgtgccgagaagaaaaaagctaaagagaaagagaagccgcgggtgaaaaaacgccatcgcgacactaaaaatattggtaagcgccgtaaaccaagcggaacgggcgtgccaccgcaaacgacagaagagtaa

SEQ ID NO: 2584 - DNA, 738 bp, Escherichia coli
atgtcacagtctacatccgtgtttcgtcgtaatggatttacttttaaacagttttttgttgctcacgatcgctgtgcgatgaaagtgggaacggatggcattttgctgggcgcatgggcacctgtggctggggtaaaacgttgccttgatatcggcgcgggtagcgggttgttggcattaatgctggcgcagcgaacagatgacagcgtgatgattgatgcagttgaactggaaagtgaagctgccgcgcaagcgcaggaaaatatcaaccagtccccgtgggcagagcggattaacgtccatacggcggatattctgcagtggatcacacagcagacagtacgcttcgatttaatcatcagcaacccaccttactatcagcagggagtagagtgcgcgacacctcaacgggaacaggctcgctataccactacgcttgatcacccatcgttgctgacttgtgcggcggagtgcattaccgaagagggatttttctgcgtggtgctgccagagcagattggtaatggttttactgaactggcattaagtatgggctggcatttacgtttgcggacggatgtggcggaaaacgaagcgcgactgccgcatcgggtgctgctggcattctccccgcaggcgggagaatgctttagcgatcgcttagtcattcgtgggccagaccagaactattccgaagcgtatacggcgctgacccaggctttttatctgtttatgtaa

SEQ ID NO: 2585 - DNA, 1623 bp, Escherichia coli
atgaatactctccctgaacattcatgtgacgtgttgattatcggtagcggcgcagccggactttcactggcgctgcgcctggctgaccagcatcaggtcatcgttctaagtaaaggcccggtaacggaaggttcaacattttatgcccagggcggtattgccgccgtgtttgatgaaactgacagcattgactcgcatgtggaagacacattgattgccggtgctggtatttgcgatcgccatgcagttgaatttgtcgccagtaatgcacgatcctgtgtgcaatggctaatcgaccagggggtgttgtttgatacccacattcagccgaatggcgaagaaagctaccatctgactcgtgaaggtggacatagtcaccgtcgtattcttcatgccgccgacgccaccggtagagaagtagaaaccacgctggtgggcaaggcgcagaaccatccgaatattcgcgtgctggagcgcagcaacgcggttgatctgattgtttctgacaaaattggcctgccgggcacgcgacgggttgttggcgcgtgggtatggaaccgaaataaagaaacggttgaaacctgccacgcaaaagcagtggtactggcaaccggcggtgcttcaaaagtttatcagtacaccaccaatccggatatttcttctggcgatggcattgctatggcgtggcgcgcaggctgccggattgccaatctcgaatttaatcagttccaccctaccgcgctgtatcacccacaggcacgcaatttcctgttaacggaagcactgcgcggcgaaggcgcttatctcaagcgcccggatggcacgcgttttatgcccgattttgatgagcgtggcgaactggctccgcgcgatattgtcgcccgcgccattgaccatgagatgaaacgcctcggcgcggattgtatgttcctcgacatcagccataagcccgccgattttattcgccagcatttcccgatgatttatgaaaaattgctcgggctggggatagatctcacgaaagaacccgtgccgattgtgcctgctgcacattatacctgcggtggtgtaatggttgatgatcatgggcgtacggacgtcgagggtttgtatgccattggcgaagtgagttataccggcttacacggcgctaaccgcatggcctcgaattcattgctggagtgtctggtctatggctggtcggcggcagaagatatcagcagacgtataccttatgcccacggcgtcagtacgttaccgccgtgggatgaaagccgcgttgagaaccctgacgaacgggtagtaattcagcataactggcacgagctacgtctgtttatgtgggattacgttggcattgtgcgcacaacgaagcgcctggaacgcgccctgcggcggataaccatgctccaacaagaaatagacgaatattacgcccatttccgcgtctcaaataatttgctggagctgcgtaatctggtacaggttgccgagttgattgttcgctgtgcgatgatgcgcaaggagagccgtggcctgcatttcacgctggattatccggaactgctcacgcattccggtccatcgatcctttctgccggcaatcattacataaacagataa

SEQ ID NO: 2586 - DNA, 576 bp, Escherichia coli
atgagcgagcagttaacggaccaggtcctggttgaacgggtccagaagggagatcagaaagcctttaacttactggtagtgcgctatcagcataaagtggcgagtctggtttcccgctatgtgccgtcgggtgatgttcccgatgtggtacaagaagcttttattaaagcctatcgtgcgctggattcgttccggggagatagcgctttttatacatggctgtatcggattgctgtaaatacagcgaaaaattacctggttgctcaggggcgtcgtccaccttccagtgatgtggatgccattgaagctgaaaacttcgaaagtggcggcgcgttgaaagaaatttcgaaccctgagaacttaatgttgtcagaagaactgagacagatagttttccgaactattgagtccctcccggaagatttacgcatggcaataaccttgcgggagctggatggcctgagctatgaagagatagccgctatcatggattgtccggtaggtacggtgcgttcacgtatcttccgggcgagggaagctattgataacaaagttcaaccgcttatcaggcgttga

SEQ ID NO: 2587 - DNA, 651 bp, Escherichia coli
atgcagaaagaacaactttccgctttaatggatggcgaaacgctgaatagtgagctgcttaacgaactggctcataacccagaaatgcagaaaacctgggaaagctatcacttgatccgtgactcaatgcggggtgatactcccgaggtgctccatttcgatatctcttcacgtgtgatggccgccattgaagaagagccagtacgtcaaccggcgacattgatcccggaagcccagcctgcgccgcatcaatggcagaaaatgccattctggcagaaagtacgtccgtgggcggcacagcttacccaaatgggcgtagcagcatgcgtatcgcttgcagttatcgttggcgtccagcactataatgggcaatctgaaacgtcccagcagcccgaaacgccagtatttaatacactgccgatgatgggtaaagccagcccggttagtctgggagtaccttctgaagcgaccgcaaataatggtcaacagcagcaggtacaggagcagcgtcgtcgcattaatgcaatgttgcaggattacgaactgcaacgccgactccactctgaacagcttcagtttgagcaggcacaaactcagcaagccgctgtacaggtgccaggaattcaaactttaggaacgcaatcgcagtaa

SEQ ID NO: 2588 - DNA, 957 bp, Escherichia coli
atgaagcaactttggtttgccatgtcattagtgacaggtagcctgttattctctgctaacgcctcggccactcccgcgtccggggcgttattacagcagatgaacctggccagtcagtcactgaattacgagctgtcattcatcagcatcaataaacagggtgttgagtctctgcgttatcgacatgcacgcctcgataaccgtcctcttgcacaattgttgcaaatggatggcccgcgccgggaagtggtacagcgcggcaatgaaatcagctattttgaaccgggacttgaaccgttcacgcttaatggcgattacattgttgattctctgccatcgctcatctataccgatttcaaacgcctttctccttactacgactttatctccgtcgggcgcacgcgtattgctgatcgtctttgcgaagttattcgcgtggttgcccgagatggtacacgctacagctacatcgtgtggatggacaccgaatcgaaattaccgatgagggttgatctccttgatcgcgatggtgaaacgctggaacaatttcgcgtgattgcttttaatgtcaatcaggatatcagcagcagtatgcagacgctggcgaaggcaaatttgccgccgttgctttctgttcctgtcggtgaaaaagctaaattcagctggacgccaacctggttgccacagggttttagcgaagtttccagtagccgacgtccgctaccgacgatggacaacatgcctatcgaatcacgtctctattccgacggattattcagcttctcggtaaacgttaaccgcgctacgccatcgagcaccgatcagatgttgcgcaccggacgcagaaccgtcagtacaagcgtacgtgataacgccgaaatcaccattgttggtgaactgccgccgcaaacggcgaaacgcattgccgagaatattaagttcgggacagcgcaatga

SEQ ID NO: 2589 - DNA, 480 bp, Escherichia coli
atgatcaaagagtgggctaccgtcgtctcctgggaaaacgggcaggcgctggtcagttgtgatgttaaagcctcatgcagcagctgcgcttcacgcgccggttgcggtagccgtgtgttgaataaacttggcccgcaaaccacgcataccattgtcgtaccctgtgatgagccgttagtgccggggcaaaaagtggaattggggatcgccgaaggcagcctgcttagctccgcattactggtttatatgtcgccgctggtgggattattcctcatcgcttcactatttcagctactctttgcttcagatattgcagcattatgcggtgcgattctcggtggcgttggtggattcctgattgcacgtggctgctctcgaaagtttgctgcccggtctgaatggcaaccgatcatcttaagcgtggcattgccgcctggccttgtgcgatttgaaacatcttcggaagacgcgagccagtga

SEQ ID NO: 2590 - DNA, 1800 bp, Escherichia coli
atgaagaatatacgtaacttttcgatcatagctcacattgaccacggtaaatcgacgctgtctgaccgtattatccagatctgcggtggcctgtctgaccgtgaaatggaggcgcaggttctcgattccatggatcttgagcgtgagcgtggcattaccatcaaagcgcaaagcgtgacgctggactacaaagcgtctgatggcgaaacctatcagcttaactttatcgacaccccgggccacgtagacttctcctatgaggtttcccgttcgctggctgcctgtgaaggcgcactgctggtggtcgatgccgggcagggcgttgaagcgcaaaccctggcaaactgctacaccgcaatggaaatggatctcgaagtcgttccggtactgaacaagattgacctgccggcagccgatcctgaacgcgtggcggaagaaattgaagatatcgtaggtatcgacgccaccgacgcggtgcgctgttcagcgaaaaccggcgttggcgtgcaggacgttctcgaacgtcttgtgcgcgacattccgccgccggaaggcgatccggaaggcccgttgcaggcactaattatcgactcctggttcgacaactatctgggcgttgtttcacttatccgtattaaaaacggcaccctgcgtaagggcgacaaagtgaaagtcatgagcaccgggcagacctataacgccgatcgtctgggcatcttcacgccgaagcaggttgaccgtactgaactgaaatgtggcgaagtaggctggctggtatgtgcgattaaagatatccacggcgctccagtaggcgataccttaacactggcgcgtaatccggcagaaaaggcgctgcctggctttaagaaagtcaaacctcaggtatatgctggtctgttcccggtaagttccgacgactatgaagccttccgtgacgcgctgggtaaactcagcctgaacgatgcctcactgttctatgagccggaaagctccagcgcgttgggctttggtttccgctgcggcttccttggcctgctgcacatggagatcatccaggaacgtctggaacgtgaatacgatctggatctgatcaccactgcgccgactgtagtgtatgaagttgaaaccacgtcaagagaagttatctacgtcgacagcccatccaagctgccagcggtaaataacatttacgaactgcgcgagccgattgcagagtgtcacatgctgctaccgcaggcatatctcggcaacgttattacgctgtgcgtagaaaaacgcggcgtgcagaccaatatggtttaccacggtaatcaggtggcgctgacgtacgagatcccgatggcggaagtggtgctcgacttcttcgatcgcctgaaatctacctcgcgtggttatgcgtctctggattacaacttcaaacgcttccaggcgtccgacatggttcgtgtagacgtattaatcaacggtgaacgtgttgatgcgttggcgctgatcacccaccgtggtaattcgcaaaaccgcggtcgcgagctggtggagaagatgaaagatctgatcccgcgccagcagtttgatatcgccattcaggcagcgattggtacgcacatcattgcgcgctccaccgtgaaacagctgcgtaaaaacgtactggctaaatgttatggcggcgatatcagtcgtaagaaaaagctgctgcagaagcagaaagaaggtaagaaacgcatgaagcagatcggtaacgtcgagctgccgcaggaagcgttcctcgccattctgcacgtcggcaaagacaacaaataa

SEQ ID NO: 2591 - DNA, 975 bp, Escherichia coli
atggcgaatatgtttgccctgattctggtgattgccacactggtgacgggcattttatggtgcgtggataaattctttttcgcacctaaacggcgggaacgtcaggcagcggcgcaggcggctgccggtgactcactggataaagcaacgctgaaaaaggttgcgccgaagcctggctggctggaaaccggtgcttctgtttttccggtactggctatcgtattgattgtgcgttcgtttatttatgaaccgttccagatcccgtcaggttcgatgatgccgactctgttaatcggtgattttattctggtagagaagtttgcttatggcattaaagatcctatctaccagaaaacgctgatcgaaaccggtcatccgaaacgcggcgatatcgtggtctttaaatatccggaagatccaaagcttgattacatcaagcgcgcggtgggtttgccgggcgataaagtcacttatgatccggtctcaaaagagctgacgattcaaccgggatgcagttccggccaggcgtgcgaaaacgcgctcccggtcacctactccaacgtggaaccgagcgatttcgttcagaccttctcacgccgtaatggtggggaagcgaccagcggattctttgaagtgccgaaaaacgaaaccaaagaaaatggaattcgtctttccgagcgtaaagagacattgggtgatgtgacgcaccgcatcctgacagtgccgattgcgcaggaccaggtggggatgtattaccagcagccagggcaacaactggcaacctggattgttccgccgggacaatacttcatgatgggcgacaaccgcgacaacagcgcggacagccgttactggggttttgtgcctgaagcgaatctggtcggtcgggcaacggctatctggatgagcttcgataagcaagaaggcgaatggccgactggtgtgcgcttaagtcgcattggcggtatccattaa

SEQ ID NO: 2592 - DNA, 681 bp, Escherichia coli
atgaaccccatcgtaattaatcggcttcaacggaagctgggctacacttttaatcatcaggaactgttgcagcaggcattaactcatcgtagtgccagcagtaaacataacgagcgtttagaatttttaggtgactctattctgagctacgttatcgccaatgcgctttatcaccgtttccctcgtgtggatgaaggcgatatgagccggatgcgcgccacgctggtccgtggtaatacgctggctgaactggcgcgcgaatttgagttaggtgagtgcttacgtttagggccaggtgaacttaaaagcggtggatttcgtcgtgagtcaattctcgctgacaccgtcgaggcattaattggtggcgtattcctcgacagtgatattcaaaccgtcgagaaattaatcctcaactggtatcaaactcgtctggacgaaattagcccaggcgataaacaaaaagatccgaaaacgcgtctgcaggaatatttgcagggtcgccatctgccgctgccaacttatctggtagtccaggtacgtggcgaagcgcacgatcaggaatttactatccactgccaggtcagcggcctgagtgaaccggtggttggcacaggttcaagccgtcgtaaggctgagcaggctgccgccgaacaggcgttgaaaaaactggagctggaatga

SEQ ID NO: 2593 - DNA, 906 bp, Escherichia coli
atgagcatcgataaaagttactgcggatttattgctatcgtcggacgtccgaacgttggcaaatccacattgttgaacaaactgctggggcagaagatctccattacctcccgcaaggcgcaaacaactcgtcaccgcattgtggggatccatactgaaggcgcgtatcaggcgatctacgttgatacccctggcctgcatatggaagaaaaacgcgccattaaccgcctgatgaacaaagcggcgagcagctctatcggcgacgttgagctggtgatttttgtcgtagaaggcacccgctggacgccggacgatgaaatggtgctcaacaagctgcgtgatggcaaagcgccggtaatcctcgcggtgaacaaagtggacaacgtgcaggaaaaagccgatctgctgccacacttacagttcctggcaagccagatgaacttcctcgatatcgtgccgatctctgccgaaaccgggctgaatgtcgacactatcgcggcaatcgtgcgtaagcatctgcctgaagcgacccatcacttcccggaagattacatcaccgatcgctcacagcgttttatggcgtctgaaattatccgcgaaaaactgatgcgttttctcggcgctgaactgccgtactccgtgaccgtggagatcgaacgtttcgtctctaacgaacgcggcggttatgacatcaacggtttgattctcgttgagcgtgaagggcagaagaagatggtcattggcaacaaaggggccaagatcaaaaccatcgggattgaagcgcgtaaagacatgcaggaaatgttcgaagcgcctgttcaccttgagctgtgggtaaaagtgaaatccggttgggccgacgacgaacgcgcactgcgcagtctcggttatgttgacgatctttaa

SEQ ID NO: 2594 - DNA, 729 bp, Escherichia coli
atggaaggctggcagcgcgcatttgtcctgcatagtcgcccgtggagcgaaaccagcctgatgctggacgtcttcacggaggaatcgggtcgcgtgcgtctggttgccaaaggcgcacgctctaaacgctctactctgaaaggggcattacagcctttcacccctctcttgctacgttttggcgggcgtggcgaagtcaaaacgctgcgcagtgctgaagctgtctcgctggcgctgccattaagcggtatcacgctttacagcggtctgtacatcaacgaacttctctcccgcgtactggaatacgagacgcgcttctctgaactctttttcgattacttgcactgcattcagtctcttgccggggtcactggtacgccagaacccgcgttgcgccgctttgaactggcactgctcgggcatctgggctatggcgtcaattttacccattgtgcgggtagcggcgagccggtagatgacaccatgacgtatcgttatcgcgaagaaaaagggtttatcgcaagcgtcgttatcgacaataaaacgttcaccggaaggcagttaaaagcgttaaacgcgcgggaatttcctgacgcagacacactgcgcgccgcgaaacgctttacccgcatggcgcttaagccgtatcttggcggtaaaccattaaagagcagggaactgttccggcagtttatgcctaagcgaacggtgaaaacacattatgaatga

SEQ ID NO: 2595 - DNA, 732 bp, Escherichia coli
atggctgaattactgttaggcgtcaacattgaccatattgcaacgctgcgtaacgcgcgcggtactgcttacccggatccggtgcaggcggcgtttattgctgagcaggcgggagcggacggcattaccgtgcatttacgtgaagaccgccgccacattaccgaccgcgatgtgtgcatcctgcgccagacgctggatacccgcatgaatctggagatggcggtgaccgaagagatgctggcgatcgccgttgagacgaagccacatttttgctgtctggtaccggaaaagcgtcaggaagtaacaaccgaaggcggcctggacgtcgcagggcagcgtgaaaaaatgcgcgatgcctgcaaacgtctggcagatgccgggatccaggtttctctgtttatcgacgccgatgaagagcagatcaaagctgcggcagaggttggcgcaccgtttatcgagatccacaccggttgctatgctgatgccaaaactgacgccgaacaggcgcaagagttggcgcgtatcgccaaagccgcgacctttgccactagtctcggtctgaaagttaacgccggacacggtctgacctatcacaacgtgaaagccattgccgccatccctgagatgcatgaactgaatatcggtcatgccattattggtcgtgcagtgatgaccggactgaaagatgcggtggcagaaatgaaacgtctgatgctggaagcgcgtggctaa

SEQ ID NO: 2596 - DNA, 381 bp, Escherichia coli
atggcaatattaggtttaggtacggatattgtagagatcgctcgcatagaagcggtgatcgcccgatccggtgagcgcctggcacgccgcgtattaagcgataacgaatgggaaatctggaaaacgcaccaccagccagtgcgttttctggcgaagcgttttgctgtgaaagaagcggcggcaaaagcatttggcacagggatccgcaatggtctggcgtttaatcagtttgaagtattcaatgatgagctcggcaaaccacggctacggctatggggtgaggcattaaaactggcggaaaagctcggcgttgtaaatatgcatgtaacgcttgccgatgagcgccactatgcttgtgccacggtaattattgaaagttaa

SEQ ID NO: 2597 - DNA, 261 bp, Escherichia coli
atggcgctgttaatcactaaaaaatgcatcaattgtgatatgtgtgaacccgaatgcccgaatgaggcgatttcaatgggcgatcatatctacgagattaacagcgataagtgtaccgaatgcgtagggcactacgagacacccacctgccagaaggtgtgcccgatccccaatactattgtgaaagatccgcaacatgtcgagacggaagaacagttgtgggataaatttgtgctgatgcaccacgcggataaaatttaa

SEQ ID NO: 2598 - DNA, 849 bp, Escherichia coli
atgaacggcttacttcgtatccgtcagcgttaccaggggcttgcccagagtgataaaaaactggcggattatctgctgctacaacctgatacggcgcgccatttaagctctcagcaactggccaacgaagccggagtcagtcagtccagcgtcgtgaagttcgcgcaaaaactcggctataaaggttttccggcacttaagttagcgttgagtgaagcgctggcaagccagccggaatctccctccgtgcccattcataaccaaatccgcggtgatgatccgttacggctggtcggcgaaaaactgattaaagaaaatactgccgctatgtacgcaacgttaaacgttaatagtgaagagaaactgcatgaatgcgtggcaatgttgcgctctgcgcggcggataattctgaccggtattggcgcttcgggtctggtggcgcaaaactttgcctggaagctgatgaagattggcttcaatgctgccgcagtgcgcgatatgcatgcgctactcgctacagtacaggcgtcgtcccctgacgatctgttattagccatttcctacaccggtgtacgacgcgagttaaacctggcggcagatgagatgctgcgagtgggcggaaaagtgctggcgattaccggctttactcccaatgccctgcaacagcgtgcttctcattgcctgtataccattgccgaagaacaagcgacaaacagtgcttcaatctctgcttgtcacgcgcagggaatgttaacggatttgctgttcattgcgctgattcagcaggatctggaactggcaccagaacgtattcgtcatagcgaagcgctggtgaaaaaactggtctga

SEQ ID NO: 2599 - DNA, 636 bp, Escherichia coli
ttggcaactcacgagcgtcgtgtggtgttttttgacttagatggaacattgcatcagcaggatatgttcggtagttttttacgttatttactgcgtcgccaaccgctgaatgcgttacttgttctgccgttgttgccgatcatagccattgcgttattgataaaaggtcgtgcggcacgctggccgatgagtctgcttctgtggggatgcacttttggtcacaatgaagcgcgtttgcaggcgttgcaggccgatttcgtacgctggtttcgtgacaatgttaccgcctttccgctggttcaggagcgattaaccacctacctgttaagttccgatgctgatatatggttgattaccggctctccgcagccgctggttgaagcggtttatttcgatacgccctggctgccgcgggttaatcttatcgccagtcagattcagcgtggctatggtggttgggtattgacgatgcgttgtctgggacatgaaaaggtcgcgcaactggagcgcaaaatcggcacgccgctgcggctgtatagtggctatagcgacagtaaccaggacaacccgctgctttacttttgccagcatcgctggcgggtaaccccgcgcggtgaactccagcaactggaatag

SEQ ID NO: 2600 - DNA, 504 bp, Escherichia coli
ttgtctgaagtcgaatttagccacgaatactggatgcgtcatgcaatgacgctggcgaagcgtgcctgggatgagcgggaagtaccggtcggcgcggtattagtgcataacaatcgggtaatcggcgaaggctggaaccgtccgattggtcgacatgatcccaccgcacatgcagaaatcatggctctgcggcagggcggtctggtgatgcaaaattatcgactgatcgacgccacgttgtatgtcacgcttgaaccctgtgtaatgtgtgccggagcaatgatccacagtcgcattggtcgcgtggtctttggtgcgcgtgacgcgaaaactggcgctgcgggatctttaatggatgtgctgcatcatccgggtatgaatcaccgggtggaaattacggaaggaatactggcggatgagtgtgcggcgttgctcagtgacttctttcgcatgcgccgccaggaaattaaagcgcagaaaaaagcgcaatcctcgacagattaa

SEQ ID NO: 2601 - DNA, 1557 bp, Escherichia coli
ttgaaaaaattaaagattaattatctgttcatcggcattctggcactgctgctcgcggtcgctctctggccatccattccctggtttggtaaagccgacaaccgtatcgccgccattcaagcgcggggagagttgcgtgtgagcaccattcatactcccctgacgtataacgaaatcaacgggaaaccttttggcctggattacgaactggcgaaacagtttgccgattacctcggtgtaaaactgaaagtgaccgtgcggcagaatatcagccagctgtttgacgacctcgataatggtaacgccgacctgctggcggcaggactggtctataacagtgagcgggtaaaaaattatcagcctggtcctacctattattccgtgtcacaacaactggtttataaagtcggtcagtatcgcccacgtacgctgggcaacctgacggcggagcaactcaccgttgcaccgggtcacgtggtggttaacgatctccagaccctgaaagacacaaaattcccggaattaagctggaaggtagacgacaaaaaaggctctgcggaattaatggaagatgtcatcgaaggaaaactcgattacaccattgctgattctgtcgccatcagcctgtttcagcgcgttcacccggaactcgccgtagcgctcgatatcaccgatgaacaaccggtgacctggtttagcccgttagatggcgataataccctttccgccgccctgctcgacttcttcaacgaaatgaatgaagacggtacactggcacgcattgaagagaaatacctggggcatggcgatgattttgattacgtcgatacgcgcacatttttacgcgccgtcgatgcggtactgccgcagttaaagcccctgtttgagaaatacgccgaagaaattgactggcgtttgctggccgctattgcttatcaggaatcgcactgggatgctcaggccacttcaccgacgggtgtgcgcggcatgatgatgttaaccaaaaacaccgcgcaaagcctcggcattacggatcgtaccgatgccgaacagagcatcagcggcggcgtgcgttatttgcaggatatgatgagtaaagtgccggaaagtgtgccggagaacgaacggatctggtttgccctcgccgcgtacaatatgggctatgcgcatatgctggatgcccgcgccctgacggcaaaaaccaaaggtaatcctgacagttgggctgacgtaaaacagcgtctgcctttacttagccagaaaccctattacagcaagctgacttacggctacgctcgtgggcatgaagcctacgcttatgtcgaaaatattcgtaagtatcagattagcctggtgggttatctgcaggagaaagagaagcaggctacagaagcggcgatgcaactggcgcaggattatccggcggtatcgcctacggagctgggcaaagagaaatttccttttctctcgtttctttcccagtcgtcatcaaactatttgacccactctccctctctgctgttttccagaaaagggagtgaagagaaacaaaattaa

SEQ ID NO: 2602 - DNA, 3888 bp, Escherichia coli
atgatggaaattctgcgtggttcgcctgcattgtcggcattccgaatcaacaaactgctggcacgttttcaggctgccaggctcctggttcacactatttacgccgagtatgtccattttgctgacctcaatgcgccgttaaacgatgatgagcacgcacaacttgaacgcctgctgaaatatggcccggcactcgccagccacgccccgcaaggcaaactcctgctggtgaccccgcgtcctggcaccatctctccctggtcttcgaaagcgaccgatattgcccataactgcgggctgcaacaggtaaaccgccttgagcgcggcgttgcttactatatagaagccggtacgctgaccaatgaacaatggcagcaggttaccgctgaactgcacgaccgcatgatggaaacggtcttttttgctttagatgatgcagagcagctgtttgcacaccatcaaccgactccggtcaccagcgttgatttgctggggcagggccgtcaggcgctaatcgacgctaacctgcgtcttggcctggcactggcggaagatgaaattgactatctgcaggatgctttcacaaagcttagtcgtaatccgaacgacatcgaactgtatatgtttgcccaggcgaactccgagcactgccgccacaaaatttttaacgccgactgggttatcgatggtgaacagcagccgaaatcgctatttaagatgatcaaaaacaccttcgaaaccacgccggatcacgttctctctgcttataaagataacgccgccgtaatggaaggttctgaagtgggccgctactttgctgaccacgaaacgggccgctacgatttccatcaggaaccggcgcatattctgatgaaagtcgaaactcacaaccacccgacggcgatttctccgtggccgggcgcggcgaccggttccggcggtgaaatccgcgatgaaggtgccaccggacgtggcgcaaagccgaaagctggtctggttggtttctccgtatccaacctgcgaattcctggcttcgaacagccgtgggaagaagatttcggtaaacctgagcgcattgttaccgcgctggacatcatgaccgaaggcccgctgggcggcgcggcgtttaacaacgaatttggtcgcccggcactgaacggctacttccgtacttatgaagaaaaagtgaacagccacaatggcgaagagctgcgcggttatcacaaaccgatcatgctggcgggtgggatcggcaacattcgcgccgatcacgtacaaaaaggcgagatcaacgttggtgcgaagctggtcgttctcggcggcccggcaatgaacatcggtcttggcggcggcgcggcgtcttccatggcatctggtcagtctgatgccgacctcgactttgcttccgtacagcgcgacaacccggagatggagcgtcgctgccaggaagtgatcgaccgttgctggcagcttggtgatgccaacccaatcctgtttatccacgacgttggcgcaggcggtctttctaacgccatgccggaactggtgagcgacggcgggcgcggcggtaaatttgaactgcgcgatatcctgagcgacgaaccgggcatgagcccgctggaaatctggtgtaacgaatcccaggaacgctacgtgctggcggttgctgccgatcagttaccgctgtttgacgaactgtgtaagcgtgaacgagcaccctacgcggtgattggcgaggccaccgaagaattacatctttctctgcacgatcgtcattttgataatcaacccatcgatctgccgctggacgtactgcttggcaaaacgccgaagatgacccgcgatgtacaaacgctgaaagcgaaaggcgacgcgctggcccgtgaagggatcaccatcgctgacgcggtgaaacgcgtgctgcatctgccgaccgtggcggagaaaactttcctggtgaccatcggtgaccgcagcgtaaccggcatggtggcgcgcgatcagatggtggggccgtggcaggtgccggtcgctaactgtgcggtcactactgccagcctcgacagctactacggcgaagcgatggcaattggcgaacgtgcgccagttgcgctgctggatttcgccgcttctgcccgtctggcagtcggtgaagcgctaaccaacatcgccgcaacacaaattggcgatatcaaacgcattaaactttccgccaactggatggcggcggcaggccaccctggtgaagatgctggcctgtatgaagccgttaaagctgtgggtgaagaactttgtccggcgctgggcctgacgataccggtgggtaaagactctatgtcgatgaaaacccgctggcaggaaggtagcgaagagcgcgaaatgacctcgccgctttcgctggtgatttctgcatttgcccgcgtggaagatgtacgtcacaccatcacgccgcagctttctaccgaagataacgcactgctgctgattgatttaggcaaaggcaataacgcgctgggcgcaacggcgctggcgcaggtttatcgtcagcttggcgacaaaccggcagatgtacgcgatgtcgcgcaactgaaaggcttctatgacgcgattcaggcgctggttgcacagcgtaagctgctcgcgtatcacgaccgctctgatggcgggctggtggtaacgctggcggaaatggcctttgctggtcattgcggcattgacgcggatatcgccactctgggtgacgatcgtctggctgcattgtttagcgaagaactgggtgcggtgattcaggttcgtgccgctgaccgtgaagcagttgaagcggtactggcacagcatgggcttgctgattgcgtccattatgttgggcaggcggtttccggtgaccgttttgtgattaccgccaacgggcagactgtattcagcgaaagccgcactacgttgcgtgtctggtgggcagaaactacctggcagatgcagcgcctgcgtgacaacccggagtgtgccgaccaggagcaccaggcgaaatcaaacgacgccgatccgggcctgaatgtaaaactgtcgttcgatatcaacgaagatgtggcagcaccgtatattgccactggcgcgcgcccgaaagttgccgtgctgcgtgagcagggcgtgaactcgcatgttgaaatggcggcagctttccaccgtgcaggcttcgatgctatcgacgtgcatatgagcgacctgctggctggatgcacgggcctggaggatttccacgccctggtcgcgtgcggtggtttctcctacggtgatgtgctgggtgccggtgaaggttgggcgaagtctatcctgttcaatgaccgtgtacgcgatgagtttgcaaccttcttccaccgtccgcaaacgctggcgctgggggtatgtaacggttgccagatgatgtctaatctgcgtgaactgatccctggtagcgagttgtggccacgttttgtgcgtaacacctccgatcgctttgaagcgcgtttcagtctggtagaagtaacccaaagcccgtcgctgctgttgcaggggatggtgggctcgcagatgccgattgctgtctctcatggtgaagggcgcgtggaagtgcgtgatgcggcgcatctggcggcactggaaagcaaagggctggtggcactgcgctatgtcgataacttcggcaaagtcactgaaacctacccggctaacccgaacggttctccgaatggtattacggcagtcacgactgaaagtggtagagtcaccattatgatgccgcacccggaacgtgttttccgtactgtcagcaactcctggcatccggaaaactggggcgaggatggcccatggatgcgcattttccgcaatgcgcgtaagcagttggggtaa

SEQ ID NO: 2603 - DNA, 1383 bp, Escherichia coli
atgctggcatttttgctgattctgctacccctgttggtgctggcatggcaagcctggcaaagcctgaatgcgcttagcgatcaggcggcgctggttaaccgcactacgcttgttgatgcccggcgcagtgaagcgatgaccaacgcggcactggaaatggagcgcagctaccgtcagtattgtgtgctggacgacccaaccctggcgaaggtttatcaaagccagcgcaagcgttacagcgaaatgctcgatgcccacgcaggcgtgctgccggacgataaactctaccaggcattacgtcaggatttgaacaatctggctcaacttcagtgtaacaacagcggtcctgatgccgccgccgccgcacgtcttgaagcctttgccagtgccaataccgaaatggtacaggccacgcgcacagtggtgttctctcgtgggcagcaacttcagcgtgaaatcgccgaacgtgggcaatattttggttggcaatcgctggtgttatttctggtgagtctggtgatggtgctacttttcacgaggatgattatcggtccggtgaaaaatatcgagcgcatgatcaaccggctgggggaagggcgttctctgggcaatagtgtctcgttcagtggaccgagcgagttacgctcggttgggcaacgtattctttggttaagtgagcgcctgtcatggctggaatcccaacgtcatcaattcttaagacatttatctcatgaattaaaaacgccgctggcaagtatgcgcgagggcactgaattactggctgaccaggttgtcgggccgcttacgccagagcaaaaagaggtggtgagcatcctcgatagcagcagccgcaatttgcaaaaactgatcgaacaactgcttgattacaaccgtaaacaggcggacagtgcggtggaactggagaatgttgagttagcaccgctggtggagacagtggtttctgctcatagcctgcccgcacgggctaaaatgatgcataccgacgttgatctcaaagcaacagcttgcctggcggagccaatgctgctgatgagcgtactggataatctttactccaatgcggtgcactacggggctgaatccggtaacatttgccttcgcagcagtttacatggagcgcgggtttatattgatgtcatcaatacaggcacacccattccgcaagaggaacgcgccatgatctttgaacccttttttcagggaagccaccagcgaaaaggggcggtgaagggcagcggtctgggattaagcattgccagggattgtattcgccgtatgcagggggaactgtatctggtcgacgagagcgggcaagacgtttgtttccgcattgaattaccgtcgtcgaaaaacacgaaataa

SEQ ID NO: 2604 - DNA, 714 bp, Escherichia coli
atgcgacacatttttcaacgattattgccccgacggctgtggctggcagggctgccatgtctggcattgctgggttgcgtgcagagtcacaataagccagccattgatacgccagcagaagaaaaaattccggtttatcaactggctgactatctttctactgaatgtagcgacatctgggcgctgcaaggtaaatcaaccgaaaccaatccgctttactggctgcgggcgatggattgtgctgatcgtttaatgcctgcgcagtcgcgtcagcaagcccgccaatatgacgacggcaactggcaaaatacctttaaacaagggattttgctcgccgacgccaaaattacgccgtatgagcgccgccagctggtcgcgcgcattgatgcgctaagtaccgagatcccggcacaggttcgcccactgtatcaactttggcgcgacggtcaggcgctgcaactgcaactggcggaagagcgccaacgctacagcaaactccagcagtccagcgacagcgagctggatactttgcgccagcaacatcacgttctacaacagcaactggaactcactacccgcaagctggaaaacctgaccgatattgaacgccagctctcgacccgcaaaccggctggaaatttctcgccggatacgccgcacgagagtgaaaagcccgcgccatccaccgatgaggtcactcctgatgagccataa

SEQ ID NO: 2605 - DNA, 1335 bp, Escherichia coli
atgagccataaacctgcgcatttattactggtcgatgacgatccgggattgctgaaactgcttggcctgcgcctgaccagcgaaggctacagtgtggtcacggcggaaagtggtgctgaaggattgcgggtactgaatcgcgaaaaagtagatttagtcatcagcgacctgcggatggatgaaatggacggtatgcagctgtttgctgaaatccagaaagtgcagccgggaatgccagtaattattcttaccgcgcatggttctattcctgatgccgttgctgcaacacagcagggcgtgttcagttttctcaccaagcctgtcgataaagatgcgctatatcaggcaattgacgatgcgctggaacaatccgcgccagccaccgacgaacgttggcgcgaggcgattgtcacccgcagcccgctgatgctgcgcttgctggaacaggcgcggctggtggcacaatcagacgttagcgttttgattaacggccagagcggcaccgggaaagagattttcgcccaggctatccacaacgccagcccgcgcaacagcaagccatttattgctattaactgtggcgcattacccgagcaattgctggagtcggagctgtttggtcatgcacgtggcgcgtttactggcgctgtcagcaatcgcgaaggtttattccaggcggcggaaggcggtacgctatttctcgatgagattggcgatatgcccgcaccgttgcaggtcaaactgctgcgcgtgttgcaggagcgtaaagtgcgcccgctgggcagtaaccgcgatattgatatcgacgtgcggattatttctgcgacccaccgcgacctgccaaaagcgatgacgcgcggggaattccgtgaagacctctattaccgcctcaacgttgtcagcctgaaaattccggccctggcggagcgcacagaagacattccgctactggcaaatcacctgttgcgccaggcggcagagcgacataaaccgtttgtccgcgcgttctccaccgatgcaatgaaacgcctgatgactgcgagctggccgggcaacgtgcgccagttggtcaacgtgattgaacagtgcgtggcgctgacatcatctccggtaattagtgatgcgctggtggagcaggcgctggagggcgaaaacacggcgctgccaacctttgttgaggcgcgtaatcagtttgaactcaactatttgcgtaagctgctgcaaatcaccaaaggcaacgtcacccacgcggcgagaatggcggggcgcaaccggacagaattttataaactgctttcccgacacgaactggatgcaaacgatttcaaggaatga

SEQ ID NO: 2606 - DNA, 339 bp, Escherichia coli
atgaaaaagattgatgcgattattaaacccttcaagctggacgatgtccgcgaagcactggctgaagtcggtattaccggcatgacggtcactgaggtgaaaggttttggccgccagaaaggccataccgagctgtaccgcggtgcggagtatatggtggattttctgccgaaagtgaaaattgagattgtcgtaccggacgacattgtcgatacctgtgtcgataccattattcgcacggcgcaaaccggcaaaatcggtgacggtaaaatcttcgtcttcgacgtggcacgggtcattcgtatccgtaccggtgaagaggatgatgcggcgatttaa

SEQ ID NO: 2607 - DNA, 1191 bp, Escherichia coli
atgcttgacgctcaaaccatcgctacagtaaaagccaccatccctttactggtggaaacgggaccaaagttaaccgcccatttctacgaccgtatgtttactcataacccagaactcaaagaaatttttaacatgagtaaccagcgtaatggcgatcaacgtgaagccctgtttaacgctattgccgcctacgccagcaatattgaaaacctgcctgcgctgctgccagcggtagaaaaaatcgcgcagaagcacaccagtttccagatcaaaccggaacagtacaacatcgtcggtgaacacctgttggcaacgctggacgaaatgttcagcccggggcaggaagtgctggacgcgtggggtaaagcctatggcgtcctggctaatgtatttatcaatcgcgaggcggaaatctataacgaaaacgccagcaaagccggtggttgggaaggtactcgcgatttccgcattgtggctaaaacaccacgcagcgcacttatcaccagcttcgaactggagccggtcgacggtggcgcagtggcagaataccgtccggggcaatatctcggcgtctggctgaagccggaaggtttcccgcatcaggaaattcgtcagtactctttgactcgcaaaccggatggcaaaggctatcgtattgcggtgaaacgcgaagagggtgggcaggtatccaactggctgcacaatcacgccaatgttggcgatgtcgtgaaactggtcgctccggcaggtgatttctttatggctgtcgcagatgacacaccagtgacgttaatctctgccggtgtcggtcaaacgccaatgctggcaatgctcgacacgctggcaaaagcaggccacaccgcacaagtgaactggttccatgcggcagaaaatggcgatgttcacgcctttgctgatgaagttaaggaactggggctgtcactgccgcgctttaccgcgcacacctggtatcgtcagccgaatgaagccgatcgcgctaaaggtcagtttgatagcgaaggtctgatggatttgagcaaactggaaggtgcgttcagcgatccgacaatgcagttctatctctgcggcccggttggcttcatgcagtttgccgcgaaacagttagtggatctgggcgtgaaacaggaaaacattcattacgaatgctttggcccgcataaggtgctgtga

SEQ ID NO: 2608 - DNA, 1254 bp, Escherichia coli
atgttaaagcgtgaaatgaacattgccgattatgatgccgaactgtggcaggctatggagcaggaaaaagtacgtcaggaagagcacatcgaactgatcgcctccgaaaactacaccagcccgcgcgtaatgcaggcgcagggttctcagctgaccaacaaatatgctgaaggttatccgggcaaacgctactacggcggttgcgagtatgttgatatcgttgaacaactggcgatcgatcgtgcgaaagaactgttcggcgctgactacgctaacgtccagccgcactccggctcccaggctaactttgcggtctacaccgcgttgctggaaccaggcgataccgttctgggtatgaatctggcgcatggcggtcacctgactcacggttctccggttaacttctccggtaaactgtacaacatcgttccttacggtatcgatgctaccggtcatatcgactacgccgatctggaaaaacaagccaaagaacacaaaccgaaaatgattatcggtggcttctctgcatattccggcgtggtggactgggcgaaaatgcgtgaaatcgctgacagcatcggtgcttacctgttcgttgatatggcgcacgttgcgggcctggttgccgctggcgtctaccctaacccggttcctcatgctcacgtagtaactaccaccactcacaaaaccctggcgggtccgcgcggcggcctgatcctggcgaaaggtggtagcgaagagctgtacaaaaaactgaactctgccgttttccctggtggtcagggcggtccgttgatgcacgtaatcgccggtaaagcggttgctctgaaagaagcaatggaacctgagttcaaaacttaccagcagcaggtcgcgaaaaacgccaaagcgatggtagaagtgttcctcgaacgcggctacaaagtggtttctggtggtactgataaccacctgttcctggttgatctggttgataaaaacctgaccggtaaagaagcagacgccgctctgggccgtgctaacatcaccgtcaacaaaaacagcgtaccgaacgatccgaagagcccatttgtgacttccggtattcgtgtaggtactccggcgattacccgtcgtggctttaaagaagccgaagcgaaagaactggctggctggatgtgtgacgtgctggatagcatcaatgatgaagccgttatcgagcgcatcaaaggtaaagttctcgacatctgcgcacgttacccggtttacgcataa

SEQ ID NO: 2609 - DNA, 1194 bp, Escherichia coli
atgagagcctgcattaacaatcaacagattcgccaccataacaaatgcgtgattctggaactgctgtaccggcaaaagcgcgccaataaatcaacgctggcccggctggcgcaaatttcgattccggcggtcagtaatattttgcaggaactggaaagcgaaaaacgggtggtgaatatcgacgatgaaagccagacgcgcgggcatagtagcggtacatggctgattgcgccggaaggagactggacgctgtgcctgaacgtgacgcccaccagcattgagtgtcaggtcgctaatgcctgtttaagtccgaaaggcgaatttgaacgctttcagattgacgctccaacgccgcaggcgctgctgtccgaaatcgaaaaatgctggcatcgccaccgtaaattgtggccggaccgcaccatcaatctggctctggcaatccacggtcaggttgatccagtgaccggcgtgtcgcaaaccatgccgcaagcgccgtgggcaacaccgattgaggtgaagtacctgctggaagagaagctgggtattcgggtaatggtcgataatgactgcgtgatgctggcgctggcggagaaatggcaaaataattcgcaagtgcgtgatttctgcgtaatcaacgttgattacggcattggctcgtcgttcgtgattaacgagcaaatttatcgcggcagtttgtatggcagtggacagattggccacaccatcgttaatccggatggcgtcgtctgcgactgcgggcgttatggctgcctggaaaccgtcgcctcgttaagtgcattaaaaaaacaggcgcgggtatggctaaaatcacaaccggttaatactcagcttgatcctgaaaaattgactaccgcgcagttaatcgctgcctggcagagtggagaaccgtggatcaccagttgggttgaccacagtgccaacgccattggtttgagtctgtataacttcctcaacatcctcaatattaatcagatttggttgtacggtcgcagttgtgcctttggtgagaactggcttaataccattattcgccagacgggatttaacccgttcgaccgcgacgaaggaccgagcgtgaaagcgacacagattggctttgggcaattaagccgcgcacaacaggtactgggaattggctatttgtatgttgaggcgcagttacggcagatttga

SEQ ID NO: 2610 - DNA, 3282 bp, Escherichia coli
atgactccagtaaaagtgtggcaagagcgcgttgagatcccgacctatgaaaccgggccgcaggatatacatcccatgttcctggaaaatcgcgtttatcagggatcgtccggcgcggtttatccctacggcgtgaccgatacgctgagcgagcagaaaaccctgaaatcctggcaggcggtgtggctggaaaacgactacatcaaagtgatgatcctgccggaactgggcggtcgggtgcatcgcgcgtgggataaagtgaaacagcgcgattttgtttatcacaatgaagtcattaaaccggcgctggtgggactgctggggccgtggatctccggcgggattgagtttaactggccgcaacaccatcgcccgaccacctttatgcccgttgatttcaccctcgaagcccatgacgacggcgcacagacggtgtgggtcggcgaaacggagccgatgcacggtttacaggtgatgacaggtttcaccctgcgccctgaccgggcggcgctggaaatcgccagtcgcgtctataacggcaacgccacgccgcgtcatttcttgtggtgggccaacccggcagtgaaagggggtgaagggcatcagagcgttttcccgccggatgtaacggcggtgtttgatcacggcaaacgggccgtctccgctttccccatcgccaccggcacttactacaaagtggactactccgccggagtggacatttctcgctataaaaatgtgcccgttccaacctcatatatggctgaaaaatcacagtacgattttgttggcgcgtggtgtcacgatgaagatggtggtttgctacacgttgccaaccaccatattgcgccaggtaaaaaacagtggagctggggacacagtgaatttggccaggcgtgggataagagcctgaccgacaataacggtccgtatatcgaactgatgaccggtatttttgccgataaccagcctgattttacctggcttgatgcttacgaggagaagcgtttcgagcagtatttcctgccttaccattctttgggcatggtgcaaaacgcctcccgcgatgcggtgattaaactccagcgtagcgagcgggggattgagtgggggctgtatgccatctctccgttgaacggataccgtctggcgatccgcgaaatcggcaaatgcaacgcgttgctcgatgatgcggtggtcctgacaccagcgaccgccatccagggcgtgttgcacggtatcaatcctgaaaggctgaccattgagctctccgatgccgacggcaatattgtactgagttatcaggaacatcagccgcaagcgttgccgttgccggacgtcgccaaagcgccactggcagcacaagacattaccagtacagatgaagcctggtttatcggtcaacatctggagcaatatcatcacgccagccgttcaccgttcgattactacctgcgcggcgtggcgctggatccgctggattatcgctgtaatctggcgctggcaatgctggaatataaccgtgcagatttcccgcaagcggtggtatatgccagtcaggcactgaaacgcgcacatgcgctgaacaaaaatccgcagtgcggacaggcgagtttgattcgcgccagcgcttacgaacgtcaggggcaatatcaacaagccgaagaggatttctggcgtgcggtctggagcggcaacagtaaagcgggcggctattatggtctggcacgactggcggcgcgtaatggtaacttcgacactggtctggatttttgccaacaaagtcttcgcgcctgcccaaccaatcaggaagtgctttgcctgcataacctgctactggtgttaagtggtcgtcaggacaacgcgcgtttgcagcgcgagaaactgctgcgtgattatccgctgaacgccactctgtggtggctgaactggttcgatggtcgtagcgaatcagccctcgcgcagtggcgaggtctttgtcagggacgcgacgttaacgccctgatgaccgccgggcaactgattaactggggcatgcccgccctggcggcagatatgctgaacgcactggactgtcagcgcacgctaccgctttacctgcaagccagtttgctaccaaaagctgaacgcggagaactggtcgtaaaagctattgatgccttcccgcagtttgtccgtttcccgaatacgctggaagaagtggcggcgctggagagtatcgaagagtgctggtttgcccggcatttactggcctgcttctactacaacaagcgtagctacggcaaagccattgccttatggcagcgttgcgtagagatgtcgccggagtttgccgacggctggcgcgggttggcgatccatgcgtggaataagcagcacgattatgagctggccgcgcgttatcttgataatgcttatcagcttgcgccgcaggatgcacgtctgcttttcgaacgggatttgctggataagttaagcggtgtcacaccggagaaacgactggcgcgtctggaaaataatctggaaattgcgctgaaacgcgacgacatgaccgcagaactgctcaatttgtggcatcttactggtcaggcagacaaagcggcggacattctcgccacgcgcaaattccacccgtgggaaggtggggaagggaaggtcaccagccagtttatcctcaaccagttattacgcgcctggcagcatcttgatgacagagagccgcagcaggccagcgagctgcttcatgccgcgctgcattatccggagaatttaagcgaaggccgtttaccggggcaaactgacaacgacatctggttctggcaggcagtatgcgccaacgcgcagggcgatgaaactgaagcgacgcgttgtttacgtctggcggcgaccggcgatcgcaccattaacatccacagttattacaacgatcagccggttgattatctcttctggcaaggaatggcgctgcgactgctgggcgaacaacacaccgcacagcaactgtttagtgaaatgaaacagtgggcgaaagagatggcgaaaaccagtatcgaagcggatttctttgccgtctcgcagcctgacttgttgtcgctgtatagcgatttacaacagcagcataaagaaaaatgcctgatggtggcgatgctggcggccgcgggattaggggaggttgcgcactatgaatctgctcgcgctgaattgatggcgattaatccagcctggccgaaagcggcattattcaccaccgtgatgccttttatttttagctacgttcactaa

SEQ ID NO: 2611 - DNA, 984 bp, Escherichia coli
atgcctaaaaaaatgacaagaacccgtaatttattattaatggctacgctattgggtagcgcactatttgccagggcttctgataaagaaatgactattggcgcaatataccttgatacccagggatattacgccggagtgcgtcagggcgttcaggatgcggcaaaagattcttcagtacaggtacagttaattgaaactaacgctcagggcgatatttcgaaagaaagtacctttgttgataccctcgtggcgcgtaatgtcgatgccattattttatcggcagtgtctgaaaatggcagtagccgtaccgttcgtcgcgccagtgaagcgggtattccggtgatttgctacaacacctgtattaatcaaaagggtgtcgataaatatgtctcggcatatctggttggtgacccgctggaatttggtaaaaaactgggtaacgcagccgccgattattttattgccaacaaaattgaccagccgaaaattgccgtcatcaattgcgaagcctttgaagtttgtgtgcaacgacgtaaagggtttgaagaagtattaaaagcccgcgttcccggcgcgcaaattgtcgctaatcaggaagggactgttttagataaagcgatttctgtcggtgaaaaactgattatctccacgccggatctcaacgccattatgggggaatcgggcggagcgacactcggcgcggtaaaagcggtacgtaatcaaaatcaggccggaaaaattgctgttttcggttctgatatgaccactgaaattgctcaggagctggaaaataaccaggtgctgaaagcggtggtggatatttccggtaagaaaatgggcaatgctgttttcgcgcaaacattgaaggttatcaataaacaagccgacggtgaaaaagtgattcaggtgccaatcgatctctataccaaaacggaagacggtaaacagtggctggcaacgcacgttgatggtctgccctaa

SEQ ID NO: 2612 - DNA, 1512 bp, Escherichia coli
atgttcacggtaacagaggcagtcccggtagcaaaagtggtggcaggaaataagcgttatcccggcgtcgttgcgctggataacgttaacttcacgctcaataaaggcgaagttcgtgcgctgttaggcaaaaacggtgcgggaaaatcgaccctcattcgaatgcttaccggtagcgaacgtccggatagcggtgatatctggattggcgagacgcgactggaaggtgacgaagctacgctgactctccgtgccgctgaactgggggtacgcgcggtttatcaggagttaagtctggtggaagggctgacagtggcggaaaacctctgcctcggtcagtggccccgccgcaacggcatgattgattacctgcaaatggcgcaggacgcccaacgttgcttgcaggcgttgggcgttgacgttagtcctgaacaacttgtttcaacactaagcccggcgcaaaagcagctggtggaaattgcgcgggtgatgaagggcgagccgcgcgtggtcattcttgatgaacccaccagctcgcttgccagtgcggaagttgaactggtgatcagcgcggtgaaaaagatgtcggcactgggcgtggcggtgatttatgtcagccaccggatggaagaaattcgccgcattgcctcctgtgccaccgttatgcgcgatggtcaggtggcgggcgatgtgatgctcgaaaacacctctacgcatcatattgtgtcgctaatgctcgggcgcgatcacgttgatattgcgccggttgcccctcaggaaattatggatcaggccgtgctggaagtccgtgcgttacgccataagcccaagctggaggatatcagttttacactacgtcgtggcgaagtgctcggcattgctggtctgctgggggcagggcgcagtgaattgctgaaggcgattgttgggctggagacgtatgaacagggcgaaattgttatcaacggcgagaaaatcacgcgccccgattacggcgacatgctgaaacgcggcattggctatacgccagaaaaccgcaaagaagcggggatcattccctggttgggcgttgacgaaaatacagtgctgaccaatcggcaaaaaatcagcgccaacggtgtactgcaatggtccaccatccgccgcctgaccgaagaggtgatgcagcggatgacggtcaaggccgccagtagcgaaacgcccatcggcacgctttctggcggcaatcagcaaaaagtggtgatcggtcgttgggtctatgccgccagccagattttgttgctcgacgagccaacgcgcggcgtcgatatcgaagccaaacagcagatttaccgtattgtccgcgagctggctgccgaaggaaaaagcgtggtgtttatctccagtgaagtggaggagttaccgttggtgtgcgaccgcattctgttgttacagcacggtacgttctcgcaggagtttcactctccggtcaatgtggatgagctgatgtccgccattctgtctgtgcactga

SEQ ID NO: 2613 - DNA, 999 bp, Escherichia coli
atgtctgcttcgtcattaccattgccgcagggcaagagcgtctcgctcaaacaatttgtcagtcgccatattaatgagatcggtttgctggtggtgattgccattctttatctggtcttctccctgaatgcgcctggctttatctcattgaataaccagatgaacgtgctgcgcgatgccgccaccattgggatcgccgcctgggcgatgacgctgattattatctccggtgaaattgatgtcagcgttgggccgatggtggcttttgtttcagtgtgcctggcatttttgctgcaatttgacgttccgctggcgattgcttgtctgctggtgttgctgttaggtgcgctgatgggaacgctcgccggggtgctgcgcggcgtgtttaacgtgccaagttttgttgccacgctgggtttatggagcgccctgcgcggaatggggctgtttatgacgaacgccttgccagtgccaattaacgaaaacgaagtgctggactggctgggcggacaatttctcggggtgccggtatccgcgctgatcatgatggtgttatttgcgctgtttgtgttcattagccgcaaaaccgccttcgggcgctcggtttttgctgttggcggtaatgccactgcagcgcagttgtgcggtattaacgttcgtcgggtacgcattcttatttttaccctttcgggattattagcggcggtgaccggcattttgttggcggcgcgcctcggttccggtaacgcaggtgccgcaaacggtctggagtttgacgtcatcgccgcggtcgttgtcggcggtacggcgctttccggcggtcgcggctcgttgttcggtacgctgcttggcgcactggtgattacgctaatcggtaacggtctggtgctgctcgggattaactcctttttccagcaggtggtgcgcggcgtcatcatcgtggtggcggtgctggcgaatatcttgctgacccagcgtagcagtaaagcgaaacgctaa

SEQ ID NO: 2614 - DNA, 1062 bp, Escherichia coli
atgaaaacgatgctggcagcttatttaccaggaaattcgaccgtcgatctgcgggaagttgcggtgccgacgccggggattaaccaggtactgatcaaaatgaaatcctccgggatttgcggaagcgatgtccactatatctaccaccagcaccgcgctacggcggcggcacccgataaaccgttataccagggatttatcaacggtcatgaaccgtgcgggcagattgtggcgatggggcaaggctgtcgccattttaaagagggcgaccgcgtgctggtgtatcacatttctggctgtggtttttgcccgaactgccgtcgcggttttcctatttcttgtactggcgaaggaaaagcggcttacggctggcagcgtgacggcggtcatgccgaatacctactggcggaagaaaaagatctgatcctcctgccagacgcgctgagttacgaagatggcgcgtttatcagttgcggtgttggtacggcgtatgaagggattttgcgcggcgaggtttccggtagcgataacgtggtggtggttggtctggggccggtcggcatgatggcgatgatgctggcgaaaggtcgcggtgcaaaacggatcatcggcgttgatatgttgccggaacgtctggcgatggcgaaacagttaggagtgatggagcacggctatttagcgaccaccgaaggtatgccgcagataatcgccgaactcactcacggcggcgcggatgttgcgcttgattgttccggtaatgccgcaggtcgcttactgacactgcaatccaccgctgactggggacgcgtggtttacattggtgaaaccggaaaagtcgagttcgaggttagcgccgacctgatgcaccatcaacggcggattatcggctcctgggtgaccagtctgttccatatggaaaaatgcgcccacgatttaacggactggaaactgtggccgcgtaacgccattacccaccgcttctcgctggaacaggcgggagatgcttatgcactgatggcaagcggcaaatgcgggaaagttgtgattaatttcccggattaa

SEQ ID NO: 2615 - DNA, 873 bp, Escherichia coli
atgaccatctataccctatctcacgggccgctaaagctggacgtttctgatcagggcggcgtaatcgaaggcttctggcgcgatacgacgccgctgctacgtcctggtaaaaaaagcggtgtggcaaccgatgcctcttgttttccgctggtaccatttgcaaaccgggtgagcggcaaccgttttgtctggcaggggcgtaagtatcaactgcaaccgaatgttgagtgggatgcgcactatctacacggcgatggctggttgggcgagtggcaatgtgtctcgcgcagcgatgatagattgtgtctggtgtatgaacatctcagcggtgtttatcactatcgggtaagccaggcatttcatttaacggcggatacgctgacggtgacgctcgctgtcaccaatcaaggggcagagacgctgccatttggtaccggctggcatccttattttccgttgtcgccgcaaacgcggattcaggcacaggcgagcggttactggctggagcgggagcagtggctggcgggtgagttttgcgagcagctaccgcaggaactggattttaaccagctcacgccgttgccgcgccagtgggtaaacaatggttttgccggatggaatggtaaggcccgcatcgagcagccgcaggagggttatgccatcatcatggaaacgacgccacctgcaccgtgttatttcatctttgtttccgacccggcgtttgataaaggatatgcgtttgatttcttctgtctggaaccgatgagccatgcgccggatgaccatcatcgtccggaaggtggtgacctcattgcgcttgcaccaagggaatcaacaacttcagagatgtcgttgcgggttgcgttgctgtaa

SEQ ID NO: 2616 - DNA, 423 bp, Escherichia coli
atgaactcactacgttattttgattttggcactgcccgccccgttttattattaattgcccgtatcgccgtggtcttaattttcattatttttggttttcccaaaatgatgggctttgacggtacggtccaatatatggcctcgctgggcgcaccaatgccgatgctggcagcgattattgcggtagttatggaagtgcccgccgcgatattaatcgtgcttggctttttcacccgtccgctggcggtgctgtttattttctacacgctgggtacggcggtgattggccaccattactgggatatgaccggcgatgcggttgggccaaatatgattaatttctggaagaatgtcagtatcgctggcgcattcctgctgttggcaattaccgggccgggggcgatttctctcgatcgccgttag

SEQ ID NO: 2617 - DNA, 1140 bp, Escherichia coli
atggttttgcaatccacgcgctggttggcgctcggctatttcacatacttttttagttacggcatttttctacctttctggagcgtctggcttaaagggattggtttaacgccagaaaccatcggcctgttattgggggcgggtctggttgcccgtttcctcgggagtttgctcatcgcgccccgcgtcagcgatccttcccgcctgatttccgccttgcgcgtgctggcactgctgacacttctctttgctgtcgccttctgggcgggggcgcacgtagcgtggctgatgctggtgatgattggctttaacctctttttctcaccgctggtaccgttgaccgatgcactggcgaatacgtggcaaaagcagttcccgcttgattacggcaaagtgagactgtggggctcggtggcgtttgtcattggctcggcgctgacgggcaaactggtcagtatgtttgattatcgggtgatcctcgcgctgttgacgttgggcgtggcatccatgctgctcggctttctcatccgtccgacgattcagccacaaggggcaagccgccagcaggagagcaccggctggtctgcgtggttggcgttggttcgccagaactggcgctttctggcctgcgtttgtttattgcagggggcacatgcggcctattacggttttagcgccatttactggcaggcagctggctactcggcctcggcggtggggtatttgtggtcgctgggcgtggtggcggaagtcattatctttgcgctgagtaataaacttttccgccgttgtagtgcacgcgatatgctgttgatctcggcgatttgcggcgtagtgcgctgggggattatgggagcaactacggcgttgccgtggttgatagtggtgcaaattctgcattgcggtaccttcacggtctgccacctggctgccatgcgctatattgctgctcgccagggtagcgaagtcatccgtttacaggcggtttactctgccgtcgcgatgggcggcagtatcgccatcatgaccgttttcgccggtttcctgtatcaatatctcggccacggcgtgttctgggtgatggcgctggtggcgcttccggcaatgtttttgcgcccgaaagttgttccctcatgctga

SEQ ID NO: 2618 - DNA, 1281 bp, Escherichia coli
atgatgcctacgcttgctccaccatctgtcctttcggctccccagcgccgctgccagatcttgctgacgctctttcagccggggttgaccgccaccacggcaactttcagcgagcttaatggtgtggatgatgatattgccagtcttgatatcagcgaaacaggacgggagatcctgcgctatcatcaactcacactgactactggttatgacggcagctaccgggttgaaggtacagtgcttaaccaacgtttgtgtttatttcactggctacgacgtggtttccgtctgtgtccgtcatttattaccagccgattcacccccgccctgaagagtgaactgaagcggcgcggaattgcgcgtaacttttacgacgataccaatctacaagcgttagtgaatctctgctctcgacggctgcaaaaacgctttgaaacgcgcgatattcatttcctgtgtctgtatttgcaatattgtttgttgcaacatcacgctggaattacgcctcagtttaatccgctccaacgtcgctgggcggaatcctgccttgaatttcaggtagcgcaggaaattggacgccactggcagcgtcgggcactccagcctgtaccgcctgatgagccactgtttatggcattacttttttccatgttgcgggttcccgatccactgcgggatgcgcatcagcgggacagacaactgcgtaagtctatcaaacgtctggtaaaccactttcgtgagctgggaaatgttcgtttttatgatgaacaggggttatgcgatcagctttatacccacctcgcccaggcgttaaatcgcagtttgtttgccatcggtattgataacaccctgccggaagagttcgcccgcctgtatccacgcctggtgcgcaccacccgcgcggcgctggctggatttgaaagtgaatacggcgtccatctttctgatgaggaaagcggtctggtcgcggtgatttttggtgcctggctaatgcaggaaaacgacctgcatgagaaacagattattctattgaccgggaatgatagcgagcgagaagcgcagattgagcagcagctacgcgaactaacgttactgccgctcaacattaaacatatgtcggtaaaggcatttttgcagacaggcgctccgcgcggcgcggcactgattattgcgccttataccatgccgttaccgctcttttcaccaccgctgatctatacggacctgacgttgacaacacatcaacaggagcagatccgcaaaatgctcgaatcagcatga

SEQ ID NO: 2619 - DNA, 855 bp, Escherichia coli
atggcgctgccagtgaacaaacgcgttctcaaaattctgtttattctctttgttgttgccttctgcgtttatttagtgccgcgcgtcgccatcaacttcttctattatcctgacgataaaatatacggtcccgacccctggtcggcggaatccgtcgaatttacggctaaggacggtactcgtctgcaaggctggtttattccttcttcgacgggccctgctgacaacgccatcgcaaccatcattcatgctcacggcaatgccggaaatatgtccgcccactggccgctggtcagttggttacccgagcgtaatttcaacgtttttatgtttgattatcgcgggtttggtaaatcaaaaggcacgccgtcccaggccggattgctggacgatacgcaaagtgccatcaatgtggtgcgccatcgcagcgatgtaaacccacaacggctggtgctgttcgggcagagtattggcggggcgaatattctggatgttattggtcagggtgatcgtgaaggcatacgtgcggtgatcctcgactccacatttgcctcttatgcgaccattgccaaccagatgatccccggcagtggctacttacttgatgagagttacagcggcgaaaattacatcgccagcgtcagcccgatcccgcttttactcattcacggtaaagctgatcacgttatcccatggcagcacagtgaaaagttgtatagcctggcaaaagaaccaaaacggttgatcctaatcccggatggcgaacacattgatgctttttccgatcgtcacggcgatgtttatcgcgaacagatggtggattttatccttagcgcattgaatccgcagaactaa

SEQ ID NO: 2620 - DNA, 804 bp, Escherichia coli
atgcatccgatgctgaacatcgccgtgcgcgcagcgcgcaaggcgggtaatttaattgccaaaaactatgaaaccccggacgctgtagaagcgagccagaaaggcagtaacgatttcgtgaccaacgtagataaagctgccgaagcggtgattatcgacacgattcgtaaatcttacccacagcacaccatcatcaccgaagaaagcggtgaacttgaaggtaccgatcaggatgttcaatgggttatcgatccactggatggcactaccaactttatcaaacgtctgccgcacttcgcggtatctatcgccgttcgtatcaaaggccgcaccgaagttgctgtggtatacgatcctatgcgtaacgaactgttcaccgccactcgcggtcagggcgcacagctgaacggctaccgtctgcgcggcagcaccgctcgcgatctcgacggtactattctggcgaccggcttcccgttcaaagcaaaacagtacgccactacctacatcaacatcgtcggcaaactgttcaacgaatgtgcagacttccgtcgtaccggttctgcggcgctggatctggcttacgtcgctgcgggtcgtgttgacggtttctttgaaatcggtctgcgcccgtgggatttcgcggcaggcgagctgctggttcgtgaagcaggcggcatcgtcagcgacttcaccggtggtcataactatatgctgaccggtaacatcgttgctggtaacccacgcgttgttaaagccatgctggcgaacatgcgtgacgagttaagcgacgctctgaagcgttaa

SEQ ID NO: 2621 - DNA, 741 bp, Escherichia coli
atgctgcaaaatattcgaattgtgctggtggagacgtcacacaccggcaatatgggttctgttgcccgtgccatgaaaacaatgggattaaccaatctgtggctggttaatccactagtgaaacctgactcccaggcgattgccctggcagcaggggccagcgatgtgattggtaatgctcacatcgtcgatacgctcgacgaagcgttagccggttgtagtctggtggtgggcaccagcgctcgctcccgcacgctgccgtggccgatgctcgacccgcgcgaatgcggtctgaaaagcgtcgctgaagcggcaaataccccggtggcgctggtgtttggtcgcgagcgcgtcggcttgaccaatgaagagttgcagaaatgccattatcatgtcgcgattgcggctaacccggaatacagttcgctgaacctggcgatggcggttcaggttattgcctatgaagtgcgcatggcctggctggcgactcaggaaaacggcgagcaacttgaacatgaagagacgccgtatccgctggtcgatgatctggagcgtttttatggtcatctggagcaaacgctgctggcaaccggttttatccgtgaaaaccatccgggacaagtgatgaataaattgcgccgtttgtttacccgtgcgcgcccggaaagccaggaattgaatatcctgcgcgggattctggcttctattgagcagcagaataaaggtaacaaggccgaataa

SEQ ID NO: 2622 - DNA, 489 bp, Escherichia coli
atgagactgacatctaaagggcgctatgccgtgaccgcaatgcttgacgttgcgctcaactctgaagcgggcccggtaccgttggctgatatttccgaacgtcagggaatttccctttcttatctggaacaactgttttcccgtctgcgtaaaaatggtctggtttccagcgtacgtggaccaggcggtggttatctgttaggcaaagatgccagcagcatcgccgttggcgaagtgattagcgccgttgacgaatctgtagatgccacccgttgtcagggtaaaggcggctgccagggcggcgataaatgcctgacccacgcgctgtggcgtgatttgagcgaccgtctcaccggttttctcaacaacattactttaggcgaactggttaataaccaggaagtgctggatgtgtctggtcgtcagcatactcacgacgcgccacgcacccgcacacaagacgcgatcgacgttaagttacgcgcttaa

SEQ ID NO: 2623 - DNA, 1215 bp, Escherichia coli
atgaaattaccgatttatctcgattactccgcaaccacgccggtggacccgcgtgttgccgagaaaatgatgcagtttatgacgatggacggaacctttggtaacccggcctcccgttctcaccgtttcggctggcaggctgaagaagcggtagatatcgcccgtaatcagattgccgatctggtcggcgctgacccgcgtgaaatcgtctttacctctggtgcaaccgaatctgacaacctggcgatcaaaggtgcagccaacttttatcagaaaaaaggcaagcacatcatcaccagtaaaaccgagcataaagcggtactggatacctgccgtcagctggagcgcgaaggtttcgaagtcacctacctggcaccgcagcgtaacggcattatcgacctgaaagaacttgaagcagcgatgcgtgacgacaccatcctcgtttccatcatgcacgtaaataacgaaatcggcgtggtgcaggatatcgcggctatcggcgaaatgtgccgtgctcgtggcattatctatcacgttgatgcaacccagagcgtgggcaaactgcctatcgacctgagccagttgaaagttgacctgatgtctttctccggtcacaaaatctatggcccgaaaggtatcggtgcgctgtatgtgcgtcgtaaaccgcgcgtacgcatcgaagcgcaaatgcacggcggcggtcacgagcgcggtatgcgttccggcactctgcctgttcaccagatcgttggtatgggcgaagcctatcgcatcgcaaaagaagagatggcgaccgagatggaacgtctgcgcggcctgcgtaaccgtctgtggaacggcatcaaagatatcgaagaagtttacctgaacggtgacctggaacacggtgcgccgaacattctcaacgtcagcttcaactacgttgaaggtgagtcgctgattatggcgctgaaagacctcgcggtttcttcaggttccgcctgtacgtcagcaagcctcgaaccgtcctacgtgctgcgcgcgctggggctgaacgacgagctggcacatagctctatccgtttctctttaggtcgttttactactgaagaagagatcgactacaccatcgagttagttcgtaaatccatcggtcgtctgcgtgacctttctccgctgtgggaaatgtacaagcagggcgtggatctgaacagcatcgaatgggctcatcattaa

SEQ ID NO: 2624 - DNA, 387 bp, Escherichia coli
atggcttacagcgaaaaagttatcgaccattacgagaatccgcgtaacgtgggttcctttgacaacaacgacgagaacgtcggcagcggcatggtgggtgcaccggcctgtggcgacgtgatgaagttgcagattaaagtcaacgatgaaggtatcattgaagacgcgcgttttaaaacttacggctgcggttctgctatcgcttccagctccctggtcaccgaatgggtgaaagggaagtctctcgacgaagcacaggcgataaaaaacaccgatattgctgaagaacttgaactgccgccggtgaaaattcactgttctattctggcagaagacgcgatcaaagccgccattgcggactataaaagcaaacgtgaagcaaaataa

SEQ ID NO: 2625 - DNA, 324 bp, Escherichia coli
atgtcgattacactgagcgacagtgcagcagcgcgagtaaatacctttctggctaaccgcggtaaagggtttggcctgcgtctgggcgtgagaacctccgggtgttcaggtatggcttatgtactggaatttgttgacgaaccgacgccggaagacatcgtgtttgaagacaaaggcgtgaaagtcgtggtcgatggcaaaagcctgcaatttctggacggtacgcagctggacttcgtcaaagaaggcctgaacgaagggtttaaattcaccaacccgaacgttaaagatgagtgtggttgcggcgaaagcttccacgtttga

SEQ ID NO: 2626 - DNA, 516 bp, Escherichia coli
atggattacttcaccctctttggcttgcctgcccgttatcaactcgatacccaggcgctgagcctgcgttttcaggatctacaacgtcagtatcatcctgataaattcgccagcggaagccaggcggaacaactcgccgccgtacagcaatctgcaaccattaaccaggcctggcaaacgctgcgtcatccgttaatgcgcgcggaatatttgctttctttgcacggttttgatctcgccagtgagcagcatactgtgcgcgataccgcgttcctgatggaacagctggagctgcgcgaagaactggacgagatcgaacaggcgaaagatgaagcgcggctggaacgctttatcaaacgtgtgaaaaagatgtttgatacccgccatcagttgatggttgaacagttagacaacgagacgtgggacgcggcggcggataccgtgcgtaagctgcgttttctcgataaactgcgaagcagtgccgaacaactcgaagaaaaactgctcgatttttaa

SEQ ID NO: 2627 - DNA, 1851 bp, Escherichia coli
atggccttattacaaattagtgaacctggtttgagtgctgcgccgcatcagcgtcgtctggcggccggtattgacctgggcacaaccaactcgctggtggcgacagtgcgcagcggtcaggccgaaacgttagccgaccatgaaggccgtcacctgctgccatctgttgttcactatcaacagcaagggcattcggtgggttatgacgcgcgtactaacgcagcgcttgacaccgccaacaccattagttctgttaaacgtctgatggggcgctcgctggctgatatccagcaacgctatccacatctgccttatcaattccaggccagcgaaaacggcctgccgatgattgaaacggcggcggggctgctgaacccggtgcgcgtttctgcggacatcctcaaagcactggcggcgcgggcaactgaagccctggcaggcgagctggatggtgtagttatcaccgttccggcgtactttgacgatgcccagcgtcagggcaccaaagacgcggcgcgtctggcggggctgcatgttctgcgcttacttaatgaaccgaccgctgcggctattgcctacgggctggattccggtcaggaaggcgtgatcgccgtttatgacctcggcggcgggacgtttgatatttccattctgcgcttaagtcgcggcgtgtttgaagtgctggcgaccggcggtgattccgcgctcggcggcgatgatttcgaccatctgctggcggattacattcgcgagcaggcgggcattcctgatcgtagcgataaccgcgttcagcgtgaactgctggatgccgccattgcagccaaaatcgcgctgagcgatgcggactccgtgaccgtgaatgttgcgggctggcagggcgaaatcagccgtgaacaattcaatgaactgatcgcgccactggtaaaacgaaccttactggcttgtcgtcgtgcgctgaaagacgcgggcgtagaagctgatgaagtgctggaagtggtgatggttggcggttctactcgcgtgccgctggtgcgtgaacgagtgggcgaatttttcggtcgtccgccgctgacctccatcgacccggataaagtcgtcgctattggcgcggcgattcaggcggatattctggtgggtaacaagccggacagcgaaatgctgttgctggatgtgatcccgctgtcgctgggcctcgaaacgatgggcggcctggtggagaaagtgattccgcgtaataccactattccggtggcccgcgctcaggatttcaccacctttaaagatggtcagacggcgatgtctatccatgtgatgcaaggtgagcgcgaactggtgcaggactgccgctcgctggcgcgttttgcgctgcgaggtattccggcgctaccggctggcggtgcgcatattcgcgtgacgttccaggtcgatgccgacggtcttttgagcgtgacggcgatggagaaatccaccggcgttgaggcgtctattcaggtcaaaccgtcttatggcctgaccgatagcgaaatcgcctcgatgatcaaagactcaatgagctatgccgagcaggacgtaaaagcccgaatgctggcagaacaaaaagtagaagcggcgcgtgtgctggaaagtctgcacggtgcgctggctgctgatgccgcgctgttaagcgccgcagaacgtcaggctatcgacgatgctgccgctcacctgagtgaagtggcgcagggcgatgatgttgacgccatcgaacaagcgattaaaaacgtagacaaacaaacccaggatttcgccgctcgccgcatggaccagtcggttcgtcgtgcgctgaaaggccattccgtggacgaggtttaa

SEQ ID NO: 2628 - DNA, 336 bp, Escherichia coli
atgccaaagattgttattttgcctcatcaggatctctgtcctgatggcgctgttctggaagctaatagcggtgaaaccattctcgacgcagcgctgcgtaacggtatcgagattgaacacgcctgtgaaaaatcctgtgcttgcaccacctgccactgcatcgttcgtgaaggttttgactcactgccggaaagctcagagcaggaagacgacatgctagacaaagcctggggactggagccggaaagccgtttaagctgccaggcgcgcgtcaccgacgaagatttagtggtcgaaatcccgcgttacactatcaaccatgcgcgtgagcattaa

SEQ ID NO: 2629 - DNA, 201 bp, Escherichia coli
atgggacttaagtggaccgatagccgcgaaattggcgaagcactgtacgatgcgtatcccgatcttgatccgaaaacggttcgattcaccgatatgcatcagtggatttgcgatcttgaagatttcgacgacgacccgcaggcatccaacgagaaaatcctcgaagcgattttgttagtctggctggacgaagccgaataa

SEQ ID NO: 2630 - DNA, 1284 bp, Escherichia coli
atgacagaagctatgaagattaccctctctacccaacctgccgatgtgcgctggggagaaaaagcgacttacagcattaataatgacggcattaccctgcatttgaacggggcagacgatctggggctgatccagcgtgcggcgcgcaagattgacggtctgggcatcaagcatgttcagttaagcggtgaaggctgggatgcggatcgctgctgggcattctggcaaggttacaaagccccgaaaggcacgcgtaaagtggagtggccggatctggacgatgcccagcgccaggaactggataaccgcctgatgatcatcgactgggtgcgtgacaccatcaacgcaccggcagaagagctggggccatcgcaactggcacagcgtgctgttgatctgatcagcaacgtcgcaggggatcgtgtgacttaccggatcaccaaaggcgaagatctgcgtgagcaaggttatatggggctgcacacggtcgggcgcggttcagaacgttctccggtattgctggcgctggattacaacccaactggcgataaagaagcgccagtgtacgcgtgcctggttggtaaaggcatcacttttgattccggcggctacagcatcaaacagaccgcgtttatggactcgatgaagtcggacatgggcggtgcggcaacggttaccggggcgctggcatttgccattactcgtggattgaacaagcgcgtgaagctgttcctctgctgtgcggataacctgatcagcggcaacgcgttcaagctgggcgatattattacctatcgcaacggtaaaaaagttgaagtgatgaacactgatgccgaagggcgtctggtgctggccgatggcctgattgatgccagtgcgcagaaaccggaactgattattgatgcggcgaccctcaccggggcggcgaaaaccgcgctgggtaatgattatcacgcgctgttcagttttgatgatgcgctggcagggcgcttgctggcgagtgccgcgcaggagaatgaaccgttctggcgtctgccgctggcggagttccaccgcagccagctgccgtctaactttgcggaactgaacaataccggaagcgcggcgtatccggcaggtgcaagcacggcggcgggcttcctgtcgcactttgttgagaactatcagcaaggttggctgcatatcgactgctcggcgacttaccgtaaagcgccggttgaacagtggtctgcgggtgctacgggacttggtgtgcgcacgattgctaatctgttaacggcgtaa

SEQ ID NO: 2631 - DNA, 777 bp, Escherichia coli
atgtccgaaacaaaaaacgaacttgaagacctgctggaaaaagcagcaaccgaaccggcgcaccgcccggcctttttccgtactctactggaatccaccgtctgggtgcctggtacggcggcacagggcgaggctgtggttgaagatagcgcacttgatttacagcactgggaaaaagaagacggcaccagcgtcattccttttttcacctcgttagaagcacttcaacaggcggttgaaggcgaacaggcatttgtcgtaatgccagttcgcacattgtttgagatgacccttggcgaaacgctcttccttaatgccaaactgccaaccggtaaagaatttatgccgcgtgaaatcagtttgctgattggtgaagaagggaatccgcttagcagtcaggaagtactggaaggcggtgaatcgctgatattatcggaggtcgcagagccgccagcgcaaatgattgattcacttaccaccttatttaaaaccattaagccggtgaagcgtgcttttatttgttcaattaaagagaacgaagaggcacagcctaatttacttattggcattgaagccgatggtgatatcgaagaaattattcaggcggcgggaagtgtagcgaccgatacattacctggcgatgaacccatcgatatttgtcaggtgaaaaaaggggaaaaaggtattagccactttattaccgaacatattgcgccattctatgaacgtcgctggggtggttttttgcgtgactttaaacagaaccggataatttaa

SEQ ID NO: 2632 - DNA, 846 bp, Escherichia coli
atgtccacgacatggtttgtaggagccgactggctcgccgaacatattgatgacccggaaattcagattatcgatgcccgcatggcgtcgcctggacaggaagatcgtaacgttgctcaggagtatctgaatggacatattcccggcgcagtgttttttgatatcgaagcgctttctgatcacacttctccgcttccgcacatgctgccgcgcccggaaacgttcgccgtggcgatgcgtgaattaggcgttaaccaggataagcacctgattgtctatgacgaaggtaatcttttctcagccccacgagcatggtggatgctgcgcacctttggtgtagagaaagtgtcgattctgggtggtggacttgcaggctggcagcgtgatgatctgctattagaggaaggcgcagtagagctgccggaaggagagtttaacgccgcgtttaatcctgaagccgtggtgaaagtaaccgatgtattattggcaagccatgaaaatacggcgcaaattattgatgcccgcccggctacacgttttaacgcagaagttgatgaacctcgcccaggtttacgtcgcggacatattcccggtgcattgaacgttccgtggacggaactggtacgtgaaggcgaactaaaaacgaccgatgaactggatgcgatattttttggtcgcggtgtcagctacgacaaaccaattatcgtcagctgcggttctggtgtaacagcagccgtggttttgttggcacttgcgacgctggatgtgacaaacgtgaaactgtacgacggcgcatggagtgaatggggcgcacgggcagatttaccggttgagcccgtaaaataa

SEQ ID NO: 2633 - DNA, 4962 bp, Escherichia coli
atgaaaaagttacgcgtagccgcctgcatgctaatgctggcgctggcagggtgcgacaacaacgataacgcgccaacagcggtgaaaaaagatgcgccttctgaagttactaaagcggcctcttcagaaaacgtgagttcagtaaaactttccgcgccggagcgacaaaaactggcccaacagagtgccggtaaggcgctgacattgctggatctctctgaagttcaactcgatggcgcagccacgctggtgctgacgttctccatccctctcgacccggatcaggatttctcacgcgttattcatgtcgtcgataaaaaaagcggcaaagtggatggtgcctgggagctgtcagataatcttaaagagctgcgtttacgccacctcgaaccgaaacgtgatttgatcgtcactattggcaaggaggtcaaagcgctcaataacgcaacctttagtaaagatgacgaaaaaactataactacccgcgatatccaacccagcgtcggttttgccagtcgtggttcgttgcttcctggtaaggtcgttgaagggctgccggtaatggcgcttaacgttaacaatgtcgatgttaacttcttccgtgtgaaaccagaatcactgcccgctttcattagccagtgggaataccgcaattcgctggcgaactggcagtcagataaactgctgcagatggcggatctggtctacaccggacggtttgatctcaatcctgcgcgtaacacccgtgaaaaattattgctgccgctgggcgatatcaaaccgcttcagcaggcgggcgtgtatctggctgtgatgaatcaggctggacgttacgattacagtaatcccgcgacgctgtttacgttaagtgatatcggcgtttcagctcaccgttatcacaatcgtctggatatctttacccaaagtctggaaaacggcgcggcccagcaaggaatagaagtctctttattaaatgagaaagggcagactctgactcaggcaaccagtgacgctcaggggcatgtgcagctggaaaatgataaaaacgcggcattactgctggcgcgtaaagacggtcagacaacgctactcgatttaaaacttccggcgctggacttagcggaatttaacattgctggcgcgccgggctatagcaaacagtttttcatgtttggcccgcgcgatctttatcgcccgggtgaaacggtcatcctcaatggtttgctgcgtgatgcagacggtaaagcgttgcccgatcaacctgtcaagctggacgtgattaaacccgacgggcaggtactcaggagcgtcgttagtcagccggagaatggcctctaccactttacctggccactcgatagcaatgcggcaaccggtatgtggcatattcgcgctaacacgggcgataaccagtatcggatgtgggatttccacgtcgaagattttatgccagagcgtatggcgctgaatctgaccggtgagaaaaccccgctaacgccgaaagatgaagtgaaattctccgtggtggggtactacctgtatggcgcacctgctaatggtaatactttgcaagggcaacttttcctgcgcccactgcgtgaagctgtatcagccttacctggttttgaattcggcgatatagctgccgaaaatctttcccgcacgctggatgaagttcagttgacgctggatgataaagggcgcggcgaagtttctacagaaagccagtggaaggaaacgcattccccattacaggttattttccagggtagtttgctggaatcgggcggtcgcccggtgacgcgccgtgctgagcaggctatctggcctgccgatgcattgccggggatccgtccgcagttcgcctcgaaatcggtttacgattatcgcaccgacagcacggtgaaacagcccattgttgatgaaggcagtaacgccgcttttgacatcgtttatagcgatgcgcaaggcgtgaaaaaagccgtgtcgggcttgcaggtgcgcctgattcgcgaacgccgcgattactactggaactggtcggaatatgaaggctggcagtcacagtttgatcaaaaagatctgatcgaaaatgaacaaactctggatctgaaagcggacgaaaccggtaaggtcagtttcccggtagagtggggcgcttatcgtctggaagttaaagcgccgaatgaagcggtcagtagtgtgcgtttctgggctggttatagctggcaggataacagcgacgggggtggtgcagtgcgacccgaccgtgtcacgctgaaactggataaagccagctatcgccctggcgataccattaagttgcatattgccgcgccaacggcgggtaaaggttatgcgatggtcgagtccagtgaagggccgctgtggtggcaagagattgatgttccggctcaagggctggatctgacgattccggtcgataaaacctggaatcgtcatgatctgtatttaagtacgctggtggtacgtcctggcgataaatctcgctccgcgacgccaaaacgcgcggttggggtgttgcatctgccgcttggtgatgaaaaccgtcgcctcgatctggcgctggaaacccctaccaaaatgcgccccaatcagccattaaccgtgaaaattaaagccagcaataaaaatggtgagatgccaaaacaggtgaatgtgctggtgtctgccgttgatagcggtgtgctgaatattactgattacgtcacgccagatccgtggcaggcgttctttggtcagaaacgctatggcgcagacatttacgatatttacggtcaggtcattgaaggtcaggggcgtctggcagctctgcgttttggtggcgatggtgatgagctgaaacgtggtggtaaaccgccggtcaatcacgtcaatattgtcgcgcagcaggcgctgccggtaacgctcaatgaacagggcgaaggctcggttacactgccaattggcgattttaacggtgaattgcgcgtcatggcgcaagcctggacggcagatgacttcggaagcaacgaaagcaaagtgattgttgccgcaccggtgattgctgaactgaacatgccgcgctttatggcgagtggcgatacctcgcgcctgacgctggatatcactaatcttaccgataaaccgcaaaaacttaatgttgctctgaccgccagtggcttgcttgaactggtgagtaattcccccgcacctgttgaattagcgccaggggtgcgtactacgctgtttatcccggtgcgtgcattgccgggttatggcgatggagacattcaggccaccattagcgggttagcgttaccgggggaaaccgttgccgatcagcataagcagtggaaaatcggcgtccgtccggcattcccggcacaaacggtcaattacggtacggcgttacagcctggtgaaacctgggcgctcccggctgatggattgcaaaacttctcgcctgttacgctggaagggcaattgttgttgagtggcaaaccaccgctgaacatcgcacgttatatcaaagagttaaaagcgtatccgtacggctgtctcgagcaaaccgccagcggcctgttcccgtcactttataccaatgcagcccaactgcaggcgttgggcatcaaaggcgacagtgatgagaaacgccgtgcatcggtcgatatcggcatttcccgtttgctgcaaatgcaacgtgataacggcggctttgcgttgtgggataaaaacggtgacgaagagtactggctgacggcttacgtgatggatttcctggtccgcgcaggcgaacagggttacagcgtgccgacagacgccattaaccggggtaatgagcgtctgctgcgctatttacaagatccgggcatgatgtcgatcccgtacgctgataatctcaaagccagtaaattcgccgtacagtcttacgctgcgctggtgttggcccgtcagcaaaaagcaccactgggtgcgctgcgtgaaatctgggagcatcgtgcagatgccgcttctggtttaccgctgctgcaacttggcgttgcgctgaaaatcatgggtgatgcgacgcgtggtgaagaagcgattgcgctggcgctgaaaacgccgcgtaatagtgatgagcggatatggctgggtgattacggtagtccactgcgagacagcgcgttgatgctctcattgctggaagagaacaaactgctacccgatgagcagtactccctgttaaacacactttcgcagcaggcgttcggtgaacgctggctatcgacgcaggaaagtaacgcgttgttcctggctgcccgtactcttcaggatttaccgggcaaatggcaggcgcaaaccactttctctgctgagccgttgacaggcgagaaagcgcaaaccagcaatctgaatagcgatcaacttgccaccttgcaggtgaccaacagtggcgatcagccgttatggctgcgtgtggatgccagcggttatccgcaatccgcacctttaccggcgagcaatgtgctgcaaattgagcgtcatattctgggtactgacggtaagagcaaatcgctggactcgttacgtagcggcgatctggtgctggtgtggttgcaggttaaagccagtaacagtgtaccggatgcgttagtcgtggatctgttgcctgcggggctggaactggaaaaccagaatctggcgaacggcagcgccagcctggagcaaagtggtggtgaagtgcagaacttgctgaaccagatgcagcaggcgagcattaagcacatagagttccgtgacgatcgctttgtggcggcggttgccgttgatgaatatcaaccggtaacgctggtgtatctggcgcgggcggtgacgccgggaacgtatcaggtgccgcagcctatggtggaatcaatgtatgttcctcaatggcgggcgactggtgcggctgacgatctgttgatagtcagaccgtaa

SEQ ID NO: 2634 - DNA, 2277 bp, Escherichia coli
atgctggcagccgcgccttttatcatcattctggcagcatgggcagcagataaactctggcctctgccattgcaagaagtgaatcctgcacgcgtggtggtggcgcaggatggtacgccactctggcgtttcgccgatgctgacggcatctggcgttatccagtaacaatcgaagatgtttctccacgttaccttgaagcgctgatcaattatgaagatcgctggttctggaagcatccgggggtgaatccgttctcggtggcgcgtgcagcctggcaagatctcacgtcgggtcgggtcatttccggcggcagcacgctcaccatgcaggtggcgcgcctgcttgatcctcaccccaaaacgtttggcggcaaaattcgccagctctggcgcgcgttgcaactggaatggcatctgtctaaacgtgaaattctgaccttgtatcttaaccgtgccccgtttggtggtacgttgcaggggattggtgcggcaagttgggcttacctcgggaaatcgcctgcgaatttaagctattccgaggcggcaatgctggcggtgttgccgcaagcgcccagccgtcttcgcccggatcgttggccggagcgtgccgaagccgcgcgtaataaagtgctcgaacggatggccgtgcaaggtgtgtggtcccgtgagcgggtaaaagagtcaagggaagaacccatctggctggcaccccgacaaatgccgcaactggcaccgctgttttcgcgcatgatgctcggtaaaagcaaaagcgacaaaatcgttactacgctggatgccggtcttcaacgacgtctggaagaactggcgcaaaactggaaaggacgattgccaccgcgcagctcactggcgatgatcgtggttgatcataccgatatgcgtgttcgcggctgggtgggatcggttgatctcaacgatgattcacgctttggtcatgttgatatggtcaatgcgatccgatcgccaggatcggtgctcaaaccgtttgtttatggtctggcgctggatgaaggcttgatccacccggcatcgctgttgcaagacgtcccccggcgtaccggtgattaccgacctggcaactttgacagcggttttcatgggccgatcagcatgagcgaggcgctggtgcgctcgctgaatttaccagctgtgcaggtgctggaagcctatggaccgaaacggtttgcggcaaaattacgcaatgttggattgccgttgtatctgcccaacggtgctgcgccgaatctttcgctcattctcggcggcgctggtgcaaaactggaagatatggcggcggcctataccgcgtttgctcgccacggcaaggcaggtaaattgcgcttacagcctgacgatccgctgcttgaacggcctttaatgtcgtcgggggctgcgtggatcattcgccggattatggctgatgaagcgcaacccttgccggatggtgccttgccgcgcgtcgccccactggcatggaaaacgggcaccagctatggctatcgtgatgcctgggcgattggggttaacgctcgctatgtcattgggatctggactggcagaccggacggcacgcccgttgttggtcagtttggctttgccagtgccataccgctgttgaatcaggttaataatatcttactgtcgcgcagtgtgaatttgccggaagacccacgtcctgactctgtaagtcgtggcgttatctgctggccgggcggacagtctttgccggaaggtgacggtaactgtcgccgccgcctggcaacctggctgctggacgggagccagccgccaactctattactgccggagcaggaaggcattaatggcattcgtttccccatctggctggatgaaaacggcaaacgtgttgccgctgattgccctcaggcgcgacaagaaatgataaatgtctggccgctaccgctggaaccctggctgcccgcatcagaacgtcgcgctgtgcgcttgccaccggcctcgacaatttgcccgccatacggtcacgatgcacaactcccgctgcagctaacaggtgtgcgcgatggcgcgattattaaacgtttaccgggcgcagcggaagcgactttgccgttgcaatcaagtggaggggcaggtgaaccctggtggtttctgaatggcgaaccgttaactgaacgtgggcgcaacgtgaccctgcatttgacggataaaggcgattatcaattgctggtgatggatgacgtggggcaaatagcgacagtgaaatttgtcatgcaatag

SEQ ID NO: 2635 - DNA, 432 bp, Escherichia coli
atggctattgaacgtactttttccatcatcaaaccgaacgcggtagcaaaaaacgtgattggtagtatctttgcgcgctttgaagctgcagggttcaaaattgtcggcaccaaaatgctgcacctgaccgttgaacaggctcgtggcttttatgctgaacacgatggaaaaccgttctttgatggtctggttgaattcatgacttctggcccgatcgttgtttccgtgctggaaggtgaaaatgctgttcagcgtcaccgcgatctgctgggcgcgaccaatccggcaaacgcactggccggtactctgcgtgctgattacgctgacagcctgaccgaaaatggcacccacggttctgattccgtcgaatctgccgctcgcgaaatcgcttatttcttcggcgaaggcgaagtgtgcccgcgcacccgttaa

SEQ ID NO: 2636 - DNA, 1155 bp, Escherichia coli
atgtctgaacaattagtcacacctgaaaacgtcaccacgaaagatggaaaaatcaacctgctggatctcaaccgtcagcagatgcgggagttttttaaagatttaggtgaaaaacccttccgcgccgatcaggtgatgaagtggatgtatcactattgctgcgacaactttgatgagatgaccgacatcaataaagtgttgcgcggcaaactgaaagaggtggcggaaatccgtgcaccggaagtggttgaagaacagcgttcatctgacggcaccattaaatgggcgatcgccgttggcgatcagcgcgttgaaacggtatatatcccggaagacgaccgtgccacgctctgcgtctcttcgcaggtggggtgtgcgctggagtgtaaattctgttccaccgcccagcagggctttaaccgcaacctgcgggtatcggaaattatcggccaggtgtggcgtgcggcgaaaattgtcggcgcagcaaaagtcaccggtcagcgcccaatcactaacgtagtgatgatgggtatgggcgagccgctgctcaacctgaacaacgtcgttccggcgatggaaatcatgcttgatgatttcggttttggcctgtcaaaacgtcgcgtcacgctttccacttccggtgtggttccggcgctggataaactgggcgatatgatcgacgtagcgctggcaatttccctgcacgcgccgaacgacgaaattcgtgacgagattgtgccgatcaacaaaaagtacaatatcgaaacgttccttgcggcggtgcgccgttatctggagaaatccaacgccaatcagggccgagtcactattgaatacgtgatgcttgaccacgttaacgacggcactgaacacgcgcaccaactggcggaactactgaaagatacgccgtgtaagatcaacctgatcccgtggaacccgttcccgggcgcgccgtatggacgcagttcgaacagccgtatcgaccgtttctcaaaagtgctgatgagctacggtttcaccactattgtgcgtaaaactcgtggtgatgacattgatgctgcttgtggtcagttggcgggcgatgttatcgaccgtacgaaacgtactctgcgtaagcggatgcagggtgaagccatcgacattaaagcggtctga

SEQ ID NO: 2637 - DNA, 1011 bp, Escherichia coli
atgaatactgaagccacgcacgaccaaaatgaagcacttactaccggcgctcgcctgcgtaatgctcgcgaacaactaggacttagtcaacaggccgttgccgagcgactttgcctgaaggtttccacggtacgcgacattgaagaagataaggcacccgccgatcttgcttcaacattcctgcgcggatatatccgctcttatgcgcgtctggtacatattccagaagaagaactgctgccagggctggaaaagcaggctccactacgggctgcaaaagttgcgccgatgcagagtttttccctcggtaaacgccgcaaaaaacgtgacggctggctgatgaccttcacctggctggtgttgtttgtggttattggcctgagcggtgcctggtggtggcaagaccacaaagctcagcaggaagagatcaccactatggccgatcaatcttctgcggaactgaataataatcaaagccagagtgtaccgttagatacttcgacaaccacagatcaggctatggcgaccacgccgacatcacctgtggataccaccgcaactaacacgcaaacacctgccgcgacgacggctccatcgccaaccgtcgattcacaacagaatgcggttgttccaccttcgcaggcaaatgttgataccgctgcgactccggcaccagcggcaacaacaacaccagatggcgctgcgccgttgccaaccgatcaggctggcgtgaccacgccggcggttgacccgaatgcgctggtgatgaactttactgccgattgctggctggaagtcaccgatgctaccggtaaaaaactgtttagcggtatgcagcgtaaagacggtaatttgaacttaaccggccaggcaccgtacaaactgaaaattggtgcgccagccgcagtacagatccagtatcaagggaaacctgtcgatctgagtcgttttatcagaactaaccaggttgcgcgtctgaccctcaatgccgaacaatcaccggcgcagtaa

SEQ ID NO: 2638 - DNA, 1119 bp, Escherichia coli
atgcataaccaggctccaattcaacgtagaaaatcaacacgtatttacgttgggaatgtgccgattggcgatggtgctcccatcgccgtacagtccatgaccaatacgcgtacgacagacgtcgaagcaacggtcaatcaaatcaaggcgctggaacgtgttggcgctgatatcgtccgtgtctccgtaccgacgatggacgcggcagaagcgttcaaactcatcaaacagcaggttaacgtgccgctggtggctgacatccacttcgactatcgcattgcgctgaaagtagcggaatacggcgtcgattgtctgcgtattaaccctggcaatatcggtaatgaagagcgtattcgcatggtggttgactgtgcgcgcgataaaaacattccgatccgtattggcgttaatgccggatcgttggaaaaagatctgcaagaaaagtatggcgaaccgacgccgcaggcgttgctggaatctgccatgcgtcatgttgatcatctcgatcgcctgaacttcgatcagttcaaagtcagcgtgaaagcgtctgacgtcttcctcgctgttgagtcttatcgtttgctggcaaaacaaatcgatcagccgctgcatctggggatcaccgaagccggtggtgcgcgtagcggggcagtaaaatccgctattggtttaggtctgctgctgtctgaaggcatcggcgacacgctgcgcgtatcgctggcggccgatccggtcgaagagatcaaagtcggtttcgatattttgaaatcgctgcgtatccgttcgcgcgggatcaacttcatcgcctgcccgacatgttcgcgtcaggaatttgatgttatcggtacggttaacgcgctggagcaacgcctggaagatatcatcactccgatggacgtttcgattatcggctgcgtggtgaatggccctggtgaggcgctggtttctacactcggcgtcaccggcggcaacaagaaaagcggcctctatgaagatggcgtgcgcaaagaccgtctggacaacaacgatatgatcgaccagctggaagcacgcattcgtgcgaaagccagtcagctggacgaagcgcgtcgaattgacgttcagcaggttgaaaaataa

SEQ ID NO: 2639 - DNA, 1275 bp, Escherichia coli
gtggcaaaaaacattcaagccattcgcggcatgaacgattacctgcctggcgaaacggccatctggcagcgcattgaaggcacactgaaaaacgtgctcggcagctacggttacagtgaaatccgcttgccgattgtagagcagaccccgctattcaaacgtgcgattggtgaagtcaccgacgtggttgaaaaagagatgtacacctttgaggatcgcaatggcgacagcctgactctgcgccctgaagggacggcgggctgtgtacgcgccggcatcgagcatggtcttctgtacaatcaggaacagcgtctgtggtatatcgggcctatgttccgtcacgagcgtccgcagaaagggcgttatcgtcagttccatcagttgggctgcgaagttttcggtctgcaaggtccggatatcgacgccgaactgattatgctcactgcccgctggtggcgcgcgctgggtatttccgagcacgtaactcttgagctgaactctatcggttcgctggaagctcgtgcgaattaccgcgatgcgctggtggcattccttgagcagcataaagaaaagctggacgaagactgcaaacgccgcatgtacactaacccgttgcgcgtactggattcaaaaaatccggaagtgcaggcgcttctcaacgacgctccggcattaggcgattatctggacgaggaatctcgtgagcactttgccggtctgtgcaaactgcttgagagcgcggggatcgcttacaccgtaaaccagcgtctggtgcgcggtctggattactataaccgtaccgttttcgagtgggtgactaacagcctcggttcccagggcaccgtgtgtgcaggtggtcgttatgacggtctggtggaacaactgggtggtcgtgcaacaccggcagtcggttttgcgatgggcctcgaacgtcttgtattgttagttcaggccgttaatccggaatttaaagccgatcctgttgtcgatatatacctggtggcttcaggtgctgacacacaatctgcggctatggcattagcagagcgtctgcgtgatgaattaccgggcgtgaaactgatgaccaaccacggcggcggcaactttaagaaacagtttgcccgtgctgataaatggggtgcccgcgttgctgtggtgctgggtgagtctgaagtggctaacggcacagcagtagtgaaggatttgcgctctggtgagcaaactgcagttgcgcaggatagcgtagccgcgcatttgcgcacgttactgggttaa

SEQ ID NO: 2640 - DNA, 621 bp, Escherichia coli
gtggaaatttacgagaacgaaaacgaccaggttgaagcggttaaacgcttttttgctgaaaatggcaaagcactggctgttggggtgattttgggcgttggcgcactgattggctggcgctactggaacagccatcaggttgattctgcacgctccgcttctcttgcctatcaaaatgcggttaccgcagtgagcgaaggcaaaccggatagcatcccagcggcggaaaaatttgctgctgaaaataaaaatacttatggtgcgctggcttctttggaacttgcgcagcaatttgttgacaaaaatgaactagagaaagctgccgcccagttacaacaggggctggcagacacgagcgatgaaaatctcaaagccgtgataaatctgcgtcttgctcgcgttcaggtacagctcaagcaggctgatgccgcgctaaaaacccttgatgctatcaaaggtgaagggtgggctgccattgttgccgacctgcgtggtgaagcattgctgagcaaaggtgataagcaaggtgcgcgtagtgcatgggaagcaggcgtaaaaagcgatgttaccccggcactgagcgaaatgatgcagatgaaaattaataatttgtccatctga

SEQ ID NO: 2641 - DNA, 1179 bp, Escherichia coli
atgcaattgcgtaaattactgctgccaggactgctttccgttacccttttaagcggctgttcgctgtttaacagcgaagaagatgtggtaaagatgtccccattgccaaccgttgaaaaccagtttacgccgactactgcgtggagcacttccgttggtagcggcattggcaacttctattccaatcttcatccggcactggcggacaacgttgtctatgcagcggaccgcgctggtttagtaaaagcgctgaatgcggatgacggcaaagaaatctggtctgtcaacctggccgagaaagatggctggttctctaaagatcctgcattactttctggcggcgtgaccgtgtctggtgggcatgtctacattggcaccgaaaaggcgcaggtttacgcgctgaataccagcgatggtactgtggcatggcaaactaaagtcgcgggtgaagcactttcgcgcccggtggtcagcgacggtctggtgttaatccacaccagtaacggtcagttacaagcgctgaacgaagctgacggcgctgtcaaatggacagttaacctcgatatgccttcgctctctttgcgtggcgagtctgcgccggcaacggcttttggtgcggccgtcgtgggtggcgataatggtcgcgtcagcgcagtgctgatggaacagggccagatgatttggcagcagcgtatttcccaggcgaccggttctaccgaaattgaccgtctgagcgatgttgacacgactcccgtcgttgttaacggcgttgttttcgcgctggcctataatggtaacctgacggcgcttgatctgcgcagcggtcagattatgtggaaacgcgaactgggttcggtgaatgatttcatcgtcgacggcaatcgcatctatctggtcgatcaaaatgaccgggtgatggcgttgaccattgatggcggcgttacgctgtggacacaaagcgatctgctgcatcgcctgctgacttctccggtgctgtataatggcaacctggtggtaggtgacagcgaaggttatctgcactggattaacgtcgaagatggtcgtttcgttgcccagcaaaaagttgatagttctggtttccagactgaaccggttgccgctgacggcaaactgctgatccaggcaaaagacggaaccgtgtactctattacacgttaa

SEQ ID NO: 2642 - DNA, 1473 bp, Escherichia coli
atggtacctgtggtcgcgcttgtcgggcgccctaacgtaggaaaatccacgttatttaaccgtctaactcgcacccgagatgcgctggttgcggatttcccgggtctgactcgtgaccgtaagtacggtcgtgcagaaattgaaggccgcgagtttatttgtattgatactggcgggattgatggcaccgaagacggtgtagagacacgtatggcggaacaatcgctgctggcgattgaagaagcggacgtcgtactgtttatggtggatgcgcgcgcgggcctgatgcctgcggatgaagcgattgccaaacatctgcgctcccgtgaaaaaccgaccttcctggtggcaaacaaaactgacggtctggatcccgatcaggcagtggttgatttctacgcgcttggtttaggtgaaatctacccgatcgccgcgtctcacggtcgtggcgtattaagtctgctggagcacgtgctgctgccgtggatggaagatctcgcaccgcaagaagaagtcgacgaagacgccgaatactgggcgcaatttgaagcggaagagaacggcgaagaagaagaggaagacgacttcgacccgcaaagtctgccgatcaaactggcgattgtgggtcgcccgaacgtaggtaagtctacactcactaaccgtattcttggtgaagagcgcgttgttgtttacgacatgcctggcacgacgcgtgacagtatctacattccaatggaacgcgacggacgtgagtatgtgctcattgacaccgctggcgtacgtaaacgcggcaaaatcaccgatgcggtagagaaattctcggtaatcaaaacgttgcaggccattgaagatgccaacgtggtgatgttggtgattgatgcgcgtgaaggtatttccgatcaggatctctccttgctgggctttattctcaatagtgggcgctcacttgtgattgtggtgaataagtgggatggcctgagccaggaagtgaaagagcaggtgaaagagacgctggacttccgtctgggctttatcgattttgctcgtgtgcactttatctctgccttgcacggcagtggtgttggtaacttgtttgaatcagtacgtgaagcgtatgacagctccacccgtcgtgtggggacctctatgctgacgcgcatcatgacgatggctgttgaagatcaccaaccaccgctggtacgcggtcgtcgtgtgaagctgaaatacgcccacgccgggggttataacccgccgattgtggtgattcacggcaatcaggtgaaagacctgcctgattcctacaagcgttacctgatgaactacttccgcaaatcgctggacgtaatgggatcgccgattcgtattcagttcaaagaaggggaaaacccgtatgcgaacaagcgtaacaccctgacgccaacccagatgcgtaaacgtaagcgtctgatgaagcatatcaagaaaagtaagtaa

SEQ ID NO: 2643 - DNA, 216 bp, Escherichia coli
atggcactcaactgtccaacctgcaaaacccctctcgaacgcaatggcgagactgctcactgtgcaacttgcgacaaagactttaccgtccaggcactttgccctgagtgtcatcaggcgttacaagtgttaaaagcttgtggtgctgtggattatttctgccaacatgggcacggtttaatatctaaaaaacgcgttgaatttattattgcttaa

SEQ ID NO: 2644 - DNA, 2178 bp, Escherichia coli
atgctgcgatggaaacgctgtactatgctaatatttatgtctggtgctgctttcgcggcaccagagataaatgttaagcaaaacgaatcgttacctgatttaggtagccaggcagcacaacaggatgaacaaaccaacaagggtaaatcgctgaaagagcgcggagcagattacgtcatcaactccgccacgcaagggtttgaaaacttgacccctgaggcgctggaatctcaggccagaagctatctgcaaagtcaaatcacctcaaccgcacaatcttatattgaagacacactctccccctacggtaaggtccgttcgaacctctccattggtcagggcggcgatctggatggcagttccatcgattattttgttccctggtacgataatcaaaccactgtttatttcagccaattttctgcgcaacgaaaagaagatcgtacgatcggaaatatagggcttggtgtaagacataattttgataaatggttattgggtggaaatatattttatgattatgactttacccgtggacatcgccgtttaggtttaggcgccgaagcctggacggattatttaaaattctcaggcaactattatcacccactttctgactggaaagactctgaagatttcgacttttatgaagaacgccctgcgcgcggctgggatattcgcgctgaagcctggctacccgcttacccgcagcttggcggaaaaattgtcttcgaacaatattatgggaatgaagtcgcgctttttggtaccgatagtctggagaaagatcccttcgctgtcacgctgggtgtgaaataccagcccgttccgctcattgttgtcggtacagatttcaaagctggcactggcgataataccgatctttctgttaacgcaacgctgaactaccagtttggcgtcccgctcaaagaccagcttgatcctgacaaagtgagcgcggctcactcgctcatgggtagccgtcatgactttgttgaacgtaacaactttattgttctggaatacaaagaaaaagatcccctcgacgtcactttgtggctgaaagccgacgtcacgaatgaacatcccgagtgcgtgattaaagatacgcctgaagaagctatcgggctggaaaaatgtaaatggaccattaacgcgctcattaaccatcactacaaaatcgttgctgcctcctggcaggcgaaaaacaatgctgcccgcacgctggtgatgccggttatcaaagagaataccctgacagagggtaacaataaccactggaacctggtgctgcctgcctggcagtacagttccgatcaagccgaacaagaaaaactcaatacctggcgggttcgtctggcgctggaagatgaaaaaggcaatcggcagagctccggtgtggtggaaatcaccgttcaacaggaccgtaaaattgagctcatcgttaacaacatcgccaatgtaccggataagagcaatcacagccacgaagccagcgcacaggccgatggtgtagatggtgtagtgatggatctcgatgtaaccgacagctttggcgataacaccgaccgcaacggcgatgcgttgccggaagataaccttacgcctcagctttacgacgcgcaggacaaacgagtgacgttaaccaacaagccctgctcgaccgataacccctgcgtttttattgccaaacaagataaagaaaagggcactgtcaccctctccagtaccttacccggcacctatcgctggaaagcaaaagccgcgccctacgatgacagtaactatgtggatgtcactttcctcggggcagaaattggtgggctaaatgcttttatctatcgtgtgggggcggctaaacccagcaacctgataggtaaagataaagaaccgttgccgctcaacaacacttatcgatttgttttgtggcgcgacaacaataaagacggtgtcttccagcaggtcgaaaaactgactgacgaagagatggtgcagtacgactacaagtgggaatttaccggcaagagcatcaatggtgaagtgggtgcacaggcgaacacttccaatgaggacattgtgattccggccactaaccgtgaagcggcgcaaacctatggcgcacaagcgggagatggcttgcagggatacggtttacgcgtgctgtataccaaaaaataa

SEQ ID NO: 2645 - DNA, 978 bp, Escherichia coli
atgaagcaggataaaagacgcggtctgacccggatcgcattagcgctggcactggcaggttattgtgtggcacctgtggcgctggctgaagacagcgcctgggtcgacagcggtgaaaccaatattttccaggggaccattccgtggctctattcggaagggggaagtgctacgacagatgccgaccgtgtaacgttgacttctgatctaaaaggcgctcgcccgcaaggcagtgaaacggacaagcgtctttactcgggtgataaattaaccgtaagttgggaaattggtgataccgaaggcgacgtggatcttgggggattgggcgataacgcgaaaactatcgatactatccgctggatgagctacaaggatgcgcaggggggggatccaaaagagctggtaacgaaggtgaccagttacactcttaccgatgccgaccgtggtcgttatatcggtattgaaattacgccaaccacgcagaccggtacgccaaacgtcgggactgcgctgcatctttatgacgtttctactgccagcggcggcggaagcgacagcgataacgttgcaccggggccggtggttaaccagaacctgaaagtcgccatctttgttgatggtaccagtatcaaccttatcaacggtagcacaccaatcgaacttggcaaaacctacgtggccaaactgtactcggatgagaacaaaaatggcaagtttgatgcgggtaccgatgctgacgtcaccgccaattatgacttccgttgggtactttctggcagcagccaacagcttggcacttcgggtggcatcgttaactcaagcttcgataataacaatttggtcatccctgcgaccaacgacgaagccagaaccaaccttaacggccctgcgcgcgatggaaaagaggcactttccatcccgaccaacggcgacggggtacagggttacaaacttcacattatttacaaacacaaataa

SEQ ID NO: 2646 - DNA, 8052 bp, Escherichia coli
atgtccctgaccctgaataaaatccttgtgttatgcgcattgctgataagcgcaatgctgcctgggtggtcatgggcagaatctgcatggcaagactcttcagatacggtcggcgaatttaacggtaccgtgcccaccgccgacagcgccagcatacccgtctaccagggcagtgtctttctcgatcccacaaagacgcatgaggtagcgtttaccgctaaaccgagtgaattcaacgcggatgttagcgtctctaaattgctcgtcaccaacccgcaagacagagaaggcgatatcattgccaccccacgttgggaaaaccaaacgccaccggctgtatctttagtttgggcggatgccgccacgccggacaccttactggacccacagccagtcgcagatcgctcgttttgcgctcagggacttgccgggcgttcgctggtcgcctgggcgcagcctgatccccagcagaccatgccgctgttatatttactcacctcgacgggctatccctatgaaagtgttctgatgctcgccgatcagaaagtgacgctgaagattgcgcccgcgcagggtgaccttatttccgtcagcgctgcgggctatgacgaatcctcaggtgcggcgaaaatgacggttgggggcagtatcacgttaacggtcaccaccaaagattgcgtcggtaatgttgtggggaatattccttttgttatcaaacgcaaagatgctgaaaaccgccagggtgtggtgaacaatactgcgcctgtaaaactgggcacgaccgaattaaccaccaccgcgacggaatatcgtggtactaccgatgcgaatggtgttgccacggttacggtcacccaggccaacggccctggtgtaaaaacgccgttggtcgcgagcctcgcgggtattgctcaggccagtgaaacggcagtaatctttaccgtcctcaccagcccggatgttccgcaggctacaatgtggggtcatatgcccgatacgctgaaggcccgtgattacactttgagtcgaccaaaactggcggcggaagtcgataatgaaggcggtacggttaacgatcacaatgaaacctggtccacctttacctggagcggcgcggataaacattgcgacattttgcccggaatgcgtcagttcggtgcgctggcgacggtggtgccaacgtcagtgcaggatgtggctggttggccgatgcagggtaatttctactggtcatcactggcggggatgagcggccagcaccatgcggcggatgtttcgaaccgcagcgaagcgcaaaaaccggacgatacgacgtttattgtgagctgtgtcgataaagaagcgcccgatgttgaaccgaagctggtactgacgccgggcagctatgattcgacgataaaagcgatgaaagtaaaggtgggggaagaggcttctttacgtctgacgattaccgatagcaagaacaacgatcagccgctggcttactactacttttcgctgcatctggatgacggcattaaccgtaagaatcaaactgacgccgcgtgggagacgcatccggtacaaattgatggcggcagtaacgttcgcaaagttgacgcccatacctatgaagggatcactgatgctaacggagaggccattctgacgctgacccagccaggcggcgtgggggtgaaaactcacatcaccgcgagaatgcgcagtgattttactgcctcggatgagaaagacgttatttttacggtgatcaccagccccgataccgacaaagcgcggatgtggggccatatgttgggtattattgaagcgaacaatatctttaaacgcccacggctggcggatgaaaccgacaacgaactgggatcggtgcgggaaaataacgaagactgggcgctgtttgatcagaatagcagtatgcaggctgagtgtggtttaggtcatattccgagccaaagttcattgcacagtttgtttgccgctcatccagccaatgccatcggcaccgaatatggctggccaacgttgcaaaaagcgtatcttagtgcggtggaagagacgtcgcacgcgtcggtaaacctggccacgggcaacatcgacacctattccggctttaagcaaaactatctctcttgttcgggcaatgagatggtcgcccagattgccgcgaccactgatcgtgatgtttccgcaggcagcagagcgcaggccaaagtgggtgacacgatcaccatgacggtacgcacctttaatgccttgaataatgcacccgtgccgtataccgcgttcaccattactaaagatatggggaaaaatcgtcaggggcagactacaggttttgatgatccaacccgcggcgcaatcgagatgaatggcacactctacggaacatcgcaaccgtctttagtctatgccggtactacggatgcgcagggttttgcgactgtggaaattaagcaatcgcaaggtgtgggcttatcgacgccgctaaatattgtgcctgtgaactcctatattcccaatactgttaattacaatgtgattttcactacgctcaccagtccggatgcggttggcgcgcagatgtgggggcatatggatgagacgattaccgtcgatgctttaacctttgcccgaccccgactggctgcggaagtgttcagtccggacggcacattaacggaaaataacgaagtctggtcgcgagtcagccaggccaacgcctccagcaccagtaaaggtggctgtggcgccaatatgctcccacgccgttctcagcttagcgcgctctatgatgccaataacggtgacggtgtacagacagtacacggctggccaacgcagcgtcagccctactggagcagttcgcccgcagatcaggtaccgcattattacaccatagccctcaacgatggggcgcggaccgttggcggtagcacggcggtttatgtcagttgcctgacgacggctaacaatcctgccagtagcattacgctggaagtggtggatccggcgcagtggaacgcggctgcaaatgcggcgaagctgaaaaaaggcgaaacgctacaggtaaaggtgacggtaaaagatgcgcagggcaatccattgggtgatataccctttaccctgaaacgtggcgatggttatacccgctcagaggaaaaacacgttgctggtagcagtgatgcgctggttgcgccggttgtggtcaatggtggcctggcggacgaaacttcgcttaataataccgctgcagcatacagcgccatgaccggcagcgacggaactaaaattctcactattacccgcccggatacccatggcacgaaaacgtcgctgaccgctaggctctattcagatacaacgaaaaaagcgaccctcgataccatttttaccgttgtaaccagtccggacagcgataaggcgaaaatgtgggggcatatgcctgaaacagtgacggctgcagatggagcggtctttaaacgcccattattgttgaaagagttatccagtacgtcgggtcgaacagcgattgcggaagataatgaagactgggcgcaatttacccaagctcaggctataagcacatcctctaatggttgtggtagtgaatatgttccctctcaggccgggctggagtcattgtatgaagccaaccgcggaaatgcgatgaaaacggttcagggctggcccgtcgcctcaagttacctttccagcacgacaggtagtagtagcctggaacagcgtgacttcaaggccgtcaatctcagttcaggcaccagttcgataattccatctgccacaaaagaactgcttacctgccagacaacgccgattgttaaggcaagccaaattgttcttgaagctgcagaccccacaaaatttgaccgtatgaataatgttgtcaaagcgaaaaaaggcgaagaagccgtattacgagtgaccactaaagatgcgcagggtaaccctgtgggaaataccgcatttaccctcaaacgaaacaccagcgtgaacagggccaatgtgtcaactacgacgtcgattgcttcgctggcggtaacggatgcctggggaaatactcaagatgattttctttcaacgaccctggttatttatggcgtgacgggggctgatggcatcaccactttcacattgaagcaagaccagactaccgggctaaaaacagaactcacggcagcgttggattcctccagcagcactaaatcgacgcttcccgttgtctttacggtgcttaccagcccggattcgccaaaagccaaattctgggggcatatggctgaaacggcgacaggcgatgacggtcttatttatcgaagggctttgctgagggacgagaatagtgctaccaccagtatcggtaccctggtggaagagggggaggcctggtctacgttcccgtcgggccaggctaacgatacctcgataaatggttgtggcgcggagtatgttccaactgacaatgaacttagggccatttatgcgcaccaggggagtagcgcattacatgatgctattggctggccagtgtcgaggttctatatctcgaataccgttgcagatacgttcactcaaacctttacgtatgatgtcgtttcgctgaagacaggagatgaaacgcagatgccctcatctggtggtgcattactgagctgccggaccacgcctgtcgccgttgccagtcagatcattgttgaggcgaatgatacggcgcaatttgtcaaagttgacgacaccttgagtgcgttgaaagtgaaaaaaggcgaagacgcggtgattcgcgtggtgactaaaaatgcgcagggaaatagcgtgcccaatgtcccctttattctcagacgtgaaggctcgaagaaccgtcaaaatgccgagatgataaataagtcgattacggtaattaacgcggcaggcgcttctgcgaggatgaatagttcttcaagcctgctttatggggtgagtggcgcggacgggactacctcctttacggtaaaacaagatgattctatgggcctggtaaccaatatgtacgcccagttgtatcagccgacgatagaatccaacaaattaccggtcatgtttaccgtcataaccagcccggatacgccactggcaagttactgggggcatatgcctgaaacgtttactacccggtcgggaattgcctttaagcggccattgcttactgccgagcatccagtggggcagtcaaccatggctaataatgaatcatggctttctttgaatacggcagcaaaaaatgatgtcagcaaatcagactgcggcgaaccttatcaaccgttattaagcgaatttcaagagttatacagtgaacatcctaatggtgcgatagggaccgatttaggccttccgctgactaacacctggtgggcttacgataaaattgcctacgcgaacgtctggtacgatcagtctattaatttatcgaatggatcaagctccagggcattatcaaacaccgtggcatttgtgtcctgtctggtaaaccctcatgcagtggcagcttctatagagatgacctccacggcactggatgcggagaaaacggccagcaacgatggtcgccctagtgcaacggcggtgaaaggtacggcgatccgtatgacggtgattgtgcgggatagcgcaggaaatctgttgccaggcgcaaactttaatctcatacgcgggactgcgttggatcgtgcaaaaaacaggctagattctacgtatgatgatcttactatcgtgccggtcacccctgccggagtaaacatgtcactctataataatggggcacaggcacttctgacgacaggaagtgatggtaaagcgacttttgatgtgacgcaaaacgagacttatgggctggcaactccgctcacttcaacattgatgcgcgacaccacaaaaagtgccacgatggatgttattttcactgtgataaccagtccgaactcaccgaaagcaaaatactggggtcatatgcccgacacgtttaccagtagggcgggggtgacctttaaacgaccgctactggcagcagaagcgaccttggggtcctcggtaagtaataataatgagtcgtggtcataccttttttataccaataaagttacgccggattgcccggttgagtatcagccgcgtctcaatgagttacaggggctatataatgatcatccaggcgggacaatactgacagatttggggttgcctataactgccggaagtggaaattggtggacttatgaaatgagcaccactgacgcgttgacgtggtattacggcgccattaatttgaaaacgggacaatcgacgacgactataaatggatacgctttaatgctctgtctgacgcagccacatttggcaccagcaagccttacgctgtcatcgactgcctatgatgagggccgaactgccagtaatggtggtacccccacgtcatctgtgaaaaaaggtgagatgcttcccatcgtggtgacgatcaaagatgccaatggtaatcctgttggtggcgaaggtgttacgctcaagcgcgtgcaggcgaaaagccgttcagggatctctgtatcctccaataccgtagatgatctcattttagatgaagtcaccccgacatcggcgcgtatctccttcaaccagaatacgtcggcatggagcggcttcaccggcagtgatggcacgataacgttcaacgttacccaaaataacaccgttggtctggtaacgccgtttacagcttcattggcgcgaaatccgcaggttacggctaatcaggacctgatattcacggtagtgaccagcccggattctgcgaaggctaactactgggggcatatgccagcaaccttgacggcagtgaatggtgcggtatttgaacgcccgaaattgtggagtgaactgacatcgacttctggcgtcggcaagatcaataacaataatgaagactggccgtactttaccccaacacagaaatcagatgcgagtgtgagcccttgtgaagtagcaaggcagccactattcaatgatttaagttcgttgtctgcgcgttatccgaataacacgtttgtcactgaaactggctggcctgcgtattacacctggtgggcagaggataaatccgccgatggtaaagaccagtcggttgatttgagaaatggcacgctgtatacgggttcaacaaaatcatttcagccttgcctggctaacgcgcgttcaaccgtttccagcgtcacactgacctcaacagcgtttgatgctgacagccaggcggcgaaagtgaaaaaaggcgaagccatgtccgttaccgtgacggtgaaagacagcgccgggaatacggtgccgaatgttgaatttactttgaaacgtggtgaggcatcgccgcgtaacgctggggcaacgttgtatggcaatgtagtggcgatggacgatctcatcgttcagccgttatctggttcggctattacgctgagtgaaagcggtaataccattagtggcatgacaggcgcggatgggacggcaagttttacgctccgccaggataatacccctggttataaaacgccactgacggttactctggctaattacgcttccgcgacagacacgctggacgctatttttacggtaccaaccagcccaaatgtttcctcggcgcacttttggggacatatggcagacacggtagtggtgaatggtaaatcgctacatcgaccgttgttaacgacagaattgccgtccggggcgaatcccgtatcctcaccgattattaactacgaaaactgggcttctgcacatatcattgatgccagtaaatgggatatcgcaaggcagtgtggcagcatagaaaatgcaccgacatacaatgaattagagttgttgcatactgtttttaattcactgggatggccgtcttcacccagttttccttatttgtcctctcaacagtgtgggatggacgaaggtactggagcacaggattgtagtatcacgctaataaataaaccgggtctggtgacctgcttccagtaa

SEQ ID NO: 2647 - DNA, 1371 bp, Escherichia coli
atgttaccttctcaatcccctgcaatttttaccgttagccgcctgaatcaaacggttcgtctgctgcttgagcatgagatggggcaggtgtggatcagcggtgaaatctctaattttacacaaccagcctccggtcactggtactttacgcttaaagacgataccgcgcaggtgcgctgtgcgatgttccgaaacagcaaccgccgggtcaccttccgcccacagcacgggcaacaggttttagttcgcgccaatattacactctacgagccgcgcggcgattatcaaattatcgtcgaaagtatgcagccggccggtgaaggattgctgcaacagaagtacgaacagcttaaagcgaagttgcaggctgaaggtttgttcgatctgcaatacaaaaaatcactcccctcccctgcgcattgcgttggtgtgatcacctcaaaaaccggtgctgcgctacatgatattttgcatgtgttaaaacgtcgcgatccttctctgccggtgatcatctaccccaccgccgtacagggggatgatgcgccggggcaaattgttcgcgccattgaactggcgaatcagcgcaacgagtgcgacgtattaatcgtcgggcgtggcggcggttcgctggaagatttatggagttttaacgacgaacgcgtagcgcgggcgatttttgccagccgcattccggtagtgagtgccgtcgggcatgaaaccgatgtgacaattgctgactttgttgctgatctacgtgcgccaacgccgtcagccgccgctgaagtagtgagccgaaatcagcaagagttactgcgtcaggtgcaatcggcccgtcaacggctggagatggcgatggattattatctcgccaaccgcacgcgtcgttttacgcagatccatcatcgcttacagcagcagcatccacagctccggctggcacgccagcaaaccatgcttgagcgcctgcaaaagcggatgagctttgcgctggaaaatcagcttaagcgtgccgggcaacagcagcagcgattaacacagaggctaaaccagcaaaatccgcagccgcgtattcaccgcgcacagacgcgaattcaacaactggaatatcgcctggcagaaacgttgcgcgcgcaactgagcgcaacgcgagaacggtttggtaatgcagtaacgcacctggaagcagttagcccgctttcgacgctggcgcgtggttatagcgtcaccagcgccgcagatggcgcggtgttaaagcaggtcaaacaggtaaaagcgggcgatacgctgaccacgcgtttgaatgatggcgtggtggtaagcgtagtgagcgacgtggcgaaaacccgcaaaccacgcaaaaaaaacagctaa

SEQ ID NO: 2648 - DNA, 1467 bp, Escherichia coli
atgctacgtatcgctaaagaagctctgacgtttgacgacgttctcctcgttcctgctcattctaccgttctgccgaatactgctgacctcagcacccagctgacgaaaactattcgtctgaatatccctatgctttccgcagcaatggataccgtaacggaagcgcgcctggctattgctctggctcaggaaggcggtatcggctttatccacaaaaacatgtccattgaacgccaggcagaagaagttcgccgtgtgaaaaaacacgaatctggcgtggtaaccgatccgcagaccgtactgccaaccacgacgctgcgtgaagtgaaagaactgaccgagcgtaacggctttgcgggttacccggtcgttaccgaagaaaacgaactggtcggcatcatcaccggtcgtgacgtgcgttttgtgaccgatctgaatcaaccggttagcgtttacatgacgccgaaagagcgtctggtaactgtgcgtgaaggcgaagcccgtgaagtggtgctggcaaaaatgcacgaaaaacgcgttgaaaaggcgctggtggttgatgacgaattccacctgatcggcatgatcaccgtgaaagatttccagaaagcagaacgtaaaccgaacgcctgtaaagacgaacaaggtcgtctgcgtgttggtgcagcggttggtgctggcgctggtaacgaagagcgtgtcgatgcgctggttgccgcaggagttgacgttctgctgatcgactcctctcacggtcactctgaaggcgttctgcagcgtatccgtgaaactcgtgctaaatatccggatctgcaaatcatcggcggcaacgtggcaacagctgcgggggcacgcgctctggcagaagctggttgcagcgcggttaaagtcggtatcggccctggctctatctgtacgactcgtatcgtgactggcgtaggtgttccgcagatcaccgccgttgctgatgcagtagaagccctggaaggcaccggtattccggttatcgctgacggcggtatccgtttctcaggcgatatcgctaaagctatcgccgctggcgcaagcgcggtgatggtaggttccatgctggcaggtactgaagaatctccgggtgaaatcgaactctaccagggccgttcttacaaatcttaccgtggtatgggttccctgggcgcgatgtccaaaggttcttctgaccgttacttccagagcgacaacgctgccgacaaactggtgccggaaggtatcgaaggccgcgtagcctataaaggtcgcctgaaagagatcattcaccagcagatgggcggcctgcgctcctgtatgggcctgaccggctgtggtactatcgacgaactgcgtactaaagcggagtttgtacgtatcagcggtgcgggcattcaggaaagccacgttcacgacgtgaccattactaaagagtccccgaactaccgtctgggctcctga

SEQ ID NO: 2649 - DNA, 1578 bp, Escherichia coli
atgacggaaaacattcataagcatcgcatcctcattctggacttcggttctcagtacactcaactggttgcgcgccgcgtgcgtgagctgggtgtttactgcgaactgtgggcgtgggatgtgacagaagcacaaattcgtgacttcaatccaagcggcattattctttccggcggcccggaaagcaccaccgaagaaaacagcccgcgtgcgccgcagtatgtctttgaagcaggcgtaccggtattcggcgtttgctatggcatgcagaccatggcaatgcagttgggcggtcacgttgaagcctctaacgaacgtgaatttggctacgcgcaggttgaagtcgtaaacgacagcgcactggttcgcggtatcgaagatgcgctgaccgcagatggtaaaccgctgctggacgtctggatgagccacggcgataaagttaccgctatcccgtccgacttcgtcaccgtagccagcaccgaaagctgcccgtttgccatcatggccaacgaagaaaaacgcttctatggcgtacagttccacccggaagtgactcacacccgccagggtatgcgcatgctggagcgttttgtgcgtgatatctgccagtgtgaagccctgtggacgccagcgaaaattatcgacgacgctgtagcccgcatccgcgagcaagtgggcgacgataaagtcatcctcggcctctctggtggcgtggattcctccgttaccgcaatgctgttgcaccgcgctatcggtaaaaacctgacttgcgtattcgtcgacaacggcctgctgcgtctcaacgaagcagagcaggttctggatatgtttggcgatcactttggtctgaacattgttcacgtaccggcagaagatcgcttcttgtcagcgctggctggcgaaaacgatccggaagcaaaacgtaaaattatcggtcgcgttttcgttgaagtattcgatgaagaagcgctgaaactggaagacgtgaagtggctggcgcagggcaccatctaccctgacgttatcgaatctgctgcttctgcaaccggtaaagcacacgtcatcaaatctcaccacaacgtgggtggcctgccgaaagagatgaagatggggctggttgaaccgctgaaagagctgttcaaagacgaagtgcgtaagattggtctggagctgggcctgccgtacgacatgctctaccgtcacccgttcccgggaccaggccttggcgttcgtgttctgggagaagtgaagaaagagtattgtgacctgctgcgccgtgctgacgccatcttcattgaagaactgcgtaaagcggacctgtacgacaaagtcagccaggcgttcaccgtcttcctgccagtacgttccgttggcgtaatgggcgatggtcgtaagtatgactgggttgtctctctgcgtgctgtcgaaaccatcgactttatgaccgcacactgggcacatctgccgtacgacttcctcggccgcgtttccaaccgtattatcaatgaagtgaacggtatttcccgcgtggtgtatgacatcagcggcaagccgccagctaccattgagtgggaatga

SEQ ID NO: 2650 - DNA, 540 bp, Escherichia coli
atgaagaaagtttttctttgcgccatcttagcctccttaagctatccggctatcgcctcatcattgcaggatcaactctcggctgtcgcagaagcggaacagcaaggtaaaaatgaagagcaaaggcagcatgacgaatgggtcgcggagcgcaacagggaaatccagcaagagaagcaacgtcgcgcaaacgcccaggccgcggctaataaaagagcggcaacggcagcagcgaataagaaagctcgtcaggataaactggacgccgaagccactgcggacaaaaaacgcgatcaaagttatgaagatgagctacgtagcttagagattcagaaacaaaaactggcgctggcgaaagaagaagcccgcgtcaagcgcgaaaacgaatttatcgatcaggaactgaagcacaaagctgcgcaaaccgatgtggtgcaatctgaagctgacgcaaacagaaatatgactgaaggcggtcgcgatctgatgaaaagcgtgggcaaagcagaagagaacaaatcggacagctggtttaattaa

SEQ ID NO: 2651 - DNA, 516 bp, Escherichia coli
atgaaatttaaaaaatgtcttctgcctgtggcaatgttagcgtcattcactctggcaggatgccagtcaaatgctgatgatcatgccgccgatgtttatcaaaccgatcaactgaataccaaacaagaaactaaaaccgttaatattatttccattcttcccgcaaaagttgccgtagacaacgcccaaaataaacggaacgcacaagccttcggcgcgcttattggcgctgtcgctggcggtgttatcggccacaacgtcgggtctggcagcaattccggaacgacggcaggtgcagttggcggcggagctgtaggcgcggcagcgggttcgatggtgaatgataaaaccttagtggaaggtgtttctttaacatataaggaaggcaccaaagtgtatacctccacccaggtgggtaaagagtgccagtttacgacaggtttagccgttgttattaccacgacgtataacgaaacgcgtattcagccaaataccaaatgtcctgaaaagagctaa

SEQ ID NO: 2652 - DNA, 174 bp, Escherichia coli
atgcgaaaacgacaccgatttaacagtcgcatgacccgtatcgtactgctcatcagctttatcttcttctttggccgttttatctactcgtccgtcggtgcctggcagcaccatcagagcaaaaaagaagctcagcaatccacactctccgtcgaatcaccggtacaacgttag

SEQ ID NO: 2653 - DNA, 153 bp, Escherichia coli
atgtcccacgccgtggacggtacttacattaaggcacaacaggacaaaatggtcaattcttcgttatgtaaaaaagcgtcagttgatacatattttaatgttatgaaagttaatttaattatttacaatgatgatgtaataatgatgagttaa

SEQ ID NO: 2654 - DNA, 2244 bp, Escherichia coli
atgaaactgaatgcaacttatataaaaatacgtgataaatggtgggggcttccgctgttcctgccttctttaatcttgcccattttcgcccacattaatactttcgcgcatatttcttccggtgaagtttttctcttttatctgccactggcactgatgatcagcatgatgatgtttttcagctgggcggcattgccagggatcgccttagggatttttgtccgcaaatatgcagagctgggtttttacgaaacgctctcattaacggctaattttattatcattatcattctctgttggggcggttacagggtttttaccccccggcgtaacaacgtttcacatggtgatagccgtttaatttcccagcgactattctggcagattgtgtttcctgcaacgctgtttctgatacttttccagtttgctgcgtttgtagggttactggcgagcagagaaaatctggtcggcgtcatgccctttaacctcgggaccttaatcaattatcaggccttgctggtgggtaatctgattggtgtcccgctgtgctacttcatcattcgggtggtgcgaaatccgttttatttacgtagctattattcgcaattaaaacagcaggttgatgccaaagttaccaaaaaagagttcgcaatctggctactggcattaggtgctttactattgctgttatgcatgccgttaaatgaaaaaagcacgatttttagcaccaattacaccttgtcattattgctgcccctgatgatgtggggagcgatgcgctatggttataagctgatttcattgctctgggcggtcgtgttgatgatcagcatccacagctatcaaaattacattcccatttatcctggctataccacgcagctcaccataacctcctccagttatctggtattctcttttattgtcaattatatggctgtactggcaacccgtcagcgagcggtagtcagacgcattcagcggcttgcgtatgtggacccggtggttcatctgccaaatgttcgcgccctgaatcgcgcgttacgtgatgccccctggtctgcgctttgttatttacgcatccctggcatggaaatgctggttaagaattatggcatcatgctgcggattcaatacaagcaaaaactttctcactggctgtcaccattgttggaaccgggtgaagatgtttatcagctttcgggtaacgatctcgcgctgcggctgaatacagaatcgcaccaggagcgcattaccgcactggatagccatctcaagcaatttcgtttcttttgggatggaatgccgatgcaaccgcagattggcgtcagttactgctatgtgcgctcgccagtgaatcatatctacctgctgctgggagagctaaatacagtggccgaactttctatcgtgaccaacgccccggaaaatatgcagcgtcgcggagcaatgtatttgcaacgcgaattgaaagataaagtcgcgatgatgaatcggctacagcgggcgctggaacacaaccattttttcctgatggcccagccgattaccggtatgcgtggtgatgtctaccatgaaattcttctgcgcatgaaaggtgagaatgatgaactgatcagccccgttagcttcttaccggtcgcgcacgaatttggtttatcgtcgagtatcgacatgtgggtcattgagcatacgctgcaatttatggctgaaaacagagcgaagatgcccgctcaccgttttgctattaatctgtctccaacctcggtatgtctggctcgttttcctgttgaagtcagtcagctgctggctaaatatcagattgaagcgtggcaacttatttttgaagtcaccgaaagtaatgctctgaccaatgttaagcaggcgcaaatcaccttgcagcatcttcaggaattaggctgccagattgcgattgatgatttcggcaccggctacgccagctatgcgcggcttaaaaatgtgaatgccgatctgcttaaaattgacggcagttttatccgcaatattgtgtcaaatagtctggattatcagatagtggcgtcgatttgccacctggcgcgaatgaagaaaatgcgggtagtggcagagtacgttgaaaacgaagagatccgcgaggcggtgctctctttggggatcgattatatgcagggttatcttattggtaagccgcaaccgttaattgatacgctgaatgaaatcgaacccattcgcgaaagtgcctga

SEQ ID NO: 2655 - DNA, 1542 bp, Escherichia coli
atgccaatacacgataaatcccctcgtccgcaggagtttgctgcggtcgatcttggttcaaacagttttcacatggtcatagcccgtgtggtagatggtgccatgcagattattggccgcctgaaacagcgggtgcatctggcggacggcctggggccagataatatgttgagtgaagaggcaatgacgcgcggtttgaactgtctgtcgctatttgccgaaaggctacaagggttttctcctgccagcgtctgtatagttggtacccatacgctgcgtcaggcgctgaacgccactgactttctgaaacgcgcggaaaaagtcattccctacccgatcgaaattatttccggtaatgaagaagcccgtctgatttttatgggcgtggaacatacccaaccggaaaaaggtcgcaaactggttattgatattggcggcggttctacagaactggtgattggtgaaaatttcgaaccgattctcgttgaaagccgccggatgggttgtgtcagctttgcccagctttatttccctggcggggtcatcaataaagagaattttcagcgcgctcgcatggcggcagcacaaaaactggaaacgttaacctggcaatttcgaattcagggctggaacgtggcaatgggcgcttccggtaccataaaagccgcccatgaagtgttaatggaaatgggcgagaaagacgggataattaccccggaacgtctggaaaaactggtaaaagaagttttacggcaccgtaatttcgcatcgctgagtttaccaggtctttccgaagagcggaaaacagtcttcgttcctggactggcgattttatgcggtgtgtttgatgctttagccatccgtgaactgcgcctttctgacggggcgttacgcgaaggcgtactgtatgaaatggaaggacgtttccgtcatcaggatgtgcgtagtcgcactgccagcagcctcgccaaccagtatcacatcgacagcgaacaggcccgacgggtgctggataccactatgcaaatgtacgaacagtggcgggaacagcaaccgaagctggcgcatccacaactggaggcgctactgcgatgggccgccatgctgcatgaggtcgggttgaatatcaaccacagcggtttgcatcgccactccgcttatattctgcaaaacagcgacttgccgggttttaatcaggaacagcagctgatgatggcgacactggtgcgctatcaccgtaaagcgattaaactcgacgatctgccgcgctttaccttgtttaagaagaaacagttcctgccactgattcagctattgcgccttggcgtattactcaataatcaacgtcaggcaaccaccacaccgccaacattgacgctgattactgatgacagtcactggacactgcgtttcccgcatgactggtttagtcagaatgcgctggtactgcttgatctggaaaaggagcaagaatactgggaaggcgtggctggctggcggttgaaaattgaagaagaaagtacaccagaaatcgccgcttaa

SEQ ID NO: 2656 - DNA, 2067 bp, Escherichia coli
atgggtcaggaaaagctatacatcgaaaaagagctcagttggttatcgttcaatgaacgcgtgcttcaggaagcggcggacaaatctaacccgctgattgaaaggatgcgtttcctggggatctattccaataaccttgatgagttctataaagtccgcttcgctgaactgaagcgacgcatcattattagcgaagaacaaggctctaactctcattcccgccatttactgggcaaaattcagtcccgtgtgctgaaagccgatcaggaattcgacggcctctacaacgagctactgctggaaatggcgcgcaaccagatcttcctgattaatgaacgccagctctccgtcaatcaacaaaactggctgcgtcattattttaagcagtatctgcgtcagcacattacgccgattttaatcaatcctgacactgacttagtgcagttcctgaaagatgattacacctatctggcggtggaaattatccgtggcgataccatccgttacgcgctgctggagatcccatcagataaagtgccgcgctttgtgaatttacctccagaagcgccgcgtcgtcgcaagccgatgattcttctggataacattctgcgttactgccttgatgatattttcaaaggcttctttgattatgacgcactgaatgcctattcaatgaagatgacccgcgatgccgaatacgatttagtgcatgagatggaagccagtctgatggagttgatgtcttccagtctcaagcagcgtttaactgctgagccggtgcgttttgtttatcagcgcgatatgcccaatgctctggttgaagtgttacgcgaaaaactgactatttcccgctacgactccatcgtccccggcggtcgttatcataattttaaagactttattaatttccccaatgtcggcaaagccaatctggtgaacaaaccactgccgcgtttacgccatatttggtttgataaagcccagttccgcaatggttttgatgccattcgcgaacgcgatgtgttgctctattatccttatcacacctttgagcatgtgctggaactactgcgtcaggcttcgttcgacccgagcgtactggcgattaaaattaacatttaccgcgtggcgaaagattcacgcatcatcgactcgatgatccacgccgcacacaacggtaagaaagtcaccgtggtggttgagttacaggcgcgtttcgacgaagaagccaacattcactgggcgaagcgcctgaccgaagcaggcgtgcacgttatcttctctgcgccggggctgaaaattcacgccaaactgttcctgatttcacgtaaagaaaacggtgaagtggtgcgttacgcacacatcgggaccgggaactttaacgaaaaaaccgcgcgtctttatactgactattcgttgctgaccgccgatgcgcgcatcactaacgaagtacggcgggtgttcaactttattgaaaacccataccgtccggtgacatttgattatttaatggtgtcgccgcaaaactctcgccgtctgttgtatgaaatggtggaccgcgagatcgccaacgcgcagcaagggctgcccagtggtatcaccctgaagctaaataaccttgtcgataaaggcctggttgatcgtctgtatgcggcctccagctccggcgtaccggttaatctgctggtgcgcggaatgtgttctctgatccccaatctggaaggcattagcgacaacattcgtgccatcagtattgttgaccgttaccttgaacatgaccgggtttatatttttgaaaatggcggcgataaaaaggtctacctttcttccgccgactggatgacgcgcaatattgattatcgtattgaagtggcaacgccgctgctcgatccgcgcctgaagcagcgggtgctggacatcatcgacatattgttcagcgatacggtcaaagcacgttatatcgataaagaactcagtaatcgctacgttccccgtggcaatcgccgcaaagtacgggcgcagttggcgatttacgactacatcaaatcactcgaacaatctgaataa

SEQ ID NO: 2657 - DNA, 639 bp, Escherichia coli
atgaatattgtggtgcttatttccggcaacggaagtaatttgcaggcaattattgacgcctgcaaaaccaacaaaattaaaggcaccgtacgggcagttttcagcaataaggccgacgcgttcggccttgaacgcgcccgccaggcgggtattgcaacgcatacgctcatcaccagcgcgtttgacagtcgtgaagcctatgaccaggagttgattcatgaaatcgacatgtacgcacccgatgtggtcgtgctggctggttttatgcgcattctcagcccggcgtttgtctcccactatgccgggcgtttgctgaacattcacccttctctgctgccgaaatatcccggattacacacccatcgtcaggcgctggaaaatggcgatgaggagcacggtacatcggtgcatttcgtcaccgatgaactggacggtggcccggttattttacaggcgaaagtcccggtatttgctggtgatacggaagatgacatcaccgcccgcgtgcaaacccaggaacacgctatttatccactggtgattagctggtttgccgatggtcgtctgaaaatgcacgaaaacgccgcgtggctggatggtcaacgtctgccgccgcagggctacgctgccgacgagtaa

SEQ ID NO: 2658 - DNA, 1038 bp, Escherichia coli
gtgaccgataaaacctctcttagctacaaagatgccggtgttgatattgacgcgggtaatgctctggttggaagaatcaaaggcgtagtgaagaaaacgcgtcgtccggaagtgatgggcggtctgggcggcttcggtgcgctgtgtgcattgccgcaaaaatatcgtgaacctgtgctggtttccggcactgacggcgtaggtaccaagctgcgtctggcgatggacttaaaacgtcacgacaccattggtattgatctggtcgccatgtgcgttaatgacctggtggtgcaaggtgcggaaccgctgtttttcctcgactattacgcaaccggaaaactggatgttgataccgcttcagcggtgatcagcggcattgcggaaggttgtctgcaatcgggctgttcactggtgggtggcgaaacggcggaaatgccggggatgtatcacggtgaagattacgatgtcgctggtttctgcgttggcgtggtagaaaaatcagaaatcatcgacggatctaaagtcagcgacggcgatgtgctgattgcacttggctctagcggcccgcactcgaatggctattcgctggtgcgcaaaattcttgaagtcagcggttgtgatccgcaaaccaccgaacttgatggtaagccattagccgatcatctgctggcaccgacccgcatttacgtgaagtcagtgctggagttgattgaaaaggtcgatgtgcatgccattgcgcacctgaccggcggcggcttctgggaaaacattccgcgcgtattgccagataatacccaggcagtgattgatgaatcttcctggcagtggccggaagtgttcaactggctgcaaacggcaggtaatgttgagcgccatgaaatgtatcgcaccttcaactgcggcgtcggtatgattattgccctgcctgctccggaagtggacaaagctctcgccctgctcaatgccaacggtgaaaacgcgtggaaaatcggtatcatcaaagcctctgattccgaacaacgcgtggttatcgaataa

SEQ ID NO: 2659 - DNA, 627 bp, Escherichia coli
atgaagatcgtggaagtcaaacacccactcgtcaaacacaagctgggactgatgcgtgagcaagatatcagcaccaagcgctttcgcgaactcgcttccgaagtgggtagcctgctgacttacgaagcgaccgccgacctcgaaacggaaaaagtcactatcgaaggctggaacggcccggtagaaatcgaccagatcaaaggtaagaaaattaccgttgtgccaattctgcgtgcgggtcttgggatgatggacggtgtgctggaaaacgttccgagtgcgcgcatcagtgtcgtcggtatgtaccgtaatgaagaaacgctggagccggtaccgtacttccagaaactggtttctaacatcgatgagcgtatggcgctgatcgttgacccaatgctggcaaccggtggttccgttatcgcgaccatcgacctgctgaaaaaagcgggctgcagcagcatcaaagttctggtgctggtagctgcaccagaaggtatcgctgcgctggaaaaagcgcacccggacgtcgaactgtatactgcatcgattgaccagggactgaacgagcacggatacattattccgggcctcggcgatgccggtgacaaaatctttggtacgaaataa

SEQ ID NO: 2660 - DNA, 1290 bp, Escherichia coli
atgacgcgccgtgctatcggggtgagtgaaagaccgccacttttacagacaatcccgcttagtttgcaacatttgttcgccatgtttggtgcaaccgtcctggtgcccgtcttatttcatattaacccggcgactgtactgttatttaacggtataggaacactgctgtatctcttcatctgtaaagggaaaattccggcttatcttggttccagctttgcctttatttcaccggtattgttactgttgccgttggggtatgaagtcgcgctgggcggctttattatgtgcggcgtgctgttctgcctggtttcttttatcgtgaagaaagcggggaccggctggctggacgtgctgtttccacctgcggcaatgggcgcaatcgttgccgtcatcggtctggagctggcgggcgtagctgccggtatggcgggtttactcccggctgaagggcaaacgccagactccaaaaccatcatcatctctattaccaccctggcggtcacggttttaggttccgtgctgtttcgtggtttcctggcaattatcccgattttaattggcgtgctggtggggtacgcgctctctttcgcaatgggaattgtcgataccacgccgattattaatgctcactggtttgcgctgccgaccctctatacgccgcgcttcgagtggtttgccattctgactattctgccagcggcgttagtggttattgccgaacacgtagggcacctggtcgtaacggctaatatcgtcaaaaaagatctgctgcgcgatccaggtctgcaccgttcgatgtttgctaacggcttgtcgaccgtgatctccggtttctttggttccacaccaaacaccacttacggagaaaacattggcgtgatggcgatcacccgtgtttacagtacctgggttatcggcggtgcggcgattttcgctatcctgctttcctgcgtcggtaaactggctgctgctatccagatgattccattgccggtgatgggcggcgtttcgctgctgctttacggggtcatcggtgcttccggtattcgtgtgttgatcgaatcgaaagtggattacaacaaagcacagaacctgatcctgacttccgttattttgatcatcggcgtcagtggcgcgaaggtaaacattggcgcggcggagctgaaaggtatggcgctggcgaccatcgtcggtatcggcttaagtttgatcttcaaactgattagtatgctgcgccctgaagaagtggtgctggacgcagaagacgcggatataacagacaaataa

SEQ ID NO: 2661 - DNA, 747 bp, Escherichia coli
gtggtaaacttctcgcgattttgtgaaatcctggttgaggtatctctgaacacaccggcacagctctctttgccactttatcttcctgacgacgaaacctttgcaagtttctggccgggggataactcctctttactggccgcgctgcaaaacgtgctgcgtcaggaacatagcggttacatctatctctgggcacgcgaaggcgcggggcgcagccatctgctgcacgcggcttgcgcggaattgtcgcagcgtggcgatgcggtgggctatgtcccgctggataaacgcacctggtttgttccggaagtgctcgacggtatggagcatttgtcgctggtctgtattgacaacattgagtgtattgccggcgatgagttgtgggagatggcgattttcgatctctacaatcgaattctggaatcgggcaaaacacggttgttgatcaccggcgatcgtccaccgcggcagttgaatctgggattaccggatctcgcgtcgcgtctcgactgggggcagatctacaaattgcagccactttctgatgaagataagttgcaggcgctacagttacgcgcgcgtttgcgtggttttgaactgccggaagatgtggggcgtttcttgctgaagcggctcgacagagaaatgcgcacgttgtttatgacgctggatcagctggatcgtgcgtcgattaccgcgcaacgcaagctgaccattccgtttgtgaaagaaattctgaagttgtag

SEQ ID NO: 2662 - DNA, 360 bp, Escherichia coli
atgaccaaacaggcaaaaatctaccataacccacgctgttcaaagagccgggaaacgctgaacctgctgaaagaaaacggcgtggagccagaagtggtgctctaccttgagacacccgccgatgcggcaacgctgcgtgatttgctgaaaatgctggggatgaatagcgctcgtgaattgatgcgccaaaaagaggatctttataaagaactgaacctggctgacagttcgcttagcgaagaggtgctgattcaggcgatggtagagaatccgaagctaatggaacgcccgattgtggtcgcgaatggcaaagcgcggattggtcgtccaccggagcaggtactggaaatcgtgggttaa

SEQ ID NO: 2663 - DNA, 1464 bp, Escherichia coli
atgttcaggcagttgaaaaaaaacctggttgcaaccctcattgctgctatgaccattggtcaggtagccccggcgtttgccgacagcgcagacaccttgccggatatgggaacctccgcaggaagcacactttccattggtcaggaaatgcagatgggcgactattatgtccgccagttacgcggcagcgcgccgttaattaatgatccgctgttaacgcaatacattaattcgctaggaatgcgtctggtttcgcatgccaattcggttaagacaccgtttcatttctttctgatcaacaacgatgaaattaacgcctttgctttctttggcggcaacgtggtgctgcactctgccctgttccgttattccgataacgaaagtcaactggcttcagttatggcgcacgaaatctcccacgtcacccaacgtcacctggcgcgagcgatggaagatcagcagcgcagcgcgccgctgacctgggtcggcgcgttaggttctattttactggcgatggccagtccgcaggcggggatggcggcgctgaccggtacactggcgggaacgcgccaggggatgatcagtttcacccagcaaaatgaacaggaagcggaccgcattggtattcaggtgctgcaacgctcgggattcgatccgcaggcgatgccgaccttcctcgaaaaattactcgatcaggcgcgttactcttcgcgcccaccagaaattctgctcactcacccactaccggaaagccgtctggctgatgcccgtaaccgtgccaatcagatgcgcccgatagtggtgcaatcgtcagaagatttctatctggcaaaagtgcgcacactggggatgtacaattcagggcgtaaccaactcaccagtgatttgctggatgaatgggcgaaaggaaacgttcgtcagcaacgagcggcgcaatatggtcgtgctttacaggcgatggaagccaataaatacgacgaggcgcgtaaaacgctgcaaccgttactggcggcagaacctggcaacgcatggtatctcgatctggctaccgatatcgatcttgggcaaaacaaagccaatgacgctatcaatcgcctgaaaaatgcccgcgatttgcgcaccaatccggtgttgcagctcaacctggcgaacgcttatctgcaaggggggcaaccacaggaagcggccaatattctgaatcgctacacttttaacaataaagatgacagcaacggctgggatttactggcacaggcggaagccgcactaaataaccgcgatcaggaactggctgcgcgagcagaaggttatgcgctcgccgggcgactcgatcaggctatttccttgttgagtagcgccagttcgcaggtgaaattaggcagcctgcaacaagcgcgttacgatgcgcgcatcgaccagttgcgccagctgcaggaacgctttaagccttataccaagatgtaa

SEQ ID NO: 2664 - DNA, 1062 bp, Escherichia coli
atgctcgaaatgttgatgcaatggtatcgccgccgttttagcgacccggaagcgattgccttgctggttattttggttgctggttttggcattatctttttctttagcggcctactcgcgccgttgctggtggctattgtgctggcctatttgctggaatggccgactgtccgcctgcagtctattggctgttcccgcccttgggcgacatctatcgtgctgatcctgtttgtgggcatcctgctactgatggcgttcgtggttctgcctattgcctggcagcagggcatctacttaatccgcgatatgccagggatgcttaataaactttctgattttgctgccacgttaccgcgccggtatccggcattaatggatgcggggattattgatgcaatggctgaaaatatgcgtagccggatgctgaccatgggcgattcggtggtgaaaatttccctcgcctcgttggtcggtttgctgaccattgccgtctatctggtgctggtgccattgatggtcttcttcctgctgaaagacaaagagcagatgctgaacgccgttcgccgggtgctgccgcgcaaccgtggactggcaggacaggtgtggaaggagatgaatcaacaaatcaccaactatatccgcggcaaagtgctggagatgatcgtggtagggatcgccacctggctggggttcttgctctttgggctgaactattcgctgctgctggcggtgctggtcggcttctcggtacttattccgtacattggcgcatttgtggtgaccattccggtggttggcgtggcgctattccagtttggtgctggcacggaattctggagctgcttcgcggtgtatctgattattcaggcgctggacggcaacctgttagtaccggtgttgttctccgaagcggttaacctgcatccgctggtgattattttatcggtggtgatcttcggtggtttgtggggattctggggcgtattcttcgctattccattggcgacgctgatcaaagccgtgatttacgcctggcctgatgggcaaatcgcgcaagactga

SEQ ID NO: 2665 - DNA, 471 bp, Escherichia coli
atgaatccactgaaagccggtgatatcgcaccgaaatttagcttgccggatcaagacggagaacaagttaatttgaccgacttccagggacagcgtgttctggtttatttctacccgaaagccatgacccccggctgtaccgtacaggcctgcggcttacgcgataacatggatgagttgaaaaaagcgggcgttgatgtgctgggtatcagcaccgataaacccgaaaaactctcccgttttgcggaaaaagagctgcttaactttacgctcctgtctgatgaggaccaccaggtgtgcgaacaattcggcgtctggggtgaaaagtccttcatgggcaaaacctacgatggtattcatcgcatcagcttcctgattgacgctgatggcaaaatcgaacatgtctttgacgatttcaaaaccagcaatcaccacgacgttgtgctgaactggctgaaagaacacgcctga

SEQ ID NO: 2666 - DNA, 573 bp, Escherichia coli
ttgacactgtcatcgcaacattatctggtgatcactgcgttgggtgccgatcgccctggaatagtgaacaccatcacccgtcatgtcagtagttgcggctgtaatattgaagacagtcgcctggcgatgctgggagaagagttcacgtttatcatgctgctttccggttcatggaatgccattactctgattgaatcaacgttaccgttgaaaggtgccgagctggatcttttaatcgtgatgaagcgcacgacggcgcgtccgcgtccgccaatgccagcatctgtctgggttcaggtcgatgtggcagactccccgcatttaattgaacgcttcacagcacttttcgacgcgcatcatatgaacattgcggagctggtgtcgcgcacgcaacctgctgaaaatgaaagggctgcgcagttgcatattcagataactgcccacagccccgcatctgcggacgcagcaaatattgagcaagcgttcaaagccctatgtacagaactcaatgcacaaggcagtattaacgtcgtcaattattcccaacatgatgaacaggatggagttaagtaa

SEQ ID NO: 2667 - DNA, 879 bp, Escherichia coli
atgttcacgggaagtattgtcgcgattgttactccgatggatgaaaaaggtaatgtctgtcgggctagcttgaaaaaactgattgattatcatgtcgccagcggtacttcggcgatcgtttctgttggcaccactggcgagtccgctaccttaaatcatgacgaacatgctgatgtggtgatgatgacgctggagctggctgacgggcgcattccggtgattgccgggaccggtgctaacgctactgcggaagccattagcctgacgcagcgcttcaatgacagcggtatcgtcggctgcctgacggtaaccccttactacaatcgtccgtcgcaagaaggtttgtatcagcatttcaaagccatcgctgaacatactgacctgccgcaaattctgtataatgtgccgtcccgtactggctgcgatctgctcccggaaacggtgggccgtctggcgaaagtaaaaaatattatcggaatcaaagaggcaacagggaacttaacgcgtgtaaaccagatcaaagagctggtttcagatgattttgttctgctgagcggcgatgatgcgagcgcgctggacttcatgcaattaggcggtcatggggttatttccgttacggctaacgtcgcagcgcgtgatatggcccagatgtgcaaactggcagcagaagggcattttgccgaggcacgcgttattaatcagcgtctgatgccattacacaacaaactatttgtcgaacccaatccaatcccggtgaaatgggcatgtaaggaactgggtcttgtggcgaccgatacgctgcgcctgccaatgacaccaatcaccgacagtggtcgtgagacggtcagagcggcgcttaagcatgccggtttgctgtaa

SEQ ID NO: 2668 - DNA, 1035 bp, Escherichia coli
atggcttactctgttcaaaagtcgcgcctggcaaaggttgcgggtgtttcgcttgttttattactcgctgcctgtagttctgactcacgctataagcgtcaggtcagtggtgatgaagcctacctggaagcggcaccgcttgcggagcttcatgccccggctggaatgattttgccggtgacctccggcgattatgcaatcccggtgaccaacggtagtggtgctgtcggtaaggcgctggacattcgtccaccagcccagccgttggcactggtttctggcgcgcgtacccagttcacgggcgataccgcttcattgctggtggaaaatggtcgtggcaatactctgtggccgcaggtggttagcgtgctgcaggcgaaaaactacaccatcacccaacgtgatgatgttggtcagacactgaccaccgattgggtacaatggaaccgtctggacgaagacgagcagtatcgtggtcgttatcaaatctctgttaagccgcagggttatcagcaggcggttacggttaaactgctgaacctggaacaggcgggcaaaccggttgcagacgcggcttccatgcagcgttacagcacggagatgatgaacgttatttccgccggtctggataaatctgccactgacgccgcgaacgctgcgcaaaaccgtgcctccaccactatggacgtacaaagtgcagctgatgacaccggtttaccaatgctggtcgtacgcgggccgttcaatgtggtttggcaacgtctgccagctgcgctggaaaaagtgggcatgaaagtgaccgacagcacccgttcgcagggcaacatggccgtaacttataagccgctgtctgacagcgaatggcacgaactgggtgcgagcgatccaggtctggcatccggtgactataaactgcaggttggcgatttagataaccgcagcagcctacagttcatcgatccgaaaggtcatactctgactcagagtcagaacgacgcgctggtagctgtcttccaggctgcgtttagcaagtaa

SEQ ID NO: 2669 - DNA, 231 bp, Escherichia coli
atgcggcgtgaacgccttatccgacctacgtccgacaaacaaatttcgtgcgaattaccgctaaaatcgcgtttttctgtcgacgcacacgtttgcgtatcatatcagaaaaaagggctggatgactccagccctgtatttttacttgctaaacgcagcctggaagacagctaccagcgcgtcgttctgactctgagtcagagtatgacctttcggatcgatgaactgtag

SEQ ID NO: 2670 - DNA, 714 bp, Escherichia coli
atgcaaaagcaagctgagttgtatcgtggtaaagcgaaaaccgtatacagcacggaaaacccggacctgttggtgctcgaattccgcaatgatacgtcagcaggggatggcgcgcgcattgagcagtttgatcgcaaaggtatggtgaacaacaagttcaactacttcattatgagcaaactggctgaagcgggtatcccgactcaaatggagcgtctgctctccgataccgaatgtctggtgaaaaagctggatatggtgccggttgagtgtgtcgtgcgtaaccgtgctgctggctctctggtgaaacgtcttggaatcgaagaaggtattgagctgaacccgccactgttcgatctgttcctgaaaaacgacgccatgcacgatccgatggtcaacgaatcttactgcgaaacctttggctgggtgagcaaagagaatctggcgcgtatgaaagagctgacctacaaagcgaacgacgtgctgaaaaaactgttcgatgatgcaggtctgattctggtcgacttcaagctggagtttggtctgtacaaaggcgaagtggttctgggcgatgagttctccccggacggcagccgcctgtgggacaaagaaacgctggagaaaatggataaagaccgtttccgccagagcctcggtggcctgatcgaagcctatgaagccgttgcccgccgcctgggtgtacagctggactga

SEQ ID NO: 2671 - DNA, 864 bp, Escherichia coli
atgcgttggcaagggcgacgtgaaagtgacaatgttgaagacaggcgcaatagctccggcggtccgtcaatgggcggtcccggttttcgcctgccaagcggtaaaggcgggctgattttactgatagtcgtgctggttgcaggctactatggcgttgatttaaccgggttgatgaccggacagccggtttcccaacagcaatcaacgcggtcaattagccctaatgaagacgaagccgcaaaattcacctcggtgattctggcaaccacggaagacacctggggacagcaattcgagaagatgggtaaaacctatcagcaaccgaagctggtcatgtaccgtggaatgacgcgtaccggctgcggggcgggccagtccataatggggccattctattgcccggcggatggcacagtttatatcgatctctccttctatgatgacatgaaagacaaacttggcgcggatggcgattttgcccaggggtacgttatcgctcatgaagtcggtcatcatgtgcagaaactgttaggcatcgagccgaaagttcgtcaactgcaacaaaacgcgacgcaggcggaagtaaaccgcttatctgtgcgtatggaactccaggccgactgttttgccggtgtatgggggcatagtatgcagcagcaaggtgttctggaaactggcgatctggaagaggcgctgaacgcggcgcaggccatcggcgatgaccgtttacaacagcaaagtcaggggcgagtagtaccagacagtttcactcatggcacttctcagcaacgctacagctggtttaaacgtggtttcgacagcggcgatccggcacaatgcaatacttttggtaaaagcatttaa

SEQ ID NO: 2672 - DNA, 2016 bp, Escherichia coli
atggctgaactgactgcgcttcacacattaacagcgcaaatgaaacgtgaagggatccgccgcttgctggtgttgagcggggaagagcgttggtgttttgatcatgcgcttaagttgcgtgatgccttacctggcgactggctgtggatttcgccgcagccagatgctgaaaaccactgttctccctcggcactacaaactttacttgggcgcgagttccggcatgcggtattcgacgcccgccaaggctttgatgccgctgcctttgcggcacttagcggaacgttgaaagcgggaagctggctggtgttgttactccctgtatgggatgagtgggaaaaccaacctgatgccgactcgctgcgctggagtgattgccctgaccctattgcgacgccgcattttgtccagcatttcaaacgcgtacttacggcgaataacgacgctatcctctggcggcaaaaccagccgttctcgttggcgcattttactccccgtactgactggcaccccgctaccggcgcaccacaaccagaacaacagcaactcttacagcagctactgaccatgccgccgggcgtggcagcggtaactgctgcgcgtgggcgcggtaagtcggcgttggcagggcaactcatttctcgtattgcgggcagtgcgattgtcaccgcgcccgcaaaagcggcaacggatgtactggcacaatttgcgggtgagaagtttcgctttattgcaccggatgccttgttagccagcgatgagcaagccgactggctggtggtcgatgaagccgcagctatacctgcgccgttgttgtatcaactggtatcgcgttttcctcgaacgttgttaactactacggtgcagggctacgaaggcaccggacgtggttttttgctgaaattttgcgctcgctttccgcatttacaccgttttgaactacaacagccgatccgttgggcgcagggatgcccgctggaaaaaatggttagtgaggcactggtttttgacgatgaaaacttcacccatacaccacaaggcaatatcgttatttccgcatttgaacagacgttatggcgaagcgagccagaaacgccgttaaaggtttatcaattattgtctggtgcgcactaccggacttcgccgctggatttacgccgcatgatggatgcaccaggtcaacattttttacaggcggctggcgaaaacgagattgccggagcgctgtgtctggtggatgagggtggattatctcaagaactcagtcaggcggtatgggcgggttatcgtcgtccacggggcaatctggtggctcaatcgctggcggcgcacggcagcaatccactggcggcgacattgcgcggacggcgggttagccggatagcagttcatccggctcgtcagcgggaaggcacagggcgacagcttattgctggtgctttgcaatatattcatgacctcgactatctttcggtgagttttggttacaccgaggagttatggcgtttctggcaacgctgcggttttgtgctggtgcgaatgggtaatcatcgtgaagccagcagcggttgctatacggcgatggcgctgttaccgatgagtgatgcgggtaaacaactggctgaaggtgagcattaccgtttacgtcgcgatgcgcaagctctcgcaaagtggaatggcgaaacgcttcccgttgatccactaaacgatgccgtcctttctgacgacgactggcttgaactggccggttttgctttcgctcatcgtccgctattaacgtcgttaggttgcttaatgcgtctgttacaaaccagcgaaatggcattaccggcgctgcgtgggcgtttacagaaaaacgccagtgacgcgcagttatgtaccacacttaaactttcaggccgtaagctgttactggttcgccagcgggaagaggccgcgcaggcgctattcgcacttgatgatgttcgcactgagcgtctgcgcgatcgcataacgcaatggcaattttttcactga

SEQ ID NO: 2673 - DNA, 699 bp, Escherichia coli
atgaaacatgaccattttgttgttcaaagcccggataaaccagcacaacagttgttactgcttttccacggtgtcggggataacccggtggcaatgggggaaataggtagctggtttgcgccgctgtttcctgatgcgctggtggtgagtgtcggtggcgcggagccgagcggtaatccggcggggcgtcagtggttttcggtgcagggtattacggaagataatcgccaggcgcgtgtgaatgccatcatgccggcgtttattgagacggtgcgctactggcagaaacaaagcggagtaggggctaatgccacggcgctaatcggtttctcacaaggcgcgattatggcgctggagagcattaaagccgaaccgggccttgcttcgcgcgtcattgccttcaacggacgctacgcgagcctgccggaaaccgcgtctacagccacaacaattcacttgattcatggcggtgaagatccggttatcgatctggcgcatgcggttgcggcgcaggaagcgttaatcagtgccggtggcgatgtgacgctggatatcgtggaggatttaggccatgcgatcgacaatcgcagtatgcaattagccctggatcacttgcgttataccattccgaaacattatttcgacgaagcgctaagtggcggtaagcctggcgatgatgatgtgattgaaatgatgtaa

SEQ ID NO: 2674 - DNA, 201 bp, Escherichia coli
atggactggctggctaaatattggtggattctggtgattgtctttttggtaggcgtcctgctgaacgtgattaaagacctcaagcgcgtcgaccataagaaatttctcgccaacaagccggagcttcccccgcatcgtgatttcaacgataagtgggacgatgacgacgactggccgaaaaaggatcaaccgaagaagtaa

SEQ ID NO: 2675 - DNA, 1128 bp, Escherichia coli
atgtcgtgcccggttattgagctgacacaacagcttattcgccgcccttccctgagtcctgatgacgcaggatgccaggctttgttgattgaacgtttgcaggcgatcggttttaccgttgaacgcatggactttgccgacacgcagaatttttgggcatggcgtgggcagggtgaaacgttagcctttgccgggcataccgacgtggtgccgcctggcgacgccgaccgttggatcaatccgccgtttgaacccaccattcgtgatggcatgttattcgggcgcggtgcggcagatatgaaaggctcgctggcggcgatggtggtagcggcagaacgctttgtcgcacaacatcccaaccatacagggcgactggcatttctgatcacctctgatgaagaagccagtgcccacaacggtacggtaaaagtcgtcgaagcgttaatggcacgtaatgagcgtctcgattactgtctggttggcgaaccgtcgagtatcgaagtggtaggtgatgtggtgaaaaatggtcgtcgcggatcgttaacctgcaaccttaccattcatggcgttcaggggcatgttgcctacccacatctggctgacaatccggtacatcgcgcagcacctttcattaatgaattagtggctattgagtgggatcagggtaatgacttcttcccggcgaccagtatgcagattgccaatattcaggcgggaacgggcagtaacaacgttattccaggtgaactgtttgtgcagtttaacttccgctttagcaccgaactgacggatgagatgatcaaagcgcaggtgcttgccctgcttgaaaaacatcaactgcgctatacggtggattggtggctttccgggcagccatttttgaccgcgcgcggtaaactggtggatgcggtcgttaacgcggttgagcactataatgaaattaaaccgcagctactgaccacaggcggaacgtccgacgggcgctttattgcccgcatgggggcgcaggtggtggaactcgggccggtcaatgccacgattcataaaattaatgaatgtgtgaacgctgccgacctgcagctacttgcccgtatgtatcaacgtatcatggaacagctcgtcgcctga

SEQ ID NO: 2676 - DNA, 357 bp, Escherichia coli
atggttacactttacggcatcaaaaattgtgacaccattaagaaggctcgccgttggctggaagctaataacatcgactatcgttttcatgattaccgcgtcgatggattggacagcgaattattgaacggttttatcaacgaattaggctgggaagcgttactcaacacccgtggtacaacctggcgtaaactggacgaaaccacccgcaataaaatcaccgatgcggcctctgcggcgacattaatgactgaaatgcctgcaattatcaaacgtccattgctctgcgcgcctggtaagcctatgctgctgggtttcagtgaatccagttatcagcaatttttccatgaggtgtag

SEQ ID NO: 2677 - DNA, 3114 bp, Escherichia coli
atggcgaatttctttattgatcgccccatttttgcctgggtgctggcaatcctgttgtgtctgacaggtaccctggcgattttttcattgcccgttgaacaataccccgatctcgcgccaccgaatgtgcgagtgaccgctaactatcccggcgcatcggcccagacgctggaaaacaccgtgacccaggttatcgagcaaaatatgaccggcctcgataatctgatgtatatgtcatctcagagcagcggcaccggtcaggcatctgtcacgttaagttttaaagcaggcaccgatccggacgaagccgtgcagcaagtacaaaaccagctgcaatcagccatgcgaaagttaccgcaggcggtgcaaaatcagggcgtgacggtgcgtaaaaccggcgataccaacattctgaccattgccttcgtctctaccgatggttcgatggataaacaggatattgccgattatgttgccagtaatattcaggacccgttaagccgcgtgaatggcgtcggggatatcgatgcctatggttcgcaatattccatgcgtatctggctggacccggcgaaactcaacagtttccagatgacggctaaagatgtcaccgatgccattgaatcacagaacgcgcagattgcggttgggcaacttggtggtacgccttccgtcgataagcaggcgctcaacgccaccattaacgcccagtcactgctgcaaacaccagaacagttccgcgatatcaccttgcgggtgaatcaggacggctcagaggtaaggctgggcgatgtcgccaccgtcgaaatgggggcggagaaatacgattatcttagccgcttcaatggtaagccagcctccgggctgggggttaaactggcctccggcgcgaacgaaatggcgacagcggagctggtgctcaatcgtctcgacgagctggcgcagtattttccacacggactggaatacaaggtggcgtatgaaaccacctcgtttgttaaagcctccattgaagacgtggtgaaaacgctgctggaagctatcgccctggttttcctcgttatgtatctgttcctgcaaaacttccgcgccacgctgatacccactatcgccgtgccggtggtgttgatgggaaccttctcggtgctttatgccttcggctatagcgtcaacaccttaaccatgttcgcgatggtgctggctatcggcctgttggtagatgacgccatcgtggtggtggaaaacgtcgaacgtattatgagtgaggaaggactcactcctcgcgaagccacacgtaaatcgatggggcaaatccagggcgcactggtcgggattgcgatggtgctttcggcggtatttgtgccaatggccttcttcggcggcaccaccggtgccatctatcgccagttctctattaccattgttgcggcgatggtgctgtcagtactggtagcgatgatcctcactcctgctctgtgtgccacgctacttaagccactgaaaaaaggtgagcatcacgggcaaaaaggcttttttgcctggtttaaccagatgtttaaccgcaacgccgaacgctacgaaaaaggggtggcgaaaattctccaccgtagcctgcgctggattgtgatttatgtcctgctgcttggcggcatggtgttcctgttcctgcgtttgccgacgtcgttcttaccgctggaagaccgtggcatgtttactacttcggtacagttgcccagcggttcaacccagcaacagaccctgaaagtcgttgagcaaatcgagaaatattacttcacccatgaaaaagacaacatcatgtcggtgtttgccaccgtgggttcttgccctgggggtaacgggcaaaacgtggcgcgaatgtttatccgcctgaaagactggagcgaacgcgacagtaagaccggcacctcgtttgccattatcgagcgtgcaacgaaggcgtttaacaagattaaagaagctcgcgttatcgccagcagcccgccagcaattagcggtcttggtagttctgcgggttttgatatggagttgcaggaccacgctggagcgggtcacgatgcgctgatggcagcacgaaaccagttgctggcgctggcagcggaaaacccggagctaacccgtgtgcgccataacggcctcgacgacagtccgcagttgcagattgatatcgaccagcgtaaagctcaggcgctgggcgttgctatcgacgatattaacgacacactgcaaaccgcctggggttcgagctatgtgaatgactttatggatcgcggtcgcgtgaagaaagtctatgtgcaggcagctgcgccgtatcgcatgctgccagatgacatcaatctctggtatgtccgaaataaagatggcggcatggtgcccttctctgctttcgcgacctcacgctgggagacaggctcgccgcgtctggaacgctataacggttattctgcggttgagattgttggggaagccgcaccgggggtcagtaccggtacggcgatggatattatggaatcgttagtgaagcagctgccaaacggctttggtctggagtggacggcgatgtcgtatcaggagcggctttccggcgcgcaggctccggcgctgtacgccatttccttgctggtggtattcctgtgtctggcggcattgtatgaaagctggtcggtgccgttctcggtaatgctggtcgtgccactgggggttatcggcgcgctgctggcaacctggatgcgcgggctggaaaacgatgtttacttccaggtgggcctgttaacggtcattggtttatcggcgaaaaacgccatcctgatcgtcgaatttgctaacgagatgaaccaaaaaggccacgacctgtttgaagcgacgctccacgcctgccgtcagcgtttacgcccgattctgatgacctcgctggcatttatcttcggcgtattgccaatggcaaccagcacaggtgccggttccggtggtcagcatgcggtgggtactggcgtaatgggcgggatgatttcggccactattctggctatttacttcgtgccgctgttctttgtgctggtgcgccgccgcttcccgctgaagccgcgcccggaataa

SEQ ID NO: 2678 - DNA, 1701 bp, Escherichia coli
gtgattgttaaacgacccgtctcggccagtctggcccgggcctttttttacattgtgctgctgtcgattctttccacgggtatcgctctgctaacgctggcgagcagtttgcgcgacgctgaggctatcaatattgccggatcgctgcgtatgcagagttaccgcctgggctacgatttgcaaagtggcagtccacaactcaatgcacatcgccagttatttcagcaggcactgcattcaccggtattaaccaatctcaacgtctggtatgtgccagaggcagtaaaaacccgctatgcgcatctgaatgccaactggctggagatgaataatcggctcagcaagggtgatttgccgtggtatcaggccaatattaataattatgttaatcagatagacctgttcgtactggctttacagcactacgctgaacgcaaaatgctgctggtggtggcgatttccctggctggcggcatcggtattttcacgctggtcttttttactttgcgtcgcatacgccatcaggtggttgccccgctgaatcagctggttaccgccagtcagcgtattgaacacgggcagttcgactcgccgccgctggataccagcctgccgaatgagcttggcctgcttgcaaaaacctttaaccagatgtcgagcgagctgcataaattgtaccgttcgctggaggcgtcagtagaagaaaagacccgcgatctccacgaggccaagcgtcgtctggaggtgttgtatcagtgttcgcaggcgctaaacaccagccagattgatgtgcattgtttccgccatattttgcagattgttcgcgacaatgaagcggctgaatatctggagttaaatgtcggtgacaactggcggattagcgaagggcagccaaacccggaattgccgatgcagattttaccggtgacaatgcaagagacggtttacggcgaactgcactggcaaaatagtcacgtttcatcatcagaaccgctgcttaacagcgtttcgtcgatgctgggacgcggtttgtactttaatcaggcgcagaagcattttcagcagttattgttgatggaagaacgtgcgaccatcgcccgcgaattgcacgactcactggctcaggtactttcttacttacgtatccagttgacgttactgaagcgttcgataccggaagataacgccaccgcacaaagtatcatggccgatttttcccaggcgttgaatgatgcttatcggcagttacgcgagctgttgactactttccgcctgacgctgcagcaggcggatctcccctccgcgttgagggaaatgctggatacgttacaaaatcaaaccagcgccaaactgaccctcgactgccgtctgccaaccctggcgctggatgcgcaaatgcaggtgcatttgttgcaaattattcgcgaagcggtgctgaatgcgatgaagcacgccaacgccagcgaaatcgccgttagctgcgtcaccgcgccggatggcaatcacacagtctatattcgcgacaacgggattggcatcggtgaaccgaaagaacccgaaggccattatggtctgaatatcatgcgcgaacgcgcggaaagattgggtgggacgctgactttttcacaaccttccggcggcggcacgttagtgagtattagctttcgctctgcggagggtgaggaaagtcagctgatgtaa

SEQ ID NO: 2679 - DNA, 1980 bp, Escherichia coli
atgaatcgttttattatggccaacagtcagcaatgtctgggttgtcatgcttgtgaaatcgcctgtgtcatggctcacaatgacgagcaacatgtcctgagccaacaccattttcatccccgaattacggttatcaaacatcagcagcaacgtagtgcagtgacctgtcaccattgtgaagatgcgccctgcgcccgtagctgccctaatggcgcaatcagccacgttgatgacagcattcaggtcaatcagcaaaagtgtattggctgtaaatcctgcgtggtggcctgtccatttggtacgatgcaaatcgttctgacacccgttgcggtaggaaaagtaaaagccacggcgcataaatgcgacctttgtgcagggcgcgaaaacggtcctgcctgtgtcgaaaattgcccggcggacgcgctgcaactggtcactgacgccgcactctccggcatggcgaaatcccgccgcttgcgcaccgcacgtcaggaacaacaaccgtggcatgccagtaccgcggcgcaagaaatgccggtaatgagtaaagtcgagcaaatgcaggcaacgcccgcgcgtggcgagccagataaactggcgattgaagcgcgcaaaaccggttttgatgaaatttatctgccattccgtgccgatcaggcacaacgggaagcctcgcgctgccttaagtgcggcgagcacagcgtttgtgaatggacctgcccgctgcataaccatataccgcagtggattgaactggtgaaagccggaaacatcgacgccgccgtcgagctttctcaccagaccaacaccctgccggaaattaccggacgcgtttgcccgcaagaccgtttgtgtgaaggtgcctgtactattcgcgatgagcacggcgcagtaactatcggtaacattgaacgctacatttcagatcaggcgttggcgaaaggttggcgtcctgacttaagccatgtcaccaaagtggacaagcgggtggcgattatcggtgcgggtccggcagggctggcctgtgcagatgttctcacccgcaatggcgtggcggtgacggtgtacgatcgccatccagaaatcggtggcttgctcactttcggcattccttctttcaaactggataaatccctgctggcacgccgtcgggaaatcttcagcgcgatggggattcacttcgaactcaattgtgaagtgggtaaagatgtctctttgaattcgcttttggaacaatacgacgcggtcttcgttggcgtaggcacttaccgctccatgaaagcgggtttacccaatgaagatgcgccgggcgtttatgacgcgctgccgttcctcatcgccaatactaaacaggtgatgggactcgaagagctaccggaagagccgtttatcaatactgccggacttaacgtcgtggtactgggcggcggcgacaccgcgatggactgtgtgcgtactgcgctgcgccacggcgcgagtaacgtcacctgcgcttatcgtcgtgatgaagctaacatgccaggctcgaagaaagaggtgaagaacgcccgtgaagagggggccaacttcgaatttaacgtccagccggtggcgcttgaactgaatgaacaaggtcacgtctgcgggattcgtttcctgcgcacgcgtcttggcgagccggatgcccaggggcgtcggcgtccagtgccggtggaaggcagtgaatttgtcatgccagccgatgcggtgattatggcgtttggcttcaatccgcacgggatgccgtggctggagtcgcacggtgtaacggtagacaaatggggccgcatcatcgcggatgtggaaagccagtaccgttaccagaccacgaatccgaaaatcttcgccggtggtgacgccgtgcgtggtgcggatctggtggttaccgcaatggcagaaggacgtcatgcggcacaggggatcattgactggctgggcgtaaaatcagtcaaatctcactga

SEQ ID NO: 2680 - DNA, 576 bp, Escherichia coli
atgacgcaacaaatcaccctcgttaaagacaaaattctctccgataactatttcaccctgcacaacattacttacgatctcacgcgcaaagatggcgaagttatccgccataaacgtgaagtttacgatcgcggtaatggtgcgacgatcctcctgtacaacgcgaagaaaaagaccgtggttctgattcgccagttccgcgtcgctacctgggttaatggcaatgaaagcgggcaactgattgaaacctgcgccgggctgctggataacgacgaaccggaagtgtgcattcgcaaagaagcgattgaagagacgggctatgaagttggcgaagtccgcaaattatttgaactgtatatgtcgccaggcggtgtgactgagctaatccacttttttatcgccgaatacagtgacagccagcgcgctaacgccggtggtggtgtcgaagatgaagatattgaagtgcttgagctgccgttcagccaggcgctggagatgattaaaaccggcgagatacgtgacggtaagacggtgttattgcttaactatttgcaaatgtcacatttaatggactga

SEQ ID NO: 2681 - DNA, 999 bp, Escherichia coli
atgtctttggtgtgggcggcaccagcgcaacgggcgttttccgactggcaggtcacctgtaataatcaaaatttctgtgtagcgcgcaatacgggcgatcataatggactggtgatgaccctgagccgcagcgccggggcgcataccgatgccgttttacgtattgagcgcggcgggttgaagtcgccggatgcgtcagaaggggagatagcgccacggctgctgttagatggtgagccgttggcgttaagtggtgacaagtggcggatttcaccatggttattagtaaccgatgatacggcaaccatcaccgcgtttttgcagatgattcaggaagggagggcgatcaccttacgcgacggcaatcagactatttctctgagtggcttaaaagcggcgttgttgtttattgatgcccagcaaaagcgcgttggcagtgagaccgcgtggataaagaaaggggacgaaccgccgctcagcgtaccgccagcgcctgcgctgaaagaggtcgcggtggttaacccaacgccgacgccactctcactcgaagaacgtaacgatttgctggattatggaaactggcggatgaatggtctgcgctgctcgcttgatccgttacgtcgtgaggtgaatgtcactgcgctgaccgatgataaagcgctgatgatgattagctgtgaggctggggcctataacaccattgatttggcatggattgtgtcgcgtaaaaagccgctggcctcgcgcccggtacggttgcgtttgccgttcaacaacggtcaggagaccaatgaactggaactgatgaacgcaacattcgatgaaaaatcgcgtgaactggtgaccttagcaaaagggcgcggattaagcgattgtggcattcaggcgcgctggcgctttgacggtcagcgttttcgcctggtgcgttacgccgcagaacccacctgcgataactggcatgggccagacgcctggcccacgttgtggatcacccgttaa

SEQ ID NO: 2682 - DNA, 2004 bp, Escherichia coli
atgtcccgaaaagaccttgccaatgcgattcgcgcactcagtatggatgcggtacaaaaagccaattctggtcatcccggcgcgccgatgggcatggctgatattgccgaagtgctgtggaacgattttcttaaacataaccccaccgacccaacctggtatgaccgtgaccgctttattctttccaacggtcacgcgtcgatgctgctctacagtttgctgcatctgaccggttacgacctgccactggaagaacttaagaacttccgtcagttgcattcgaaaacccctggtcacccggaaatcggctatacgccaggtgttgaaaccaccaccggtcctcttggacaaggtttggcgaacgccgtcgggctggcgatagcagagcgtacgctggcggcgcagtttaatcagccggatcatgaaattgtcgatcacttcacctatgtgtttatgggcgacggctgcctgatggaaggtatctctcacgaagtctgttcgctggcgggcacgctggggctgggcaagctgattggtttttacgatcacaacggtatttccatcgacggtgaaaccgaaggctggtttaccgacgatacggcaaaacgttttgaagcctatcactggcatgtggtccacgagatcgacggccacgatccgcaggcggtgaaggaagcgatccttgaagcgcaaagcgtgaaagataagccgtcgctgattatctgccgtacggtgattggctttggttcgccgaataaagcaggtaaggaagaggcgcacggcgcaccactgggggaagaagaagtggcgctggcacggcaaaaactgggctggcaccatccgccatttgagatccctaaagagatttatcacgcctgggatgcccgtgaaaaaggcgaaaaagcgcagcagagctggaatgagaagtttgccgcctataaaaaggctcatccgcaactggcagaagagtttacccgtcgaatgagcggcggtttgccgaaggactgggagaaaacgactcagaaatatatcaatgagttgcaggcgaatccggcgaaaatcgctacccgtaaggcttcgcaaaatacgcttaacgcttacgggccgatgctgcctgagttgctcggcggttcggcggatctggctcccagcaacctgaccatctggaaaggttctgtgtcgctgaaggaagatccggcgggcaactacattcactacggggtgcgtgaatttggtatgaccgctatcgccaacggcatcgcgcaccacggcggctttgtgccgtataccgcgacgttcctgatgtttgttgaatacgcccgtaacgccgcgcggatggcggcactgatgaaagcgcggcagattatggtttatacccacgactcaattggtctgggcgaagatggtccgacgcaccaggctgttgagcaactggctagtctgcgcttaacgccaaatttcagcacctggcgaccgtgcgatcaggtggaagcggcggttggctggaagctggcggttgagcgccacaacggaccgacagcactgatcctctcaaggcagaatctggcacaggtagaacgaacaccggatcaggttaaagagattgctcgtggcggttatgtgctgaaagacagcggcggtaagccagatattattctgattgccaccggttcagagatggaaatcaccctgcaagcggcagagaaattagcgggagaaggtcgcaatgttcgcgtggtttccctgccctcgaccgatattttcgatgcccaggatgaggaatatcgcgagtcggtactgccttcaaatgtttctgcccgcgtggcagtagaagcgggtattgccgattactggtacaaatatgttggtctgaaaggggcaattgtcgggatgacaggttatggggaatctgctccggcggataagctgttcccgttctttggctttaccgccgagaatattgtggcaaaagcgcataaggtactgggagtgaaaggtgcctga

SEQ ID NO: 2683 - DNA, 951 bp, Escherichia coli
atgaacgagttagacggcatcaaacagttcaccactgtcgtggcagacagcggcgatattgagtccattcgccattatcatccccaggatgccaccaccaatccttcgctgttactcaaggctgccggattatcacaatatgagcatttaatagacgatgctatcgcctggggtaaaaaaaatggcaagacccaggaacaacaggtggtcgcagcgtgtgacaaactggcggtcaatttcggtgctgaaattctcaaaatcgtacccggtcgcgtgtcaacagaagttgatgcacgcctctcttttgataaagaaaagagtattgagaaggcgcgccatctggtggacttgtatcagcaacaaggcgttgagaaatcgcgcattctgatcaagctggcttcgacctgggaaggaattcgcgcggcagaagagctggaaaaagaaggtatcaactgcaacctgacgctgctgttttcttttgcacaggcgcgggcctgtgcagaagcaggcgtttttctgatttcgccgtttgtcgggcgtatttatgactggtatcaggcacgcaagccgatggacccgtatgtggtggaagaagatccaggcgttaaatcagtacgcaatatctacgactactataagcaacaccactatgaaaccattgtgatgggcgcgagcttccgtcgcaccgaacaaatcctcgccttaaccggctgcgaccgactgactatcgcaccgaatttgctgaaggagctacaggaaaaagtttcgccagtggtacgtaaattaatcccaccttctcagacgttcccacgcccagctcccatgagcgaagcggaattccgttgggagcacaatcaggatgcgatggcggtagaaaaactgtctgaaggcattcgtctgttcgccgttgatcaacgcaaactggaagatcttcttgccgccaaactataa

SEQ ID NO: 2684 - DNA, 2280 bp, Escherichia coli
atggatgaccagttaaaacaaagtgcacttgatttccatgaatttccagttccagggaaaatccaggtttctccaaccaagcctctggcaacgcagcgcgatctggcgctggcctactcaccaggcgttgccgcaccttgtcttgaaatcgaaaaagacccgttaaaagcctacaaatataccgcgcgcggtaacctggtagcggtgatctctaacggtacggcggtgctggggttaggcaacattggcgcgctggcaggcaaaccggtgatggaaggcaagggcgttctgtttaagaaattcgccgggattgatgtatttgacattgaagttgatgaactcgacccggacaaatttattgaagtcgtcgctgcgctcgaaccgaccttcggcggcatcaacctcgaagacattaaagcgccagaatgtttctatattgaacagaaactgcgcgagcggatgaatattccggtattccacgacgatcagcacggcacggcaattatcagcactgccgccatcctcaacggcttgcgcgtggtggagaaaaacatctccgacgtgcggatggtggtttctggcgcgggtgccgcagcaatcgcctgtatgaacctgctggtagcgctgggtctgcaaaaacataacatcgtggtttgcgattcaaaaggcgttatctatcagggccgtgagccaaacatggcggaaaccaaagccgcatacgcggtggtggatgacggtaaacgtaccctcgatgatgtgattgaaggcgcggatattttcctcggctgttccggcccgaaagtgctgacccaggaaatggtgaagaaaatggcccgtgcgccaatgatcctggcgctggcgaacccggaacctgaaattctgccgccgctggcgaaagaagtgcgtccggatgccatcatctgtaccggccgttccgactacccgaaccaggtgaacaacgtcctttgcttcccgtttatcttccgtggcgcgctggacgttggcgcaaccgccatcaacgaagagatgaaactggcggcagtacgtgcaattgcagaactggcccatgcggaacagagtgaagtggtggcttcagcgtatggcgatcaggatctgagctttggtccggaatacatcattccaaaaccgtttgatccgcgcttgatcgttaagatcgctcctgcggtggcgaaagcggcgatggagtcgggcgtggcgacgcgtccgattgctgatttcgacgtctacatcgacaagctgacagagttcgtttacaaaactaacctgtttatgaagccgattttctcccaggctcgcaaagcgccgaagcgcgtagttctgccggaaggggaagaggcgcgcgttctgcatgccactcaggaactggtaacgctgggactggcgaaaccgatccttattggtcgtccgaacgtgatcgaaatgcgcattcagaaactgggcttgcagatcaaggcgggcgttgattttgagatcgtcaataacgaatccgatccgcgctttaaagagtactggaccgaatacttccagatcatgaagcgtcgcggtgtcactcaggaacaggcgcagcgtgcgctgatcagtaacccgacagtgatcggcgcgatcatggttcagcgtggcgaagccgatgcaatgatttgcggtacggtgggcgattatcatgaacactttagcgtggtgaaaaatgtctttggttatcgcgatggcgttcacaccgcaggtgcaatgaacgcgctgctgttgccgagtggtaatacctttattgccgatacctacgtcaatgatgagcctgatgcagaagagctggcggagatcaccttgatggcggcagaaactgttcgtcgttttggtattgagccgcgtgtggctctgttgtcgcactccaactttggttcttctgactgcccgtcgtcgagcaaaatgcgtcaggcgctggaactggtcagggaacgtgcgccagaactgatgattgatggtgaaatgcacggcgatgcagcgctggtggaagcgattcgcaacgaccgtatgccggacagccctttgaaaggttccgctaatattctggtgatgccgaacatggaagctgcccgcattagttacaacttactgcgcgtttccagctcggaaggtgtgactgtcggtccggtgctgatgggcgtggcgaaaccggttcacgtgttaacgccgatcgcatcggtacgtcgtatcgtcaacatggtggcgctggccgtggttgaagcgcaaacccaaccgctgtaa

SEQ ID NO: 2685 - DNA, 336 bp, Escherichia coli
atggataaagaacgcatcattcaggaatttgtgcccggtaaacaggtcacactggcgcatctcatcgcgcatcccggcgaggaactggcgaagaaaatcggcgttccggatgcgggcgcaatcggcattatgacgctaactcccggagaaacggcgatgatcgccggtgatttagcgttgaaagccgccgatgtgcatatcggttttctcgaccgttttagcggcgcgctggtgatttatggttcggtgggcgcagtagaagaagcgttatcacaaaccgtcagtggtttaggacgcttattaaattatacgctttgtgaaatgaccaaaagttaa

SEQ ID NO: 2686 - DNA, 480 bp, Escherichia coli
atgaaacgaattgcgtttgtgggtaccgtcggggcaggaaaaacaacgttatttaatgcgttgcaggggaattataccctcgcaagaaaaacacaggccgtggaatttaatgataatggcgatattgatacgctgggtgaatattttagccatccccgctggtatcacgccttaattaccacgctacaggatgtggacatgctgatctatgtccacggcgcgaatgacccggaaagtcggttgcctgccgggttgctggatattggcgtcagcaaacggcaaatcgccgtcatcagtaaaacggacatgccagatgctgacgtcgccgcaacgcgaaagttattgcttgagacgggcttcgaagagccgattttcgagctaaacagccacgacccgcaaagcgtgcagcaactggtggattatctggcatctctcaccaaacaggaggaagcaggtgaaaaaactcatcacagcgaatga

SEQ ID NO: 2687 - DNA, 702 bp, Escherichia coli
gtgaaaaaactcatcacagcgaatgatattcgtgaagcacacgcgcgcggcgaactggcaatgttcgtggttctgcgcgccagcattattaccccggaagctcgtgaagtggctgatctgttgggttttaccatcaccgaatgtgatgaatcgatcccggtaacggcgtctgttcccgccagcgcatcagccgataaaaccgaaagccagcgcatccgtgaaaccattatcgcccaactgccggaaggtcagtttaccgaaagcctggtcgcgcagctgatggaaaaagtgatgaaggaaaaacagtcgctggaacagggtgcactgcagccgagctttaaatcggtgaccggcaaaggcggcatcaaagttattgatggcagcagcgtcaagtttggtcgtttcgacggcgcacaaccgcactgcgtaggcttgactgatctcgtgaccggagacgacggcagcagtatggccgctggtttcatgcagtgggagaacgccttctttccgtggaccctgaactacgacgaaatcgacatggtgctggaaggggagctgcatgttcgccacgaaggcgaaactatgatcgccaaagcgggcgatgtgatgtttatcccgaaaggctccagcatcgaatttggtacgacatccagcgtgaaatttctgtatgtcgcctggccggctaactggcaatccctatga

SEQ ID NO: 2688 - DNA, 804 bp, Escherichia coli
atgaaagatttcatcaccgaagcatggctaagagcgaaccatacgctcagcgaaggcgcagagatccatctccctgcggacagtcgcctgacgccctctgcccgggagttactggaaagccgccatctgcgcatcaagtttattgacgagcagggccgcctgtttgttgacgatgaacagcagcagccgcagcccgttcacgggctgaccagtagcgatgaacatccgcaggcgtgctgcgaactgtgccgccagccggtggcaaaaaagccggatacgctgactcacctgtcggcggaaaaaatggttgccaaaagcgatccgcgcctggcttttcgcgctgttctcgacagcaccattgcgctggcagtgtggctgcaaattgaactggcggaaccgtggcagccgtggctggcggatatccgttcgcgtcttggcaacattatgcgtgccgatgcgctggggaaaccgctggcctgccaggcgattgtcgggctttctgacgaagatctgcatcggctttctcaccagccgctgcgttatctcgaccacgatcatctggtgccggaagccagccacgggcgcgatgcggcgttgctgaatctgctacgcaccaaagtgcgggaaaccgaaaccgtagcggcgcaggtctttatcacccgcagctttgaagtattacgcccggacattttgcaggcactgaaccgcctttccagcacggtctacgtgatgatgatcctgagcgtaacgaagcagccgctaacggtgaagcagatccaacaacgactgggggaaacgcaatga

SEQ ID NO: 2689 - DNA, 1017 bp, Escherichia coli
atgattattaaacgttgtcgtgaactggcgttgcgagcgcccgccagagtagtttttccggatgcgttagatcaacgtgtgctgaaagctgcgcaatatttacatcaacaaggtctggcaacgcccattctggtcgccaatccgtttgaacttcgtcagtttgcgctcagtcacggcgtggcgatggacgggctacaggtgatagatccgcatggcaacctcgcaatgcgggaagaatttgctcatcgctggctggcccgcgcgggcgaaaaaacgccgacggatgcgctggaaaaacttaccgatccgctgatgttcgccgccgcaatggtcagcgccggtaaagcggatgtctgtatcgcgggcaacctctcttccacggcgaatgtgctgcgtgccggattacgcattatcggcttgcagccaggctgtaaaacgctctcatccattttcctgatgctgccacagtacagcggtccggcgttgggctttgccgattgcagcgtggtgccgcagccgacggcggcacaactggcggatatcgcgcttgccagcgccgaaacctggcgcgccatcaccggagaagaaccgcgcgtggcgatgctgtcgttttccagcaacggtagtgcccgtcacccctgcgttgccaacgtccagcaggcgacagaaatcgtccgtgagcgcgcaccaaagctggttgtcgatggcgagttgcagtttgacgccgccttcgtgccggaagtggcggcgcaaaaagcgcctgccagcccgttacagggcaaagctaatgtgatggtttttccgtcgctggaggcaggaaatattggctacaaaatcgcacaacgactcggcggatatcgtgccgtcgggccattgatacaaggacttgccgcgccgatgcacgatctctctcgtggttgtagcgtgcaggaaattatcgaactggcgctggtggcagctgtgccgcgtcagacagaagtgaaccgcgaaagcagtttacaaacactggttgaatga

SEQ ID NO: 2690 - DNA, 336 bp, Escherichia coli
atgaacggtcccgttctggaccctgataaagaggaaagcacaatggaagcattaggaatgatcgaaacccggggcctggttgcactgattgaggcttctgacgcgatggttaaagctgcgcgcgtcaagctggttggtgttaagcagattggcggcggcctgtgtactgccatggttcgtggtgatgttgcagcctgtaaagccgcgaccgatgcaggtgccgcagcggcacagcgtatcggcgagctggtatctgtacacgttatcccgcgtccgcacggcgacctggaagaagtcttcccgatcggcctgaaaggcgatagcagcaacctgtaa

SEQ ID NO: 2691 - DNA, 288 bp, Escherichia coli
atgaaactggcagtcgtcactggacaaattgtttgtaccgtacgccatcacgggctggcgcatgacaaattgctgatggtggaaatgattgatccacaaggtaatcctgacgggcaatgcgccgtcgccatcgacaatattggcgcgggaaccggggagtgggtgttactggtgagtggcagttccgcccgccaggcgcataaaagcgaaacgtcaccggtcgatctgtgcgtgattggcatcgtcgatgaggtggtgtctggcggtcaggtcattttccacaaataa

SEQ ID NO: 2692 - DNA, 1404 bp, Escherichia coli
atgaatcaacaggatattgaacaggtggtgaaagcggtactgctgaaaatgcaaagcagtgacacgccgcccgccgccgttcatgagatgggcgttttcgcgtccctggatgacgccgttgcggcagccaaagtcgcccagcaagggttaaaaagcgtggcaatgcgccagttagccattgctgccattcgtgaagcaggcgaaaaacacgccagagatttagcggaacttgccgtcagtgaaaccggcatggggcgcgttgaagataaatttgccaaaaacgtcgctcaggcgcgcggcacaccaggcgttgagtgcctctctccgcaagtgctgactggcgacaacggcctgaccctaattgaaaacgcaccctggggcgtggtggcttcggtgacgccttccactaacccggcggcaaccgtaattaacaacgccatcagcctgattgccgcgggcaacagcgtcatttttgccccgcatccggcggcgaaaaaagtctcccagcgggcgatcacgctgctcaaccaggcgattgttgccgcaggcgggccggaaaacttactggttaccgtagcaaatccggatatcgaaaccgcgcaacgcttgttcaagtttccgggtatcggcctgctggtggtgaccggcggcgaagcggtagtggaagcggcgcgcaaacacaccaataaacgcctgattgcggcaggtgccggtaacccgccggtagtggtggatgaaaccgccgacctcgcccgtgctgctcagtccatcgtcaaaggcgcttctttcgataacaacatcatttgtgccgacgaaaaggtactgattgttgttgatagcgtagccgatgaactgatgcgtctgatggaaggccagcacgcggtgaaactgaccgcagagcaggcgcagcagctgcaaccggtgttgctgaaaaatatcgacgagcgcggaaaaggcaccgtcagccgtgactgggttggtcgcgatgcggcgaaaatcgcggcggcaatcggcctgaacgtcccgtcagaaacgcgactgctgtttgtagaaaccaccgcagaacatccgtttgccgtgaccgaactgatgatgccggtgctgcccgtcgtgcgcgtcgccaacgtggcggatgccattgcgctggcggtgaaactggaaggcggttgccaccacacggcggcaatgcactcgcgcaatatcgaaaacatgaaccagatggcgaacgccattgataccagcattttcgttaagaacggaccgtgtattgccgggctggggctgggcggggaaggctggaccacgatgaccatcaccacgccaaccggtgaaggggtaaccagcgcgcggacgtttgtccgtctgcgtcgctgtgtattagtcgatgcgtttcgcattgtttaa

SEQ ID NO: 2693 - DNA, 837 bp, Escherichia coli
atggcgcacgatgaacaatggctcaccccacgtctgcaaacggcggcaacgctgtgtaaccagacgcctgccgcgacggaatctccgctgtggctgggggtggatctgggcacttgcgatgtggtgtcgatggttgtcgaccgcgacggtcagccggtggcggtatgcctcgactgggctgatgtggtccgcgacggcatcgtctgggatttcttcggtgcggtcaccattgttcgacgccatctcgacaccctcgagcagcaattcggtcgccgttttagccatgcggcgacctcttttcctccaggtacggacccgcgtatttccatcaacgtgctggagtctgccggactggaagtgagccatgtgctggatgagccaaccgcagtcgcggatctgctgcaactggacaacgccggtgtagtggatatcggcggtggcactactggtattgccatcgtgaaaaagggcaaggtgacgtactcggcggatgaagccaccggcggacatcacatctctctgactctcgccggaaatcgccgtatttcgctggaagaggcagagcagtacaaacgcggtcacggtgacgagatttggcccgcggtgaaaccggtgtacgaaaaaatggcggacattgtggcccggcatattgaagggcagggcattacggatttatggctggcgggcggttcctgtatgcaaccgggcgtagctgcgctgttttgcaaacaatttccggcgttacaggtgcatttaccgcagcacagtttgtttatgaccccgctggcaatcgccagtagtgggcgagagaaagcggaggggatctatgcaaagtga

SEQ ID NO: 2694 - DNA, 1188 bp, Escherichia coli
atgcaaagtgaattgcaaacggcgctttttcaggcgttcgataccctgaatctgcaacgggtaaaaacatttagcgttccaccggtgacgctttgcggtccgggcgcggtgagcagttgcgggcagcaagcgcaaacgcgtgggttgaaacatctgttcgtgatggcagacagctttttgcatcaggcagggatgaccgccgggctgacacgtagcctggccgttaaaggtatcgccatgacgctctggccatgtccggtgggcgaaccgtgcatcaccgacgtgtgtgcagccgtggcgcagttgcgtgaatcaggttgtgacggggtgatcgcgtttggcggcggctcggtgctggatgcggcgaaagccgttgcgttgctggtgacgaaccccgatagcacgctggcagaaatgtcagaaaccagcgtcctgcaaccgcgcctgccgttgattgccattccaacgaccgccggaaccggctctgaaacgactaacgtgacggtgattatcgatgcggtaagcgggcgcaaacaggtgttagcccatgcctcgctgatgccggatgtcgcgattctcgacgctgcgctgaccgaaggcgtgccgtcgcatgtcacggcgatgactggcattgatgcgttaacccatgccattgaagcgtacagcgcgctgaacgctacaccgtttaccgacagcctggcgattggtgccattgcgatgattggcaaatcactgccgaaagcggtgggctacggccatgaccttgccgcgcgcgagagcatgttgctggcttcatgtatggcgggaatggcgttttccagcgccgggcttgggttatgccacgcgatggcgcatcagccaggggcggcgctgcatattccgcacggtctggcgaacgccatgttgttgccaacggtgatggaatttaaccggatggtttgtcgtgatcggtttagtcagattggtcgggcgctgcgaactaaaaaatccgacgatcgtgacgctattaacgcggtaagtgagctgatagcggaagttgggattggtaaacgactgggcgatgttggtgcgacatctgcgcattacggcgcatgggcgcaggccgcgctggaagatatttgtctgcgcagtaacccgcgtaccgccagcctggagcagattgtcggcctgtacgcagcggcgcaataa

SEQ ID NO: 2695 - DNA, 1227 bp, Escherichia coli
atgggaattaacgaaatcatcatgtacatcatgatgttctttatgctgatagctgccgtagacaggatcctgtcgcagttcggcggttctgctcgtttcctcggtaagttcggcaaaagtatcgaaggggccggcggccagtttgaagaaggctttatggcaatgggcgcactgggcctggcgatggtcggtatgaccgcgctggcaccggtactggcccacgtactcgggccggtgattatcccggtttacgaaatgctcggcgcaaacccgtcaatgttcgccggaacactgctggcgtgcgatatgggcggcttcttcctcgccaaagagctggcgggcggtgacgtagcagcgtggctatactctgggttaattctcgggtcgatgatggggccaacgattgtgttttccattccggtggcgctcggcattatcgaaccttctgaccgtcgttatctggcgctcggcgtgctggcgggcatagtgaccattccgattggctgtatcgctggtggtctggtagcgatgtactccggtgtgcagatcaacggccagcctgttgaattcacctttgcgctgatcctgatgaacatgatcccggtacttatcgttgcggtgctggtggcgctggggctgaaattcatcccggaaaaaatgatcaacggcttccagatcttcgccaaattcctcgttgcattgatcaccctcggtcttgccgctgcggtagtgaaattcctccttggctgggaactgatcccgggtcttgatcctatctttatggcccctggcgataaacccggtgaagtgatgcgcgccattgaagttatcggctcgatctcctgcgttctgttaggggcgtatccaatggtactgctgctgactcgctggtttgaaaaaccgctgatgagcgtcggtaaggtgctgaatatgaacaacatcgcggcagccggcatggtggcaacgcttgccaacaacattccgatgtttggcatgatgaagcagatggatacccgcggcaaagtcatcaactgcgccttcgccgtttccgctgctttcgccctgggcgaccatttaggcttcgccgctgccaacatgaacgccatgatcttcccgatgattgtcggcaaattgatcggcggcgtaacggcaattggcgtggcgatgatgctggtgccaaaagaagacgcgaccgcggctaaaactgaagcggaggcgcaatcgtga

SEQ ID NO: 2696 - DNA, 1404 bp, Escherichia coli
gtgaacactcgccagctactgagcgtcggtatcgatatcggcaccaccaccacccaggtgatcttctcccacctggagctggttaaccgtgcggcggtgtcgcaggtgccgcgctacgaattcatcaaacgcgaaattagctggcaaagcccggtgttctttacccctgtcgataaacagggtggtttaaaagaagcggaactgaaaaccttaatcctcgagcaatatcaggctgcgggcattgcgccggaaagcgttgattctggtgccatcattatcaccggtgaaagcgcaaaaacccgcaacgctcgcccggcggtgatggcgctctcccggtcgctgggcgattttgtcgtcgccagcgccgggccgcatcttgaatccgtgatcgccggacacggtgccggggcgcaaaccctttctgaacaacggctgtgtcgggtactgaatatcgatatcggcggtggcaccgcgaactacgccctgttcgatgccggaaaaatcagcggcactgcctgcctcaacgtcggcggtcgcctgctggaaaccgacagccaggggcgcgtggtttacgctcataaaccggggcagatgattgtggatgagtgcttcggtgccggtactgacgcccgttcgctgaccggcgggcagctggtgcaggttactcgccggatggcagagctgattgtcgaagtgattgacggaacgctctcgccgctcgcgcaggcattgatgcaaaccgatttgctgcccgcaggtgttacgcccgaaatcattacgctttctggcggggtaggcgaatgttatcgccaccagcccgccgacccgttctgttttgccgatatcggcccgcttctggcaacggcgctgcatgaccatccgcgtctgcgtgagatgaacgtgcagtttccggcgcaaaccgtgcgcgccacggtgattggcgcgggtgctcataccctttcgctctctggcagcacaatctggctggagggcgtacaactgccgctgcgcaatttgccagtggcgatcccgattgatgaaacggatctggtcagtgcctggcaacaggcgctgattcaactggatctttgccccaaaactgacgcgtacgtgctggcgcttcccgcctcgctgcctgtgcgttacgccgcggtactgacggtcatcaacgcgctggtcgatttcgtcgcgcgttttccgaatccgcatcccctgctggtggtggccgggcaggactttggtaaagctctgggcatgttgttgcgcccacagctacaacaactcccgttggcagtcattgacgaagtgattgtccgcgcgggggactatatcgacattggtacgcctctttttggcggatcggttgtgccggtgacggtgaaatcactcgcatttccttcctga

SEQ ID NO: 2697 - DNA, 1362 bp, Escherichia coli
atgaaactaaagaccacattgttcggcaatgtatatcagtttaaggatgtaaaagaggtgctggctaaagccaacgaactgcgttcgggggatgtgctggcaggcgttgcagcggcaagttcacaggagcgcgtggcggcaaagcaggtgttgtcggaaatgaccgtagcggacatccgcaataatccggtgattgcctatgaagatgactgcgtgacgcggctgattcaggacgacgttaacgaaacggcctacaaccagattaaaaactggagcatcagcgaactgcgtgagtatgtgctgagcgatgaaaccagcgtggacgacattgcctttacccgcaaagggctgacctcggaagtggtggcggcggtagcgaagatttgctccaacgcggacctgatctacggcgcgaagaaaatgccggtgatcaaaaaggccaataccaccattggtattccgggcacctttagcgcccgtttgcagccgaatgatacccgtgacgacgtgcaaagtatcgccgcgcaaatctacgaagggctttccttcggggtgggcgatgcggtgatcggcgttaacccggtgactgacgacgtggaaaacttaagccgcgtgttggataccatctatggcgtgatcgacaaattcaacatcccaactcagggctgcgtactggcgcacgtcaccacccagatcgaagcgatccgtcgtggcgcaccaggcgggctgattttccagagtatctgcggcagcgaaaaagggctgaaagagtttggcgtagagctggcgatgctcgatgaagcgcgcgcagtgggcgcggagttcaaccgtatcgccggggaaaactgcctctacttcgaaaccggacaaggctctgcgctgtccgctggcgctaacttcggcgcagaccaggtgacgatggaagcacgtaactatgggctggcgcgtcattacgatccgtttatcgtcaacaccgtggtcggctttattgggccggagtatctctacaacgaccgccagattatccgtgcaggcttagaagatcactttatgggcaagctgagcggcatctctatgggctgtgactgctgctacaccaaccacgctgacgctgaccagaacctcaacgaaaacctgatgatcctgctcgccaccgcaggctgtaactacatcatggggatgccgctgggcgatgacatcatgctcaactatcagaccaccgcattccacgacactgccactgtgcgtcagttactgaatctgcgtccgtcaccggagtttgaacgctggctggaaagcatgggcattatggcaaacggtcgcctgaccaaacgggcgggcgatccgtcactgttcttctga

SEQ ID NO: 2698 - DNA, 888 bp, Escherichia coli
atggatcaaaaacagattgaagaaattgtacgcagtgtgatggcgtcaatgggacaaacggcccccgcgccgtcagaagcaaagtgcgccaccaccaactgtgcggcaccggtgacctcggaaagctgcgcgctggatttaggttctgcggaagcaaaagcgtggattggtgtggaaaacccacatcgcgcggacgtattaacagaactgcgtcgcagcaccgtggcccgcgtttgtaccggtcgtgccggtccgcgtccgcgcacccaggcgttgctgcgtttcctggccgatcactctcgttcgaaagataccgttctgaaagaagtaccggaagagtgggtgaaagcgcagggcttgctggaagtccgctccgaaatcagcgacaaaaatctctacctgactcgtccggatatgggccgccgcctgtgtgcagaagctgttgaagcgctgaaagcacagtgtgttgctaatccggacgtgcaggtcgttatttctgatggcctgtcaactgatgcgatcaccgtgaactacgaagagatcctgccgccgctgatggcgggcctgaagcaagccgggctgaaagtcggtacgccattctttgtacgttatggtcgcgtgaagattgaagatcagatcggtgagatcctaggcgcgaaagtagtgatcctgctggtgggcgaacgtccggggttggggcagtcagaaagcctctcctgctacgccgtttattcgccgcgtatggcgaccaccgttgaggccgatcgcacctgtatctctaacattcaccagggcggcacgccgccggttgaagccgcagccgtcattgtggatttggcgaaacgtatgctggagcagaaagcatccggcatcaacatgacccgataa

SEQ ID NO: 2699 - DNA, 660 bp, Escherichia coli
atgccagctttagatttgattcgaccgtcggtaaccgccatgcgggtgattgcctccgttaacgccgaatttgcacgtgaactgaaattgccgccgcatattcgtagcctcgggctgatttctgctgattcagatgacgtcacctacattgcggctgacgaagcgaccaagcaggcgatggtcgaagtggtatatggtcgctcgctgtatgcgggcgctgcacacggcccgtcaccgactgccggtgaggtgctgattatgcttggtggaccaaacccggcggaagtgcgtgctggtctggatgcgatggttgcgaatattgaaaatggcgctgctttccagtgggcaaatgacgcagaaaacacagccttcctggcacatgtagtttcgcgtaccggttcttatctctcatcaaccgccgggatcacgcttggcgatccgatggcgtatctggtggcaccgccgctggaagcgacctacggcattgatgcagcgttgaaatctgccgacgtgcagttggtgacctatgtcccgccaccgtctgaaaccaactactcggcagcatttttaaccggtagccaggccgcgtgtaaagcagcctgtaacgcctttaccgatgcagtgctggaaatcgcgcgtaatccaatccagcgtgcgtaa

SEQ ID NO: 2700 - DNA, 501 bp, Escherichia coli
atgatcaatgcactgggattgctggaagtggacggcatggtcgccgcgatagatgcagctgatgccatgctcaaagcagctaacgttcgtctgctcagtcacgaagtgcttgaccctggtcgcctaacgctggtggtggaaggcgatctggcggcgtgtcgtgcggcgctggacgcaggttgtgctgccgcgatgcgtaccgggcgtgtcatcagccgtaaggagatcggtcggccagacgatgacacccagtggctggttactggctttaaccgccagccgaagcaacccgtaaaggaacccgacgcgccagttatcgtcgcggaatctgctgacgagttgttggcgctgttaacatcagtacgtcagggaatgacggcaggagaagtggctgcccactttggctggccgctggaaaaagccagaaatgcgctcgaacagctcttttctgccgggacgttacgtaaacgcagtagtcgttaccgtctcaagccccattaa

(The sequence listing continues in the following parts.)

1. A data bank comprising at least one pan-genome of one of the following bacterial species:
Escherichia coli,
Acinetobacter baumanii,
Citrobacter koseri,
Enterobacter aerogenes,
Enterobacter cloacae,
Klebsiella oxytoca,
Klebsiella pneumoniae,
Morganella morganii,
Proteus mirabilis,
Pseudomonas aeruginosa,
Salmonella enterica,
Staphylococcus aureus,
Serratia marcescens,
Shigella boydii,
Shigella flexneri,
Shigella sonnei, and
Stenotrophomonas maltophilia,
wherein the pan-genome of Escherichia coli comprises or consists of SEQ ID NO 1-41296 or comprises or consists of sequences that are at least 90% identical to SEQ ID NO 1-41296 or comprises at least 90% of SEQ ID NO 1-41296, the pan-genome of Acinetobacter baumanii comprises or consists of SEQ ID NO 41297-71315 or comprises or consists of sequences that are at least 90% identical to SEQ ID NO 41297-71315 or comprises at least 90% of SEQ ID NO 41297-71315, the pan-genome of Citrobacter koseri comprises or consists of SEQ ID NO 71316-86840 or comprises or consists of sequences that are at least 90% identical to SEQ ID NO 71316-86840 or comprises at least 90% of SEQ ID NO 71316-86840, the pan-genome of Enterobacter aerogenes comprises or consists of SEQ ID NO 86841-113784 or comprises or consists of sequences that are at least 90% identical to SEQ ID NO 86841-113784 or comprises at least 90% of SEQ ID NO 86841-113784, the pan-genome of Enterobacter cloacae comprises or consists of SEQ ID NO 113785-171921 or comprises or consists of sequences that are at least 90% identical to SEQ ID NO 113785-171921 or comprises at least 90% of SEQ ID NO 113785-171921, the pan-genome of Klebsiella oxytoca comprises or consists of SEQ ID NO 171922-209528 or comprises or consists of sequences that are at least 90% identical to SEQ ID NO 171922-209528 or comprises at least 90% of SEQ ID NO 171922-209528, the pan-genome of Klebsiella pneumoniae comprises or consists of SEQ ID NO 209529-273591 or comprises or consists of sequences that are at least 90% identical to SEQ ID NO 209529-273591 or comprises at least 90% of SEQ ID NO 209529-273591, the pan-genome of Morganella morganii comprises or consists of SEQ ID NO 273592-293457 or comprises or consists of sequences that are at least 90% identical to SEQ ID NO 273592-293457 or comprises at least 90% of SEQ ID NO 273592-293457, the pan-genome of Proteus mirabilis comprises or consists of SEQ ID NO 293458-318000 or comprises or consists of sequences that are at least 90% identical to SEQ ID NO 293458-318000 or comprises at least 90% of SEQ ID NO 293458-318000, the pan-genome of Pseudomonas aeruginosa comprises or consists of SEQ ID NO 318001-368053 or comprises or consists of sequences that are at least 90% identical to SEQ ID NO 318001-368053 or comprises at least 90% of SEQ ID NO 318001-368053, the pan-genome of Salmonella enterica comprises or consists of SEQ ID NO 368054-404774 or comprises or consists of sequences that are at least 90% identical to SEQ ID NO 368054-404774 or comprises at least 90% of SEQ ID NO 368054-404774, the pan-genome of Staphylococcus aureus comprises or consists of SEQ ID NO 404775-421990 or comprises or consists of sequences that are at least 90% identical to SEQ ID NO 404775-421990 or comprises at least 90% of SEQ ID NO 404775-421990, the pan-genome of Serratia marcescens comprises or consists of SEQ ID NO 421991-457642 or comprises or consists of sequences that are at least 90% identical to SEQ ID NO 421991-457642 or comprises at least 90% of SEQ ID NO 421991-457642, the pan-genome of Shigella boydii comprises or consists of SEQ ID NO 457643-470165 or comprises or consists of sequences that are at least 90% identical to SEQ ID NO 457643-470165 or comprises at least 90% of SEQ ID NO 457643-470165, the pan-genome of Shigella flexneri comprises or consists of SEQ ID NO 470166-481587 or comprises or consists of sequences that are at least 90% identical to SEQ ID NO 470166-481587 or comprises at least 90% of SEQ ID NO 470166-481587, the pan-genome of Shigella sonnei comprises or consists of SEQ ID NO 481588-492644 or comprises or consists of sequences that are at least 90% identical to SEQ ID NO 481588-492644 or comprises at least 90% of SEQ ID NO 481588-492644, and the pan-genome of Stenotrophomonas maltophilia comprises or consists of SEQ ID NO 492645-537429 or comprises or consists of sequences that are at least 90% identical to SEQ ID NO 492645-537429 or comprises at least 90% of SEQ ID NO 492645-537429.

2. The data bank of claim 1, wherein the data bank comprises 2, 3, 4, 5, 6, 7, 8, 9, 10, 11, 12, 13, 14, 15, 16, or 17 of the pan-genomes.

3. (canceled)

4. A pan-genome of one of the following bacterial species:
Escherichia coli,
Acinetobacter baumanii,
Citrobacter koseri,
Enterobacter aerogenes,
Enterobacter cloacae,
Klebsiella oxytoca,
Klebsiella pneumoniae,
Morganella morganii,
Proteus mirabilis,
Pseudomonas aeruginosa,
Salmonella enterica,
Staphylococcus aureus,
Serratia marcescens,
Shigella boydii,
Shigella flexneri,
Shigella sonnei, and
Stenotrophomonas maltophilia,
wherein the pan-genome of Escherichia coli comprises or consists of SEQ ID NO 1-41296 or comprises or consists of sequences that are at least 90% identical to SEQ ID NO 1-41296 or comprises at least 90% of SEQ ID NO 1-41296, the pan-genome of Acinetobacter baumanii comprises or consists of SEQ ID NO 41297-71315 or comprises or consists of sequences that are at least 90% identical to SEQ ID NO 41297-71315 or comprises at least 90% of SEQ ID NO 41297-71315, the pan-genome of Citrobacter koseri comprises or consists of SEQ ID NO 71316-86840 or comprises or consists of sequences that are at least 90% identical to SEQ ID NO 71316-86840 or comprises at least 90% of SEQ ID NO 71316-86840, the pan-genome of Enterobacter aerogenes comprises or consists of SEQ ID NO 86841-113784 or comprises or consists of sequences that are at least 90% identical to SEQ ID NO 86841-113784 or comprises at least 90% of SEQ ID NO 86841-113784, the pan-genome of Enterobacter cloacae comprises or consists of SEQ ID NO 113785-171921 or comprises or consists of sequences that are at least 90% identical to SEQ ID NO 113785-171921 or comprises at least 90% of SEQ ID NO 113785-171921, the pan-genome of Klebsiella oxytoca comprises or consists of SEQ ID NO 171922-209528 or comprises or consists of sequences that are at least 90% identical to SEQ ID NO 171922-209528 or comprises at least 90% of SEQ ID NO 171922-209528, the pan-genome of Klebsiella pneumoniae comprises or consists of SEQ ID NO 209529-273591 or comprises or consists of sequences that are at least 90% identical to SEQ ID NO 209529-273591 or comprises at least 90% of SEQ ID NO 209529-273591, the pan-genome of Morganella morganii comprises or consists of SEQ ID NO 273592-293457 or comprises or consists of sequences that are at least 90% identical to SEQ ID NO 273592-293457 or comprises at least 90% of SEQ ID NO 273592-293457, the pan-genome of Proteus mirabilis comprises or consists of SEQ ID NO 293458-318000 or comprises or consists of sequences that are at least 90% identical to SEQ ID NO 293458-318000 or comprises at least 90% of SEQ ID NO 293458-318000, the pan-genome of Pseudomonas aeruginosa comprises or consists of SEQ ID NO 318001-368053 or comprises or consists of sequences that are at least 90% identical to SEQ ID NO 318001-368053 or comprises at least 90% of SEQ ID NO 318001-368053, the pan-genome of Salmonella enterica comprises or consists of SEQ ID NO 368054-404774 or comprises or consists of sequences that are at least 90% identical to SEQ ID NO 368054-404774 or comprises at least 90% of SEQ ID NO 368054-404774, the pan-genome of Staphylococcus aureus comprises or consists of SEQ ID NO 404775-421990 or comprises or consists of sequences that are at least 90% identical to SEQ ID NO 404775-421990 or comprises at least 90% of SEQ ID NO 404775-421990, the pan-genome of Serratia marcescens comprises or consists of SEQ ID NO 421991-457642 or comprises or consists of sequences that are at least 90% identical to SEQ ID NO 421991-457642 or comprises at least 90% of SEQ ID NO 421991-457642, the pan-genome of Shigella boydii comprises or consists of SEQ ID NO 457643-470165 or comprises or consists of sequences that are at least 90% identical to SEQ ID NO 457643-470165 or comprises at least 90% of SEQ ID NO 457643-470165, the pan-genome of Shigella flexneri comprises or consists of SEQ ID NO 470166-481587 or comprises or consists of sequences that are at least 90% identical to SEQ ID NO 470166-481587 or comprises at least 90% of SEQ ID NO 470166-481587, the pan-genome of Shigella sonnei comprises or consists of SEQ ID NO 481588-492644 or comprises or consists of sequences that are at least 90% identical to SEQ ID NO 481588-492644 or comprises at least 90% of SEQ ID NO 481588-492644, and the pan-genome of Stenotrophomonas maltophilia comprises or consists of SEQ ID NO 492645-537429 or comprises or consists of sequences that are at least 90% identical to SEQ ID NO 492645-537429 or comprises at least 90% of SEQ ID NO 492645-537429.

5. A method of determining an antimicrobial drug resistance profile for at least one clinical isolate of a microorganism and for improving a first pan-genome, comprising:
obtaining or providing a first data set of at least one nucleic acid sequence of the at least one clinical isolate of the microorganism, wherein optionally at least a part of the nucleic acid sequence of the first data set is assembled;
analyzing the at least one nucleic acid sequence of the first data set for genetic variations by comparison to a first pan-genome to obtain a third data set of genetic variants;
providing a second data set of antimicrobial drug resistance and/or susceptibility of the at least one clinical isolate of the microorganism;
correlating the third data set with the second data set and statistically analyzing the correlation;
determining the genetic variations in the at least one clinical isolate of the microorganism associated with antimicrobial drug resistance; and
determining a second pan-genome using the first pan-genome as well as the genomes used for constructing it and the first data set of at least one nucleic acid sequence of the at least one clinical isolate of the microorganism.

6. A method of determining an antimicrobial drug resistance profile for at least one clinical isolate of a microorganism and for improving a first pan-genome, comprising:
obtaining or providing a first data set of at least one nucleic acid sequence of the at least one clinical isolate of the microorganism, wherein optionally at least a part of the nucleic acid sequence of the first data set is assembled;
analyzing the at least one nucleic acid sequence of the first data set for genetic variations correlated to antimicrobial resistance and/or susceptibility by comparison to a first pan-genome, wherein the first pan-genome is obtained at least partially using a plurality of clinical isolates of the microorganism for which genetic variations are correlated to antimicrobial resistance and/or susceptibility;
determining the genetic variations in the at least one clinical isolate of the microorganism associated with antimicrobial drug resistance; and
determining a second pan-genome using the first pan-genome as well as the genomes used for constructing it and the first data set of at least one nucleic acid sequence of the at least one clinical isolate of the microorganism.

7. A method of determining an antimicrobial drug resistance profile for at least one clinical isolate of a microorganism and for improving a first pan-genome, comprising:
obtaining or providing a first data set of at least one nucleic acid sequence of the at least one clinical isolate of the microorganism, wherein optionally at least a part of the nucleic acid sequence of the first data set is assembled;
analyzing the at least one nucleic acid sequence of the first data set for genetic variations correlated to antimicrobial resistance and/or susceptibility by comparison to a first pan-genome, wherein the first pan-genome is obtained at least partially using a plurality of clinical isolates of the microorganism for which genetic variations are correlated to antimicrobial resistance and/or susceptibility; and
determining the genetic variations in the at least one clinical isolate of the microorganism associated with antimicrobial drug resistance.

8. A method of determining an antimicrobial drug resistance profile for at least one clinical isolate of a microorganism and for improving a first pan-genome, comprising:
obtaining or providing a first data set of at least one nucleic acid sequence of the at least one clinical isolate of the microorganism, wherein optionally at least a part of the nucleic acid sequence of the first data set is assembled;
analyzing the at least one nucleic acid sequence of the first data set for genetic variations not correlated to antimicrobial resistance and/or susceptibility by comparison to a first pan-genome to obtain a third data set of genetic variants, and analyzing the at least one nucleic acid sequence of the first data set for genetic variations correlated to antimicrobial resistance and/or susceptibility by comparison to the first pan-genome, wherein the first pan-genome is obtained at least partially using a plurality of clinical isolates of the microorganism for which genetic variations are correlated to antimicrobial resistance and/or susceptibility;
providing a second data set of antimicrobial drug resistance and/or susceptibility of the at least one clinical isolate of the microorganism;
correlating the third data set with the second data set and statistically analyzing the correlation;
determining the genetic variations in the at least one clinical isolate of the microorganism associated with antimicrobial drug resistance; and
determining a second pan-genome using the first pan-genome as well as the genomes used for constructing it and the first data set of at least one nucleic acid sequence of the at least one clinical isolate of the microorganism.

9. A method of determining an antimicrobial drug resistance profile for at least one clinical isolate of a microorganism and for improving a first pan-genome, comprising:
obtaining or providing a first data set of at least one nucleic acid sequence of the at least one clinical isolate of the microorganism, wherein optionally at least a part of the nucleic acid sequence of the first data set is assembled;
analyzing the at least one nucleic acid sequence of the first data set for genetic variations not correlated to antimicrobial resistance and/or susceptibility by comparison to a first pan-genome to obtain a third data set of genetic variants, and analyzing the at least one nucleic acid sequence of the first data set for genetic variations correlated to antimicrobial resistance and/or susceptibility by comparison to the first pan-genome, wherein the first pan-genome is obtained at least partially using a plurality of clinical isolates of the microorganism for which genetic variations are correlated to antimicrobial resistance and/or susceptibility;
providing a second data set of antimicrobial drug resistance and/or susceptibility of the at least one clinical isolate of the microorganism;
correlating the third data set with the second data set and statistically analyzing the correlation; and
determining the genetic variations in the at least one clinical isolate of the microorganism associated with antimicrobial drug resistance.

10. The method of claim 5, wherein the first pan-genome is a pan-genome of claim 4.

11. The method of claim 5, wherein
the first pan-genome is for Escherichia coli and is obtained using at least 150 clinical isolates, preferably at least 250 clinical isolates; or wherein
the first pan-genome is for Acinetobacter baumanii and is obtained using at least 150 clinical isolates, preferably at least 180 clinical isolates; or wherein
the first pan-genome is for Citrobacter koseri and is obtained using at least 35 clinical isolates, preferably at least 55 clinical isolates; or wherein
the first pan-genome is for Enterobacter aerogenes and is obtained using at least 120 clinical isolates, preferably at least 160 clinical isolates; or wherein
the first pan-genome is for Enterobacter cloacae and is obtained using at least 100 clinical isolates, preferably at least 150 clinical isolates; or wherein
the first pan-genome is for Klebsiella oxytoca and is obtained using at least 90 clinical isolates, preferably at least 120 clinical isolates; or wherein
the first pan-genome is for Klebsiella pneumoniae and is obtained using at least 160 clinical isolates, preferably at least 250 clinical isolates; or wherein
the first pan-genome is for Morganella morganii and is obtained using at least 70 clinical isolates, preferably at least 120 clinical isolates; or wherein
the first pan-genome is for Proteus mirabilis and is obtained using at least 120 clinical isolates, preferably at least 140 clinical isolates; or wherein
the first pan-genome is for Pseudomonas aeruginosa and is obtained using at least 100 clinical isolates, preferably at least 140 clinical isolates; or wherein
the first pan-genome is for Salmonella enterica and is obtained using at least 130 clinical isolates, preferably at least 190 clinical isolates; or wherein
the first pan-genome is for Staphylococcus aureus and is obtained using at least 180 clinical isolates, preferably at least 260 clinical isolates; or wherein
the first pan-genome is for Serratia marcescens and is obtained using at least 230 clinical isolates, preferably at least 330 clinical isolates; or wherein
the first pan-genome is for Shigella boydii and is obtained using at least 60 clinical isolates, preferably at least 75 clinical isolates; or wherein
the first pan-genome is for Shigella flexneri and is obtained using at least 50 clinical isolates, preferably at least 80 clinical isolates; or wherein
the first pan-genome is for Shigella sonnei and is obtained using at least 60 clinical isolates, preferably at least 80 clinical isolates; or wherein
the first pan-genome is for Stenotrophomonas maltophilia and is obtained using at least 125 clinical isolates, preferably at least 240 clinical isolates.

12-17. (canceled)
